United States Patent Application Publication US 2011/0014706 A2 - sequence listing, part 41

SEQ ID NO: 119782 - DNA, 494 bp, Arabidopsis thaliana columbia
  unsure (1)..(494): unsure at all n locations
cnnnnnnnnnnnnnnnnnnnnnnnnnnnnnnnnnnnnnnnnnnnnnnnnnnnnnnnnnnnnnnnnnnnnnnnccacgcgtccgcccacgcgttcgtcggctgcgagaaacaacagaaggggaaccaaacaaatcgagaaagacgaacacttacaaaaaaaatctctttgtgagctttagcgatcgtaacaatggcgaacgaggtgattcttcttgatttctggccgattttgtgcgggatgaggacaaggatctgattgagggaaaaaggtgtttaattttactacaaagagaagatctaaggaacaagagtcctttgcttctccagatgaattcgattcacaagaagattcctgttctcatccacaatggtaaacgcggtaacgaatttattatccaggttcattacattgacgagggtctggtctaacaaaaaccctatccttccttttgatcctaacctgagagcttaagctaaggttctgggctgatttc

SEQ ID NO: 119783 - DNA, 471 bp, Arabidopsis thaliana columbia
cagctctaattctactcactctatggaaagctggtccgcctgcaggtaccggtccggaattcacgggtcgacccacgcgtccgtgcggctgcgagaagacgacagaagggggcacccaacgacaaagggaacacgtgaaaggaactactggataccttcgaaagccgaaggaaaccgtttgcttaaaaccattgcgtctcttctctcagatgatgatcattttagagatgcaacagggggggagggttgttaaatacggagggagagtgcacacggtcaaagcgtctgttgcaacaatgcgacacctctgttaaatgatttacccccaccacattggggtggtggagatcactccttttccagcccgaccgcttacagagaatgattcctttaagggtgaaaacctggataggatttttaggtccggcgccaacatttgacccctttaggaagtttttactttgggtaaaa

SEQ ID NO: 119784 - DNA, 524 bp, Arabidopsis thaliana columbia
cgactcactttagggaaagccggtacgcctgcaggtaccggtccggaattcccgggtcgacccacgcgtccgcggacgcgtgggcagacgcctgggctgcaaaaagaccacataaggggaattgttcactgcgacgttgaatctaagaacgttcttgtttttaacggtggtagctcccttaagctaacagattttggatcggcggttgtattttataaatctaggggggatgtttcgccacggggaaaccctctttagatggctccgggaggtggttaaaataaactcccaaggaccggaaaatgacttgtgtttttaaggtctcccgtcatcgaaatcctccccggaaaacctggtgggaaagaacaacgttttttactcgcttaagcgggttcgggatttctaacaactccctttcaatcccggggggggtaacaggacctgcggaaaattttctaaaaaaattccttcaacccgcaccggacccccggggtggggggtaaaacagtcttggcataattttt

SEQ ID NO: 119785 - DNA, 551 bp, Arabidopsis thaliana columbia
  unsure (1)..(551): unsure at all n locations
tgatctnnnnnnnnnnnnnnnnnnnnnnnnnnnnnnnnnnnnnnnnnnnnnnnnnnnnnnnnnnnnnnnnnnnnnnnnnnnccacgcgtgcgtgcggctgcgagaagacgacagaaggggggttcagagaagatcgtttactctttcctcaatttcgaacaaagttttcgaattttccaactctctctagtgaatttagggttctgatttcgacattagtgtaaagatttgttttttatccgaggggggcgattgtgtagtcaaaccagatcaaatgtcggggtcaacggtgtcaatcaccggttatacgggggcttggacttgaccggccccgatttttgccggagaaaaaaatcaaactttgattaccctaaaaccgaatcgcttgccaagggtggtggtggggaaccccggggtccaaggtaaaaacttaacccgggggaaactaccctggatcgatccaaaggacaagaattggggtcctgggaacaagaagggctgtttccccttgcacggggaccaattacccccgttcgaaggggcggaggggg

SEQ ID NO: 119786 - DNA, 499 bp, Arabidopsis thaliana columbia
  unsure (1)..(499): unsure at all n locations
atgatcctnnnnnnnnnnnnnnnnnnnnnnnnnnnnnnnnnnnnnnnnnnnnnnnnnnnnnnnnnnnnnnnnnnnnnnnnnnnccacgcgtgcgcgagaagacgacagaaggaggatggttttgtgacctttgtgggcaaagtttgaaaaacctttactggtttaaaaactgccggttgccggagcggggttctttttcctctgggtgcgtgatttccagataaaattgtggtaaaaaaagggagagaaaaacctcttctttcttggggggggtgaatttccctgtggggggccccctttttttattatagatatttccgaggttttggccgcggttggcccgaagtaaaaataaggcgggggggagaggtttgtctttgtcccttttagaagttggttaaaaatattaaaaaaaacaccctctttgggggaagggggtgggtgggaagaaacaacacaccccccccgcttttttttaccccccccgctgctgcttttt

SEQ ID NO: 119787 - DNA, 510 bp, Arabidopsis thaliana columbia
  unsure (1)..(510): unsure at all n locations
nnnnnnnnnnnnnnnnnnnnnnnnnnnnnnnnnnnnnnnnnnnnnnnnnnnnnnnnnnnnnnnnnnnnnccacgcgtgcgtgcggctgcgagaagacgacggaagggtacggctgctaaaaaacnacagaagggtacggctgcgaaaagacgacagaagggtacggctgctataagaccacagaagggtacggctgcgaaaagacgacagaagggggaagccagaggtttcagagggggtaatcttcaaggctcctccaattttgctggaatatccggaatatggctacagtttcaatgatgtattcataaaaaggatagtggcaagtgaaggggactggtttaaattttctgatgggaaacttttttggaatgacattgggcaagaagaaaattttgttttaaacccattgtgttgtgaaagggaaccatggttgtccccaaagggttttgtttttggccccttgggatcacccgaaacaaaagctgttatttcttataaggggggggc

SEQ ID NO: 119788 - DNA, 489 bp, Arabidopsis thaliana columbia
  unsure (1)..(489): unsure at all n locations
nnnnnnnnnnnnnnnnnnnnnnnnnnnnnnnnnnnnnnnnnnnnnnnnnnnnnnnnnnnnnnnnnnnnnnnnnnccacgcgtccgtgcggctgcgagaagacgacagaaaggggtcacttgctgccattgttggtgggatacttgaaaaacggagaggcttcggctgctgttttgtccgacatgcaactgagtatatcgggaggcttcaatattggtatgtggatcagctacattggggggggggtttccaactggggactcaccgacaaatgttccatgcccaagaacaggaagatgactctcgcgccgatgtgggaccataaaacccgcggggattagtttttggaccgggttttacatggggaggtttgggataccactctctttatcgacttgtcttgcggagttttgttggaccccctattgaaggacccttctgtttaatgggaacttttcaggggggtttaaaaaagctggattttggtctc

SEQ ID NO: 119789 - DNA, 534 bp, Arabidopsis thaliana columbia
  unsure (1)..(534): unsure at all n locations
tgatctcgccnnnnnnnnnnnnnnnnnnnnnnnnnnnnnnnnnnnnnnnnnnnnnnnnnnnnnnnnnnnnnnnnnnnnnnnccacgcgtccgtgcggcgagaagacgacagaagggcacggctgcgaaaagaaacagaagggggtctcttcgcttctagggtttcatcaaccaaattcgctttcgccgcctttccacaagcaatcatggtgctccaaaacgacatcgatctccttcatccgccaccggagcttgataagagaaagcataagctcaagcgtctcgtgcaatctcccaactccttcttcatggatgttaagggacagggatccttcacataaccactgtgttcagccatttctaaactggtgtgggtttggggaaactggcaaacagtttctgtgccaacccaccgggggaaaacgaaggctacaagaaggacgcttctttaagaacaattgaaaactaagatctacaaatgctccatcccgccccaaatgtttggcttttacaattccgaaaccaaaaacgtttt

SEQ ID NO: 119790 - DNA, 535 bp, Arabidopsis thaliana columbia
  unsure (1)..(535): unsure at all n locations
gatctnnnnnnnnnnnnnnnnnnnnnnnnnnnnnnnnnnnnnnnnnnnnnnnnnnnnnnnnnnnnnnnnnnnnnnnnnnnccacgcgtccgtgcggctgcgagaagacgacagaaggggatctctctttgttcgctttgtggggaacgaactatggccgagagatggaggaacacggctctactcgtcatcgacatgcagaacgatttcatagaggaaggggctgtgacgcaagtgaatggaggaggggggtctatctcctaatgttatcagagtcaacaaacccgcgaggcagggggggtattctcggaattggggttgttcggaaacatgacccgcaggaaaagatgttgatttttcaggccccctaccacagttctaaaaaggcgggccttttttaaaagccccggaggacacaatggggtgggggttggtgacccaccaaaaagatgcctttaggaggggaaaacctcgtttaaggtttttttgagaccaactttattcctttttgaaacttgaggggggtccaagtgagg

SEQ ID NO: 119791 - DNA, 538 bp, Arabidopsis thaliana columbia
  unsure (1)..(538): unsure at all n locations
agggaaagagcgagggaacggaggggatgggaaagaactgcgagagagcgacaccggcgaaagagagaggaaggaaaaaacagggcaaccggagacgcgagggagggggaggacaggatnggggggggaaagagggaggagagtaagatacctcggcccaagggcgaacaaaaaaccggactnacaacttttaaaggggaaaaagcccaggggtccccccccccgggccaggggaaccccggggccccggaaaaaataccccgggggggggcggaaaccccaacccgggggtcccgagaaacaggggggtgtggntaagaaaaaaaaaaacccccacccacccaaaaaaggggggggggggggggcccccccaaaaaaaaacacacacaggcccccccgcgggggggggcgaaacaaagaggggggtgtttccccacacaaaaaaaacaaaaccagaggggggcccgccccacaaaaaaagagaggcgagaaaaagaaaaaaacacccaccctcccggtggcgggggggggggggggg

SEQ ID NO: 119792 - DNA, 401 bp, Arabidopsis thaliana columbia
  unsure (1)..(401): unsure at all n locations
gaggggaccaatatcctgttgctattatcaaggattacagagaaaaattgactccgaccttatcaaagtcggggatggggattttnaaatgttcctagaacctaatcttattccttctgctttaccagggggggggtgnanttttttatggttaanattaaaaaaaaaatatcctanntctcttcccttactttaaggccggggctaaaaggaaaaaagctccttaaaccccttttttccttacaaggctgctttcaaccttgcccctggtgagtgagcttcctactcccccgataagggtggggctacccctcaactttccttgggtttactatgaacacccacaattgccctgaggggggctgccaacctaaaaaaggggggggtctgattgatccacc

SEQ ID NO: 119793 - DNA, 522 bp, Arabidopsis thaliana columbia
  unsure (1)..(522): unsure at all n locations
nnnnnnnnnnnnnnnnnnnnnnnnnnnnnnnnnnnnnnnnnnnnnnnnnnnnnnnnnnnnnnnnnnnnnnnnnnnnnnnnnnnccacgcgtccggctgcgagaagacgacagaaggggactgtaaaaaagatttagaaatggagactctgagtcgtttattggttttcatgtctctgttttccggtttagtttctggatttgctctgcaaaatcttccaatcacatcttttgaagaaagttacactcaagtttttggtgacaagaacttatttgttcatcaagatggcaaatctgtccggttaacgctcgatgaaagaaccggttccggttttgtttcaaatgattattacttgcatggattcttcagtgcttcaattaaattaccttctgattatacagctggagttgttgctgccttttatatgtctaagggagatatgtatgacaagaatcatgatgagatagattttgagtttcttggcaccattagagaaaaagaatggggagttcagacaaacatt

SEQ ID NO: 119794 - DNA, 538 bp, Arabidopsis thaliana columbia
tgatctgccaagcactaattctactcactttatggaaagctcgtacgcctgcaggtaccggtccggaatcccgggtcacccacgcgtcggtgtggaaacaccgaggggacacccagaggttcggatcgtggattgtttgatttcttggggaagaaggaagaagaagtgaaacctccagagacaacgacgctcgagtctgagttcaatcataaggctcaaatctcttttccgggagtagacgggggatcccgaggaaacgaaaggacaacaagattcctcttcttagaggggccttaaaaaaacccccgaggaaggggaaggaaaacacccctagggtcctccaaaaccttccccaaccaaccgtttttttttccttttggagcgaaaaaagagggggggaaaagagggccaacaaaatcttctctttaaaagagaaggaaaaaaaaaaaggcctgggaaaaaacaccctggggacccccccaaacccccacacatgacgggggggggtgactccccttttccccttccctccgggggg

SEQ ID NO: 119795 - DNA, 547 bp, Arabidopsis thaliana columbia
  unsure (1)..(547): unsure at all n locations
tacaattctactaaatttatggaaagctcgcacgcctgcaggaacctgggactgcatttcacgggtgcgacccaccgcggtgcgggtcactgtgtttcgtccatccgcattcagtaanagcgtgctatagaaaaacatacaaacacagggccctcgcgggcttagaattacccacccacccggggcgaattatatttatgggatcccgtaaatattttctaccttccttaggatacttgtttttggactaaaaaaaatttaaacattttcttggggggggggaagcttttcttttatggatataactaccaaaaaagaggtttccctaacgtttttcaatcctcatattgcaaaaccctcccgcggacgagttgtattcctcttgggtgggtggctcactgcccgctctgtgtaaaattttttttcgtttttttttgcgaactaataaaagagagtttgtgaatgggagaatagccgctctctttcggagaggatgattttggctagacgggtccgctctcctgtagcgcctttctttaagggtgcg

SEQ ID NO: 119796 - DNA, 600 bp, Arabidopsis thaliana columbia
  unsure (1)..(600): unsure at all n locations
ttaaagangggggtagtactcgccgggctactaattcgactcactttagggaaagctcgtacgcctgcaggtaccggtccggaattcccgggtcgacccacgcgtgcgtgcggctgcgagaagacgccagaagggtacggcttctattataccaccgaagggggcgccaaaagaaaaatgggtttgtctctttgctttatcgacggcaccaatgatttggactattatctctgccacgaggggggtccaattttttcttcctagggggtggaaaagtcaaagcggttgattaacctagacaacgatggtcaacaaggcgggtttctccctgcggcgccccacaaaggattttactttggaacgtgcttaataaggggtggcgactcttgctttaaaaattggaaaagggacttcttctttttgacaccaccttatcatatttttttgatcctcccttcgtttattgtgggtccttatattcaaggctttaaccgggtgatacttggttgtgcttctaatttaccaaacatcctaccgccctagttcttttttttctggttcttcctccttttgttggcgcggttgaaccccgtggttttc

SEQ ID NO: 119797 - DNA, 487 bp, Arabidopsis thaliana columbia
  unsure (1)..(487): unsure at all n locations
cnnnnnnnnnnnnnnnnnnnnnnnnnnnnnnnnnnnnnnnnnnnnnnnnnnnnnnnnnnnnnnnnnnnnnnnccacgcgtgcgacggctgcgagaagacgacagaagggtacgtaggaatgaattactatacttcagtgtttgcaaaagaaattagccctgatcctaagagtccgagttggacgactgattctcttgttgattgggatagcaagagtgtggatgggttctatattgggggggggggccgtttaatggggaaactggattgtgtattcaaaagggtgggggataccttttagaagtttttttaaggataacttgtgggggccccaaaagttttcatttgccgataagtggatccggagaaacaccttctggagagaaaccccattgaccgtttccttttggggacaccaagattcaccacaatgaaatttgttttcttcaaaaggccttttttttggagttttgccagcaacctcctt

SEQ ID NO: 119798 - DNA, 505 bp, Arabidopsis thaliana columbia
  unsure (1)..(505): unsure at all n locations
cgacccacggcgggcggggcctgcggagaaaactacaaaaagggggaanaaccttctcttgtctttaatagattgctttccttcctcccccatcgtggggggaggggaaacgagcatggctttgaatcctctactctaagaaagtgtccttattatgtgaaacatttttccccgtttctttatggaggggggggatttccttatcccaaggggtgcccttactaaaaaaaaatctgagaagggcaattttagttttttaaccaaaaggttggtccgttttttatatactcgggggggaacaatggaattgtttatttgggggtgtttttcctttatgttaaacgcccctcctatgggggaagacccaaaccgtgggtaggtgctcttacccttcgccggggcccgaatttttttgtcttgtcgcggttggtgtttcaacacttcttagtgggggggggggctcccccgcgggggggggggtaaaatgtaattcaacccactcccg

SEQ ID NO: 119799 - DNA, 288 bp, Arabidopsis thaliana columbia
  unsure (1)..(288): unsure at all n locations
cagctctattctactcacttatggaaagctggtacgcctgcaggtaccggtccgcaattcccgggtcgacccacgcgttcgggcacgcgttcgtccacgcatacacccagcgttcgtacgggtgcgagaagaccactgaaggggacgcttcagaagaagaggatgaagaccatgatgcggagacgaccagaacaataacaaactgtctcatctctccggacaataaaaaagatggggggggtttcntacttcgatgaccatctaatatacaaggtcgaaggcaaccgc

SEQ ID NO: 119800 - DNA, 514 bp, Arabidopsis thaliana columbia
  unsure (1)..(514): unsure at all n locations
ccnnnnnnnnnnnnnnnnnnnnnnnnnnnnnnnnnnnnnnnnnnnnnnnnnnnnnnnnnnnnnnnnnnnnnnccacgcgtgcggccacgcgttcgcccacgcgtccgtacggctgagaaacaacagaagggatcctccgtctctcgaacaagaaggaagacaaagattacgggccgcaacattccgaatcgaactcatcaagcctcttccggaatcgaactctctccaatgatgaaggggggggactggtgttgagtgcaccttcagaaaaaggatggacaaccggttcccggtatgaaaggaccttttctaccggctaaaccgatacagacccggttccccatttgcatgggcattattcacctaatccccccgaaggccaatgcttgttccttccctttgtaacgtgtgggggcaaaaaaccacaagagcttttaaccctcatgcttacactgaggggccctttctttcgagccaggggtggagattgtaatggtgcttaataagccggggc

SEQ ID NO: 119801 - DNA, 536 bp, Arabidopsis thaliana columbia
cagcactaattcgactcactttagggaaagctcgtacgcctgcaggtaccggtccggaattcccgggtcgacccacgcgtgcggtttatagctcctctctatcggctcgtctctataaataaacgagaagctcacaaattgcacaaaaatccactctaactatgaaacaattagggttttgaaatttacctaaatctctccggaatcatcgatcaaaacgatgctcgagtgtcaatgggtgggggagaaattatcacgcgtcggtgacaaaacctctctaggaatcgagtctctgggaaaaaatcaaacgcgccgaatcgctttttttggaagaagaatcagatagataccgtgaatccgaccattttcttaaacgcggttttcggtttccctaccttaccaaaaaaaacccaatcggggtttggatcaaagctgtttgggaaaatctgggttctgttccaggtgggagaaaaaaacggaaatcttttaaaaaagggaagctgcaaacttttttggccgtttgtaaaaggcaaatg

SEQ ID NO: 119802 - DNA, 553 bp, Arabidopsis thaliana columbia
caggtctactctactactctatggaaagctcgccgcctgcgtgtccggtccgctatacacgggtcgacccacgcggttcgtttggataaataaagacgctaatctctgcttccatcaaggcatgttcagagatatgaggaaactccttgtatacctattgcgcgggctagaataacgcgtctatttgaaatgggtcaagtcaacgctgaatggcctaatctagagtgttttcgtggatggagggaatatgtccctgttacagacttatccagctacttataggagaacgaccatgtacgccctacatggcgtggggtcacttggactgggtggaaacttcttttaccgaagggatgggtttaaaaaggccttacgaaggttgccatcctggctttaggacgggccttggggggatccacaagtatccccattacgcgacaccggatgaagacatttttcctattggagagaccattcagatggggtgaatccgacactcacgggggggaggggtgttcccggggcgttttgcggtctttgggcaagtggaaaa

SEQ ID NO: 119803 - DNA, 555 bp, Arabidopsis thaliana columbia
  unsure (1)..(555): unsure at all n locations
nnnnnnnnnnnnnnnnnnnnnnnnnnnnnnnnnnnnnnnnnnnnnnnnnnnnnnnnnnnnnnnnnnccacgcgtgcggaaagtgttcacagatccatcgtctgcatgagatctctgtgaataacattacttctctttctcaaactcagactctgaataacacaaaaacccagatgtttctctctcttcaccacaaaaaaaaatcggaaactttatttttgctttgatgaagagggggggccaccaccagcccaaggggtagcaacagaggggggtggttcaagtaaacgataaggggctggcgaagggagtctcccagccccacctttatttgcaaaccggcgggggccctccggggggaaaggggggggaaactttcactgaggagcttttgtctctctctgtgggggaaaaaccgtggggaactggcgtcctcctttcctaaggaaaaaccgcttgcggggccttctaaggggggggggggccccttcctcgggacttgggaggggggggggtcatgggccccgggttctgggtttgcggggccccggaaatt

SEQ ID NO: 119804 - DNA, 554 bp, Arabidopsis thaliana columbia
gggaaggctcggttccccccttcagggtagcccgggcccccaatttcccggtttcaccccggggggtggggcgggggataaaaattattaagggttcttgtgggttcttcctggaatttttaccccttccggggcccccttaaaggggcctcactttcctcggttagtggggaaatcttttagtgttaagtggaacaaccggttctttcaattggggatcccgaattttttctccagggggggaggggggttctttcaatggcggcttcttaacaaaaaaacctttttgacccggtgccttttatatcccccccctcacaggggggaggggctctttgcgaaaaaaaatatttctcccttccccccgtcctcggggggggcggcccctcccacttgcacccggccctaaaatgcggtgccctcttgccccacactcgtgggggggggggccaccccccgagatgacatgggcttcccgcctctttcacaagcgcgtcctttcctcgggccccaccctcgacgtttttcgcagcccctgcgtgggggggccgtgt

SEQ ID NO: 119805 - DNA, 146 bp, Arabidopsis thaliana columbia
cactctgactaactctagggaaagctcggccgcctgcaggtgccgggcccctatacacgggtcgaccctcgcgttcgtgctttctttctgccacacatactggatgattatgattggccgtcttcatcattatcaccaacaacaaa

SEQ ID NO: 119806 - DNA, 541 bp, Arabidopsis thaliana columbia
  unsure (1)..(541): unsure at all n locations
gatctaccagctctcctctactaactatgggaagctggccgcctgcgtgaccggtcccctattcacgggtcgacccacgcggtcggatggatcgttcttcaagcgtttgcagaaattgttagatccgttgcagcagagacttgcagatggatgccatttggggaagaaacaccacagactgcatcttggaagcctgttttaggggaggagtttaagcacataccttttctatgtttaggggggggttggatgacaagacctnatatctaaagacaaccttacaactaaaacttttattttttttcacttacactaaaatgattgggcttgaaatgttttgatctccctgatggcgggtttttaccaaatagaggggggaaacaaagggtgggggtggggtaattaaaaaaagattgtgtttgtgggggcccaaattgtgaaggtggaaaaaaaccttttcctccatggcgcctccttcatggccgtgttttgggcataataaaggaaatttaaaccctttttagaaaagctccaaaaaaaa

SEQ ID NO: 119807 - DNA, 520 bp, Arabidopsis thaliana columbia
  unsure (1)..(520): unsure at all n locations
tgatctgnnnnnnnnnnnnnnnnnnnnnnnnnnnnnnnnnnnnnnnnnnnnnnnnnnnnnnnnnnnnnnnnnnnnnnnnnnnccacgcgtgcgggcacgcgtgcgttctggtatataggaatacctcatggtgcggacaatacaatcccagagtgggtgtagttcttgagttcctctacaacatcatcgagtttagggcagttttttagttagaaatttatagtcaagcaataatggatcactcgggcgaggggaaagttcaggcagtcgttaggaaaaaaaaaaataccctggggaaagattattttcaccctctcaaacaagctagagaaaaaaaaaaaacgttggggaaaaagcttttgttacttttggagccatccgggctaatctttaaaaaaaaaacccaaaaaattgggaaaacacagggtttaataaaaaagagcctgaattgcaaaaacgtgccttccccctctaaggggaaaatatttctattttatccggaaacaagttggtgaaaaaa

SEQ ID NO: 119808 - DNA, 538 bp, Arabidopsis thaliana columbia
agctctaattctgactcactctatggaaagctggtacgcctgcaggtaccggtccgcaattcccgggtcgacccacgcgttcggtcgcttaacctgaactcaagtgcttactatgcatcattttttcccagatgcagatgtttcttacaatcttcatcagattgcttgtaaaaggcaacagcaaatgcgccctaaaaggcattacaattctgatcaatttgggaaattttttaccaggggaggagggcctgcgtttaacaatcatcataaaaagtggtgggggtttcagaggatctttttctatggcaacaaatgggcatattttcaacggcgttcagactgatcgttctgatcatcgagaggaagctaaggcggcaagttatgcctaggcattgacttttgcataagaaaagaaagtgggggcaaaaaacccagggttgatccggaaggggaaaaacaccgcggagactgtgaagcgcatgaggaggatggggaacacccttggggtggagctgggggtgtaaagaaaacaccctac

SEQ ID NO: 119809 - DNA, 590 bp, Arabidopsis thaliana columbia
  unsure (1)..(590): unsure at all n locations
nnnnnnnnnnnnnnnnnnnnnnnnnnnnnnnnnnnnnnnnnnnnnnnnnnnnnnnnnnnnnnnggatctctctgggggcgcgagggggtgtcactcttctcctttggcgaaactctttcttggaaagagcattttgttatcaagactctgaagacctcttttgggaggatagtaaggttggatgatgaagagggagattctgattggaggccctaaagaagctgttttatttgtttgcgggggggggcaaagcctctattccctctggtttctaagaaaatggacctaaagggtccctctaacccaaagggggcctccagcgagtgggaatatgggaaaaatcctttgaaaaaaacctgggaaggcgtttttattgtgagggggaagatgaatggatagtggggcaccacaaaaacagggatgtattcttggggttatagggacaaacaacagggcttgggggcccgcaaaatgttttccttggttgggaaacgcccgcgcccgctggaaatatacttccgtggtttaaaaaggaacctgtcttccacaaaagggaggggggagcgctgaattctttcctctaagggaac

SEQ ID NO: 119810 - DNA, 542 bp, Arabidopsis thaliana columbia
caagctcctattctactcactttatggaaagctcgtacgcctgcaggtaccggtccggaattcccgggtcgacccacgcgtgcggaagtgcgatcaccgatcgatatcgacggacatgggacgcacacgtcatccaccgtagccggggttttagtcgcaaacgcgagtctctatggcatagcaaacggcaccgcccggggggcggttccggcggggaggttagcgatgtacatgggggggggggcgaaatccggctgggctaacatgaacatacctcgccggattcgaagcagcgattcacgaccgcctaaaaattatctccatcttttgggggggccaatggccgattccttttccgattaaatatccgggggggcgttcacccggaggaggaaggaacctcaggggtgggctccggcggtaacgacgggcctacttaaggacctggacgaaccctggggcggtggtttttgcgggtggtgaaaggggaatcgtcgggccgttaagaaaaaaataaatcttgggaaggggaatgttttttg

SEQ ID NO: 119811 - DNA, 317 bp, Arabidopsis thaliana columbia
  unsure (1)..(317): unsure at all n locations
aatacgactcaccttagggaaagctcgtacgcctgcaggtaccggtccggaattcccgggtcgacccacgggtgcgggcacgcgtgcgaccacgcgttcnctcttatccttttaccctcatgatcctccactatttacaggtttgccactctgactttatgctagcttcttccggggactggggataacacgagagagccttcgccttctccaagctatatactcttgggggggggggattatttnaagacctggaagacgggaaaccggaaaacagcggccgggaaacagaagaacgtccccccggggaaaaaggt

SEQ ID NO: 119812 - DNA, 520 bp, Arabidopsis thaliana columbia
  unsure (1)..(520): unsure at all n locations
gatcttgccgaggannnnnnnnnnnnnnnnnnnnnnnnnnnnnnnnnnnnnnnnnnnnnnnnnnnnnnnnnnnnnnnnnnnccacgcgtgcgggttttaacaatggtcgaacttttgcagcagttcgaggatattggaacacatggaacaaaagtaattatatacaccgttggggcttaatgatgaaggaatctatgagctgagttttgacgacgatgatgtggatatccggctcctatatgaggggggcgagggacggaaaacggttcccccctaaaaaattggaagtaggatctcatttttcgtcccgcttatgacattttttaaggggctacatttccttgttttatttaaaaaagtaaaaaattttcaaaatctttttgcggggagttttttggggccaattcaacttgggtggagaatccaaacttgcgaaaaaatagtggccaacccccaagcggctggagggatttttcctgcccgtggaataaaagggggattcctaaaggggcgtccttaa

SEQ ID NO: 119813 - DNA, 464 bp, Arabidopsis thaliana columbia
  unsure (1)..(464): unsure at all n locations
tctactaaaattttgtactgtcctgttttcatcttttcacaacacaaaaaacaaaaaatcggaggaggggcccccaagttattgttatttgttgaggtgggcgagcccctacgtcgcgcgcctgcactctctttagagcggaatttttttgaggaggaggggtctttttgtagggttgtgttaaaaaaaaaaaacgggcgttgttcttctcgcgcggcccccccccagtaggttttttcagataccacatcatctattatgcatccatctccctctagcggggccaaccgnacaccctcggtcctctctctcatgtccctagaccacatcgacggatccgctccgaaccgcgagctccccccgcttccactccgttctacaaatgacgtcccgcatcccctctgccctcgcagttctccccttctcagcctcgtctggcagcacccattagcattcctttagcc

SEQ ID NO: 119814 - DNA, 300 bp, Arabidopsis thaliana columbia
ggattaacttctctttctcaattagaaaccaaaacggggctgcgggattttgtcctctcaccaattacccctaagtttgaacttagcccgggtttttagggcgcgcggtttttctttttttatctaaaaaaaaagggggcacttcattggggggggttcgcttttccgttttaatccgggacctctaaggactgcgcttttttcggaggggggggccccttgagggtgggtaaaaaaggaacccccccgggaccttgtcgtgggaaacctccaccggttaaaggggccctatctctgggg

SEQ ID NO: 119815 - DNA, 446 bp, Arabidopsis thaliana columbia
aaattttcttaaaaaaaacccaaaaccttatcttcaaagggaaaaaaaacgggtaagcagaaacctattccttacccctctgccttcgggtgggggtgaaaaaaactcaccgggaggtgtctatctataaaaaatccttcttcggggggggggggattttaattgggagggggaactggaaaaaaaaaaaagccttctatttccccgggctttgggtttggcccccctcctttacgggggcgggcgtttccggcggccagatgtaaaacagacggcgaattcctttttgtaaaccgcgcgagaggggggtcgtgcccccccaccccttataccttaacccctcaataagaccctctttttttttttttcaaaaggaagaagttgcaagaaatgcttcaccccgttccacaggagcgccctccgacattcgcttccctgcgctcaaa

SEQ ID NO: 119816 - DNA, 381 bp, Arabidopsis thaliana columbia
aaaaactaaaaaatccttttctctaaaccatatccctccctcctcaatacttttttcagggggggggttttttttattggccccctcaaaaaaaaaaacatggtgtcgtgtctttcctcctgctgccccccccctctcttctcccctctctctccccctccctctttctcggcacctctcctttcctccccccttccttctcctgaacctgcagccattcccgctctcctctgctccttctcccttccgccaccactactcccatttactgtccacttgccttcgccttttccactcctctccccgctctctcctatccaccctcactctccctctaccccatacaactccactctacccacatctctttcccactctcca

SEQ ID NO: 119817 - DNA, 427 bp, Arabidopsis thaliana columbia
  unsure (1)..(427): unsure at all n locations
nnnnnnnnnnnnnnnnnnnnnnnnnnnnnnnnnnnnnnnnnnnnnnnnnnnnnnnnnnnnnnnnnnnnnnnnnccacgcgtgcgcccacgcgttcgtacggctgcgagaagactacagaagggggttaaggaggaagaagtttcattgccggagaagattacagaggcaccggcgactactccacagtttcttgaacattctgatggtcttaattaccggagtttaacacatctacggggggtttttccattaaaggcggtggcttattcattctccggcgcagctggatcttcagacagtagcgattcaagcgctctgctgaatgaagaaagcagctctaatgtgactgtggcgggtcctgtgacggttccaggaggtaatttcttccagtttgcgaaaatgggccatacggaagatcttgaggac

SEQ ID NO: 119818 - DNA, 527 bp, Arabidopsis thaliana columbia
  unsure (1)..(527): unsure at all n locations
nnnnnnnnnnnnnnnnnnnnnnnnnnnnnnnnnnnnnnnnnnnnnnnnnnnnnnnnnnnnnnnnnnnnnnnnccacgcgtccgtgcggctgcgaagacgacagaagggtacggctgcgagaagacgacagaagggcaggcgtgttgaaaatgatgtatctgatgtgaatataagacaaatagaagcagatgagatactggcccgtgaattacaagaacagctgtaccgagaagagggggggatcagacacgagcagatcgatgaaatcataaccaggtcgatggaacaagaagagaattctctccgggcttcttctagacgggcttctactcgtattacccaaagctctaataccatcgcagcaaatccacgtgggagaagttccctggaagcacgactgcaacaacattcttcaaggaggcgatttaatcctccacagggccgtgctcctgttagagcaccagcacgggggtcgaggttatcgtttaagcggggcatctggttcactacgtacaggtttgaatttc

SEQ ID NO: 119819 - DNA, 378 bp, Arabidopsis thaliana columbia
cactctaggaatttctatgacgtaacatgcacgcgtacgtaagcttggatcctctagagcggccgccctggggtggtgtgtttttttttttcttaggcggaagatattgagttaaaacttttgaaatggtttgtatcgtaaaggtagggaacctctggtggcgatacgatgttgggatttcttccactcttcttaagaaaggtgaggttgttggtgccttttttttgttagtaatagggaggacaggaatattcttctttttatttgtaggggggggggggggggggtcgttattcttgttcgtgtgtattagggcgacgcgccgggggcgattctatgctggttacgcgagaaataaaaaaagatgggttgctatag

SEQ ID NO: 119820 - DNA, 665 bp, Arabidopsis thaliana columbia
cttttattcaataacaagaaggaaaaaaaaaaggctcgtcggaggaccacattccgactaactaatatgataaaacctttacccctgcatgtaccgggcctctattcccgtttccacccacgcggtggcgggctgttattaaaataacacagaaagaacccttgaaaccacctttttattcctccccgcattccactcttcaataacatcacccttaaattttcaacacctttgctattgttttctaaaatctaaaatatgcagcccctcaaatactagacttaacacaacatacctaacattctttcctcccaccaccctttttcttttttttcttccataggggcggggggggggggggcgttcttctttcctcctcacctaccatgttgagtgtactactttcttttttattctaacctaaaaaaaaacaaaaaaaaaaaaatcgtcctgatccgatattactcaagtcacctcttatattctcgatctcactcgcacatatttaactagatcctctctcctctcacacatctactcaaactctcccctctactaatgtaacgcctttttaccctcagtcctactttcctatattcactcaatcatgatataatgtacccatcttcttctctgcctctttacctctttttcacttctattct

SEQ ID NO: 119821 - DNA, 492 bp, Arabidopsis thaliana columbia
actatagaagatcatgacgtcgcctgcacgcgtacgtaagcttggatcctctagagcggccgcttttggggggggggttttttttttttttcaagggaaaataaagactgctcctccttccaaatttttcatttatttcccaaaaaggggaaaaccaacctttccccgggaaaaaaccttaccccttgtggggatatttacccaatttttccttacacaaaacttagggggaaatgcgggggaaaaatttgtggggggaaaaaaaggcgttttccttttttcccggtgggggggaagcccccacaattcccccccccgattttttttataaacaaaaaaaaaacacccctcttaaattatagccgggaacaccctcatttggtggtggccccacccccccctcccgcgggtgtttgctttttgtagccccaaaattcttttcctctcttggaaaaacaattttctttggtttctaaaaaaaaaattttttat

SEQ ID NO: 119822 - DNA, 455 bp, Arabidopsis thaliana columbia
  unsure (1)..(455): unsure at all n locations
tgattttatgaggggaaaaaggaatttcgggactgtgttcaattggggggtagtactcgccaggctacttatacgactcactctnnagggaaagctcggtacgcctgcaggtaccggtccggaattcccgggtcgacccacggcgtccgtggaagacgacaaaaaggtacgggtggggaaaagactactttaagggttgcgggttgctgataaatacctacggaaggggtccgggttgttaaaaaaaacggcggtaaggggttctgggttgccaaaaaatacccacaataagggggacggggttgcccaaaaaggcctttttttaggggaagaaggggtttcccaaaatttagggtggattaggggtttcaaaaaaaaaagggtaggaccgtgtctgtgggggggaattttttcccaaaccttttttttttaaaaaaggggggggggtttaaaag

SEQ ID NO: 119823 - DNA, 529 bp, Arabidopsis thaliana columbia
taggtacacactatagaagaatcttgacgtcgcatgcacgcgtacgtaagcttggatcctctagagcggccgcttttttgttttttttttttttttttttttggctaaaaacattcattataccctttggaaatagtgtgtatcctcaacttaggaaaccttactggcgaaaaatcgtggcagttttccactctctaaaaaagctatcgatctttttaatagaagaagctattttcttagggacctttccattaacaggttgcgtaagaactaatatgtatccttgaaattaagcgtacgggtggccacccaaggtttttagattgcagaggttcttttaacaaagggaaggtttcccacgggtttggcgagctaccttggaacctttgggttccacctttcaaaggacttgatctgggctatagaaattctcgacaatgctgataacaatggtgccagcacacttaaaatctttctgagattttttaaacggtgcccactcacttgtagggtcccttaaccaaaacga

SEQ ID NO: 119824 - DNA, 531 bp, Arabidopsis thaliana columbia
  unsure (1)..(531): unsure at all n locations
atgatctnnnnnnnnnnnnnnnnnnnnnnnnnnnnnnnnnnnnnnnnnnnnnnnnnnnnnnnnnnnnnnnnnnnnnnnnnnnccacgcgtccgtgcggctgcgagaaaacacaaaggggggctgaaacaactattaattgtagtgcatctgctcttcagcgcagacaataagattccaaaccagagctaagttctgtcaacaatagctcccaacttctaaaaaaatacctttttgtttgttttgaggggggcttaccacttcgcctgattcgatactagaacagaggcaacttactccaaaattaccagggctctctggaacgcttatgagtcaagggtggcatacaagagggtggaattggctatttaaaaggtcacttaatcttaatcggttcctattaaaagatctgagagagatcttgagtggacctacacatcatcgtgaatttggctaaaatgaacaaggccttgagcagtactttgaaggggaaaactatctcttccatggtttttaacaacccaggacaaaac

SEQ ID NO: 119825 - DNA, 339 bp, Arabidopsis thaliana columbia
tgacgtcgcctgcacgcgtacgtaagcttggatcctctagagcggccgcttttttggttggtccttttttttctcttcaggcataaggtgcgccatttttcttttttggaacgggcgtgtcactttttccctgacacaccatggctactcaggaacccaccggctcatttgcccagaccctcgggggaagcgcttatgtccccccccctcacgagagaggttttttacgtgggggggggccggcccgttcatgaatgtgtgctgcacaaaaaggacgcgctccccccccttgtgatgtggcggcgccctctacccgggtcgccccgcgtgctttaaacc

SEQ ID NO: 119826 - DNA, 459 bp, Arabidopsis thaliana columbia
gggcggggcaggggacgggggggggggggtcttggggggccacccgccaacctgtgggggggacccgccccctccatgaccggtccgcatttcgggttttcccccaggggtgggggcgggtgaaaaaaaagaacaaagggggcctctaccccgcttgttccggtgctcgccttcacgctccgggagcggcgtgtctatctgcgcgcccgctgtgctttttttttcgacattggtgagagcccaggtggggacacaaacttatcgctttcttttttttgggagagacggagtcgcccttgatgggggatccataaaaaaaaaattatccccccgagtgtctgagaagattttattgcttcgttagtgtctccttggttgccgcggcgcggcgatccgcccgtgcttgtggtagtccgtctttgtgtcggtctcccgtcttctgtgccgagtgcgtgttcg

SEQ ID NO: 119827 - DNA, 530 bp, Arabidopsis thaliana columbia
ttaggaccactatagaagagtctatgacgtcgcctgcacgcgtacgtaagcttggatcctctagagcggccgcttttttttttttttttttttttttttttttttttttttttttttttttttttttttttttttttttttcggagggaacaaaggggcctttgttttttttttttttttaagaaaacggggatcccaaaatttatgggaggcctttttgaaaaaaaaacggcctaggggggggggaaatcccttgggggcccccctttggggggaaccccctgcttagggggggggttaaaaagcttttacttaacaacccccgctcccgtttttttttttaaaggaaggggacgggttttttaatataacacccctttaaaaaatgggggcctgcccttaaacttttcaaaggccgctttgttaaccggttcttgggcccaaaaggcttttgggggggccccaagggcctcttgggggagggggagggggtgataaaaaacccccacggcccctctgtgggggggccg

SEQ ID NO: 119828 - DNA, 538 bp, Arabidopsis thaliana columbia
  unsure (1)..(538): unsure at all n locations
tgatctctnnnnnnnnnnnnnnnnnnnnnnnnnnnnnnnnnnnnnnnnnnnnnnnnnnnnnnnnnnnnnnnnnnnnnnnnnnccacgcgtccgtacggctgcgagaagacgacagaagggcttcctcagcgatgatagcacattgaggcctggagccatagagttgacttgtccaccaaatatcaacaagccccaatggaaacaagtcttcacgccaggctatgatgctacatcatgctggctatggaatcttgctaagactcatgctatctctcatgacgccggttatcatcaggttatttcccattggttgaggactcatgcctgtacggagccatacataatagcggcaaatagacaactaagtgccatgcatcccatttataggcttttgcatcctcatttccgctacaccatggaaatcaacgctcgtgcacgccaaagtcttgacaacggaggtggaatcattgagacttgtttctggcccgggaagtgtgcattaaagctaagttcagcccgctatggtaaactatggagg

SEQ ID NO: 119829 - DNA, 502 bp, Arabidopsis thaliana columbia
gcacgcgtacgtaagcttggatcctctagagcggccgcttgggggtgggggggcgtttataattatgtttcgggagccaaagtggggcgttttattaattagggacctgcacacctaacaaatggggtgtcaagaaaaaaagataatattatgaggtgtggggaatagcgtcatcattatgggcgatagtgaggctccttggcgctgcgagtgagacgtgtcgtatgaaccgatcttttttgtggggggggcggggcgatgctaaaggatgtgaatatgtgacacaggataagtaaggggcggggcaggtggaggacaacacggggggtgttccatcgtacgtagaaggggtacacggaaggtacgctaaagaagaaaatattgaagaacttatttattgataagaagaagacgagctcatacaagaaaggacgagtgccggacacccgtgcgcggggagaggggggtcaggtggcgagagtgtaggcgtctggatagtgaa

SEQ ID NO: 119830 - DNA, 450 bp, Arabidopsis thaliana columbia
gaaagccggtacgccctgcaggtgcctggtcctggattcccattttctaccccgggggggggggggttgttatattactacctaacgggtgggtctttaatttctgacaaggactcctacacgatatttactattccccctcttttgatcctatattcattaataccaacatgccacgagagtgctgtgttcaatcgatacttatctgctcgtcttattttttgtccggggggggtgttcttttatgcgccccttcctgccagaaaaaacaaccttttctcccatcaccgtacgtgctcgtgcccgctttgcctcgtggtgagatcgatcgccctgtccctcttctttcaagcgctttgatagtgttactgaggcaatttccgaaacctctcccatatcattgagggtttgtgttcctttttgggatctgaattttccttacaccttaaa

SEQ ID NO: 119831 - DNA, 234 bp, Arabidopsis thaliana columbia
gctaggatcctctaaaacagtcgcactgggggggaggggcgggtattaaatttcaacaacaaaaccaggcggccgtaccagtaagttggtcagataagaaagacaaggagagaaacagagaacacacacgcggacaaaaggtgattcagtgacacagggcacgaatacgacgtgaagggaccggtctatttacttcggaggggggggggggcgagtctacgcgcgggtgctcca

SEQ ID NO: 119832 - DNA, 421 bp, Arabidopsis thaliana columbia
gggggaaaaaaaaatatctttcaaaaaccatatacatccccatatcacctctcccgctaaccgatccgtcgtagaggttcagtatcgcactgtgatgatgtattctatctgatcactatcttccccttcacaacaattttttttaaggagaagggggtatactcaaagatacatccaaaaaaaaaaattcctcccctgcagcttgcgttaacatctccacgtactcccgatctttcactctcccactacccactatgattcaaacaatttcaattgacgatcccgagaatagccccaggtaaataatcaaaaataacaataaacacctagacatataactacacgacgtcaccgatgcgcaacatataaacaaaaaaaaactgtaaaatattactactaaacacgtaaacaatcttaattt

SEQ ID NO: 119833 - DNA, 531 bp, Arabidopsis thaliana columbia
  unsure (1)..(531): unsure at all n locations
nnnnnnnnnnnnnnnnnnnnnnnnnnnnnnnnnnnnnnnnnnnnnnnnnnnnnnnnnnnnnnnnnnnnnnnnnctttttttttttttttttttttttttttcccgaaaaggtttagttttttttagccataaacaaaatcacatttttcacacttcaaaaggatttagcaccaaaccaaaaacaccccacactaatcttttacacaagaacagaggtcctcggaatttcaatcctttagggggggtctaagccctgaaagtgcttgtttaacaaagggggttttgatatccaaccggtaaccccggcaaaaaaaatgtgagagggaaaaggacacattgttccttaattaacccaattgtgtcccaacaaggaaggggcccatctaacagcagagccaacatataaatttgagggaagcttaaaggcctgctcaatgaaaccctcctgggttgtccttttaccctttaaagaccctcctgaaaatcccttcatatttacttaagggccccctttgggtttatttcttgacc

SEQ ID NO: 119834 - DNA, 522 bp, Arabidopsis thaliana columbia
cagctctattctactcacttatggaaagctggtacgcctgcaggtaccggtccggaattcccgggtcgacccacgcgtccgagcacacgttcatatacaccttcgtacggttgttgattcacgacaaaaagaagagtctatattatttgtggattatgatgttttgaactcgaaagtgtgtgaccttgatccatcttgcttagagattaagagtggctggtgaaattttttatgcggaggtgagttcatactctaatgattcggtgacaaatagatctactagtatttctgttgctgctattgctgcctaattatgatggaaaatgagggggcctaattctgtcaggtggatttctacgcttcccttgtgcatcatcggcgccgagaaatgtgttctcttcatcgttaagacaccttatgtacaagagcaggtgattattggtgtatgacccacagtgttttaaatcaggtggttgagagttccgagcattgattaggggtaacatcgcgttgttacctttg

SEQ ID NO: 119835 - DNA, 535 bp, Arabidopsis thaliana columbia
  unsure (1)..(535): unsure at all n locations
nnnnnnnnnnnnnnnnnnnnnnnnnnnnnnnnnnnnnnnnnnnnnnnnnnnnnnnnnnnnnnnnnnnnnnnnnnnttttttttttattttttttttttttttttcgcggaaagaggaggtcttgattaactatgagccaaggttcactattcatttccaaaaataacagaggacccaaccaaatttaccccaccctccttttattcttgaaaacaaactttacagtgattcatgacttttaagggggactcagccctttctttatctggtaccaagcagggagtgacgtccttacgatatacttggccaggccaaatagacctggaccacaacgattgagccccaataaccgtctttgtgttctaacaattttcgagatcctttccaactcctaaccaagcttaggttttgaaaggaatgcaatctacatggtcactaaagcactcctaagtaagcctgtttcctttacaaatgcttcacaaatttaattcataagattggcaaatgaaccatttgataaattcgagaatctggc

SEQ ID NO: 119836 - DNA, 534 bp, Arabidopsis thaliana columbia
  unsure (1)..(534): unsure at all n locations
nnnnnnnnnnnnnnnnnnnnnnnnnnnnnnnnnnnnnnnnnnnnnnnnnnnnnnnnnnnnnnnnnnnnnnnnnnccacgcgtgcgcccacgcgttcgcccacgcgtccgtacggctgcgagaagacgacagaaggggggtaggtaaaatttttgaatatttgcaatgacactgtaatgttgttgacgactctgaatgcaccatgagctgcacaattctatacgctaaggctaattctgctgaagggagtttcagactataacgtattcgacacaaacaaggaaaccctgatttaatttgctgatctttcaccgtatctattagatttacagacgatccaaaatctgttaccatggtgtgtatccatatcttgaaaatcatattggccttgcaattggacatgaggaaggcttacctatcaattgtgtaacaaacatttctattatatttcttgaacatccttaaccaaccgaaggatttgaaattactacgctttgttagggaagtactgattttatacacaaattttcatctt

SEQ ID NO: 119837 - DNA, 520 bp, Arabidopsis thaliana columbia
gccccgccttttgggtaatgtttattatgcttttaaccctggggggggggggggttaaattaaattctttccatagccagcccaaacgtttcgggccacgttaccctgtatactccccagtttgaagaaatggatccgtttgcggcctcgacaaaactaggcgtagcggagtgtcgtgtccgataatgtagatcgggttttttttttggggaggaggggatcttcccaaacgggaaacaatcataaaaaaaagttcccgttctgtcgcgtgtacttcctattcgtcgtctcgggttagcgggaaatatctgttgaagcatgtcgttacctcggaggattcgactacggtgagacttaacatccgcgcctctcttatagtgtgtctgaacctttaacagagttcgtaccatgatttcgttgcatctccacctctcacactcgcctcctgtgtggtcccagcatcgggctatctatacactaattcttcgtgtggcgatgagtctatggtttgctggtacgc

SEQ ID NO: 119838 - DNA, 452 bp, Arabidopsis thaliana columbia
ggagcactatagaagattcttgacgtcgcctgcacgcgtacgtaagcttggatcctctagagcggccgctttttgttttttttttttttttttttttttatcaagggaatctacaagaaccacattcagaaactcagatcatggcctccaaattttgaagtctagggactcatcataatccatattacaaaacacaagatcacatatgcgcgacactaaaagaatgggatcagaacgaaggcaaaatcacaatagtctcaaatgatttaaaacagatatactcaaacagtttaaaacacagtcttgttgtctattctaccgcttctcgccgcacaaacaagtagcagcttgaagagcgaagtacgtgaggatgatgtccgctccagctctgcgtaaacacatcagggactccatcatcactttctctttatcgatcattttcaagactcccc

SEQ ID NO: 119839 - DNA, 553 bp, Arabidopsis thaliana columbia
  unsure (1)..(553): unsure at all n locations
nnnnnnnnnnnnnnnnnnnnnnnnnnnnnnnnnnnnnnnnnnnnnnnnnnnnnnnnnnnnnnnnnnnnnnnnnnntttttgggtttttttttttttttttttttcccaaaagggatgggaaactatgcatttttttagcagctgatactttcaaatgtgaacaagaaactgatcctgaagactaaagccgatagtcatatatgttcataaaacttggattaggttcttaagcttttggaaaggggcatatttttattatgggatcaagatccttgaagggactgtaaggccctttcattgtcacctgaagtcaaaatcaagccagaaccgatggaatgacttccagtcctggctaggataagcaattttaccaccagcattaattgaccggggcagggatcacaaagggggattagcctggaactcttttccccggggcgtgatttgttcaaaatactatctccttttcttaagggaaaagggggaaaattaccagttggacacttatacaaaacccttaactgaagaattcaaaggataaacctggcccggg

SEQ ID NO: 119840 - DNA, 516 bp, Arabidopsis thaliana columbia
cagctctatactgactcacattagggaaagctggtcacgcctgcaggtaccggtccggaattcccgggtcgacccacgcgtgcggccactgcgtgcgtacggctgaaagaagactacatacggggactgcagagagaaacatacactggcgggttctctgcaatcagcaaaccctacattgtcacgaacccgtaacttcttcccaacaaaaccttaccctccttaggacaccattcctgatcttggagggggggagattcaattcaacatgcgtcccttccaaattcaaacccctagggtcctggagaagcatccttatcggtcgggactcgctgcgccggcgagtcccatgatagataacccttgcatggacttggctatgttgatagggacaacggggaccctggccaaatgcttctcgcggagtttttcctctcgcccctttgaagccagaagaattcgagacattcgtgtgctacgcttaaatagggcttccaggttgttacaaggacaaat

SEQ ID NO: 119841 - DNA, 435 bp, Arabidopsis thaliana columbia
ttgggggtttttaaaaagggccaagggaaaaacacaccacaacctggtttttatacgcgaatgtgttaaaaaaccctgggagagacacaccataaaccaccgcgggggtgtttaaaaaataaaagaggaaaaaggggtggccttttttttttaaaaaggagcaaaaaaaaaaattttttttgttgtgggggggggttttccccctaaaaaaagagtggcccccacacaaagaggggggggttcttcaccacacaagaggggggtgccccttcggtgggtggctctcttttattatttagagagcgggggagcgacattaaatataaatctttctttttcttttttttcgggggggggggggcgcccccaaccaaagaagaaatatatttgtgtgttggtccgctccccaccaaacaaaaaaaaaaaacaaatgta

SEQ ID NO: 119842 - DNA, 521 bp, Arabidopsis thaliana columbia
  unsure (1)..(521): unsure at all n locations
attaggacgcactatagnaagagttatgacgtcgcatgcacgcgtacgtaagcttggatcctctagagcggccgccctttttttttttttttttttttttttttaatccaagcttaaaaacaactttctagcgaaaaatacccattattctgttataaaccacgttacaaaacaaaaagaaactaccaaaattgaaaaaaatttatcacatcagccctcttggggagacattacatttatcgagggatagacgggacaggacaaaatctatagaaaaattagggagttttagcagaggcattaatcaaggacaaagggggggtggttttatgtcccacgttcatgaaactatcccgaaccgggttgttgatcctcacatccatatcgagaagggggaacccaaaggagcatgggtttgctgcagtcaaagggcgaccagcggcagggcggaacattcctcaggggggacgaaaacgggttgagacgtttgggacttgcaaaaaagttgagattgtttacag

SEQ ID NO: 119843 - DNA, 542 bp, Arabidopsis thaliana columbia
  unsure (1)..(542): unsure at all n locations
nnnnnnnnnnnnnnnnnnnnnnnnnnnnnnnnnnnnnnnnnnnnnnnnnnnnnnnnnnnnnnnnnnnnnnnntttttttttttttttttttttttttttttaatccaatcttaaaaacaactttatagcgaaaaatacacattattctattataaaccacgttacaaaacaaaaagaaactaccaaagtcgaaaaaaatttatcacatcaaactcttagcaagacattacatttatctagggggagacgggcacaggacaaaatatagtgtttaaatcaaggacgttgtagcaaaggcattaatcaaggacaaagggggggtggtttcatgtcccacggtcatgatactagcccgaaccgagttgttgatcctcccatccataacgccgaccggagaacccattggagcaagtgttcttgttagtcaaagccgcactaggccaaggctgagcattacttaggtggcacggaaacggggcttgatgtttggcactcccacacatcttgagctcttgaacagattcggctaaacggaccacggt

SEQ ID NO: 119844 - DNA, 546 bp, Arabidopsis thaliana columbia
  unsure (1)..(546): unsure at all n locations
nnnnnnnnnnnnnnnnnnnnnnnnnnnnnnnnnnnnnnnnnnnnnnnnnnnnnnnnnnnnnnnnnnnnnnnnnnnnnnnnnnnccacgcggtccgtggacgctgtgagcaggacagcatccggtactggatgtgcataatacgacaacatagggacacactcaaatatctctacaacactaaaataaaagcaccgactctgtctctctatctctgcgaaacaaaaaaataaccaatggcaaaacaatatctctttgagcgtgctctcaatatagatatctcttatcactggagctcacggcggacaccgcagtcgtacagaccggagcttacaaaaaaggcataaacttcatccaatcttcttgcaaaaccaccacataccctggcttatgtgcacactcactctacgtgtacgcagacgacattcaaacaaaccactatcgtttagctgagaccgctataggcgagacactaagccaagcccaatccacgaatctcttcttctagcgctaacacgtatgaagggtcttaagaagcgcgaggccga

SEQ ID NO: 119845 - DNA, 530 bp, Arabidopsis thaliana columbia
  unsure (1)..(530): unsure at all n locations
cnnnnnnnnnnnnnnnnnnnnnnnnnnnnnnnnnnnnnnnnnnnnnnnnnnnnnnnnnnnnnnnnnnnnnnccacgcgtgcgcccacgcgttcgtacggctgcgagaagacgacagaagggggatgtggcaaggctacacttgtgtttgcacttgattatcttttcaagacaacaaaaaagaagtcagcgacgatatccgtagacgatttttacttgactgcagaaggccaggctggggggagaaaaaagaatccaggaaatgcacttctagagtatcgnggaaatgcaggaagtcatgatctgaaactttctgttgaaacactagaagccctgtcgaaactgaccaaagaaggcttaaagatgaaggtacctaggtacaataagtctgcctatagtgggagaggtgacagggccgattcatcaacatggcctgaagttgaaggacctctatcggttattctctgtgagggatggatgccttggtttaagcctcttccagctgacgttgttaaagcagttgacccacagt

SEQ ID NO: 119846 - DNA, 510 bp, Arabidopsis thaliana columbia
  unsure (1)..(510): unsure at all n locations
ttaggtacannnnnnnnnnnnnnnnnnnnnnnnnnnnnnnnnnnnnnnnnnnnnnnnnnnnnnnnnnnnnnnnnttttttttttttttttttttttttttttttggaaaatcttatggctttttaagaacctttatcctttggtccaagggggcataaaaaaaattttcaaaaattaacgccattttttaaaagaaaaaatttttacaaaagacttttttttgaaaaagggttctttcggggggtaaaaacttgaaaagaaaaaaagcccccaaaaggtgttaccctcttgggcatacattttcagaaggttttttataccaagttccaggctctgaccaaagaaaatatcccaagggcctttcggtgtataaaaaaaactccggtgcttgagaatcatagctggaggaaaacccctgtggggaggaaattttagatactgcctaaaaaaaaaatgtttcctgttttgggataaaagacaaaatcttttgtttccattagtaatcccagg

SEQ ID NO: 119847 - DNA, 536 bp, Arabidopsis thaliana columbia
  unsure (1)..(536): unsure at all n locations
tnnnnnnnnnnnnnnnnnnnnnnnnnnnnnnnnnnnnnnnnnnnnnnnnnnnnnnnnnnnnnnnnnnnnnnnnntttttttttttttttttttttttttttttttgaagagattttttcatttttatatcctgtatcctttgggccaggggggaataaaaaaaagcttctcggaatgtgacgccatttttagaaaaaagaaatttttgccaagaccttttttttgaaaaaggggtctttcagggggtaaaaagttgaaaagaggaaaggcccccacaggggttacccctttaggcttctctttggaggggttttcttgcaggttcgaggccttgtttaaaggaattgtcccaaaggccatcccaagtgaaaaaaaacaaccggggctacaggtttagagcttggggaacatccccgggagggagaaattggaggtcccgcttaaagaaaacaggtttcctattgtgatataaaggccacccacttttctttcccttaataaaaaccagggcatggccaaatggtatgtgaccggcc

SEQ ID NO: 119848 - DNA, 532 bp, Arabidopsis thaliana columbia
  unsure (1)..(532): unsure at all n locations
nnnnnnnnnnnnnnnnnnnnnnnnnnnnnnnnnnnnnnnnnnnnnnnnnnnnnnnnnnnnnnnnnnnnnnnnntttttttttttttttttttttttttttttaggcaaatcttatggctgattaataaataataacgagcggtgaaacagtgctggatatctttttaccaaacatgaataccagtcccaatagctatactctaataaacagactttcttctgactataagttttgtgggggggggcaccctggtgaagagtgaaagaagcaacctcttctggctttggtgttaacgtcctctaatgtttggaacaatatgaccacctttttcctaaacgagacagttctagtttataaacttttattccacaagcttcctaaaatcgaacatcattggtggacgaagaccccattgtgttttagggcttttgagaattcccgcttcatccaatgtttcccattttgagataaaaccaattttcaaatcacctcataggtgctgggactaaaatctctggaaggccaggaccc

SEQ ID NO: 119849 - DNA, 444 bp, Arabidopsis thaliana columbia
caagctctaattctgactcactttagggaaagctggtacgcctgcagtgtaccggtccggaattcccgggtcgacccacgcgtccgtcgagatgtcagaacgaggaccagtggacacactcgtacttatctgaagatggtttcatatacgggttgactttcttttccgaattatacatgaacattcttgttactgtacggctaaggggctggatttgttcttcttttgcgagggggggggacatgatatgcacatgaatggaacaaatactcttatccttacttcaagaatctttatactctacaattctttgattttattatcaacaaacagagacggttctagttattgcatttatatgaaactgtgtcactatggttgggagtaatggtaccacaataccttatgtatttctaagcaggcagggccaggttttaacatttt

SEQ ID NO: 119850 - DNA, 429 bp, Arabidopsis thaliana columbia
  unsure (1)..(429): unsure at all n locations
nnnnnnnnnnnnnnnnnnnnnnnnnnnnnnnnnnnnnnnnnnnnnnnnnnnnnnnnnnnnnnnnnnnnnnnnnnccacgcgtccgggagacgacagacggggaccatcgaagactgtcttaccgagatggttaaccggttgacttctttggaattattggtcttggactgcacagcgaagggctggcctggttcttctgacgctgagaggcgcgggacaatatatcggcatgaatggaattaaatctctgatccttacttcaagagtcttgatactctacaatccattggtttgattattaacaaacagggagtgatctggttcttggacttgtatgaaactgtctcacataggttgactgcaatgttcccaaaagaccacaagattatgggggcattaaaggctaggatgttccttcgtatgaagaat

SEQ ID NO: 119851 - DNA, 525 bp, Arabidopsis thaliana columbia
  unsure (1)..(525): unsure at all n locations
attcgtnnnnnnnnnnnnnnnnnnnnnnnnnnnnnnnnnnnnnnnnnnnnnnnnnnnnnnnnnnnnnnnnnnnnnnnnnnctttggtttttgtttttttttttttttttttttttttttaaatgtttttttttttttttttttaaggaaaaagtttctcacaccttcaccttcatgttttattcacaacaagatcaagccagggtgcctgaaaaatccccccaacaaacccctttttaaagggtgggggggaaaaatcaaaacctttcccgtttaacggggagaaacctcgaaaacggtaacttcttttgaccacttttggaacccttccggtgaaaaaaaaaccttggaagggctgacaacccttttcaacaaaaacccaggccttaaagggggggggggggtaaaagaattccttttgggcgtgaaaaaaacccggccctttgggggcgtaagggctgcactttcttgcccacaaaaaaaaccaatggggttgccttccaagaccttttttttgtgaccccgg

SEQ ID NO: 119852 - DNA, 432 bp, Arabidopsis thaliana columbia
  unsure (1)..(432): unsure at all n locations
ttgtnnnnnnnnnnnnnnnnnnnnnnnnnnnnnnnnnnnnnnnnnnnnnnnnnnnnnnnnnnnnnnnnnnnnnnnnnncttttttttttttttttctttgagatatgacccttatcttattgtgcttattgattcccattttcgtattcttgcttgggctgaggaggatacctaattatgacattcagatgcttgatttgagggagcacgaattgaagggtgatccttatcacaattagctcgaggggctaccactgatgttgtacacactattaatgattggagacggctttacgatggcaagctgtattgtcttgttatcaactttgaacaagacaaatgttttcttgtcagggtgaacattagaagtgttgtttggggcccatgccctaacttggcggagaggaagctctctgagatgctggccaggat

SEQ ID NO: 119853 - DNA, 421 bp, Arabidopsis thaliana columbia
  unsure (1)..(421): unsure at all n locations
cnnnnnnnnnnnnnnnnnnnnnnnnnnnnnnnnnnnnnnnnnnnnnnnnnnnnnnnnnnnnnnnnnncttacccacggggatcgggttctgaaaatggaagctgcctttgctatggataatgatgatggtgatgcaaacataaagattctgactgatgctttgctcactaagaatgatgatgcccagcgataatccgaacttcaaataaaattcttggatagaaaggatatgagtgaggcgtgcgggtaaaaattaggtcttttcttccaatgaggacggcgagatactggaatagggaaaactggtgcaaagtggaccccattttaatagaagcgtgatttaaaccaaaactgactcgggtggtgatagagtgaaacccactgtggctcgcgcttaacggaaggtctatggagatagaga

SEQ ID NO: 119854 - DNA, 538 bp, Arabidopsis thaliana columbia
  unsure (1)..(538): unsure at all n locations
nnnnnnnnnnnnnnnnnnnnnnnnnnnnnnnnnnnnnnnnnnnnnnnnnnnnnnnnnnnnnnnnnnnnnnnnnccacgcgtccgcccacgcgtccggggaatggtacccgaaaaacccggttctcagagtcttgacacctgcactgaggaaactatttgtataccctgtcaaatatgatgaggaaaacatctatatcagcattagagacagcgggaaaacagaggcagctgctgagagcgggttcagtggaaaagctcagcctgggctcacagcaacaaacgtcaatgtagacgaggtgagaatgattgtggacgagggttctgaaggatttggtttcacgaagaagaacgaagtgataaacgggaaggcggcagggataggattcttgctgctgttagatttcgagctattgacaggtaaaggtctattgaaaggaacaggggtcttggacttcctttactctggcttagatgctttcaagtagaggtaatatcttggttggtctggttttgcttgcctcctttgggcagtttgccc

SEQ ID NO: 119855 - DNA, 579 bp, Arabidopsis thaliana columbia
  unsure (1)..(579): unsure at all n locations
aaccacgcggccaaacgacgcacaccccgacccctgcacaaccccccgcacccaccccaccaccgcccccccccccccacccaccccccacacccccccccgccgcccagccccccaccccacacccgcgcccggcggaacgccaacgcccccccacacagtggggaggtaacctacaatgaggtgccacctcaaaanaaaaaccctaggaccgtggccagccccccccgaccccaaagccccggggacccccccccaaaaaccccgccccccccccccagggggtggagggcaatcatagaacgcactcgaccgtgccacggcccaccaccccaccccccccgcccgccccccgtcgacgacaccagagggaacccccccaacagcaccccccaccccccccgaaggggggagagaaaaaaaaactcgccccccccccacaaaaaaaaaaaacccccgcccctagccggtccgtcgacaagccccaaacaacaaaccgcccccccgcgcccccgcggcgccgcagtcccacaccaacgaccgccccacgcgcgtcgcccccctcccccacacccaaaa

SEQ ID NO: 119856 - DNA, 524 bp, Arabidopsis thaliana columbia
  unsure (1)..(524): unsure at all n locations
nnnnnnnnnnnnnnnnnnnnnnnnnnnnnnnnnnnnnnnnnnnnnnnnnnnnnnnnnnnnnnnncttttttttttttttttttttttttttttttttttttttttttttttttttttttttttttttttttttatttttttgtttttttttttttttttttttttttttttttttgtggaaaaaaaaggggccccaaccggaggaggaacctaaaacccaattttaaaaaagggagtttatggtaagaaaactacttaaaaaaatttttaaaaacattggcctttttttaaaagattggttggggaaaaaaaaaaaaaaccccgccccccacttgaaaaaaaaaaattgggggggaaaaaattttgggcagggcggttttttttaccaaaaaaaaaaaaatgcgggggccccagggcccaaaaatttttttggggcccccccaaaaaaaaaaacccacaatgtttctggggtatgttgcaaagagtctaaaaaaacttcccccggggggaggtgggggaaaccc

SEQ ID NO: 119857 - DNA, 524 bp, Arabidopsis thaliana columbia
  unsure (1)..(524): unsure at all n locations
nnnnnnnnnnnnnnnnnnnnnnnnnnnnnnnnnnnnnnnnnnnnnnnnnnnnnnnnnnnnnnnnnnnnnnnnnnctttttttttttttttttttttttttttttttttttttttttatgcccttcccatcaacaaaaaaccattcaactcccataatttttttggtagaacaagctattctcacttctatttaaaattcttaaccacaaagagggggtgggggaaaaatttaatctccggggggacttgtttgaacgggtaatccccaaaaagactttcttgggccccttggaaatcccgaagaaggaagaaaacagtgccccacaaggaacctccaaaaaaacccttccatgcatgggagaagccccaaaaaactcccgggataagggggggggccacgaaacttttttttttattcccaaccccctgaaactcatgctaatttaaacccctttgtggggccaagtgcaacaggtgatacctattttttataacaatgatttgcccaggtattttcacccccc

SEQ ID NO: 119858 - DNA, 536 bp, Arabidopsis thaliana columbia
  unsure (1)..(536): unsure at all n locations
annnnnnnnnnnnnnnnnnnnnnnnnnnnnnnnnnnnnnnnnnnnnnnnnnnnnnnnnnnnnnnnnnnnnnnnnnnctttttttttttttttttttttttttttttttttttttttttttttttaaaccggttaagcggttcttaactttttacaatcaacccttacaggttcaaaataggacttcccgggtctgaaaaacttgaattcaatgtaacccggggggacttatttacttttttgggagggcggggtgaaaaggaaaggtttataaatgaggcgggggccttgttagaactaacccccatacgaagttgggtgaccacccttgagaacgggaccagagtcccaaaccagggggggggggaaccggttttaaccatgcttttttttaacgagcacaatctacttttttgttcagaaaatacgaggggaggaaccggggataaattatcggtactgggagacacaaaactcctaaaaccccctttgcccagtttgggggggggatgcctaaaagctgtccttaaaaaattt

SEQ ID NO: 119859 - DNA, 528 bp, Arabidopsis thaliana columbia
  unsure (1)..(528): unsure at all n locations
attaggtcnnnnnnnnnnnnnnnnnnnnnnnnnnnnnnnnnnnnnnnnnnnnnnnnnnnnnnnnnnnnnnnnnnnctttttttttttttttttttttttttttttttttttttttttatgcccttcccatcaaccagaaaccattcaactcccataatttttttgggagaacaagctattctcacttctatttaaaattctttaccacaaagagggggtgggggaaaaattaaatatccaggggtgacttgtttgaacggttaatcctcaaaaaagactttcttgggccccttgggaatccccaagaaggaagaaaacactgccccacaaggaaccttcaaaaaaacccttccttgcatgtgaggagccccgaaaaatttcttgtgttagtggtggggccacgaaatttttttttatattcccaaccccaaaaatctcaggccactcaaactccttctggagccatgtcaacagctgaaacctaatttctataacattgattgacagggaattgtgccccccccgaga

SEQ ID NO: 119860 - DNA, 457 bp, Arabidopsis thaliana columbia
ctctactctacatactctagggaaagctggcacgcctgcgtgtaccggtccccaatacacgggtcgaccctcgcgttcgtgacacactacaaaactgatatatctatctgaggcgaatttcactaactcttggggaatacaggatcttactacaaatctttaactcaccgatcttgttctcattcaaagactatagatatagtggacaaccagctgaccatgaacacagagggggcgaccacctcagagatggcgactcattataaacaccagcagtcttcttcatcggccatgatgcctaagtgggctataatggatccacatccgtttaagatgtttcctcttatgggaaaagtgaccgggccaacacaactacaaagcgtctatgactctgcttttagctctttaatcttatcaccggcggcgaaaaattcgactttgtccggggggagggggg

SEQ ID NO: 119861 - DNA, 518 bp, Arabidopsis thaliana columbia
  unsure (1)..(518): unsure at all n locations
nnnnnnnnnnnnnnnnnnnnnnnnnnnnnnnnnnnnnnnnnnnnnnnnnnnnnnnnnnnnnnnnnnnnnnnnncttttttttttttttttttttttttttttttttttttctttgtttttttttgggcaaaaaagaaaacccatttgaaacactttaaaaggttttagagggaaatcaagaacgctacaaataaaccttttaaacctggaaagaggacttgaaactccaatccccaacgggggattcaaataaagaaaggggttcttttaaatggggtttttcatatgtacgggtacacacattttgaataaatggggaagggaaaaggaacaacattctatgactaaaccaatcggtgaccatctaggagttgccgatcataaaaggagtgttgatatataaacttggggcaagcttaaagccctgaaaaatgaaaaccaactgggttgtctttgaacacaaaaggaccaccctggggaacccaaattatttccaaaggggcccttttggatttcct

SEQ ID NO: 119862 - DNA, 535 bp, Arabidopsis thaliana columbia
taggatcacactatagaagagtcttgacgtcgcatgcacgcgtacgtaagcttggatcctctagagcggccgccctttttttttttttttttttttttttttttttaaacacattttgtttgttttttaaaaaaaaataaaacatgacctggttttgcttaaagaaattaaaaacctagtgttgaccaaggggtgaattaaaccaaactatttctttacttgtggttttaaaacccttgggggggaattttccccaacaaagtttttacagggggggggggtttttttttgaacgtttcccgcttctttctttgtagggcaccgctcggttgaacacaatctttcttggctaaaagtacttgctcaccgggtaatgccttagcactctgaatggaatttttttcactacttccctttttttaggggcgaatacatgtttggcaccagaattgcccttctaagagttggggacatggatgcggggccactctttattgaattatagccctttttttagggattaaagattttttta

SEQ ID NO: 119863 - DNA, 537 bp, Arabidopsis thaliana columbia
attctattaggacaactatagaagagtcttgacgtcgcatgcacgcgtacgtaagcttggatcctctagagcggccgccctttttttttttttttttggaataaagggtctttcatagaattgtcaaaacccaaatgttacgtacaatggtattagtgtacacaactggcattctgacgcgcacacttgcccacaaatggtttacaacacagatggctgctcaaagacactaagttaaaaagatttatcgctacacacaattgaaggaaaccaaatgatacattcgtagtagtagtagtagcagctaacgatgacgatgtatgtgaaatcaattggaccacacatgaaaaggccgtgtctgtttcctgtgtatatctcattgcgttcttcgtcgtagaaaagagcggttatgtcttccaaagcttcagctacagcgtttcttctttgctttgagttctttcccatacaattactgctgctgctctcatcatcttttggaggcccactgcttggtgttattttagctaagcatttccc

SEQ ID NO: 119864 - DNA, 533 bp, Arabidopsis thaliana columbia
ttaggacacactatagaaagatcttgacgtcgcctgcacgcgtacgtaagcttggatcctctagagcggccgccctttttttttttttttttttttacacaagtgctttattattctgggcaaaaattcagtgccttttacaggagctgtgttgtgagtatagaaaatggaattgatacaatgttggaaaattcttggtgtaaataaatgatacatgtgaattagttcccaaatatgggggggtgtgggtctccaggagatattgaataaaagggagataggggggctgctccccactgggttgggtccatttttcaacttccggttttaagttacaaaatgatctcgtcttgaacactgacgttcaggggtcttgtttggaagaacaatactggtgggcaccacaccctcgtttaaaactgcaaccagaggttcggaaaattggaactccgatttttcaatcgggagacttctttagccgtgggacggggaccttcggccggtaaaaaaatgccacccaacaatggggtggt

SEQ ID NO: 119865 - DNA, 309 bp, Arabidopsis thaliana columbia
cagctctaattctactaactctaggaaactggccgcctgcaggtcctgtccccaattcacgggtcgacccacgcgtccgcggacgcgttgacacttctactatatcttctcaaaaactacacctttttttgtttacacaatttctcagaggagatcttacttgagagctcaaatccttttgtctgaatttggatactgctgaccccatctttttgcaagttggcaaatttctgccgcggggtttttctccctgttataaagatctaaactttgaccgtggggatctcaatgaatgagaaagtgccatct

SEQ ID NO: 119866 - DNA, 447 bp, Arabidopsis thaliana columbia
cagctctattctactcactctatggaaagctgtgccgcctgcgtgtaccggtcccctatacacgggtcgacccacgcgtgcgctccaattacaaaattacatcaacttcctctctgctttaatggctgggacactatactttctctctttccgaggaaaaacaaaacataaattcgatttttctctggggcgggtgaaacagagatttcttctgtggcccttttattgggtctgatgaggctcctcacaagtccactggatcgtaagaagcacacacacttggccatggctatgaatgcccctctaatgggagaagaacacacataactcacacaaatctctgtatccatggaatcttattacgcctcaaactatgaatttacgacacgagaagggtttatggtttaaagattggaagccggtgatacttcctacgacggggctatt

SEQ ID NO: 119867 - DNA, 456 bp, Arabidopsis thaliana columbia
tagccactatagaagagttatggacgtcgcatgcacgcgtacgtaagcttggatcctctagagcggccgcccttttttttttttttttaaaatccaaatatattaaactttttataagttttatgaaatgtgtcctcatcccaagcactagagcacactataacactggaggcatacatcattacactggttggtgacaatttgagaatcgcgggaggaaccccaacagaaaaaaagaactggggggaatattcatggaaaaccctggggtgaatggttcaggaaatcccccgggttttggccaattttttacccgggggtaaagaaataggttttttggaccggaaaaataaaccccacaaaccggtgccccagggcgggaaaattttttgggggttggcttttgtttaaaacaccccttttaaaagcgggccgggggtccgggaaaaaaaaccc

SEQ ID NO: 119868 - DNA, 411 bp, Arabidopsis thaliana columbia
  unsure (1)..(411): unsure at all n locations
tctaattctactaactttagggaaagctggtacgcctgcaggtaccggtccggaattcccgggtcgacccacgcggtgcggggttcgttatgaaaccatagatccaggtgaattctggaaaacatctgtgaacgaaatcaagacatggttggaggatcaaaacgttaattctattgatctataaatcctagaaggggatcctatggtgggtagaatttctctcttttatggcatgggaggagggaccaattanagcctgctttttattactctgatgagatcaattacctcgagaatgagcgttcctttggaggatttgaagatagagtcatttcttttaaaacgactttctggcgattttaatgaagaggtccatccttataaccggatgctttgcagaatggggcaata

SEQ ID NO: 119869 - DNA, 504 bp, Arabidopsis thaliana columbia
gacgtcgcccgcacgcgtacgtaagcttggatcctctagagcggccgccctttttgttttgttttttgttcaaaaattggaatatcctgattaatgtagatcttttattttgggtttttcaatcttgaaaacattcaagtcatgtaaaactttttttgattacaacatcaaaacagggctgggtttaaatctgggggctctttcgctctcttgagggggggccggattgaaaaaaaccccgagagcgctgggtttgcaaacaaccacccccattggcttttcctggggtcgactcgtgttagccagaaaccacccccttggatttctttactgaaacattgtgggtaccacctggtaccaatgaaagacacgccctttacaatgcggtgaatggtcccgagaaaaagaaagagggggttggggttcttaaaaagagggcccaaggcccttttgtgggggtacccttctccgcgagggaaaaaagagcatgacttttccttgtgg

SEQ ID NO: 119870 - DNA, 424 bp, Arabidopsis thaliana columbia
  unsure (1)..(424): unsure at all n locations
gaattaattcgcttnntctacggggttgagtgaggcggagacaccctttttttttttttttggggttagaaggctgtgaattccaaaccaaattaaattcacataaaccagatactaagagggctgttcaaacaggaataattttgtgacatgaactctaaaccataacaataacatgaaaggggggaggggtcattacttagggggtttaagaacaaaaacggaaggcgagtttccttcggaggcacacttttcattgcttaaggatcaaacatcatcagtacaggcaacgtgtttttattctacaccggataatttcccaaggggttcaaatttttcgcataaaaaggaatttcttttaaaaagagcttaattttgcccaaaagagacaggctaccaggaaagggggcctttattgtacgcc

SEQ ID NO: 119871 - DNA, 528 bp, Arabidopsis thaliana columbia
  unsure (1)..(528): unsure at all n locations
gacacttagaaagtatgacgtcgatgcacgcgtcntaagcttggatcctctagagcggccgccttgggtggggggtttttttttttttaccagaaacctttgagatctatgtattgataaaccgcgccaaaaagaaaacagagtcgtgcacaaaatcaaaaaccagaagaacaagaattcaagaatgattaagctctataaagcaacgaattttacttcttctctggggggggagcctcgggagccctcttggctctggcaccagcatgacgtgcgtttgtgcgctccaaacgaatcttatggtaagccttgaacgccttcaaatctggagggagcttaactagctccatagctggcttgacactggcatggggatgtaatcaccttgaacttgagtaggattgggaagctcttttggagtaaaatcaccagccttgacttgacggggaacggggagggaacaccacccacttagccttggaaggttttaacctttgagcattgggactgaaaaccctccaaagaacg

SEQ ID NO: 119872 - DNA, 535 bp, Arabidopsis thaliana columbia
  unsure (1)..(535): unsure at all n locations
taggtacannnnnnnnnnnnnnnnnnnnnnnnnnnnnnnnnnnnnnnnnnnnnnnnnnnnnnnnnnnnnnnnnctttgttttttttttttttgctaaaaaaagcgaaagctttaaaaaaaagaattcctatggagccaacaaacgaaatatgagggagctctgggaagctcttgtttgtaacacaaagactttgaattaagtaaatacgccgtctcccgggagatcaatctttatcctggggggagagagacatacactctcttagctaaaaagacctcggaatcccaaaactgggatgaagctcctccggtaacaaagcagattgaagatcttcaggcggggacatcgtcggatttaaatggatcaaaggaacggctggccctggaaatgtacttcttaaaaataaaaaacggcttgatctgataataggccaaaactttcaacggtgtttggggtctaaggatactcccaaaagaattggaagagttaactccttgatcaagactggggacggttaccattgtcctcataagg

SEQ ID NO: 119873 - DNA, 308 bp, Arabidopsis thaliana columbia
  unsure (1)..(308): unsure at all n locations
cagctctattctactcacattatggaaagctcgtccgcctgcagtgtaccggtccccaattcccgggtcgacccacgcgtccgtgctggttttccaagaagaccaaatggtttataactacctttcacggttctgtcaccacacaaggagagagggtaatcgtcgtctccaccatgtggaatttcaactgctcctctaatcttacaagggaggcggccaacttatgtttctctaatggaagacggcacacanaaacgctgctttaacaaaaaaaatctggacctcggaaacgcatcttttcccccctc

SEQ ID NO: 119874 - DNA, 533 bp, Arabidopsis thaliana columbia
  unsure (1)..(533): unsure at all n locations
cactatagnaanagttatgacgtcgcctgcacgcgtacgtaagcttggatcctctagagcggccgccctttttttttttttttttttgtaaaaaaaccgaaatcgttaaaaatcatttttcctctggagacaacccacaaagtttaaacattctcttgaaaccactggttaatatctcaaatcacttgaagttcacttaaggcggaatcgcccttaagaataatctttaccagagggggacaaagaaatacttgcccttaacaaaaataaccccggacaaacgaaatgaaacctggactccttgatataacaacgttgggggagatctacagaccgtgaacatcctcggatttaaactgaaccatggataccggtgccccaccaaaagcatctccttcacaaataaaaatggcgcgggatcctcataaatgttgccaaaactttgaactcttcttgctttctaaagaaactccctgacgaacttgtataatggactgctcaaccagaacgggggaaaattttcatttgaccac

SEQ ID NO: 119875 - DNA, 477 bp, Arabidopsis thaliana columbia
  unsure (1)..(477): unsure at all n locations
nnnnnnnnnnnnnnnnnnnnnnnnnnnnnnnnnnnnnnnnnnnnnnnnnnnnnnnnnnnnnnnnnnnnnnnnnnncttttttttttttttttttgctaaaaaaggcgaaagctttaataaaaagaatgcctctggagccaacaaatgtggtttaggggagctctggtcagctcttgtttgttacacaaatgactttgagttaagtaaagacgcaatctcccgtgagatcaatctgcaacctagggggagagggagatactctctcttggctaaaatgtcctcggaatcccaaaactgggatgaactcgctcgggtaacaaagctgatgaaagatcaacagagggtgaaatccccaggatttaattggatcgaagggaaaggctggctttgcgaatgcatatctttcaataataagaaacccctggaatctgataatcttgacaagactctcaacactgctggggtgcaaatgagatc

SEQ ID NO: 119876 - DNA, 312 bp, Arabidopsis thaliana columbia
  unsure (1)..(312): unsure at all n locations
aagctctaattctactcactttatggaaagctggtccgcctgcaggtaccggtccggaattcccgggtcgacccacgcgtccgtgctgattgttcaagaagaccaaatgggttttagctggcttccagttctgcaccacaaaggagaaggcgtaatctgcgtctccaccgtatggactttcaactgctgctctgatcttctaggggaggcagccaacctctggttctctaagcgggggcgtcanacaganaagcttctataacaaatattatatgggcctcggagagacatcttgtcttctctcaagaacta

SEQ ID NO: 119877 - DNA, 476 bp, Arabidopsis thaliana columbia
tgacgtcgcctgcacgcgtacgtaagcttggatcctctagagcggccgccctttttttttttgtttggtaactgaacaaaaccttttttattaaacaggaaactcaatgggggagacaaaagtcccatgaggatctgcataaagcccttcaccagcacaaatccaagtccctgttatttttaccggaactcccggtgaaacaaattttttctgggggggtattatgggatgaaaggccaaagctaaaactgccttattccacccgtgggtgtaatgagagcctcctgatacaaacgccgaagacaattgcctgcccattcataattccgagcatataaaaggggggttacccgccgaggatggtacatcgatgactcccttgcgcatccaccgaaggactttaccagatgtcttttctccaagaagattgggccgatgtaggccgtttgttttataaaccctatacaggggcaaag

SEQ ID NO: 119878 - DNA, 194 bp, Arabidopsis thaliana columbia
tggggaaagccctgtacgcccttgcagtgaacctgggtcctcaaattacacgggttcgacccacggggtgcgggcgtgtggttaacaaaaaaaaacctctttttattttttatcctgggaaaactaagggccgcgcgggagaaaaagagggtttacctctcagctgtgaatattttacgctctgttccaggaga

SEQ ID NO: 119879 - DNA, 509 bp, Arabidopsis thaliana columbia
  unsure (1)..(509): unsure at all n locations
nnnnnnnnnnnnnnnnnnnnnnnnnnnnnnnnnnnnnnnnnnnnnnnnnnnnnnnnnnnnnnnnnnnnccacgcgtccgagaagacgacagaagggtgttgagaaggccgaacaagacaagagaagtgccgttatccgcgcccagggagaagccaagagtgctcagctcattggtcaagcaattgcaaacaaccaagcgtttatcacgctcaggaagatcgaggctgcaagagagattgcacaggccatagcaaactcggcgaacaaggtttacttgagctcagacgatcttttgcttaacctacaagggatgaatttggatgttgatgcaaagaactagagaggtttcttaagtaaaactgcatgtgggtcattttgtcttttaagttcctagaatccgttggaacaaaagcttgatttgtactactaaatactacttttaaaattcttgggatcagtctacctcaaggtgaaagttgaaaaagaagatactgtcttgctgaatgagt

SEQ ID NO: 119880 - DNA, 535 bp, Arabidopsis thaliana columbia
  unsure (1)..(535): unsure at all n locations
acaaaatttatgacgtcgcacgcacgcctacctaaacttggatcctatacagcgctccctcatgggttcgagctgttttaaaaatattacaacaagcgatttctaatggaatcctaataaagtttacaaaacacttaacaaaaacccaaaatatctcactaaatcctacattacttaaacaaatacttctaattaaccaacaaccacttcnaaaattttttttggtgttgtgaacccaacacaggtatctttttaaaaaaaaaaaccaaaactctggaggggggaaaacacccctcttttagcttttctcccttctcctccatagaatactaatagcatttctaaattccattattggccccctggttcattaatttaaccacttctcaaggattaaataccacctttaaccttaactatcactattttttaaatatggagaaagacttctctttccccttatatatttaatgggggaaaaacccccccttctccttcctctatcaaattgcaagaacacccccccctttccccc

SEQ ID NO: 119881 - DNA, 334 bp, Arabidopsis thaliana columbia
  unsure (1)..(334): unsure at all n locations
acgtcgcatccacgcgtacgtaagcttggatcctatanagcggtcgctccattgggttaggggctttttaannaaacgaggcgatactttcatattaatattaatttccagttccgggagtacatactcaaaagtaaagatctaaatgtacaaaactcatggggggaatacaanacttctttgagttaggaaaacaaaagagggggattttttgggaagtgcgtataaaattactgtctttttaaaagaaacatcttcaaatgcacaaggtgggttcccccgccttctaggcataccaaaagggaaaggaaactcacccccccccttttcgagt

SEQ ID NO: 119882 - DNA, 284 bp, Arabidopsis thaliana columbia
  unsure (1)..(284): unsure at all n locations
taagcttggatcctctagagcggctgctccattgggtcgggcgctcttaaatacttttccgaaatcatgatttattcatataactattaattcaaaatttcagcttcacattacacattctattgttcaaaatcattacactctcaagctaaagtaatccccttcaatattaacctatctcctcttaatctccggggggtganttntccattgacttcaacctcataaaacattctctttacctcgggaaccaaaacctttnctntcttctcaatacctatgga

SEQ ID NO: 119883 - DNA, 407 bp, Arabidopsis thaliana columbia
  unsure (1)..(407): unsure at all n locations
cctctacttgtcttaacgtctacatgggttgtcctaacatttacaaaaaactttgtttattatatttcacaaaccagagagactatnttcaaccaatcaaaaatctttcctagaataattttatactaccttaaacccaacccttcattgaggggttaaaaacctatatcccctaacaaaaaaacccaacttgaaggagactgagcacttgtaataaacactatttcataatttaacaaaaactttggctttccatttatgctgaatctcatccactataatgcaacaaccaaacttccctttaaatgtttctaaacaattctctaaaaaagaaattttactttaaattacaggtattttaaaggttttcccccttaatagtcttttaaaaagcttaactaaaaaat

SEQ ID NO: 119884 - DNA, 516 bp, Arabidopsis thaliana columbia
  unsure (1)..(516): unsure at all n locations
acgtggcatcgccgcgtacgtaagcttggatcctatanagcggtctcctttttgtgggttgtggttttatgaatcaaaaatcttattaaacaaanatnaaaactacactaattttaacaacataaataaccaatatntgatgtgcattgcaaatgcaaaaattataaaggcacagctggtaaagttttggaaatacatacaacaaactcactcccgggggggggtctaaaanacagggcaagaatttaaagaacctctggatcattttaatttccacatttaccaagagttcatatgcggggaggaccctcacatgggacttcaaactcacaggcatttacaggacaaaaccaatggttcaaattgaaatggtgcgactggaaataatttacaaaaaacgagggtgccgtttcaatattaccttagatgaggggccccccgatttaaagatctcgcgtgatggtaaagatcattccttccccacaaagatgcaaatattatgggccagaagaaaac

SEQ ID NO: 119885 - DNA, 438 bp, Arabidopsis thaliana columbia
  unsure (1)..(438): unsure at all n locations
ttaacccttttgtagaattctcacaaccgtacctctttgagaattctcacaaccgtacccttctgacaatatctcacaaccgtacccttctgacaatatctcacaacgctacccttgtgtacaatttttcacagggggtgcccttctnacaatactaccaaccttaacaaaaaaaacaaacccttggcccacccttcctccacctctaaattcccacccttacctacaagcctaccaaatttattatattgatttatattaaacctaatccaatcattggcataccttttccattttaaaatttttaacccttacaattccacaaaataaacgacctggaaaaataaactctaaaccccgggttcccaataaagaaacttacctaaattaattcccttccaatcactgcccattttaaataggaaaacctatcccccc

SEQ ID NO: 119886 - DNA, 507 bp, Arabidopsis thaliana columbia
  unsure (1)..(507): unsure at all n locations
ccccccgaaaatctaggtgcctctccaagattagacgtgctcgcccgtctagctggtccttcgcggctctcattgttcggggcggtcataatanacagaacgtgtttaaacctatctccaaacactgagcaaatgttttatggaggctcggctgtcagcttactgaagcctaattgcttatccaagaatctataaacaaaggccttgctcacaaggggggtgtctattttaagcttcatgtggatcacatcaatactttgtagccctgtttttcaatctctgatgatagaattttcatggagggtctataagtgataactccatcgatctaaactagaagggtaaaacgcaattgattcggtctctgtcccaaacctttgattggggggatattattatctctcccggtgaggagactgacaaagaggctatttggtactacatgttttgacaaacattccccggcgatcgaggtccagaccaagataagccaccccaacccggtgg

SEQ ID NO: 119887 - DNA, 617 bp, Arabidopsis thaliana columbia
  unsure (1)..(617): unsure at all n locations
accccaacccgcggggggggggggtagttgcgcctttttttttcttctccactttgttgaaaggggcccgcnccgcggaaccggncccgaaaaaccgggtttacccacgcgcggcagaacccccgcgaaaaaaaaaaaccaaaaaaaaaacgacaaaaaagcccacccaaaccaaaaacaaaaaacacaaggaaccgcgcacacagaggcaaacaaaaaaaacaaccaagggtccccagataaaaccaaaaaaaaaaaaaacgccacaacaaaaacacacaaaaaagaaaaagttttttttttggggtgtttaaaaacaaaacctctttttttttcattataaaaaaacactttcattcttcttttttttcaaaaaatcctttacaactttttttatttaaatcaataatatcaaaatatccattttatttctatacccttttactattttcaccttaatctacatccaaatatactcctcttccctttttaaataaattttttcaagtatttccaccgcattaatatctcctctaataccacctttctttcaaaatcttcctctttttttatccatttcttaccatttttatcctatattttctttcctttttttt

SEQ ID NO: 119888 - DNA, 362 bp, Arabidopsis thaliana columbia
ttccttttttaaaatactaacaaacctacccttttttaaaacactacaaaacctttttcttgggggtggccacaaaaacgggcgcttttaaaaaaaaaaaacacccctaccctttttaaaacatttccccccggtaccccttttaaaaaatctacaaacgggtcccctttttaaaaaaccacacaagggtcctctttttaaaaaaacaaaaaagggtcccctttttagaaaactaacaaggggtactgttttaaaaaacttaaaaggggccccttttagaaatactccaacggcgcccctttcaaaaaaaccacccccccgccccctttataaaatcaaccaaggcccccttcttaaaaacc

SEQ ID NO: 119889 - DNA, 370 bp, Arabidopsis thaliana columbia
  unsure (1)..(370): unsure at all n locations
atttttctaaactattaacatctttattaacagagaaaccttgttctaacaaaaccattttttaaacacaatagaccacttaatcaaccttcaaagagagacaatgaataactgaaaaaatgcctcataatctctttgnagggtgcaaacccaaattttatctatctccattaaaaaacccctccaataatgattttctnntntcccctanctctaccaattcttcttaacaatcttanacttttaaaatataaaccttccctccttttacttttttaaattctaaaaaaaccccttcctattttcaacccaattnttcntaaccaccaacacaatttttatccccccccnctttttcaccccttaaaaa

SEQ ID NO: 119890 - DNA, 510 bp, Arabidopsis thaliana columbia
tgacgtcgcacgcacgcctacgtaagcttggatcctctagagcggtcgctccattgttgtcgggttattacaaaaatttttaaataaaattttttttttaaaaccacaaaccatttttttattcaaacacttggtttttccactaaaacctctttaaacattacataatcaaactttattcccacccttttttctttttcccaactctttggtgggggggggaattcccaaccggtaccttcaaacaaacaaaatttccttttattggagacggattacaccttttccaaatcatggccactactttttcctgtgggaaattgtatacccttaccatttcccaaaatttaccgcccggaaaacataaacttttataggcggggtggcctaaaagaggaaaccaaccccccattaatttgcctgcccaaacttcccccttttaaaatgggaaaaccctccccccccactttcattaaaaaaaccccccccgccccggaaaaatccccttcc

SEQ ID NO: 119891 - DNA, 479 bp, Arabidopsis thaliana columbia
gtggcatcgcacgcgtacgtaaccttggatcctctagagcggtcgctccatgggttcgggccgttgttataatacatacaaacactggaagtgttataaattcaaagtgtgtgtgagttttacaacattagagagagtgggaacaacgctgatacctttatggaaacatgattccacatgctctaacaactttaagatttactgtaccaaagggggggggttcaccacaggaagagcaccttcgacaagaattccggcgagagttaccacccaaattgccaatccggtgactcctttcttggacacgtgaccactggggtgaccactcgttctcgttggaaataggactgtgtccatcgacgttagctccatactggacgacggtctgtgaaacaccggatcctttagccttattggcagaggggacgacgcctcccctaaagtccatgctgccattaattgcgaaaggcttgtcggat

SEQ ID NO: 119892 - DNA, 525 bp, Arabidopsis thaliana columbia
  unsure (1)..(525): unsure at all n locations
ctgcgtaagcttggatcctatagagcggttgcccacgtgttcggaggctcttacaaaaangaggcaaaacttttatattaatttaattaccaattccgatagtgcatactcaaaagtaaggcatctaattgtacaaaactaatggaggaataaaagacttctttgttttaagaaaacaaaagagggggattttttcgggtgtgggtacaanacgactgtttttttcaagaaaaacaccttcaaatgcacaagtcgcattcccaccgctctctaggcctaccaaaagggatagggaaactccaccaccccttttttcatggtcgtggccccaggtaaaattgttgtaactcttttttccctttcattttatataaaaaatctgttaaagaaacgaatttgacgcttttaaaataacgttttctagcatggaaccccctaaattctgcttggtttcttttaacaccatcactccgcggtgataaatgaaaaacatattcttcaatccaaaattcatcttcatttgag

SEQ ID NO: 119893 - DNA, 415 bp, Arabidopsis thaliana columbia
gacgtcgcatcgcacgcgtacgtaagcttggatcctctagagcggttgcttatgtgtttgtggttttttttatttttttcaacaaacaacaccctacactgtaggaagaaaaaccccctaaaactatttaacgggctggtattttttatccttacaaatggtgggttggtcttctagggggggtgggcatgttaaattttattttcaatggggggggttttcatagggggggtatttgtttattttttttcttggaggggagccttctgggctgtttttaaatttttgctttttatgaccctgggggtggcggccatttcattaggctgtgtgcttgcacgcttgttctaatcttaaaaactctttgttttcttatgcaacaccatatttaaatttactgcttggggagggtggg

SEQ ID NO: 119894 - DNA, 362 bp, Arabidopsis thaliana columbia
  unsure (1)..(362): unsure at all n locations
nnnnnnnnnnnnnnnnnnnnnnnnnnnnnnnnnnnnnnnnnnnnnnnnnnnnnnnnnnnnnnnnnnnnnnnnnnnnnnnnnccacgcgtccgtccacgcgtncgaccgatgcgagaagacgactgaaggggacgtctgccgagctcgatcttaatggtgaagctgttcaagatgatgatgatgattattctacgactgaccctgttcaagacatcaatcatgagaatgtgaagatgtcatatgatgacacttagggtgattaaataccctattatcaggaggaagcttacctggcatactggtataaaatgcttatgatagatgctcgcgggaagacgatgtatgcaatccccaggttcgca

SEQ ID NO: 119895 - DNA, 478 bp, Arabidopsis thaliana columbia
  unsure (1)..(478): unsure at all n locations
gggggccgtagcagcgccatttttttttccccccccttttggagggcaccccgngggacagagaggaaggaagattgaaaggggggggaagccgaaaaagaagcggagaagaaaggaaggcccaggacccaaggcaaccggggcgcgcgagagaagggcagccagagaggaagacaggccaaagagaaccacacgaggaccagacggcgaggggaagtttttacgcggggggagagaaaagacccgagagggccaaggaacaaacaaaaagccgagagacacagccggggcgagagcagcgaggagcgaaagacgaaaaccgcgaaaagacaaacgcgaaggagaaccccaggaagcgaggcgcagaaacccggacacccgaggaaacaggaagccagaagacccgcgggagggacagaaagagggcgggcagcaggaacaggaacgacaaagggagagccgagcgagacaaaaccag

SEQ ID NO: 119896 - DNA, 486 bp, Arabidopsis thaliana columbia
  unsure (1)..(486): unsure at all n locations
tgacgtggctctgcacgcgtacgtaagcttggatcctctagagcggtcgctctattgttttgggcttttttaataacattccttacaaaacacgaatgtgttacacagggtgtttcaataccaataacccaatggtggtgaaagatggaaatttttggcgatacaagagacttaaaaacacatggagatgttgatcacctcancttattttgtggggggggaacaccttttttttgacccgttcacacaaatgttcatccangttggtgtggggtgcctcacaggacaatagtccttttattaaaaaacctggggtggctacaattgtcaatctacgggtctagacacttttgagtttcaactccttgaggagtttttattatttgcaaagccaaaaaggggtgaaaaaagggctcccccgttaaggggttttaccccaacagggaaatgtttgttttaccggagaaaatggtgtttttactaaga

SEQ ID NO: 119897 - DNA, 359 bp, Arabidopsis thaliana columbia
  unsure (1)..(359): unsure at all n locations
aaaaaaaaaaaacccaacaacacacaccacacacaccacaccacaaccaccacaccaccaccataccanactcacaaccacaaccnaactccatcaatccaactacacatcatcatcctcaacatatcttatcaaacttattaccatcacaccctcatacccccacccactttttttttttgaggggttttttgaaaaaaccaccaaaangacgccnncccccctaaaaaaaaaaaaaaacccccacatacctaaaaaaaaacatacacctcccacacaactcactatcacctaccaccctaaaacacataaacacaatctctaccctatcacactaccaattcactatattcacaaaa

SEQ ID NO: 119898 - DNA, 490 bp, Arabidopsis thaliana columbia
ggtaacacttagaagagtatgacgtcgcacgcacgcgtacgtaagcttggatcctctagagcggccgctctatggggttgtttcttttttctttcttgttgaaaagaattatcccttgtgtcggcttctagcagacgaacccttgtgtcgtgtgtcacaagcctacccttgtgtactgttgtcagaagcctacccttgtgtactgttgtcacaaccctacccttatgtactgttgtgggaagcctacccttggtgtctgttctcacaagcctacccttctgtcgtgttgtcacaaccctacccttgtgtcggcttctcagaagacgacctttgtgtcggcttctagaagacgacccttgtgacgtgttctagcagacgacccttgtgtcggcttctagagaccacaccctggtgtcgttttctagaaaccacacacttgttaattcttctcgcaacactacggacgcttgggcggacgcatggggccacc

SEQ ID NO: 119899 - DNA, 520 bp, Arabidopsis thaliana columbia
  unsure (1)..(520): unsure at all n locations
nnnnnnnnnnnnnnnnnnnnnnnnnnnnnnnnnnnnnnnnnnnnnnnnnnnnnnnnnnnnnnnnnnnnnnnctttgtgttttgttttttatttgtattgtacagatgcctcacagatgaatctgactcatattagtaactcacaggcccatgtgcatgtgtatttatatacacagaatcagatagtgatcatagttcggagtatctatccacaagggccttagctttgtttggcgcagggagcgcgcctggatgaacattctctctgcatctcatctggtttcattttgtctcaatgtaattcccttagccaagtagcctcagaagtcttgaggatgagcactgattaactggacataaacagctatcgtgtcgctgatatgtccacagacagaatacgctcttgcgagaagtaactcaacctgaaatgggcctagattcgtttcatttgaaacactggcagtagagctagattcctttgtattcagacgttcacgagggactagaataaatttgacggc

SEQ ID NO: 119900 - DNA, 548 bp, Arabidopsis thaliana columbia
  unsure (1)..(548): unsure at all n locations
nnnnnnnnnnnnnnnnnnnnnnnnnnnnnnnnnnnnnnnnnnnnnnnnnnnnnnnnnnnnnnnnnnnnnncttgtgttcggtgttagtttttttgttttacgagaagaacaatattcttacatataaaagatttaaagattatcccccttcacttaaaaaaaatgctaaacacatgacctggtcaagaacaacacaagactcaggcaaacattggttgtgtgctttattcgaaacgaggtaatatctgaagaaagtgccaggaagaccagaaacgagagtggtgaggtgaaaaacggttttggtgcatggacctctctagcgagcgtccttggacaaaagaccttgcgcttgaactttccttgcgttgcgaagctcataaactccatcttctctctcaaacacagttggtggacccatccccggcccaatgctcattgccactactccaaaacggacgtctttaccacggctggttatgtcgcgcaacaatgtagcaacacaacgcgctcctgtggcgcccaaaggatggcctatggccattgcacct

SEQ ID NO: 119901 - DNA, 481 bp, Arabidopsis thaliana columbia
  unsure (1)..(481): unsure at all n locations
aggccaacaaacggggaggggccaagtacgcccactttttttttcccccccccataaggggggaaccccagnnnnaaaaaggaagnggaggccatttagaggggggggaagccagagaccaagaagaaaaccagagaacccgagcaaacaccacgaaacaaagcacacggcagaaaagacagaagacgggcaagaccccaaacaaagagagagaaccccataaaccaaacacccgcgagaaaaaccccaccccaaaaggcgggggggaaccccagaggggccagggaaaaacagaaaaagccccccgagggcagacccccgacacgccgcggccagggaccccgaaggcccaggccccccagaagcccccgacacaaacatatatggcccgcgagacggcaagccgcagaagcccacggcccaacgagacaccccgagccgcaagaaacacccgcgcagccaaaagaacgcaaggccccaa

SEQ ID NO: 119902 - DNA, 447 bp, Arabidopsis thaliana columbia
  unsure (1)..(447): unsure at all n locations
aaaaaaanacaacaccccccccacaatcaaaaaaattaaacccccaccaaaccttttgctccacctcaaaattgaacacaccatacctaaaacttaaaacataatcatcataatataaaccacctatataaacccaaacaacaactctttttttagggggggtggggacccaacaaaggggggtaaaaccctaaaaagaaaaccccccccatatgggggggggggagcgaaaaccccccctctgctcctggggtgaacttataccacccaatactaccctcgccacttgttgtccccctctcccaccactcttccccgcaatgtgtaacggagggaaagccgcgacgctgcacaatggtaccggaaatataaaagagcccggcgcgccggtgaaaagagaacgaagaagacgcttctcgctctacccttggacgcgatcaaatttcg

SEQ ID NO: 119903 - DNA, 303 bp, Arabidopsis thaliana columbia
  unsure (1)..(303): unsure at all n locations
cggaccggccggaaacccgggtcgacccacgcggncgacgcgtgaagaagaaacagaagggtgcaaaccacaaaaatcgcaactcaaaccttatgggtccgttctcatagagcacatattatctacccgctcaaataacatgcatcagtgtagtatctggacaccacagaacaacttttttctccggggttggacaccgcccagaagggtacaaatttaaatcctctccaacccatacggccggggcccaccatcccccgctgtgcgtggcgatcgtaatatctgaatgcgccctgtcctcac

SEQ ID NO: 119904 - DNA, 507 bp, Arabidopsis thaliana columbia
  unsure (1)..(507): unsure at all n locations
gcacgcctacataagcttggatcctatacagcgttcgcccttttgtttgggctttattaacacaacacaatncaaactaattcatttcttcttattttctcaaagggtcatatctacatctattggtattgactgaatcacctaaacagattaaacaaaaacctgaactatgaaaatcttaaatacccncccttatttatggggtggtgggccaaaatctctctttaatttacaataaaataattccacttttgggccagattctccctaattccaagatattgcctttttctacacctgtgcggatgggacccctcacctgatgcgaactgtaaaccccattccttcatcctaatctgatgaccctcccgggctgttagatgacagattggggtattaaatatgcgtcgcacacatttgcgcgttcgctcccaagggccggccctagaatatttactgccacaatgcccagagggcggttcccaaagacgacccccctcgttcacc

SEQ ID NO: 119905 - DNA, 489 bp, Arabidopsis thaliana columbia
  unsure (1)..(489): unsure at all n locations
aaaaaaaaannacaaaacaccaaaaatttgttaaagtgcggaggcgagagatcggggagatggggggagtgagatgagataggggttaatgtatgtaaggagtatggggtagttaaagatagataggaagagaaaattgtatagtaaaaaaagaaggagcttattttttaggggggggggggaaaacaataagacaggggnaagaggaaaaagaaattttccggtttgagggggggaaatgttgttaggtgtatatatgtaaggatgtaaatgatagattgagagtggtgttgatttttttgggtttataagggatgttgagtgaagtgtttgggttaagagttggagttaggaagtttgtgtatgtagaacacgatggggagagtgggtgtagattggaggttatgtgtatggtgtgggtggggaagaggagttgtggttagtaagtagagtgtaggaggggagtgagagggtggtatagtaagaaga

SEQ ID NO: 119906 - DNA, 214 bp, Arabidopsis thaliana columbia
  unsure (1)..(214): unsure at all n locations
ccggnccggaattcccgggttgacccagagggttgaaccanacacaaaaaaaaaaaaaaagaagaaagagggagtataccggagccgcagagacaaagccagcagcaagcgagggggtgcccaagggtcaccaagcaaggacacggcgctattgggaacacgcaaagacacgaagcaccgggcaaactttttttttgggttgttttagaaaacc

SEQ ID NO: 119907 - DNA, 291 bp, Arabidopsis thaliana columbia
  unsure (1)..(291): unsure at all n locations
nnnnnnnnnnnnnnnnnnnnnnnnnnnnnnnnnnnnnnnnnnnnnnnnnnnnnnnnnnnnnnnnnnnnnnnccacgcgtccgaggtgctgccaacagatgatagatttctatggagatctgtcgatgaagccggatatgctctagaccatacactactgtttgataagcactcgtcatactgcgcctacaaagttctatcttcgtgcctaggacaatactaacaccttgatgtatatgacattcgatgcgagaagcatctgctcatataacatcagactctaacatatatg

SEQ ID NO: 119908 - DNA, 242 bp, Arabidopsis thaliana columbia
ctctatacgactcactatagtggaagctggtacgcctgcaggtaccggtccggaattcccgggtcgacccacgcgtccgtcttcttgtagaagtcagaaaagacaactgtgatgtcctcctgctgtgatcgccccttttgctatacctgcgtacatgtgttgcttgcgctatgtgcggcggggatcgcactgaattcgacgagactactctgctcgaatgctgtctgagcaggacttctgtt

SEQ ID NO: 119909 - DNA, 544 bp, Arabidopsis thaliana columbia
  unsure (1)..(544): unsure at all n locations
nnnnnnnnnnnnnnnnnnnnnnnnnnnnnnnnnnnnnnnnnnnnnnnnnnnnnnnnnnnnnnnnnnnnnnnnctttttgtttttttttgtataaaacattatcctttgttttaaattttgtaaagggtctgaagtattgagccaccattgacttgtacaaatagatagaagcaaagtaaatgtatagaaccatttagttaataagagagtagctatgtgaagcttttattttatgagcggggatctgattttatacttggtcaagttgagaaatgatcctgatgaagacatcaaagccttggcacatgtctgtaagaaggcagtattcgttctttgcatgatatgcagccatgagaccgtatcctgaagtttgcacatcaaaaccttcatcctggaggtctcggattagaggtaaagtaccggtgatcgagtaaggcttcacgtggccaacaactttttcggttgttttgatagaacgtgaagccgggagatcaaaatacacgcactccagttgtgcttaataaaactttacggagccttcccg

SEQ ID NO: 119910 - DNA, 510 bp, Arabidopsis thaliana columbia
ggcacgcacgcgtgcgtgagcttggatcctatagagcggtcgacctatgtgttttgtgtttaaaaatcttgaaatttcggatttaacaaacaacaatgtttgtccttacacacatgtttggtagacgaccatgcggggacacaattgcgcaccttaaagatagcctgagcgtagaattccgcggtttgacatgtatggctattctgaacaggggctgtgttgagtaggacactaatgcggtcactgagactacatgatgaggagcttggaaaaactacgggtttagggcgaaggttgtcttcaataagatctggatttgggacacggaatcacccttaaaagcaggttgcataccggatacagataaaacgcatggaccataccttccggatacatttaccaggcctgtgaaggcttcaggttgtctccacatgctatataatattgggagctgataccacccattgtgactaaagtagggtggatgtcccatgaacgacatgtgtgcaa

SEQ ID NO: 119911 - DNA, 526 bp, Arabidopsis thaliana columbia
  unsure (1)..(526): unsure at all n locations
aggtgcactctagaagactatgacgtcgcctgcacgcgtacgtaagcttggatcctctagagcggccgcccttttgttttttttttaaaaattacaaattaactctactatgttaaccagagataatcagagcaatacataagagagactcaaaaaaaaactatgtccatggattctagagtttctgagtaatgtaatcatcaatcctggaatctctggtgggtgttgctgcctggagagggcanatacaagtttggggatttgagagactcttcttccttcctttggattttttaggatctcattgctttggctctgacgcagctagtttacgctctactactcggcttcttggcgaaagattcaataaaggggaacatccaacgatctaacattgctggcaaagcaaatgtaccgactaatacagtgcaaagacgagcgattaagtggagaaaactacggcgttcctccttgatggccacacggttgggtgaaagatcatcttagaagtaaacagctggccatg

SEQ ID NO: 119912 - DNA, 504 bp, Arabidopsis thaliana columbia
  unsure (1)..(504): unsure at all n locations
nnnnnnnnnnnnnnnnnnnnnnnnnnnnnnnnnnnnnnnnnnnnnnnnnnnnnnnnnnnnnnnnnnnnnnccacgcgtccgtctctaccggagatctctctttctcttcttctccatccttcttctctcggcgcgcgcttcatccccaccatcttcgaattcgtgccctttgagggaagctgctaggatgggtgtgaagcaggctctaaggagcattgatgcgtctccaagagcagaggatcatttgcttcagaagacacaatctggcgctgttgtatctattgatggacttcttataatggctactttgatcttacacgagctgagttattatcttaacacacttacagtgcaccagatgtcagtggacttaaagcgtggagaaactcttgcaattcatgtaaatatgacgtttccatctttaccttgtgatgtactgagcgtacatgctatcgacatgtcagggaagcatgaagtggatcttgatacaaacatttggaagct

SEQ ID NO: 119913 - DNA, 541 bp, Arabidopsis thaliana columbia
  unsure (1)..(541): unsure at all n locations
taggtccaactnnnnnnnnnnnnnnnnnnnnnnnnnnnnnnnnnnnnnnnnnnnnnnnnnnnnnnnnnnnnncttttgtttttttttttccataaagaggtcaatactcttgagaataacataagcttacttcagtcatggacaatgtaattgttacaataaacattgacaacttcctctgctgcatgctaataagctcacttcatagttaggcacttagtgaaatggacacaagcggggatggcttgaatttcttcatctttgtggagtctcggggctgaaacagaacctaagtgctcgacctgacagtcacttatttcgactctgcccctgaactgccttcacttgtgtagtccccatacgaatacagaacctgcaacctcgaaggagctaatccaaacatgcttgttttctgaatagagacacggtcaacttttgaccttttgatatttcttaaagccagggtatctttcctgtttcctttaaactcgaggaattcccctaacacaattttgctacttttaagctccactctatccca

SEQ ID NO: 119914 - DNA, 538 bp, Arabidopsis thaliana columbia
  unsure (1)..(538): unsure at all n locations
nnnnnnnnnnnnnnnnnnnnnnnnnnnnnnnnnnnnnnnnnnnnnnnnnnnnnnnnnnnnnnnnnnnnnnnctttgggttttggttttttttttttttttttttttttttttttttttttttttttttgggaaccaacctttgacttttaatttatgacaaaattggacatttaagtggttgccaaaactttttttatttccgggttatatcaacataggacatgattcagaggtggggggggggcgatctttggttcaatgaacacaccaattggttcttggggggatgctcaaagggattgttttatatacacaagatttccaaatttttccttctaaagagatcactactgttgaaacttcttcggggataccgggttggttcaccttggggtttttttagcaattcatggaaatccataccaggttttttaggagctttaaacaaaagcttttgcacagggggttgagctggatccccttaaggttggaaagggaagaagaggtcaacctgtgaaacagtttttttgtttggga

SEQ ID NO: 119915 - DNA, 440 bp, Arabidopsis thaliana columbia
gacgtcgcatccacgcgtacgtaagcttggatcctctagagcggccgcccttgtgttttttttttttttttttttttttcttttctttttttgaaagctttgtttttttcattttttctttttgattttttattgatgtcaaacaaaattgtttttcccactttggggaaaagatttttgtcccctgttaaaattttttcattttttaaagaggggagggacccactcatgggctttaaaccttttcatttttaaaggttttttttttccaaccaaccttccccaaatgggaaaccccttttaactaatctttcttagcctggaaattttttattgaagaaacatattttttaacccctcccaaaggtgtttgtttaaaaataaaaacttttaaaccccccacttattttttttcttagaccggccccttttttttttta

SEQ ID NO: 119916 - DNA, 406 bp, Arabidopsis thaliana columbia
ctctcacaagaatttatgacgacggcacgcacgcgtacgtaaccttggatcctatagagcggtcgacctatgggtttggtctttttaataataattttctgatttccctgaatccaagtaaatgcctagaggaacaacaacgaccattctttctaggtgggatattaatgcgaagcacgaggtactgttaccgtccaaaaatttcagttggattgcataactactctaaaagggggagtttaacctactcctactttactatactgtaaacctacacctctgtcagcgtactatagcatgacagttataactaaatcggcggagaggatttatgcgatcttatctgcctttcgatcagttataacataaacgcgactcgcactattttaataggaagtaaacaaat

SEQ ID NO: 119917 - DNA, 339 bp, Arabidopsis thaliana columbia
  unsure (1)..(339): unsure at all n locations
tgacgtggcctgcacgcgtacgtaagcttggtcctctaagcggtccccttttgtttggttttggtaaaaaaactttnaatatcaaaattaaaaacttttccaaacgaaaatgtccaaaggcaagaggacatttnagaaatcatgcaagtatatacccaggaatttataaatttagaatcagggagaaaaattcaggtcaacaaaacaaggggtgttggggaaaccgaagggggatcataacaataaaagatcttgaactgaatggagcaaaggagctggggaggtattgcttccccaaggttgggttattcatcgagtggctggctcaaattgagcaaa

SEQ ID NO: 119918 - DNA, 519 bp, Arabidopsis thaliana columbia
tgacgtcgcacgcacgcgtacgtaagcttggatcctctagagcggccgccctttgggttttgtttttttttttttttttttttgttgcagtttcgcacagtaatactgtatttgatgagtttcattaaaaaaaaaaaatagtaaactaggggaatcctcccatggccgttgccttgggtgcctccgggggtggtgaaggtaaaacggttaacgcgggggtccactaatcgccgctgcaattgctgcaacgataaacgccggtaagtttccaccgccgaacaaggcgtctaaaggtccacctcctagtgagactatcattggtgggatcacaatcgccaaatttaaaactcctaaggaaagtccttggcctgcaccggagcagattgagaatatggctgctagagcaaacggagttctgaaagtaatggctaaggggataccaagaacacgaaagagacttaaagctccagctttaacactagcgctgggaccggttaaaacaccggcggttttccgggg

SEQ ID NO: 119919 - DNA, 554 bp, Arabidopsis thaliana columbia
  unsure (1)..(554): unsure at all n locations
aggtgcactatagaagagctatgacgtcgcatcgcacgcgtacgtaagcttggatcctctangagcggcctgccctttgtgtgtttgttttttaggcatcatgtatatagacattaagaccacaggtttctcatgtatatgtcatatttacaactatgttgagtacgcagatgagattataataagtgatcagatctctctttgggctatggtcacaaagggtttttgttgtacaagccggggtggtggtttcactggctatgagttagctgcaaaatgattgaatatggtctcaagtgtggattgacttatactgtattcagctattcccagccgattccgggttctttcaagatgtccaaaggcatccgcaagtgacaatcctccttctccaaatggcaactggtacttgatactcagtccattgcagcttttgaatgttgcaccgggaaacgaagattgtctgaaagaatccaatgctgagaacttttctttggttagccaccactcggaaaatattggaagtggaataccaccatctcgaaacagctgct

SEQ ID NO: 119920 - DNA, 417 bp, Arabidopsis thaliana columbia
  unsure (1)..(417): unsure at all n locations
gacgtcgcatcgcacgcgtacgtaagcttggatcctctagagcggttgcccttttgtttggtgttagnaacanacccatttaataagaaaaatcagctactttttttatatgaccttaacccttaaaaaaccccgaggaccacttagggggctttttttcaacggggggggggttttatttttttcaaaaataaaaaaaaccccccttttaaaaaaagacccccccccatttttcccaaaactttttttatttttggggggggggggggccaaaaaaaaaaaaaagggggggagtctcccttttgaaaaaagaagagggttttttttttggtttatgaaggggggggggtagcctcctcaaaacaaaacctaaccgggtgggcggccgccgaccgaaaaagggaccttcaaagagaa

SEQ ID NO: 119921 - DNA, 532 bp, Arabidopsis thaliana columbia
  unsure (1)..(532): unsure at all n locations
nnnnnnnnnnnnnnnnnnnnnnnnnnnnnnnnnnnnnnnnnnnnnnnnnnnnnnnnnnnnnnnnnnnnnnnnnnnnnnnnnnccacgcgtccgcccacgcgtccgcgagtatcgctgattgggctcgtcatcgcaagagaagaagagaagatatcaagaaggaatctggtgtcacgatttcagacattgtggcatgtcctgaggagcagattttaactgatgaacaacctgacatggatggatgtcctggtggtgagaatcctgatgatgaaggaggagaggcaatggttgaagaagctntatcaggtgatgaagaggaaacgtctagtgagccaaactggggaatggattgttctacagttgttagggttaaagaacttcatattagttctcctattntagctgccaaaagccctntcttttacaagttgttctccaatggaatgagggaatctgagcaaaggcatgtcacccttaggattaatgcatcagaggaagctggcttgatggagcttttaaactttatgtatag

SEQ ID NO: 119922 - DNA, 541 bp, Arabidopsis thaliana columbia
  unsure (1)..(541): unsure at all n locations
ccccccccagattgtttcaggtggcgntcagcagagctangacgtcgcatccacgcgtgacgtagcttggatcctctagagcggccgccctatgtgtttgtggtctcttattttctattttgtggtggtttctacccgatcaagaattattgttctacagcacttttctatgccatgaggagcgatgatttctcgtcattgtgtgggcctgtgatcnangaagacaagcaaataagcgttcgtaaaccatttttgagggggggggctattacaagagaatgcatcttgtggaattcttttattttccttaaacagaatttgagggcccgtagaataatatagaaacgagaaggggaataaacccccgctcaaaaaacaagagttaaggggtaatatcacgctatgggcctaaacctatcttgtataaaaaagaaagagaagggcaaagacacgtttggtatataaaaaggccccaccccctcttaatttttattggagagtacaaaacctacacccccggtggtttcctatgtaactgggg

SEQ ID NO: 119923 - DNA, 478 bp, Arabidopsis thaliana columbia
  unsure (1)..(478): unsure at all n locations
caggnacccggnccggaannnccggggtttgacccacgcggggcgatcacacacaaactaaaccggaagggccaccggcgacgaattttccgactaagatacatcaatcgatagaagaagaccggcttaacgttaacaaacacctgcgaaccaatactatcgagcttggacatccagagacgccgttgaaggctttttactcggggtggtcgtacactcatccccttaagcacccgtattaggtcccgaacctcacccggtgggaatgacttcgaagcatggtggaggtgggtccattatctatgtgccatgaattgggccaaggggtttttcataacccgttttggtgactcccgtgtgccgttccgcccttgggacgtgtggaacgccggttacgctcacaggaatatgcatcgtgcgttatatgttttcagctgtaggctttatttttaccttataagacttggatacttgcggg

SEQ ID NO: 119924 - DNA, 485 bp, Arabidopsis thaliana columbia
acgtcgcatcgcacgcgtacgtaagcttggatcctctagagcggtcgccctttgggggtggttctttatttttttaaaaccccatcgatgttgttggggacatcaaaagaaaatattattgcaatttggtcggaacacaacgtcagttaacatgggaaatctggcggtcgcaaatttagatattgggccgcttgctaagttttacggtaaaaaatgggtgggtctaaacggattttccatgttcaaacttttttgagcttatttcatcgggaccatcccagcgctaataagtttttgaatcttggtcataaccattggattttgcatgtgcttttgggctgcgcttggattctcttgaagatcaggcagtacctgttatattacaggatctggggggaatttatggattactgggtttgggattccctttgccggtctttattaaaattcctaagggggtagggctcccggggtggcctttttga

SEQ ID NO: 119925 - DNA, 509 bp, Arabidopsis thaliana columbia
gcgtggctacgcacgcgtacgtaagcttggatcctatagagcggtcgccctatggggtcgagttttatcgattctacaacattatttttgtttaccagatttgatagattttggaagatgacattatggtttggggggaacaaaaggtatatcatggtgatgaaagagagcatctcctatcgttaagctatgtaagactcgagatctaaaagactggggggtggaaaatactgcttggaagttttaatcacactcgtagagttgaagccatataaagggcactgccattcatatgggaacaaattaaacggggggaaaaccgcttgcgtttcacttttttccctgaaacaagtttttagcgtgcaagtctggagaaggttaaagatgaggacagggtttttttatcaggaatggatttccaacggcgcttaaaaaccttaatgggttcttccaaaaattttgaaaatctgggaaaaaaaattgtgtgggaaatttaaaaaaatgggggg

SEQ ID NO: 119926 - DNA, 474 bp, Arabidopsis thaliana columbia
  unsure (1)..(474): unsure at all n locations
cataaacttggatcctatacagcgttcgaccttttgttttggcttttcctattaaattnaanctaaccacaaattcaattaaagagtcttcttttttttctcattttcaaaacaaaaccaaatatacagagaaatatgcccaagcttttatgggcaataaccagctaaaagactaacccaaacaaattttattgggtgggggggnaaacactaccagtaccctctataatataacaatccacatttnttaggctccacctctttcttccctacataaaacacccttttataaattacttttctcaactctaactcaaatttttttaaacaaacttccttaaaacccttttcaaaaaagggacgcggtttctaaattttttacacgctccccgtgctcaaagggtggaaaaggggcctccccggaagcttctctttccacaaataaagggtagtgctcttttaaaagagcgaacg

SEQ ID NO: 119927 - DNA, 395 bp, Arabidopsis thaliana columbia
acgtcgcatcgcacgcgtacgtaagcttggatcctctagagcggccgcccttttgtttggtctctttcaccttaaaaactcctttaaaccttttttttcttaaaatgtctattttttggctcgcaaagaaaaacggcgccccataggggggattcagcgcctaaccaaaactttttatatgaacactctcctttcaaataaaaaccttccttagggggtggaataacggagggaagatttgggccaaacccacaaccgaaaaaccgcggggccgggttattccaaatggaacaaaaccccttgtgcccaatcaactttgcatactaccaatatgcgggcaaccctgacttctctccctttgtatgaacacaatatgatctttgagaaactggtta

SEQ ID NO: 119928 - DNA, 464 bp, Arabidopsis thaliana columbia
  unsure (1)..(464): unsure at all n locations
gtagaggacgggccccgcccgcgcccggggcgggccgccgcgaccgagcccgttggagatgcgcgactgcgggtgccagcgtgaccgccgcgaggcgaggaacgcccggacgcacttttttttttcgagcttgtttgggggcnaaagatcattcgagggaggggacagagagagaagaaagcccccccaggcgggggggggggggcaggggaacccccgcactagggaagacggagggtgcgagagtaggagggaggggaggcacacgcgcgcgggagcgcggccaccgactcgcgggccagagcgatacgtcagggcccgccgcccggcgcagcgcaggacaccgcgcgggatgaggggggtgcggggagattttcgcataaggtggtagtcggcggttgagggggccagagtgggcgctcggggccgatcggagccacgtcgcagtcgagcagacacacccc

SEQ ID NO: 119929 - DNA, 541 bp, Arabidopsis thaliana columbia
gaggggcagaaaaaagtttacaagggggggggggacccgcaggaaaaagaacgaaagaaagaaaaagggaagccgcgagaaggcccgcgcggaccgagagagggaggagcgggagcaacggagcacgaggaaagccgcaggcgaagaaaaggagaaggacacccgaagccaagaggcacaccgggaatttttttaaagggggggggaagaaacacagaaagccagatgaagtaaccaagagacgagccgaaggaagccgggagggggggcagcgcaccaaaaagaaaagggacagggacagaaagaaagaagagaggcgacgaccagagcgcgaagcaaacaagaaaagaggagccaaagaggagagagaggagaggaagccgcacgcgcaggaggagagcaaacgagagcacagaggaggagagagcagagaaaggaagtgaagacagagaaggaaagaagagaaaggaggacgaggacagagaggaaacgacggcgtgcagagggaagaagagcaaagagaggaacaggacgaggagaa

SEQ ID NO: 119930 - DNA, 526 bp, Arabidopsis thaliana columbia
  unsure (1)..(526): unsure at all n locations
ggtgcactactagcagactangacgtcgcatcgccgcgtacgtaagcttggatcctctagagcggccgcccttgtgtgtggggcctttttttaaatcttaaaaaaaacgggaccagattttatttcccgttaaagcatttttaaactgtttaaatttaatacacaaaaacactacaaacaaccactaggaagttgcaatgcttataagggatcactcaagtggattgatgttgggggggcaataanccaacacaccaaatatanctccggttagctggaaaattgagcaaaccaaactgggtggttaatgtcaggcatctccccaagcattttcccgttgtttctgtcttgagacaatccggtttttccgggcagggttttgggctcgctctttagacccaaatacagaagcggggagcttaaatcccatgctgtaagcaatcaacccgggggctggtatcactggtgtctttgggcttttaaaccggggggtcccaatttttttccaaaaattgggcccaaaagg

SEQ ID NO: 119931 - DNA, 472 bp, Arabidopsis thaliana columbia
acgtcgctcgccgcgtacgtaagcttggatcctctagagcggcctccctttgtgtttgggctcttttattcttcttctcctcctttttatccttactttttttttccatatctttttcttcttcaacaaaaaaaaaaacttttttttccccaattaaccacataaaaaatttttttaaaaaaaaaaaaaagcgggggcactttttttttaactggggggccaaaaaattttaagggcccttttaaccaagatttttttcctatggggggggtgtgaaaacaaatctctgctcccatgaacccaaccgcgttccgcggaaacactaacacacctagggggaaatttgtaaaaataatttttttctcctgaaaatttaaagaacgcggcccccttctttcttaaggtgctggggcctaaattttactttcaccggcttctatctttcttacccccaccaagggtactcgggaga

SEQ ID NO: 119932 - DNA, 521 bp, Arabidopsis thaliana columbia
attgatccaggtgacagtctagtagagctttgacgtcgcatgcacgcgtacgtaagcttggatcctctagagcggcctccctatgggttcggggctatttaattatcactcttttttcttttaaagagattttgcatatatttctataccagcaggggaaacaattatttggaaaacattttggtgattttattttgggacgacccctttttgtttttccaaaataactggaaaattcattgtgggggggggccacatcttctttgtacacccatttattaatgggctccgggttttaaaaatatagtttacactcgttagaaccctttttggttgacaattcccaacaaactttcggtgaagtggtggggggtcccaatacaactggggtctaaacagttgtttgcgggggtgctaaaatcccccccaagggcgtgaattttatttgggaggggcgcaaggttaaaaccaaaaaattacttttctcctggaatgggcctgccacacctaggaccccttca

SEQ ID NO: 119933 - DNA, 493 bp, Arabidopsis thaliana columbia
  unsure (1)..(493): unsure at all n locations
ccccccccccgattattantaggntgacagtctcacaagagctatgacgtcgcatcgcacgcgtacgtaagcttggatcctctagagcggtctcccttttgttttttttttgcaaatggtgtgtatatttaaattaaaattgtatttacattttttccaacttgtaaatgtttgtttctatggttaaacatttgtatatatcaaaaacagtgacaaataacaaatcaaaaatgaagaaggtgggatataaaaaggatcagggggggattcctcttcttttctggacgactacttgaactgctccaacaaaacagaaaaggatgagttccgatcaacgggggagattgctccgaccagaattcttcatcttattgttcctcttctttcttcctaacaatctaacctgtggcctctgtttcaacaccgaagggacttacttttgggtcatctttctttctgagtctatccaactattgatggaggggataactct

SEQ ID NO: 119934 - DNA, 264 bp, Arabidopsis thaliana columbia
acgtggcatcgccgcgtacgtaagcttggatcctatagagcggtctacctttgtgtttttgtttgcaaatggtgcgtatatttaaattaaacttgtatttactttttctccaacttgtaaacgtttggttctatggaaaaacatatgtctatctcaaaaacagtgacacatctcagatcaaatattaagaaggtggtatataaaaaggatctgagagtgagttcccttcttttatggacgactacttgaactgctcctacaaaa

SEQ ID NO: 119935 - DNA, 496 bp, Arabidopsis thaliana columbia
  unsure (1)..(496): unsure at all n locations
caggaacccgggcccgaattcccgggcttacccacgcgactcaagactctnnaaataaaacatnaaaccaaaaacaaaccctaatttctcaactccatttctctcttactccataaatcaatccttcacaaaatacaccaactaccattttccaatatcttaaaaaaccttttccncactacccttataatattttatttcaagtgtttttancaaacacaaacccccctattcacaaaaaatccccccccacaacccaagcattcctcatccccccgacaacgaactttccctttcaaattactaaccctccttcccccatctcacccacccacatataattcacccctttttcctccctcccccccatacataccccctctttcaaccccccctccccaaacttctctcccctcttttctaaaacttcacctaaaaaattcctccgcactatcatttctgtctaccaaaaaaccattcacctatccgcatttca

SEQ ID NO: 119936 - DNA, 483 bp, Arabidopsis thaliana columbia
  unsure (1)..(483): unsure at all n locations
gacgaggaacgcacgcgtacataagcttggatccttaagcggtccccttttggtttgggtgctcattaaanatttactttaccaaatataaattttgttcttgaaggacctaattacatgagagagcaataacaactactagcgtttaccaaaagagagagtgctcaactatttaccaaaactttttaagcctcggaaagattaaattatggggggggggganatatttattagcctattaaaagaaattttcctcatccaattaaggatcactgtttctggcttctttagtctcccactaggcaaggcttttttattcctgttgcagcctaaagaataccaaataacctgaacctcatacatgtggttggacatgagggggccatgaataaagtgatttggtgcgtcttttggaggagccgaaaaagaaacccgaggttaattggtggcaatttctcagtatggactcatataaaggtggga

SEQ ID NO: 119937 - DNA, 522 bp, Arabidopsis thaliana columbia
  unsure (1)..(522): unsure at all n locations
acgtcgcatccacgcgtacgtaagcttggatcctctagagcggcttccctttttttttttttttttttataataagaaactgttcaatattcaaatcggaagggtgaagaagagagctaaaaattctatttactattgctaaccaacaaacacattacaattttatcataatatttcaagatcctttaagtatgattctcctaatcttatgttggggtgtaccaattnatttgaaacaatgcaatcataaaaccaatgtcattttgggcaccctatttcttcttctccatgacgcagtatgatttaggccaaaaaaacttaaaactacactcatactaccctgttaatccctggatttcttgccaaattcctctaaagggaaccccctccaaaataattttttttttgacccggccaaaaaaatctgtcaattatccccaatcctttcgcttttcgcccacccatgaataatggccttctcattacggagctaaaggttcaacggaattccccctcttcttt

SEQ ID NO: 119938 - DNA, 481 bp, Arabidopsis thaliana columbia
  unsure (1)..(481): unsure at all n locations
cccccaaccaaaaaaataaaccccccccctaccccctttacccttttttttaaccatccacaccttacatccacaattatgctctcacctactctctccacaccccttcaanctcaaaaacaaccaattttttttggggtggtggtgccaancaantggggggcgcgctcaaaaaaaaaaccccccccagtgcgggtgggccccctccctccccattcctcaccccctctcccttttcccccccctacaaaccacaccgcctcctctacactccccctactactgctttcccttcttcgccaccctcccacaaacacccccggtctccagctacaggaagcgctattgacattgtgaatataaagatctacgacggccaagtctaagccttcgtcaccctgcgtcgcgcacgccgtctctccccacccaccccatgccacccatttattccattactcccatccccgccaccccctcccca

SEQ ID NO: 119939 - DNA, 486 bp, Arabidopsis thaliana columbia
  unsure (1)..(486): unsure at all n locations
acgccngcaggtaccgggccggaattcccgggtcgacccacgcgtgcgggccagggtaccttaggtaacgtgatgagtaattgcccggattacgggagtggtgcaaatcacgtcgagaatactctggttcctccgtcttggaattgttctccaaattctgcgtgtacattccaatttggggcagtagaggatgattttcttacggggggggggccatcaaactcggatggggcctcagttaaaatccctgtcgacccgttgtttctgcttgcttccttatcggttagatggttttctcatattgacgggttggttccagatgaacggtcccggaatgtggggctgcatactggaggtttcccggagttcgctcagccctgcggagagcatcttcaggcttgttagcccgcgcggtgggatctttggtctagcatgaggtgttcgcggagtcgagtgaattaggtatgcgaggtgtgtgatattcga

SEQ ID NO: 119940 - DNA, 301 bp, Arabidopsis thaliana columbia
  unsure (1)..(301): unsure at all n locations
cgtaagcttggatcctctanagcggcctccctttttgttttggttcctgcaacataanattcannattnacaaanagaataaacaacaagatgagagcttttgtctttgttgagtgagtcacaatctacaaccacagaagggacgaagctaatatgtccacacagttacaagcctaaaagaagctatacccttgtgggggtggganaaaaaatgggggggctntactaaaaaacacccccccaatgccgggggcgcggctgattttatctagtccttcccatttcccgtggattctaactc

SEQ ID NO: 119941 - DNA, 491 bp, Arabidopsis thaliana columbia
  unsure (1)..(491): unsure at all n locations
cctaagcttggatcctctagagcggtctccctttttgttttttttcttttataaaacaccatatttttcatttaactgaaaaagtatatctgtacacaaaaataaatcttaaaaatccatcgacaccaatctttgatcaccttttcttaccctttaatttagctccatctctacagcaaaacaaattctatttttaacgggtgtgacctccccnctttcccaatctcaaaaaaaaaacaacaccaccaaaagagttttccttaacccaaactgagactttatccattgctttaaatttttcaagcctttctttttaaaaacacatgacttctccacgatgctatattatttggaatattaagtttaaagaacattcaaaaggaaaacccccattttttgtattttttatttttagaaacccccatcgatcttccctccctcaccttttaatctccctttcttccccttggggaaacaccatttttcccttc

SEQ ID NO: 119942 - DNA, 650 bp, Arabidopsis thaliana columbia
  unsure (1)..(650): unsure at all n locations
ggaaaaaacacaccaaaacagaggagaaggggggaggtagtgaaacaccaattttttttttcccaccccacccttttggaaggggacacccccccggggngggncngnnnnaagaaagnagaaagttttagcaagggggggaggggggcgcccagaaaaanaaagaaagcaagaaacgagaagagaggaaggaaacccaaacgaacagcagagcagagacacacacagccaacaaacaccaagcgagcagaaaaaccacccacagaagacaaacaccgcgacacacaaaaagagaaaagcgaccagaccaaacaccaacacacacaaccaacaaaattttttctccagcgggggggaggcagaaaaagaccaatagaagcgcaacaagagaacaaccacaaaatacacaccccaccaaaaaagacgcggagaggaaggagccagacccaccgagacacacagcaagcacacaagagcagccagaagaagaccggcgacccacacacaagacgccgagacgcacgggataaagcatacccgcagagacgaacagacccgaaacaagaccccacccccggaacaagacgaaaaagaggcccggagagaagcacaacagaaaaaactaacaaaaaaagagaccaacaaaaagc

SEQ ID NO: 119943 - DNA, 155 bp, Arabidopsis thaliana columbia
  unsure (1)..(155): unsure at all n locations
gaaagcnggccacgcctgcaggnaccggnccggaatacccgggttgacccacgcgtccggacacgcgaaacgataatccattgtactggtctaagatgtcagggcgacatttaactcatgagccctccttacaagcttacttacaagaacaaaag

SEQ ID NO: 119944 - DNA, 325 bp, Arabidopsis thaliana columbia
  unsure (1)..(325): unsure at all n locations
ctaagcttggatcctatacagcggcctccctttttgtttttttttaaaaataataaaacatnanacaaatatttctttatttaagtacaccacacanttattaattacagcaccaagaaactaaaaaataccccaaatgaaaaccagagatttaggtgtatgcagagcaattaaatacaaacattgacggctttttttagggtgcgggtctaacttcccatttctcaatcccaaaaaaaaccaaatcgcgcataccaaataaacctaaaccctcaacacaaaaattatacccctttactaaaccctataaaagacctttttaatt

SEQ ID NO: 119945 - DNA, 516 bp, Arabidopsis thaliana columbia
  unsure (1)..(516): unsure at all n locations
acgtcgcatcgacgcgtacgtaagcttggatcctctagagcgggctccctttgtgtttgggttctnggaacctaatatattatcaaaccaattttcaaaaancttacaatatttnataacccaagggacataattaccaacaggaaccaaacctaaaaaaacacaaggaaaaaaaaagtgcgaaaaccaaaaaaaacaaaccatcgatttttagggcttgttgggcaacacatatggggaaacctttttaaaaaaaccccaaaaaaannnnnaaaggcggcttccgccccccgttaagtttgttagttagggacacaccaaaatttactttgacccatggggccattggcccaacaaaggatttaacaacaaacccaatcctcgtgggttttataccttcaaccacaaaaaataccgaaaaaaacagagggcgcgataaaacagattcataaatatcccccaaaaaaaaagggtgtggaactggcaccccccgcggaaaatttctgaacccggggg

SEQ ID NO: 119946 - DNA, 494 bp, Arabidopsis thaliana columbia
  unsure (1)..(494): unsure at all n locations
ggatcctatagagcggttccccttttgttttttttttttttataagttcaggccaantattnaaaccttaaaccaaaacacataagagttgtccaatttaattaacatctcattttaacaaaacaacacctaagagtcttatcaaacaggatcataaaccacaaccatgtacccctaattgttatggggtgggtcctaaaaccttccccctaatataaaaaaacaaaccccccttacaaaaaccaattctcctccctaaaaacccccattactttaccatanncccatattttaaatccaccctcntcttttcctttacttcttaagggttgggaccccccaatcataacaatcccacttgaacttccccaattttggcaaaaatttttttttttgggctaaaaatcaagtccctcattccccatattttggaatatccccccttcccccgggggtttaacattccttaaaaacccctcccatagccccaaggc

SEQ ID NO: 119947 - DNA, 518 bp, Arabidopsis thaliana columbia
  unsure (1)..(518): unsure at all n locations
nnnnnnnnnnnnnnnnnnnnnnnnnnnnnnnnnnnnnnnnnnnnnnnnnnnnnnnnnnnnnnntttatgggtttgttttttttttttttgactaaaggaaggaacataactttaaatcggatgtttgattcaacaacaaaactaaactcagatagagattatgaagggttccggaatctgaattacaaaagcaaaatttaaagctgaaaactcctacatggtcttactggggcgtaaagacatttctttttcaaggcaaacctgaaccagatggtgcagctgggctgtaaccaccaccaccacggccaaaaccacgggcacttccttggaaagatggctggtannnnnnnnnnnnnnnnnnnnnnnnnnnnnnnnnnnnnnnnnnnnnnnnnnnnnnnnnnnnnnnnnnnnnnnnnnnnnnnnnnnnnnnnnnnnnnnnnnnnnnnactacagcactgcacgggtcgatacgcacagcggctagtatacatcgttaacgggtaggactactggggtat

SEQ ID NO: 119948 - DNA, 530 bp, Arabidopsis thaliana columbia
taggtgcaacttagaagatctatgacgtcgcatgcacgcgtacgtaagcttggatcctctagagcggccgcttttttgttttttttttttttttttttttttagagaaaaacctttacttactctaaatgtcatcgactcattgaaacacttggttcttacaaaaaagtaatcttgcccaatttctcgtttggttcgaatcttgaaaaaacacccttgaatattcctctcagtttagcgaagcagatgtcatcaaagtttccttgccgatctggcatgatactcatgtttcaggaggttggctcttaacagcatcgccctgacatctctatcgaattcgtttcccatctgaagtaccttttggaaagttgcattcctctgatccgcgtgtcttgcatagaggattctgttgtgtgaatcaatccttgcctgaatctggttgtctgagatcaaggcttcaagttctttctctaggccagagacgctagtcttgaatgcatccgccatcctgctcaatcaacagagacaaat

SEQ ID NO: 119949 - DNA, 440 bp, Arabidopsis thaliana columbia
taggtacaactatagaagagttatgacgtcgcatgcacgcgtacgtaagcttggatcctctagagcggtcgctttatggttttggtttatttttttttttttaacaaaaatccatcagaaattagaacacactaaaagatatcagtgcaaagacaaaacacaacaaccagacagaaacacatgaacatataaacatctcatgtttatctactaactgaatccatacatatatgtagatggggaggaaagtatcgtaagcacaaacacaagaaactggtaagagaaccactaatcactgagttgcagaaatcccaaactcgggaagggtccaaccattgtccatggcatgactagcatacagctcaaacttctctttcgcgttcggatatcaagcgacaaggcatcgaggctgtcgttaacacgaccaaaccctttcgtca

SEQ ID NO: 119950 - DNA, 505 bp, Arabidopsis thaliana columbia
tatagcagagttatgacgtcgcctgcacgcgtacgtaagcttggatcctctagagcggccgctctttttgtttttttttttttttttttttttttttgggtgaaaggaacacaatgaggtatatatctcttccattgcttttttttcttttgtttagacttttttttctttatctttgggggcaggtcttttctttttttagggaagggaaaaaagggtttttaccgagtgctcacccccttcttgagggtggtcataagggagccatgagcccaatgggggggccccccccaactttttttcattttgcatttggaaaaaaaaaattttctttctcaggggaagaaagttctttaatcccaatttaaaaaggaaccccccttggcctggcaaattggtggggctcatctgggaccaacaactaatatctagggccgcgtgaagcaatccggagtcaccccaatttccaaggggttcccattggggcgtcttgcaaaaaaaaaaa

SEQ ID NO: 119951 - DNA, 527 bp, Arabidopsis thaliana columbia
  unsure (1)..(527): unsure at all n locations
ttaggacnnnnnnnnnnnnnnnnnnnnnnnnnnnnnnnnnnnnnnnnnnnnnnnnnnnnnnnnnnnnnnnnnnnnctttgtgttttttttttagtgcaaaacatttcatatattgtagccggatacaaaatttaacaaagccaaaattagcattacaataacactctaccaataagcaacgatcgatccggtgtttagaaatcggacactcattggtttctcttattatattttaataggggccgttagtcttttctttattttagactgattcattggtgttaggcctcgagatcacaacacttgcatcatttgtgtccatttttgcatttgcttttgatgggagcacaatttgtggtgtactaagtggtagctccttgtgcatgtctgaaaatgatgaagatggttcgtctttgctttttccccacaaaaccgaatagagtccaagaactatcactattgctccaagaatccttccaaggaacataacctcagcaagaattatagaccccaagatcgcaacaatg

SEQ ID NO: 119952 - DNA, 540 bp, Arabidopsis thaliana columbia
  unsure (1)..(540): unsure at all n locations
nnnnnnnnnnnnnnnnnnnnnnnnnnnnnnnnnnnnnnnnnnnnnnnnnnnnnnnnnnnnnnnnnnnnnnnnctttgtgtttttttttggttgtgaaccatatcctcttataatgtagatgagactgtatcctttgtgaacacgatcattgtttttttgcactgcataaacgcagttgattccgttttggatgataccttctgcttctcagggataaaaggatactagtctaaactttatgccttccatctactgtaacaactatttcacatgttggtctctcccttgatgctgaagactcattgcagacctgatgaacagtccttgaatcaagaggaattgatcttctgaccatagcccttagcactggagatgctccatcataatccttagtcgtgcagaaggcataagccaccatgtcgaatgttggctcatgcggatggcaaccactcctaatcatgctcttgtacagttgaagaccacggtctgcattcactctaacgcactggaccatccttagcgcacacaaggatgactagt

SEQ ID NO: 119953 - DNA, 444 bp, Arabidopsis thaliana columbia
gctgggatcctatagagcggttgcccttggggtttgttccttttttaagaacaagcacgaagctgtacgagtaggaaaatttgtatgcttccttacaacgagagcaggggggtggtggccagtaaatgagatcaggtggcttcggctagtttggcagagggtcagtgctgatgtgaggggagagagaagctggtttttttttttggggggggggggccgcacgcccgtcatgcggagaaatgggtttcgacaatgggcgccaccgatcccgtatggtgggttatagagcgagggatgagttacacggcgtttatggggatgggtgaggtgatggtagtaaggggtgtatcgctcgattcggtggagtgggaggtgtaagttagggcggtgacgtggttcgtagtatgagcgtattgttagtatctgctcgtacgggctatggcg

SEQ ID NO: 119954 - DNA, 529 bp, Arabidopsis thaliana columbia
ctatagaagactatgacgtcgcatgcacgcgtacgtaagcttggatcctctagagcggccgccctttgtgtttgttctttttttttttgttactttttatttcttgctgtactgatcagaagaaaaaactttgaaggaggtaaaaaaggaacatcctttatttaaatcgccaaggggtgataagaccgctggattgggaacattgcatgttcccataaaagcttttcccctataacccacacccttatccataagggtgctgggcacatgggcctttttttaggggagcaccgacaagaaaaaaacctgattgcaacttgtggattggggaaaatgggccccatatggactccattctgaataaccaaaagacccttttttccatggaacccaaggacctttgtaccgatttttttaagcgcaaaatgttccccagcaagaattcacaacgggtgacacggtctctgtgttgttttgaacattgacacagttcccacttcaggttaaagaccggaagttttttcttttc

SEQ ID NO: 119955 - DNA, 531 bp, Arabidopsis thaliana columbia
  unsure (1)..(531): unsure at all n locations
aggtnnnnnnnnnnnnnnnnnnnnnnnnnnnnnnnnnnnnnnnnnnnnnnnnnnnnnnnnnnnnnnnnnnnctttgggtttgtttttttttttttatattatttttttttttattgattttttttttgtttttttgttattttttttttttaaaaaaatttttttgattttgacccttaaaaggacccttgtaaaaaaagaaaaaatctccccgaaaagattacacggtttggggggttttaaaaaaatattttgtgttgttagaataatattgaacaaagggaccttgggggggaggtggtttccaaagggtgttttcacgtttatttgtgccaacgtgtgggggggggagataaaaaccacagtggctgggtgcgaaggaaactttaaagggggatcttgttttggaatggaaaaacctattttaaaaactgaggttgccccgttttagaaaaaaggccttggatccccaagaggggtttttaggacaccagttttgccaccggggaaggggggcacacctttgtgttt

SEQ ID NO: 119956 - DNA, 408 bp, Arabidopsis thaliana columbia
actatagaagagctatgacgtcgcactgccgcgtacgtaagcttggatcctctagagcggccgccctttgggtttttttttttttagcaacttattgtttgtagatgaacagacaaagcaaaagatccaattgacttcagaatggaaaaacagctctttaaacaatggctcggagcagggtgagagaggatccagctgtttcctaccaagaacttcggtgcttaagcctatctgagggagaccagagaacatttcgttagaccttgaatgcacgaatctttgggtggcctatagcttgctcaaactagcttcccttatgcctaacatatggcttagggatacatgtgggcacaccaggagcaggttctaaatgcttgactgcgtcacgcgagctctttggacctctaa

SEQ ID NO: 119957 - DNA, 540 bp, Arabidopsis thaliana columbia
  unsure (1)..(540): unsure at all n locations
aggtcnnnnnnnnnnnnnnnnnnnnnnnnnnnnnnnnnnnnnnnnnnnnnnnnnnnnnnnnnnnnnnnnnnctttgggtttgtttttttttttttttttttttattttactttgttttttttgaggagcgaaagagaaacttgtcattactcacgaaatataattgaaagcggtgtagcatatcacacttcgcaatggaagaaacaccccacacaaaaatggaaagcttaaaccaacggcggcaaaattctattttaatttttaccaaagagatcgaattccgaggctgcttgttccccttctgaatcttgtttcttcttcacatgttgcttagggggaggtgggagtttacccggaccaccttcacttgagggaggttctccagcagagaattcttcaccaccaccaccaccaacaatttcctggaatacgggggggggtggggagacaagagaaaacgaatactgaacgcccccggaggaatcagcggaaagagatacctgaacgagcttaccctggagcttgtaggtagaaaaagct

SEQ ID NO: 119958 - DNA, 306 bp, Arabidopsis thaliana columbia
acgcgcacgtgagctgggatcctatagagcggtcgaccttgggggttggcctggataaaacattatccattggctgaaagggtgcaaagggtctgaagtatagagccaccattgacgtgtacaaatagaaatgaagcagcgaaacatggttagaaccatggtaaatcataacgagagcggaggtggtgaggcgtttttttttttggggggggaggcgggactcacccgggtggagagaggaaacaaaatccctggtgaggggggggatagccttatgcccatatggtggggagaaggagagtgttg

SEQ ID NO: 119959 - DNA, 498 bp, Arabidopsis thaliana columbia
gaggaacgcacgcgtgcgtgagcttggatcctctagagcggttgcccttttgggtttttttttttataacaacgtttgatttgattagtactcctcatcacatatctgaaaaagccatctggtgaggaaagatcaattctctaacaaatgacaaacacaccaatggcgtggtgagtgtgtccacatatctgcactcatcctttttttgaaaggggcatagaagctccagtcctcgaccctaaagaacttctcattcattcttgagaacgtaaatgatcttagagtgctcccatcaggctgcacacagttatctctaatttgccttactgccatctaatcaaatcttatcgttagcattgctaccagtcacaatatattgaccacttcttcgaaacatacatgtatgctgactacataatcccttatgggtgcaaagatattttgaaagtattgcactttttgccatatccaacccggggattcagagagcagccccat

SEQ ID NO: 119960 - DNA, 472 bp, Arabidopsis thaliana columbia
cacgcctgcgtgagctgggatcctatagagcggtcgacctacgggtgtcggcctttttatcatgaaactccgaatctcacatgacactatttggtggaatcactctcgtcggacggaaaaacgaacgacccccaactttaataaccacaaggtgagaatagcacagcaccggagggtgaacgtgtgcaggccatctctaggtttcttgcggggaggggtggggaccccccccgcgcgctggcggtgggaagcagacgccccttttgtggtgggggttgtggacaatacaaaattcgcgatgttttttttttttgaaatgggaaaaaggtggtaggagtcggaataagactttaaagagaggaaagtgccgattattaatagagggtcgagggccttgtaaccggtgtttttaagggtgaaatagtggagacaaaagaggtgtatgaacgggtgaaaagggatatgtaagggt

SEQ ID NO: 119961 - DNA, 532 bp, Arabidopsis thaliana columbia
aggtacactctagaagactatgacgtcgcacgcacgcgtacgtaagcttggatcctctagagcggccgccctttggggtgttttcttttttttttttttttttttttttttcttttttcttttttttttttttcttttctttttctcaaaaaaaaaaaaccaaatctttttttggggggtgcgccccccaaataaacatttttactaaaaatgccccaaccccctggcatttttaaaggggagagggcccctctttaaaaaataaccccacattggttttttatttaaaccaatttacacccttggctttccccggggttttaacgggtttttctttaccaccggaaaccccaattccccgcgaaaaacactttcactttccggggagtaaccccctccctaaaactttttaaccttttttgctaggataaattgccccgggccggccacattttttgccccggccagattccagggacattaccgaaggggttttttacactccggtcccccggttttttccgtttcccct

SEQ ID NO: 119962 - DNA, 540 bp, Arabidopsis thaliana columbia
  unsure (1)..(540): unsure at all n locations
nnnnnnnnnnnnnnnnnnnnnnnnnnnnnnnnnnnnnnnnnnnnnnnnnnnnnnnnnnnnnnnnnnnnnnnnnctttgggtttgttttttttttttttttatacctaacattcgagaaatctcgaacatcaccgtttaaagtaaaatttaaagttacaatttaaaaataaaagaaatatataattctcaccaagcatatactaaaagcgaaaaaaaaaacgaaaattgataaatatgctgggataataaaattgaattggcagctttcaatagctttcttggctttgaagcaacacaaataacctatgcgtgttgctgttgagactttgttctcaagatacctccgaacaaaacaaaagctttaagcttaagctttcgatttggcctattatttctttctttgacggtaattaatttggtactgaacttgcgttagatgaataccacagcttcttctggcaaatcaagagcttctcattggctgatgcagactctgtttgntctttacggcaactccatctcagctctttagcaacagaa

SEQ ID NO: 119963 - DNA, 511 bp, Arabidopsis thaliana columbia
ctatagtagagttatgacgtcgcatgcacgcgtacgtaagcttggatcctctagagcggccgcccttgggtttggtttttttttattattgtttttttttcatttaatacatgttttaagatttatggaatttgtaatgttttttttttaagtttgatattgattttgttttgggggaattaaggctatacaatagggaaaattttggggggccttttttttggggggggggggcacattttggaaaagggaattttaaaaatgggtatgccccccaggggggggttgtggggcaaaaaaaacggcggggggaaccacaaaatacacaagggggggggggcgctttcccccccggggggtgttttggctccgcctccttggggggggggcgggcccccaaaaaaatttgaataaaagcctctgtgggcaccaaattgatgagtgggggaactggcgaaaaagctttttcccttacaccaggggaaagaggggaaagggggggggtttatcc

SEQ ID NO: 119964 - DNA, 480 bp, Arabidopsis thaliana columbia
cgaaagctaggatccactacagcggcctaccacggggggaagggcccccgaaactaaaccagctctgagaatgcgagacccaaggcggggcgcaaggaagccccaatacagagagaaagaaggccagagggccgattcgaacaggggagacgcgggaccacagcccaggggaacgcgcccggagaaaacaaaaaatttttttttcgaggggggggcgaaggacgcgcgcgcacaagcgcctgccaaaaagaaaagagccgcaagaccggcgcggggggagcacatcctaccgcggggagagagcgagcggaaagggaaaagggaccaagcgcgccggaaaagcggagagagacacaggcagagacacgaggcgggacacggccgcgccgagagcagcagacacacaccacaaggagcaggaagaagaagagacaggacacggggacggagcgcgcgagacacgacaagaccagcaacgaa

SEQ ID NO: 119965 - DNA, 491 bp, Arabidopsis thaliana columbia
cgccgcgtcgtaagctggatccttagagggtcgccttgggttggtctttaatcaggagccatcttattcttgctggcaggatgaggaacaagatagacattatcaacttgtgtgctgagttcatatgaagaactgcaaactgtgaggaaactctgtacattgtaagacacggttttaaaacttgtgttcgtgggggtaaaggcacagcttggacaaaatcaggagcttctgccccgcctggtgggggggtcccggcagaatctaaaccaccgtgcccaatggcatggttggggtcgatggtactagggtgaggatagtgactaccatggtggacgacagccttgcatgggggaggggaaattttggcaggatagagatgactgcaaggaggtgggcgcgtcctgtggcgccgctggctggttgccggggtggctgtgggggtggaggagaaggtgtgactgggtgagggccggggtcgacgagacgccgga

SEQ ID NO: 119966 - DNA, 523 bp, Arabidopsis thaliana columbia
taggtgcaactctagaagatctatgacgtcgcacgcacgcgtacgtaagcttggatcctctagagcggccgccctttttgtttttttttcatattccagcaaaacaatgttgcatagtatatatcatatatgtgaacattatctcattgtggcttgagattctaatctgctttttaaaattcattgcgactaacaaacatacctgacatttttcacatttgaccccacaacatttggaatgattaataatataacacaacttgcttatttatcagatcaaacctagacttctacactgatctttagcaggttaacacagttacagacacacatacataaggcaacagaaacaaaaaaaaaaatggcgagttagtcttaagtgatagagagatttctgattctactgaacaaaagggtatcgagcaacgtaaaattctcttacacgtgaagccccgtctctagcaagtataccttcaagatctccaatatttctagccagccaaatctccaagtttctctgaac

SEQ ID NO: 119967 - DNA, 539 bp, Arabidopsis thaliana columbia
  unsure (1)..(539): unsure at all n locations
nnnnnnnnnnnnnnnnnnnnnnnnnnnnnnnnnnnnnnnnnnnnnnnnnnnnnnnnnnnnnnnnnnnnnnnnnctttttgttttttttttagcaaaagaaagaacagttttatcctattgatcatactcatgttgaatacttgaatgtcaaatagcttttggattacaaattacacagttcaaacttccttatagattccatataagaaagcaaagaaattatacatacaagtaacaatgccattttcttgcaatcaccaagtactactttgggtaccaaaacatgcctttgatgccttctggatcagcctcaaaccccaagttctgatagaaatccacaacttgactatctgcaaacagagatatgttaccaatatctctttgaagaagagcccttacaagtttttcaacaagagctttacctagcccttgaccctgatattcaggatcaacaagaacatcccaaattgtagcattaaaggcatgatccgacgtcgcacgtgccataccaataagcttcttctcctgctgcttctccc

SEQ ID NO: 119968 - DNA, 484 bp, Arabidopsis thaliana columbia
ctatagtagagttatgacgtcgcatgcacgcgtacgtaagcttggatcctctagagcggccgccctttgggtttgttttttttttctttttttttattgttatctttttcctagcttttgttttttgttttcttagaaaagggacttaggaccttttatacaggaattttttcaaaaaccatgaatgaaaaaactttggggcctaacaaaaaaaagagcaattttaattggggggctgttctgcggcctccccgttaaaaaaagtggaatttccggtaacaggtgtgttttcaggggggggttttaatattttcacaccactttttgaccaccacttttactttgaattttacggagcttattgagaatttttttttttttcgacttttgagtttaaatccttttttggattattttgctttaaagaaccgggccaaaaaatttttgccatcgttgggcatggtgaaacacccccagaaggggg

SEQ ID NO: 119969 - DNA, 434 bp, Arabidopsis thaliana columbia
taggtacaactatagaagagttatgacgtcgcctgcacgcgtacgtaagcttggatcctctagagcggccgccctttgtgtttttttttttatgcatagctgataaatttatcttacccctgtatagaaaagctgctgattaatttaagggacacaaagaggccagaacaatataataaggctctatttaaaaatatccaactgtgatatgaactttgtacatagaatataaaactttggtggatgaccatatcagctcactctttaaatagagaagcttcttcttcagggatgtacttcagcggacagtcagttcctcttctgttgaggatggctgcataccttactatgtagacttatccgatcagatcgtgctggatacatccgtaaacttgaaccagcaagttcatatcctatgcccaacacactgccct

SEQ ID NO: 119970 - DNA, 508 bp, Arabidopsis thaliana columbia
atgacgtcgcctgcacgcgtacgtgagcttggatcctctagagcggccgccctttggttttactcatttcttattgatgcctatttatccatagaatcttggagcattgctcatatgatgaggagactcattgtttaattagatgaaatattggaatctgcgggcgctctcgctcatgatcgggggggcacccccccccctcaacatgttctggagagagggaagcccgatgaaaggagacagatcattgagaagttgacagggaatggtgttcagatcaaacaaaacaaatactcatctaacgccgaagagaagtgtttggaacactctgtttgttcccaaagagagttcctgattgaagacaaaatgggcaaatccgaggaagacattcacttgcttgcgaggatgaaggatcaccctgcaaatgaaaagagccatatagtcttggaaatcaataaagatcattttggggacactctggagcaaaagatgaaccttcatcttcaaa

SEQ ID NO: 119971 - DNA, 506 bp, Arabidopsis thaliana columbia
tgacgtcgcacgcacgcgtacgtaagcttggatcctctagagcggtcgccctttttttttttttttattaactcttttcgtatttttgattctctttgaaggggaaatttccccaaagagcaatttaaagttacaagaaagccgctaaaccctattaagtgaaattggatgcatattaagaaagaaagaaaaaagtgatggatcataatgagaatgggcttaagagagactcgtcaagttctttaaaacctgcgtatacaccattcggcttgttcggtggcagaactagtctcctaacctctgtcatatacctgtttgcagcgtttgcaatcttattacgtgccccttggttaagagcagctttgttctctagcgcaaactagccgactagtttcagagaagacctggttggactcgaccccattctgtctgacaatacagacattgcccattcacggagtaccactagaactgaacgaaggaggcggattcttatatttggggat

SEQ ID NO: 119972 - DNA, 513 bp, Arabidopsis thaliana columbia
tctagaagataatgacgtcgcacgcacgcgtacgtaagcttggatcctctagagcggtcgccctttgttttttttctttgttttttctatttttttttatgctgaaaaattttgaaaacaaataaggaaatgtgtggagagcgtattttacactttagtgagtgcaaattggggggaacaacacattattcatcaaaaggggaagaaaatcccacactttggtagctcggccttctaatactgatgccctttaacccgacccacaacctgtgaacttgggatctttgtagccctgactggggacaagctgctgtgatcaataacagcgacttgttcctgttgagcatattggccttggtagctgcgcaaaacatctacgatcttggttaaggccggagacaacacaaaaggggcaggtgcacctgtcccggtaccttcaaagggagggttgggtccccttgggtccctgaacatctgcctagcaactttagggggggctggtacaaatggtcc

SEQ ID NO: 119973 - DNA, 497 bp, Arabidopsis thaliana columbia
cgccgtcgtaagcttggtcctctagagcggtcgcctttggggtgttccgttagctattaactgccttacaagatcagagaatagatcaatttttaattgcgtattattattcttgttaaaactaaataccacagccccctcttactgaaaaaaatcctggaaggcatacatggtctgcggacacccttttttggagggggggggtgctcccccgctcgcggtccttgatattaaaaaaaggcctcttccttggggggggccgcgtttctctctcctcctattaccggcgcttgcccccttagccgcgccaagggggaattctttaaaagacttgttgaatgccaacttggactcctttaaccctcactccccctgactgactgaagtgctctcttttgtatgaaagctcgtgtcactctgttgccttttttgcgggtggcgcgtagcttttcgaatatgaggggaatctgtcgcccgccatgtctcacatgcccccc

SEQ ID NO: 119974 - DNA, 586 bp, Arabidopsis thaliana columbia
  unsure (1)..(586): unsure at all n locations
cacggtgagctgggatcctctancagcgtgtcgacctgtttggggggggccctaataaaatataaaacaaaacaagancaggaaaccttgcctagggagtcattgcnagagtcgaaaagcccggagagtcggcgctgcaatctggttgctagaaatggccaagcggcgggaaggaagaggggcggccggcgagtcagagagagaaagagaggcgctgttttttttggggggggtggggggacnaccnccgagccgagagggatatgcaggaataaagaaagacccccttgcgggggggaggggagaagagcgacgatgggtgcgtaatgggcatagtgcctgttgtcttgtgcgcgaggcagtcggagcatggggcacagagcgagggtccgatcatcttggtgttggcgatgtgcgcggcatgaaactgctcggactgcggtaacggtctatatcgccccgcggcgagtgcgccctcggaggaccgccgagcgccgccgcttgtcgtgcagttgcactagtgagcgctgaacggattacagggttgcggaggcggtggcgaacgtttccctgtcacagctgggcg

SEQ ID NO: 119975 - DNA, 512 bp, Arabidopsis thaliana columbia
cgcctacataagcttggatcctctaccacgttcgcccttggggttggttcctttttaactaaaacacaggaaattcaattaacatttgttcaaacaccaaaactacggtattgccctttacaacactaaaaaaagctttgacacttaagcaatttaagcaggagcaggtggctttagaaacaccgcatgaaacttttttttcggggggttgggagacaaaactccataggctctcgtcaaaaaaattccccaccggcggggggaagcattttttttccaacagggcgccctcctagttgtacaaccacgaaactagaaacatcccttttacatgccggaaagaaaccaccacctagacacccgtcgctagctccaaaagaagtccatgaccgcaaacctacaaacagactaaggttcagcatgggtacaagagtcgggcaaatcccggccttcttgaatatctcccatagtcctctcgcagacgtatatagacgcgatcgccatagagcaac

SEQ ID NO: 119976 - DNA, 537 bp, Arabidopsis thaliana columbia
  unsure (1)..(537): unsure at all n locations
gtgnnnnnnnnnnnnnnnnnnnnnnnnnnnnnnnnnnnnnnnnnnnnnnnnnnnnnnnnnnnnnnnnnnncttttttttttttttttcacaagaataacattgtttctccttatgtttgtaaacaaagatacagagagattaaagttcataaggggggggagagagagagtatacaatcagatctttattcatattcatagatttctctatcagccaactttctcatgacacgtgggagtttaacgaacaagagctccatgatcttggaagggaagctttgacttcttttctgtcaggtccaaatgactcggtgccaaatcccttcacatacacattggtaaagagctcagaaggctctggcattgggcaatcctgaaacggtacagagattttcgcataagggtctcgagtttacgctttgaaagagtaatgtaactgttggtttaccttagctttggcaatggcgtcatctacttctttttaattccctttccatatccttaggctctttctcggttgctaggtcatgagatagt

SEQ ID NO: 119977 - DNA, 531 bp, Arabidopsis thaliana columbia
agaagagctatgacgtcgcatcgccgcgtacgtaagcttggatcctctagagcggccgccctttgggttttgttttttttttttttttttttgtttttgcgaaattttttgaaataaaaaaaaaagtttgcttgaaagcagatctcatcaaggccagaggtgtttacagaggccatgtgagattggatctgcctaacaaaggaaggtccaaccaggtaagggaatctcgtgtttttgtgggggggcaaagaacaaaaccggtctgacgaggatttatatggtttaacgaaccttgtaaaaaaaacgccctcttctaaagaataaaaggctggtttgtgctatagaatagcgatgtttagattaaaaatcaaacgcctacctcttgctttccctcggaagggagttgaaaccaaagcagttttttttccccaacgttggttccgactgggcctggagcttccaaagtggggtggggaatcggccgtgtcgttcagaccaccaccggaacggggtcagagctgaggggatggg

SEQ ID NO: 119978 - DNA, 533 bp, Arabidopsis thaliana columbia
taggtacactctagaagactatgacgtcgcacgcacgcgtacgtaagcttggatcctctagagcggccgccctttgggtttttttttttttttttttttttttttttttttgtctattttttcttttttttttctttcttgtttttttgaaggcccccaaaaaaaaaattcacttgggaggggggagcaaaatttttcccaatttacaacaaacattatcccactggcttttttctttggtggttggaaaaaccctttctgtttttcgaaaaaccttcttttttcctttttccccaccttttttttttttttactccaaaccaagaactctttacaggtgcatttttgctaattccttctccagaacccccacgtggttttgattttgttttaaaacaccccaaacttttaattgttttcttagaaggccctgctaattttacccaattgtgccttggactctgggtggcctttttaacaaatcctaaacccgttgtgttactttgggctttctcaacgaaccagtaatcttt

SEQ ID NO: 119979 - DNA, 508 bp, Arabidopsis thaliana columbia
aaaaaatcaaaactaacaacattagaacaacgtttgctccttgaattatagccagcgacacttatacttaaagtcaaattgtacttttaatatctcatccatttattatatacacaaccaccctaagaacgtaaggaccgcggaccaccatttctcgtttagggggggggggcaaacaacagccagtaactaacggctaacttaaaaaaaaccccctcccttacattgtgtgagtcgcttatttatctctatgttctatcagccctcatctatctcttaatcggcctgttatgataacatattccattataatcgaatattatatttattgtttctttctatcctgagtctgccgaactagatagtttctttgttgaatatctaagagagtcgatcaataactattccgaggcatttaacccatcctactacacatattatcccggaattcgccatacgcttacactcatcattaaatgagaggtaggacatatggattctactgcct

SEQ ID NO: 119980 - DNA, 519 bp, Arabidopsis thaliana columbia
actatagcaagattatgacgtcgcctgcacgcgtacgtaagcttggatcctctagagcggccgccctttgtgttttgtttttaatctttcttcaatatttcatttaaacaactttgccttttaataataacaagaacaagagacataaaggaaactgtcctcttcagtctcaacttttataaaagacacaagacccaaaaagtagtatctgtttactagttaggagagggggtggttttcttgcggttccttggcggcttaacaaccaactcacttgaagtccaagaccggttaatctcggtagcatcctcatccgacttccagcaacatagtcgcccatcttcacccccagtccatccaaataaccctgcagctcctccatactcgcctggcatctgcagaacgctccttactacatctatgtgacctccaccaagaatagcttcagcggtaccgattgatccaggctgtttgtagttcaccggaaaataaccaacgggtcctgcgcacgttccaccg

SEQ ID NO: 119981 - DNA, 516 bp, Arabidopsis thaliana columbia
agaagagttatgacgtcgcacgcacgcgtacgtaagcttggatcctctagagcggtcgccctttgggttttttttttagccatacacagtaatagaagtcgaaagtttttggtctacataataattcaataagattccagattcttggaatgaacaagaacaaagaattagctttctcacccagaacctgattatcaatcgactacaacaatgcattataccgagggggtttgtctaagtgcgtcatcaggcagcaaaactctaaacactgcataatgatggttcaaactcttttccccttgaagtctatgaacactcccgagaccacctgccgtggtgtttggaaaagcatagaaaatccgttttattctttgatgcacaagcgccatagcacacattggacaaggctccaacaggaggaaaatgtcataaccagtgcagaggtacggcctatccattgaaggatctttaacagtctcttgtctgctggcattttggacgggtggactctgactg

SEQ ID NO: 119982 - DNA, 517 bp, Arabidopsis thaliana columbia
acgtcgcacgcacgcgtacgtgagcttggatcctctagagcggccgccctttgggtttgtttttttttttttatttctttctttttgacattttttattgttttgagttttgctgagggcagccacctagggaaagataacacaggagccctaagatgaacgcaactataacagaaacatcccctggaacaaaaggaaaaaagctcgttttttttctggggggacgccgagtgcgaaccgtgaaagcggggggtatctaccctcgggcgtggggaatactaagctaaaggagggacctagggaccacaaggataactgggtgggggaagacaaggggcatggcgacattgctgtttgatcctcggatgtaggctctaacgatgattgtgaaacacaattcaccaagagttggatccgccacgctcattaacggaacgcgagctcggattagaccgtccaaagacatgttaggaataccctatgatactagcggggcgagagtaatataacctaaaac

SEQ ID NO: 119983 - DNA, 443 bp, Arabidopsis thaliana columbia
atgacgtcgcatgcacgcgtacgtaagcttggatcctctagagcggccgccctttgggtttgtttttttttttttttttttttttttttttttatttttttttttttattttttttttgttttttttttttttttttatgtttatttttgttgagggaaaaaaccaaaatggtaaaaaaaatatgggaaaacccaaaaattaaaattttttttggggggggttggaatatactaaaaaaaactatttttataaaggtaaaaaaaaggaggggtacctttaaaaaaggaaatcatattgatgggtgccctcctaaaaaaaattttttcgtgtacaaaggggtaccctccacaaagatgtctggctaatcaaagttgcggctgtatatagcattctagcatataaatttaagaatatggttgcttcttaaaaattggtttatact

SEQ ID NO: 119984 - DNA, 512 bp, Arabidopsis thaliana columbia
gacgtcgcacgcacgcgtacgtaagcttggatcctctagagcggccgccctttgggtttgttttttttttctttattttttttattaacctattttcaccttttaaggttttttttttgtctttattgatctgagatgatgtatttgggtcagaacaagacccacaccgaaaaaggagttgcaccaactgattaaaaaaagcatgtttctcagggggtgttcgacaagaaaaacacaaacctttttttgtctagcgagaagaaggagcgctacctttaccaagctgatctgatggatgggggtggcaaaaaaaaagcttttgtgatctacgtttcattcacgcccccgaaagttgtccgcaagattcatctgcggctggttagagagctcgacaaaaaaatcactggaaaagatgtgacccctaaagcgacgagaaggatcatttctccaccaaagaaaggggagaggatacataccacgcatcagatctctgacaaaagaacattatttct

SEQ ID NO: 119985 - DNA, 482 bp, Arabidopsis thaliana columbia
ccgcgtacgtaagcttggatcctctagagcggtcgacctatctgggttcgtgctctctttggctgactctttgggctgactcacaaaaatcggtggatgatgctctatacttaccttatacgtggcctagtctgtaaaagagaggagtctagggcttgctctccggcttaccaaaagcacaaccaaggagcttatttttgtgtgggggaccagacttttcgaaggaatgatatgcactagaaaggccattcttgggatgaagcgggccaaagcctggtcaaattctttctccagatcaaatatctcctcgcgatgcctcttattcatggcttccatcttcttctcttgatcttttatcaggatgtgcctcttttccacaaactcctccatttcttttttttgaaactcgatgaagcttgacacttccttagctttctttggggaatctgcaatgctagagggattaaaggtctgctggtgtt

SEQ ID NO: 119986 - DNA, 177 bp, Arabidopsis thaliana columbia
  unsure (1)..(177): unsure at all n locations
aggaaaaacagatggaagacntgcactatgacacaaaccattattntactcgtagactggggaaaacgggttttttgggggggtgggannatccttatataggagttagaataatggtgagcatttctctgtcctttttagggatgaagaactgggacaagtttaagaggaactttc

SEQ ID NO: 119987 - DNA, 370 bp, Arabidopsis thaliana columbia
  unsure (1)..(370): unsure at all n locations
gggggggggctatatagatagggcgccagctttctaattccgacttgagatgttggggggggaagggtcggttgccccgccttcacggttaccccgtttcccgggatttctcccgttttctaacnccagggggggtgggggggcccttttaatcaacaaaatttttttntnngnacnggcgggtggaggagaaaaggaagggggcctctctcttactcttttttttggtgggcgtaataactcgctcggcacgagagctggcggtggttgggcagcgtgggtttgtttttttgcgaaggcggtctggcgcggttggcgagtttttttttttttgggggggggggtttttttttaggccttttttttaaaa

SEQ ID NO: 119988 - DNA, 390 bp, Arabidopsis thaliana columbia
  unsure (1)..(390): unsure at all n locations
gcgcgcgtgagctnggatcctctagagcgttcgctgggggggttcagaccgntgnnnnnnnnnnnnnnnnnggggagagaggngttaaattggaaaacgtgttaatttcataaactacacaacaatttgcattaaaacatgtaatgcgtctactagtgacaggggaccaacaaagctgctatagaatttttttttgggggggacacctcaaacaacggtcaaatgctcttactaaaatttcaaattctcaaactaaattttaaatttcctttcccggcgggtttaacaatgacccgacttaagaacgggtcgggcgctacggaaccaaactggcacgtggggaccttggggggacttgttttagctgatgtccactaacatcgtagtaga

SEQ ID NO: 119989 - DNA, 471 bp, Arabidopsis thaliana columbia
ctcactccactactctccatcacaacatcacaccctatacaccacctactcacactcactccacattccctcctcccatcactccacccacccaaaactcgtccacaccaccacaccccccctcctccacccttttcctcactttttctccacccccacttatccctcaatctttccccccacacatatcatacctcacttccctctcttcctcatctttcaccaaggaactcacaaccccccttctcaacaacaaacaaacatcactcatccccctcctcatcctccaactcacccaagcttccactcccccctcaatctttatccacactcttaccctccctctcccacccacacactccacccaccccctccctcctcccttattctcccgacctcacaccacacactcacatcccatcctccattaattccccacacctcacctcctcctccacccctccccacatc

SEQ ID NO: 119990 - DNA, 332 bp, Arabidopsis thaliana columbia
  unsure (1)..(332): unsure at all n locations
cacgcgtgcgtgagctgggatcctttagagcggtcgctccgggggtgagagcggntgananaanacnaaagtaaaggatctggtgcatttgttggaattagtggaacttttacacgtggacagtcaaatgttttaaaagggtaaaagaaaatcacacattctacgggatgatgtgtctgaacgattttctacatttcttgcactggtgggacaatgagttcttcagtggcgcagtggagcgtggaattccgaaccgtaagagcatccaagctatcatccatggaagacaatcgtgagcggcggcctctgagcacaaattatagatgtaaccg

SEQ ID NO: 119991 - DNA, 499 bp, Arabidopsis thaliana columbia
  unsure (1)..(499): unsure at all n locations
gaggaaaacggagccgctgctgtaacggtaaagattttcttttccccaaggggagggggcngtaaacaaaaaattcttcctcntctcttttctcttatccacttacacccaactcttcacaccctccatctatcccccaataaacttcatatccccaccgcctccaatagccagaacacattccttgtctaacgcctattctttctttttttgggggggggggggggggccttttctcccccatcttaccaccgtggggggggcggtcgcgtcgataaaaaaaaaaaaaaaatcatcccgctctgccgttctccttcagggggggtgactgcctccccgtagcgaaatctcccacgccaaaaccacgcatcagagacacccttactactggacgagtcgaggaacgccgcgtccgcggactccgcgcagccgttcggacggtcccctttcaatcatagtcggttgtccgcatcatcgctcctcaacgttatcgggacga

SEQ ID NO: 119992 - DNA, 463 bp, Arabidopsis thaliana columbia
  unsure (1)..(463): unsure at all n locations
tgcacgcgtacgtaagcttggatcctctagagcgtccgctccacggtntggggcggttaaaaatacnacaaaaacaacaatttggagttagaaaaattacaaccctttagctttacatattgtcgtaaaatgtgtggaagaaaaggaaaataactgaaccattatacttatatatcattttggattgaagcaaccttttaaacggggggtgcacatataaaccggttaaaggggaaataggcggcttacaactacatgagcatggactgggatttgggggtacttataaaatactccatgactagcaactacctcaaatttaccagacccattaccattcaaaatgtggcttctcatttcaacactaccacaataatctaccacgtacttaaggggcggctttgaaggggctgtaaaatggaacacctactggtcccaaatgagtgagctagagcaagttctc

SEQ ID NO: 119993 - DNA, 483 bp, Arabidopsis thaliana columbia
  unsure (1)..(483): unsure at all n locations
gccgcggcggagctgggatcctctagagctttcgtggtgggttaggctgtttttatattattatagaaggggatttttgttgaggaaaacgagtctgttatcataggtacacaagtgatgccgcaaagggaacatcatcttgattggtgtgaaaagctgaggttcattttccatttttttcaagagactttttaaggggggtggganagccttgttaccttgtgttggtttcacttaagcaacactggaggaaggggctggcctctcgacaaatttgctggatcccttgaaccaccttttgtttccagcttgggcttgggggatggaaagctttcctccattcacgggtggttgggtcagggtgaggcttcccaactttgagtacattagccgggtttgtgaaaacaaagaagtaatagtgggggttcccaccaatttcttgggatgataactccaaactggtagttgtggccactggctttg

SEQ ID NO: 119994 - DNA, 214 bp, Arabidopsis thaliana columbia
aaaaaattctggcctttcggggggggttttccctcccccccaagggctttcgttttcatcaacccccaccatcattttttttcctcctaatcccacggtcccgtgttccttctccaaaccttgtcaaatccttctgtaaaccgtaaaccgtcttttaaaaccccatttcctccggcctcctcccgacctttgggcctccactcctccccggccc

SEQ ID NO: 119995 - DNA, 421 bp, Arabidopsis thaliana columbia
gcacgcgtacgtaagcttggatcctctagagcgtccgctctagggtttggtgctattactacatattgagcttataaaaaccctgtcgttggttaattgtataaattctctaacaattatataaattcaaaacctgaaagattcatttttaagcgcaaatgaaaacaattggaatttcacatataccacaaaaaggtctaagaggggttgcatttttcgaaaggatcacatggagaatcgaaaaacacactccctatcccttacatacttaatagaaaaccaacagcagaccaacttcttatgtaactttgggttttctccacaatgggaagttagcagatttggcagcgagtctttaaaacttgttggataaccacgggcgggacctgctcctgtgttgccacccatcttacccattgaa

SEQ ID NO: 119996 - DNA, 484 bp, Arabidopsis thaliana columbia
  unsure (1)..(484): unsure at all n locations
gtaagctnggatcctctagagcgttcgctccantgtttagggcggtttcataatttttaaaaaagattcaagtggttacaaatccaaacggggttttgggggaaaacccaggtttttgaataatagcgggtgggaaatttcatgcttaggttttatggtcccccctaaagaccaattcaggacgcctagttgggcggggggaagccaaaccgggacatccaggggaaccggctttcccgatgatgtgaggtcttcaagtttggggacaaatgggtcgtggattacccttgggggagattgtttaagggtgacatatgcgctaagctaggagctttgggcatagagggtttaagctggaggggctaatgaggaagctctctacattaatgccggtcgctcagaggagagattgaaacggtaactggcctacctgtggcgtcatggatgttgacctaccacggggagagggcgagagattttgggt

SEQ ID NO: 119997 - DNA, 539 bp, Arabidopsis thaliana columbia
  unsure (1)..(539): unsure at all n locations
tccaataccactcacctaanggaaagctcctacccctccaggtacccctcccgaattccccgttccacccacgcgtccgggcgactacaaaaaacccccaataaattcttctcctatactactacatacgggttaagttgaaataccctctattcccataataacatcttccctttctttaaaaaaacaccttatccatctcaaaatcccttccctctctcatccctttccccgcgcgcccgancacccacccccccttcccccaaaaattctccccnntcctccttctaaaatcccccccccctttcacataacctacccttccttcacccaccctatttccctttaaaacccctaccccccccccaccctaacccccccccccccccctccccctccaccaacacaccctcattccccaaaacccccccccccctcccccctctcccctcaaaccccacccccccactcgcacctcccccccccctcctctccccctccctaacacccccccttcttctaacctcccccccctcccc

SEQ ID NO: 119998 - DNA, 297 bp, Arabidopsis thaliana columbia
gggcgtaagcctcctaaaccaaaaaggaagttggactaagagatagtaagggcgaggcagttcataattgtaagctaaagctgagtgtgagaattttgcttgcttttcatgttaataacatatagataacgtcgtgttagatatattccttcattttttgttcgtgaggggggaggcttaacaccctatagaacagagaagaaatttaatggaaaattactacaccttatatcaattacgttatatgatctacttcaagacttaatatatataataatatgaattctctatagtgag

SEQ ID NO: 119999 - DNA, 503 bp, Arabidopsis thaliana columbia
  unsure (1)..(503): unsure at all n locations
gacgtcgcctgcacgcgtacgtaagcttggatcctctagagcggtcgctttttgggtttgtgctttttttttttttttttttatattactactttttgttttttttattcttttttgtttattacttgttgggggagaaacaaccaaccgggtatttttttttcaaaaaaatttgtttttttaagaaagacaagggatttaacatttcttttcgggggggccttttgtnntttttttaaaaccaaaaaaacccttggggggacccgggggtcccccctgaaatttcggaccggtccctgggggggtaccaattttcccttttggggggtcgtttaaaccttggggaaataatgggcataggtttttcctgggggaaattggtatcccctcacaattccccaaaaaattggggcgcgaagaaaaaagggtaaaccctggggggcgcaatgagggagggacccccacttaattgggttgcactaaatggccggtttaaaggggga

SEQ ID NO: 120000 - DNA, 535 bp, Arabidopsis thaliana columbia
  unsure (1)..(535): unsure at all n locations
atgatatnnnnnnnnnnnnnnnnnnnnnnnnnnnnnnnnnnnnnnnnnnnnnnnnnnnnnnnnnnnnnnnnnnnnnnnnnnnccacgagtnncgggcacgcgtaantacaggtgnnanaagacgacagaagggtttctggaaacgtaatggtaactgaccttggcattctctaaataacaaatttcttcggagatattatctctggtgattgattccttcaaaaaaaaaaaatactctttttttgggggggggggtttatttccggggggtccaaaaaaaaaagccccctgggtgggggggccgtttaaccattcaattttcccccccggcccctgcacatacctatcttcttttgggcccccccatcgcagccccgggggcgcgtttacccgggcgggggggaaaaccctgggttccccccttaaagcccctggcgcaacccccctctttcgcgggcgggcaaaccacagaaggcccaccccgtcgcgctcccacacagcgggccatatacgtcgcgagaagggaacccccttt

SEQ ID NO: 120001 - DNA, 453 bp, Arabidopsis thaliana columbia
  unsure (1)..(453): unsure at all n locations
cgcacgcgtacgtaagcttggatcctctagagcggtcgctccagtgtttcggtgcctcttttcttactgaacgccccaataaacatatatttaaactgggggccgcatctacctgtaacgcgtgtaccaagacttgaaaacaagagcttattttaacgaataatacgatatctgactatttaaatcaggctagactttttttacaggggggtgacttncgcttggcctggaactcacaagagagcgcccacccgagagggagtaccacctcaaatttacccccggttaatggggcacagcgtctccacttggatactagttccccctcgagcctgaaattctggggagcccaccagcggggggaagtgtgggttcttccggaccttgggcttaataccaagggcttggatctacaacggccacactgggtaaagccttcaattcgtacagtac

SEQ ID NO: 120002 - DNA, 446 bp, Arabidopsis thaliana columbia
gtggagcggaggggggcggtggggggggatagaaattgcctaaggtaccaaccccggtaagtttttggggagggaagcctccacgctcctcatgtctccccgccggaattgatccaatttttacccagggggtgggtgcgcttaaaaaaaacaagcttgtgggtctcgaccacacaaggtggcaatcgtcctcgtggcctgggcctagccaggtcaacgtgcttgaaggtatgctgcgtaggttgaccttgcagccgtcgagtccttcgctatccctatctcagtggccgatgctcgttcttttttggaggggggggggtggagcacctccagtgttgccgctcaacaaaaaaatactacgcatgttgtcggtcgcggccgccgatcagagcaccacaggtacgaggtgtggcgtttgtacttgggcggtcggtgaaacgctatgt

SEQ ID NO: 120003 - DNA, 415 bp, Arabidopsis thaliana columbia
  unsure (1)..(415): unsure at all n locations
gtaagcnnggatcctctagagcgttcgctcgaagtttaggggcggntaaaanaaanananacaaacactggagggcttataaattcaaaggatggctgagttttacaacattagagaggaagagaacaacacagaaacttttgtggaaacatgattacacatgcgctaacaactttaaaatttttttaggggagtggcgtcnctcccacacaataataccacctagagaaanacttccggggaggagtaccggccaaattgccaatgcggtgactcctcccttggacacttcaccaacgcggtaacgcattcatctcggtggaaataggggcggggccatcggacttaagtccatacttggcagacgtagtggaaacaccgggtgccctggccttttttgcaggagggagcaagc

SEQ ID NO: 120004 - DNA, 369 bp, Arabidopsis thaliana columbia
ggggggggggggtagtactgccaggctacatcccactcacttaggggaagctcgtacccctgcaggtaccggtccggaattcccgggttctacccacgcgtgtcggccgggtgaatataaaaattataagaggggagaagatactcgacagaagaatcttttgggttctccttgtggaaaacaaaatagggcggcttcaggcatgccctcctttcgaagacacttgaacaccacccgtgttccacgggccgcaaaaaaactgtttttttttaggaggcagcgggggctctacctctaggcgggctccttcataaaaaaaatataccccaccgtggcggggcggagattgccactcccccgcccgcccgc

SEQ ID NO: 120005 - DNA, 610 bp, Arabidopsis thaliana columbia
  unsure (1)..(610): unsure at all n locations
ggggggtagtactgccaactccataccactgactttaggaaagctcctgcccctgcaggtaccggtcccgaattcccgggttcacccacggggggagggcgcgtgtaaataangttttnataanaccacaataagggttccgtcttccacaaaaccacagaagggttccggctctccacaaaaccaacaaaagggttccttctttctaaaacactacaagaacggttcttccttattaaaaaccaacaaatatttttcggggggggagggggcctattataacgggttcctttttataaaaaaaaccaacctaacgcgttttcttgtccgattaacaccccctctccctggccccccgttcctcaaaaacacccccccgaacgtgatccgcctgttccaaacatactccctcattgtccccgttttcctcatacaaaccatcacagcgggtgcctgtcttttaacacaactctccggatcgtgttcttttttcttatatactctccccatccggttttcttactcttcctcaccgccgctcatccgtccgcttcccttcccccttcttttctcatcccgtccactttctcccttcactcgctgctgcccc

SEQ ID NO: 120006 - DNA, 629 bp, Arabidopsis thaliana columbia
  unsure (1)..(629): unsure at all n locations
tcccggggggngggggggggggggggggggtaatactaccaaactccattctcactgactttagggaaagctgctccccctccccttcacccctcccgtaatttcccttctcgaccccggagctcagggcgggttaaattaaaactacatgagggcgggcgctcctactcctctccaccgcccccatcttctctgccctactcgtttcctccctcttaatgcgccgcccctctctatgcctattcacttcccccccccaccacgaccaactcttaacaacaaacatcttttctttttcgaaaggggagggcgntcttaatctcaggcacctncttctaaaaaaaaaacctccctcactctcaaccaccctcctcccccccccccctcaccccccccccccccccttcatccctccactcttccccacctcttttctacctctctccctcctccacctccctcacttacattctccccctcccctccttccccccccccaaccccccctccactctttcccaccttcttatctcctttctccctctctccttctacacctaccctctacctctccccatccccccactacccccctctcatctctccacaacctctccctatccatcccc

SEQ ID NO: 120007 - DNA, 492 bp, Arabidopsis thaliana columbia
gcgtgcgtaagcttggatcctttagagcggtcgcccacgggttcgagccctcgttcttactgccacaaagaagactgcgtttatgagcgagaatcaaagaacaattgtcccatttgaagtcactatgaaatacaacatggatcaaaccctatttacactatttacacacgcatggctcttaatttaaaatcattttctcggggggaaagacaaacccaaagataggtgaagatcattattcccactgtcataggataagatggacctcttattactttcgaagagccttaagaacaaccttgttggttggatgaacacccttagcagttatctacagtacaccacgagcttgggataacccttcaaaggcatgtccccatgtggacagggtgtagaacattggccaagcatgccatatatccactaccttccctaccttgctgagagcgataactttttgcaccaaaagattctgaagctttccaggatcga

SEQ ID NO: 120008 - DNA, 548 bp, Arabidopsis thaliana columbia
  unsure (1)..(548): unsure at all n locations
cagctccaatcccactcactttagggaaagctcgtacccctgccggtaccggtcccgaattcccctttcgaccccgcgttcgtcgggtaaanaaaacnacagaagggttcccctcccaaaataccaccgaagggttctaaaaaaaaaaaatttctctcctccccctttcttctctcttctttctctctcttcccccccctcccccgcccgccgcccttttagaatttcctttttttctcgggccgctggggttnaaccctctttgctttttttttataaaaaacccccttccttcttttccccggcccccttttttcccccccctttttgtccttgaaaaaccctcttctctttccccccttttatttcgcctttgccccccttcccccccttttaccctgctctgcgtantttccccatcaccccccccccccctttcctctttccccccctttctccccttcctgtattgctgttttccccccccccctttcctcctctctttctccgccctcttgtcttttattcccccccccctctcccccctc

SEQ ID NO: 120009 - DNA, 494 bp, Arabidopsis thaliana columbia
  unsure (1)..(494): unsure at all n locations
aagctnggatcctctagagcgtttgcncctggggtttagggccacatgcgaaactactactgttagcattgggcaataattcatagatcaaagggcgataacaatgtaaaagacatatacatattgggcgtgtctcgtatactactttaatgtgcaacagtgcgctctacacactatatgagttttttctgcggggggtactcggctcgccctactgaagtatatagcctgtttcgcatgagcagggcgcatatcggacttgtggttctatgtatacgactggtggcgaggaaccctgtcctttcttaggcttagaagaaaacccatttaagtcttgggcaaaagcagtaaatgtggttggagaatttcactaggttccttaacaaacttaacatgcacgactgagaatgggtgagctcataaagggctaaagttgaactttatgatgcatcgctgacttggatatatgaaactcatttgcacaattaggacaa

SEQ ID NO: 120010 - DNA, 492 bp, Arabidopsis thaliana columbia
ctatagaagactatgacgtcgcacgcacgcgtacgtaagcttggatcctctagagcggtcgccctttgtgtttgtgtttttttttttttttttttttttttttgtttttttctttttttttttttttttttttttttgttcttgagaaacaaatttccccttttttttacctaagtttttgaaactttcccccttgatcaaattttagggctccaataataactgaaaacgggggagggggaaccagaaaaaattttttaataccgattaaactttgggtgggatggggacactttttttccgaggaagggtggcggaaaaaatttgggggtgttcctaagggggtccctttttttttttaacctaaccgggcgtttttcaagctccaaaaacggttgttggtccattggggcttttttaaaaagggcttcccacaaaaacaaaaaccgggttggaacctgttttttcctaaaaaccggggaattctttttg

SEQ ID NO: 120011 - DNA, 534 bp, Arabidopsis thaliana columbia
  unsure (1)..(534): unsure at all n locations
nnnnnnnnnnnnnnnnnnnnnnnnnnnnnnnnnnnnnnnnnnnnnnnnnnnnnnnnnnnnnnnnnnnnnnnnctttgggtttttttttttttttttttttttttttttttttttgtttttgtttttttttcccctggaacccttgattggatggggaatttaacaaaatttgcccaagctaacaaaaacctttgccctattggtggctctccctctagcaatcaagtcaaaacaaaggggctctctttttgccgatccagagacaatcaatctattctaggctagcttcaaattcttgggttcgctgagaagagtcaacaaactcaccttttgtccaccaatggagcctcctattgctccttaacacacacatttaggcctttcctgccttggtttttcccaccaaggggttttggccagctccaaaccttcctccaataattggtccatatgctggaactaaaaacattttgttttttattcccatggggtttaagggaaaaaagataccaagcccattttttcctggtgccc

SEQ ID NO: 120012 - DNA, 587 bp, Arabidopsis thaliana columbia
  unsure (1)..(587): unsure at all n locations
nnnnnnnnnnnnnnnnnnnnnnnnnnnnnnnnnnnnnnnnnnnnnnnnnnnnnnnnnnnnnnnnnnnnnnnccacgggtgcgcgaagacgaaaaaagaaaatccctgaaagaggggaaggagaacaaaaatccacaaatctccgttagtatcacgatatcaactgtgggggggctttttgctggcttatgtgaattactggggttatttcctgatccttaggatttccacggtggtcccctaacaagaggagggggggcnaatctcatttctggatccaactataaactctgggttttcctatggaatgatttgagctccccactccggtgtaataatctaccgggtgtgtcccgacgaaaaccccaaaagaatgtgtcgttccttttaaagcttgtgggcccgaagttctatgcggaacctactgcccggtgctttttataattcgtttgggaagcgttcttctttggggccccctttattggaattccactctctattcaaaacagattgcctgggccttctctaacggcgggtctccaccgctgccccaaccctttcattttttaagcgccttcatggatagag

SEQ ID NO: 120013 - DNA, 541 bp, Arabidopsis thaliana columbia
  unsure (1)..(541): unsure at all n locations
caagctctaatacgactcaccttagggaaagctcgtacgcctgccggtaccggtccggaattcccgggtctacccacacgcgcagagagatttctataaancaaacttttatcatcccctgcatctgcggnaatgggtaaaggaacagggagctttggtaagaggaggaacaagtcacacaccctctgtgtgagatgtggtcccccgacctttcactccaaaaaaattttttttctgggggggcgggttatccatcctggggagaaagagacataaaactggagcgggaagcggataagatcaagccccccggacctgggacatagagtttctcccttaagaccttaaaggctcaaaactctctttaaggaaggcgcccaggcctcccaagaaagaaggtccgggcttcgccccccaagcattgatcaaggcgcggccccccttcccttgtttcctatgcagttttctttcttaatcgggtggcatacctttttggcctgggccccaccttgcggggacgccgttttggtgcagggggagc

SEQ ID NO: 120014 - DNA, 506 bp, Arabidopsis thaliana columbia
  unsure (1)..(506): unsure at all n locations
gggggaacaacaggacgcccgncggaagccgnggaccctatacttttttccgacccagggggggggtgccttcaagcaaaaccccaaccaccgcgccgttgcggttttgtagcaggcgtcgtgcaacaaccccaatgctcaaggcagtaatccacctcggccgcccagacgccagcccccgccgagaaagatatggccaggagatgcgcacgaaccgccgcggtttttttatcgggggtgtctgaggaccacacgcccccgcgttgcagcaggaaagaaaccgcctcccccgggcgggccggaggccgcatgcgcgcacaccgacagccgcgctggcccacgccgcgcctcgctggtctcgtcctgctttcgttccccgatcctgcgactagtgcgggccgtgcgtgtggctggggcgggggcgctgcgcgcgccgcccgcgtgctgcccctgcggccgcacgtgagtcccgcgcggccggcgatcctgaggcgcacattacggcc

SEQ ID NO: 120015 - DNA, 397 bp, Arabidopsis thaliana columbia
aggaaactccaccctgccgtccgtccgatttcagtttaccagcgggggttttttaaaaaaaaattaaaaaaaaaggccggttggttttctcaaacgcaacaacaaaaggggcgtctttcccttagcgaacacccttctaaacctaatcctaaccctcctcacacacccccctttttttcgggggggcgcactaccacgacccaacctaaaaaaaaaacctccgctgccaggggtttctaccccccaaaatttcttcttcacaaaaactctcctacaaaaaccttttctagtcaactctccctaacccccacccctccctcccctctccacttcgcgcacaaacccaacattgtcttcccttccaacgcaaacacatccccgcgccttctcttctccc

SEQ ID NO: 120016 - DNA, 514 bp, Arabidopsis thaliana columbia
cgcgtgcgtgagccgggatcctatacagcggttcgcctagggtgtggggcccgtttaccaaccacacacccacataaaagacattaaactgtagccctattcaacacaaaccttctcatttggcactaaatggtcctaaagtggtcccgttcttgatgtgtaactataatgtatcttaatgggaaaaaagacgcctctttttttcggggggggggcgccacccacctgtgacaaccttttgtacaaggttgacccgcagcgttggggcgtaattgtcatttttgaaaaagtagctaaccaatccttaggagcgcaaatgagttggttctgtaggcgattactgttaaaaactgagaagttgacgtatactaaggctttgtgtttacaataagacacataccgaaagaaaaaattgtgaaggacattgggtggcatctaattcaaagtagcttctttgtactgtgacagtcattcggggtgccggtacgtgaagataaattctacaactcgtttt

SEQ ID NO: 120017 - DNA, 248 bp, Arabidopsis thaliana columbia
ccccccgggcctatggggggagaaccgaaccccggcggcgtgagggagagaagtgagcctcacttttgatgcaggggggaaagccttttcttaacacatacccccgccgccgaccccggaacccacgtggcgcgcgcggccagcgtccgtctgcaaacagaactgcccagcacgaccttgcccacgccgccgcacgcgcctcgcgcggccggtcgcacgtcacgcgccgacctccgcccacgctcttt

SEQ ID NO: 120018 - DNA, 526 bp, Arabidopsis thaliana columbia
  unsure (1)..(526): unsure at all n locations
cagctctaatacgactgactataggaaagctcgtgcccctgcaggtaccggtccggaattcccgggtcnacccacgggttcgggatncttataataatactaanctttttcttgaaaaaatacctananacatctaccctnccgaaccagaatggaaaataattcttctgagggacttcaatccgggtggacctcacgagaggggaaaaattggaaaagatccatatttcctgggggggggtctcatcccttatntcccacaatgaaaaaaattnaacactcccctcgccctcactggttgtcgacatgattatccctacctggtggggcgcgcggttagaaacctccttcctttgggggatttaacagacgggcctggggcttcccttaaacaaattgtcttaaactcaaagttggggtggccggttaataacggggggcccgggcaggaactttttgcttaaaaatgctttcttttttagaaaaaggtttccggaaaaaaactcccttccaggtctggcgagag

SEQ ID NO: 120019 - DNA, 494 bp, Arabidopsis thaliana columbia
tcataagcttggatccttaagcgtttcgcctctgtttaggccctccctttacaaatgctctgataaaattgggttttaaaagtgttgactcctgaaaaactgacatggcatagatggacttaaaaggcttaaaagagacaacctctgttttttctactataagatccacaaatataaaacccctttaaggggggcgttgcactgcttgaccaaaagagtttcttcaactaatgcatctgactaaaccaaagtctgtctgagaagcatcatcaaaggccgaggttactcagaagctgactccatgttgggagtctcctcatgaaaaatgtatggtacaggagaaactagtaccccacttcctaccaccggtctcaggtgctgcacagactcataaaacgctatttttgggccacatatcacaatggcatagaactcaatggttacttttccatctcgtttacaataaactggacttattggtgggtccctgcaac

SEQ ID NO: 120020 - DNA, 365 bp, Arabidopsis thaliana columbia
  unsure (1)..(365): unsure at all n locations
agctctaatacgacttaccttaggggaaagctggtgcccctgcaggtacccgtcccgattccgggtcaccacggggggggaccgtaaaacacttntncnccaancttttttcttcctcggaacggaggagaacaccctcccatctcaatttcccttaacgcccactctaaaaaacccggcggccctctctcttctgcttcttccttcttcctctcacactccttgggggggggggggttntttctctattgggtgcaaccccacaaaaaaaaacttccggggaatttgcgcgggcgagggccttccccctgggttcctttttttgcgatctccaagcgttaaaaaaatccggggcctggagtggg

SEQ ID NO: 120021 - DNA, 178 bp, Arabidopsis thaliana columbia
ccgccgacgtaagcctgggacctctacagcgttcgcccttggggtgggtcctattaacataaaatgcagagagaagaggcgatgaagaaatagaggctacggaatagttgtcttcaccgggcgagttataagtgaaggggacggcgactaagaagtgaggagtcgatggcggcatgat

SEQ ID NO: 120022 - DNA, 516 bp, Arabidopsis thaliana columbia
  unsure (1)..(516): unsure at all n locations
tatagtagagttatgacgtcgcctgcacgcgtcntaagcttggatccttagagcggcgccttggggttgaacttatttttataattttcgacntggcctaaccaaaaaaagagcacagcgtttacatacacataactggtttgaaccttaacgtgactgctaaaggcattttctcttgggcaggactacactcagaagaggcgaggtgggttttgactatacgggggttgtcttaacacagccgaaacagtgggaatgtatgccctttggaaacgaactactatcaatgggagtgccatgaaactggcaatttttgtttataataaaaacccctatatctgggagggtgttcttggttcctcacctaacctttacctttggaagaacaccgcggcatctggtccaccaggattatgaacagccccgtcatatgtttacagatttttcaacgcggcaactctgagttttgttatagaaacccgagggaaaataagaacggggtggaaaaaaaagggg

SEQ ID NO: 120023 - DNA, 543 bp, Arabidopsis thaliana columbia
  unsure (1)..(543): unsure at all n locations
nnnnnnnnnnnnnnnnnnnnnnnnnnnnnnnnnnnnnnnnnnnnnnnnnnnnnnnnnnnnnnnnnnnnnnnnccacaggtgcgaacccaanctcaaagctgccgacttgacctctccaacgagctattcggtggcgtcaacgaagcttgcggaagaaaccttgaccggagtcgatgttgccctgttttagccgcttggctcttcgcagatcacgctcgctctgctcttcatttacggggggggggtccaacggccggaatcttctgatcccaaccaacccatgaagcctgacgactctaagaagggcgtgaacacattggaaaagggcgcttttgaccaaaccaaagaaagaccccctcagcctaattctagcttggaccccatctggggctcttgggggatttggtctccacaaaattaagtcacttttttgggccgcccgttttattgggtcctcgcgggttaaaaagcccactccgagccccggcgcgaaaaaatctgagaaaagaatgccgggaactttttttcacgcggggtggcccc

SEQ ID NO: 120024 - DNA, 260 bp, Arabidopsis thaliana columbia
ggccctgggggtggtggttttgtcacaaagaaacctatagaggaatagatcgcgaagatatattaaacaaaagcgcggacaacttcacacgccgtcggtggttattaagagttctaggcatgacggacatagtcagcaatggtaggatgtagaggggtagaggaaggaggcaccggccggagctttttttttgggagggggggggaaaacaccaacgcgcgtgagcggtggtaagcagaaaagaaaggacgcgtacatgc

SEQ ID NO: 120025 - DNA, 290 bp, Arabidopsis thaliana columbia
tgccgaacgagcacctaaactaattcttttttacataggggggagagggcttaaaaaacaaacttaattacatacatcctacgacactcactgctgatactttctctcatttcacgctatagtgtaacttcaatacgcgcaggcatcttcccactaagatttcgatagagctcagtctcgtatctaatatctgcttacttttgtttagagaggggggggacataaaattctgggctatgctataaaaaaaaaattaaacccatgcaaagaaaagagacgcggaaacgtca

SEQ ID NO: 120026 - DNA, 527 bp, Arabidopsis thaliana columbia
ctctagaagagttatgacgtggcactgccgcgtacgtaagcttggatcctctagagcggtcgccctttgggttttgtttttttttttgtgataacctcatacaagaggattatatatcagatcaaagaaaaatattgcaatcacagttgcattttccaaccaccgaggatggaaactgaaaggttttagttttgttacatagaatcagaaacacacagctttcatgagggggggggaattccataaaaggagagtttttaagcttgaagaaatagaggaaagaagtccaaaagagagataaagaggggatgaatacctttcacctgagattcctaaccatgggatggtcaactggtttgggtgattggtttaagaagaacctaaagggacccaaattttctcccaagagggaaaaattcatgccaagggaagaacccccacattccataaatgggggtgggtcaagatttaaggagaaatctaaatttgagatctaaaaaggacctaaaccaaggttgctcaagggg

SEQ ID NO: 120027 - DNA, 209 bp, Arabidopsis thaliana columbia
  unsure (1)..(209): unsure at all n locations
ttgggggggtggggggtaaactactaaggtacaaccccctgacttaggggaaagcccccacccctcctgtacccgggcagaattcctgttttnaccagggggggggccttttaaaaaaaaatatttttggtttttttcttagggcgccaaatatctggtgaatttttgtgttttctggagcagtgcttccctatggggtttctcgaatt

SEQ ID NO: 120028 - DNA, 558 bp, Arabidopsis thaliana columbia
  unsure (1)..(558): unsure at all n locations
aatacgactcaccttagggaaagctcgtacgcctgcaggtaccggtccggaattcccgggtcgacccacagatccgtgtcctctctatcanacnagatttcctcttcatctcaagagaaatggctgaatccaaggtagtggttccagagtctgtgctaaagaagatcaagaggcaagaggaatgggccttggccaagaaagatgaagctgtagctgctaataataagaggggggggggcccctaacttatcttcaaaaaaactaaacattctnccaaataatacgcttaannaagataaccccgttgatcccgattgaaggcgggaggctaagtgtgaaaggagggtttctaccgttgacccctgaggtctaagttggctctttattatttcggatccggggggtatcaatggccttggaccccaaaaaaccaaagaagattcctgcagcctcctcgcgtctgaggcacagatccttaaatggggggggtttcttaagggggaaccaagggccacacgtgaacattgcggggcccgagcttaacccattactgaactt

SEQ ID NO: 120029 - DNA, 501 bp, Arabidopsis thaliana columbia
acgcgtgcgtgagctgggatcctctagagcggtcgacctgtgggtttaagcttccgaagattactttaccggtgaaaaatgtggtcccttgttatacacactagaggcttcttatactaacatggacatattccctggattactttttggaagattttctttttgtctagatgctgcatatgatctatgcacaggcaaagagggggaccgcttcattataggcgttacttactttggcctagcggattttaaaccagcgtcaatggtggaacttgtcgagacagaggaaaagcatccaatgttaccatcatctgttgaagatcttgatggagataaagaagcttaatgatcagttgaaacttccttccacagattcaatgctctattaatagtttctgtaacactttgcaccttatcaaattttctactctcaagagccgtggtgcaagtgttcttatactgcgacgccaaatgttacgacgtcggaatttacccaacgcc

SEQ ID NO: 120030 - DNA, 485 bp, Arabidopsis thaliana columbia
  unsure (1)..(485): unsure at all n locations
aatcccactgacttttagggaaagctcggtgcccctgcaggtaccggtccggaattcccggttcgacccaggggggcggggggcgcgataataaataatccaccttggtgttgttctgatagggattttcattttccaggttgggagcgccaaatttacatggaggagagatgttgaatggaataacaccaacccaaccgggggcttgggggcctcaaaaaaatattaaaacctaatttttctttgaggggggggggggaaacantcnccgggggggcgcgcgccaataaaaaaagacccccaagttttcgcgggcggggtgcttggccacctgattagggtcttctcctaaggggcgcccggaacgttcaggggcgggggggggggcgtcgtacacattggtggggcgtggggtaaaacccttggtggggcctccacagcttacggcgggcgtgcacgacaagtgccggctggggggctggtgg

SEQ ID NO: 120031 - DNA, 400 bp, Arabidopsis thaliana columbia
  unsure (1)..(400): unsure at all n locations
aggggagattttttacagatacattaagaaaggcagatgaaagggttacccaatgtggttttggttgaaacataattggatgttgattaatttataaagcaaaaaagatttttangttttttttgggtggttgggacaaacccccctgtacattaaaacaaaaactacccaccctggggggggcgcgtaccacaatttgtttttgatcctcgccacgggcggactgataagctgttggggttatcccccaagcggcgtggactggcgagcccttgccatggtcgacccgccgcggggcaccacgctgcgtggagacgggctgttcgcgggagggcgcgccgggtccgcggccgcgatctgtgggcacgcgggctccgtgtgcgcgctgtgtgcgctgctc

SEQ ID NO: 120032 - DNA, 531 bp, Arabidopsis thaliana columbia
  unsure (1)..(531): unsure at all n locations
ctgcgtaagcttggaccctctaaagcggtcgcccctgggggtgggggtcctttcaaaaaaaaataaacaccttttaatccctgcgatgaaagatagaaaccccacacagtgtggtgatcgcaaacccacaaatcatcaggagagattgcggtaatgatcccaccccagagaatgggggcttatgtatttgtggtaaataaaaaagcacagaacaaggaaattttttatatgggggtgttggggcgnccacaagaagggggcttgtattaaaacaaaaaattacaccccgttccaccgtgttcttggcatcccttaacggatcaagcggaggtcccttccacctatccttgccccaagctttgctcccccgtggtggggcgcactcccacgaaaagaaaaatatccaccgggggcacagataagtcccgaggcgtgcggccgcatcgtataaatccttgcgaggtgcccaaccggcgggccaaagctagaagacagatgctgtggtctcccacggccaattcacggcggggg

SEQ ID NO: 120033 - DNA, 481 bp, Arabidopsis thaliana columbia
ggggggggtaatactgccaactgcaatacgactcacttagggaaagctgcgtcccctgcaggtaccggtcccgaattcccgggtctacccacgcgcggcggggtggatttaactaagggggattgtcttatgggatttccctaagttttatccaagctccccaaaggagtacgggaggcctgtggataaagagggtcttggcctcccactgcttggggaccgtcaatatctccttacccctgatgaggaaaattgggcttttctttaaagaccatttgtttgaaaaaggggggagggagtacctcaatctgcggaccccataaagaataacactccacccaaaaggttgtgcaatcgtgggaatggaggcctctgcccgggagcgtgccgtgtagcggcgagggtcgcttgaggcacctctgtttcgatcacgacagcgcagacgctcgtggtcggccttcttccttcaccgagcgcgttg

SEQ ID NO: 120034 - DNA, 563 bp, Arabidopsis thaliana columbia
  unsure (1)..(563): unsure at all n locations
caagctccaatacgactcaccttagggaaagctgctacgcctgcaggtacccgtccggaattcccgggtctacccacgcgctgcggggacgcctaaattcccancttcctccttttcgtttgccactttttgatcaaacgaaactccaaaacacanacccatgcccccccaatttttgacccgaaccagatccgtcgatgtgttccctccctgttaaccggacaaagaactgggatttctccaggggggggagctccaaaaaatcgggccctctctatactaaaaccaaaaaaaaatcctgataaagacttttcgaaaacaaacccgcacaaaaatggaaacgtcttttcttctccccctgaaaagctgaccgttttaaaaatttcctcaatctaagggtacccccggcttccctcctccctcccacctctccccacttcaagcctttcaacgacccaccacaaaccccttaaaaaacgtaaaaactttttcactctccctctctcttccttcttcgtcgttccatctacacttctcatattcctcagtcctaacatctttac

SEQ ID NO: 120035 - DNA, 573 bp, Arabidopsis thaliana columbia
cacctacctccgcccccccggggggaactccggggacttcccggggggctccccggggggccccgccccggggaacggcgagaggcctggggtttgccgcggcaggcgagcgccggtgtctcggcgcgaactcgacatgccccgccttaaatagtccctcacccgcgcttgagcgcgagcgcggcttatttgttgggcgcagtccacaagatgacgcttaatgaatttgttttgattctcggatacatcggctctagccggaggagtagcgatcttgcggtttactggcctagttgtgatgtgcggtgcgaccggaggtatcacctactttctgtttcgtaggcgcggctctagaccatagctatggactctattctatttgatgtcgctcgccgccgatgcctcacgtccgttccgttgcttgcggaacttcagtacgttctagatctgcttgtcagcagtcgtaggtcgattgcggtgagtaatatgacgaccaaggcgctgcagcgctataggcgagtctgtacctatcttagagttctgttatcctctttcctgctagcaatgaccgtt

SEQ ID NO: 120036 - DNA, 615 bp, Arabidopsis thaliana columbia
ggggggggggtagtaactgctcaagcaacaataccactgaccttagggaaagctgcgacccctgcaggtaccgctcccgaatttccggttttacccaggggggggagaccttaaaaagagacctataccttaaggcccaaacaaacccgaagggaaatctatatcatacctcaaaaggtaaggggcacactgaagaaacaaatctaactcggcgggggggaggccgcaaacacacatcttcgtgcctgaacttcttcggagggggaggggattattcccgaggggtttatcgaaaaaaaacatgtccctttctctcgcggtggcctcctggacaacatgtactgccacacgaacccttctaatctcagcgttgcgacgcgcgccccccaacgcggcaccgatcctcggcttgctgccccttcgatgcacgcaatcccatacgtacgggcctgcggcgcgcgcaccgacccatacagtctccactaccctgcacgccactgtccccctccccgtcctatccttcctacacacccaccgcccgccccgctatcgccacaccacacgtgttcaaacctcctctcctcgcccagatagccgacatcttcacgttagctc

SEQ ID NO: 120037 - DNA, 402 bp, Arabidopsis thaliana columbia
  unsure (1)..(402): unsure at all n locations
acccccactgacgttgnagggaaaggtacgtgccgccctgcaggtacccgggcccggaattcccctgtttctcccagaggcgcggggctctttaaaaacataaaatatccttgacggggtgtgacctcaacaataagatcgtccaacattgtttggcatttaattaacggcgtgaaaccccgtgtttttcctgacgtgtacctaatcgtgcattttgcccagaagcacttgcatttttccgtcatatagtaccttgtttttttcgggggagggtgggctcccgatacaacccgaaacgcgctcttcctataaaatgagcccccctagaacagggtgccggtatcagcgactaatacacataaagtctttctttgcgccctacctggctcgcgggtggatcgt

SEQ ID NO: 120038 - DNA, 339 bp, Arabidopsis thaliana columbia
gggaacccccgcgagcggacttaagggtcgccgggggggctaaaggactggagggggggcgcctaatcgcgacccgcgaaaccaagaattggggccgcgggagaacagggggatgcaaaataaaagagaaggattttttgggggggcgaaagaggaaaggtaagtgggcacggatgaaggaggaaggagggggatgcagcccaggagaggggtggcgggggaggaaagaaagagaaaggcgagccaaacccagcgagacgtaaacgtagagggacacgacgagcgagccggccctacaccgagagaggaagagtatcggagacaagcacgcaccgatca

SEQ ID NO: 120039 - DNA, 487 bp, Arabidopsis thaliana columbia
gcgcgcgtgagctgggatcctttagagcggttcgccgggggtttaggcttttgagataaactgatattatcataagtgataatctgatgtcagagaatccattccagaaatatggaatacgaattgtgtccttcacagtcacactataccattagggaaagagagaatcttaaaagaattcttagaaacattttttggggggggaggaaaagcccaaggagattgatttccttaagcatttcttcttggggggggcagttctctttcactagccagatgctctcctttgacaggcgtcggggacccaatttttatgtggccgaacatgctgatttttgggtagcttgagatgttcccggaccttggtcgaattggtggtggtgatttgttggggctaaggtggtgctggggttctggaagtgtttggttaatgtttgtggcatagagaagaggacttgcttaacgtgtaggtggggtggggctggtt

SEQ ID NO: 120040 - DNA, 490 bp, Arabidopsis thaliana columbia
cagctacaatacgactcactttagggaaagctcgtacgcctgcaggtaccggtccggaattcccgggtcgacccacggctccggccaatcgggggaagaaaaaaattcaacggcccgtctggttactgtcttgcttgcttccgacgatctatcttccccgagtagatttgaaatggctgctcctcctgctagagctcgtgctgattacgattacctcattaaacttctgctgatcggaggcagcggtgttggtaagagttgccttctcttacatttctcagatggctcgtttaccaccagtttcattacaactattgggattgattttaagatacggactattgagctcgatgggaagagaattaagctgcaaatctgggatactgccggacaggagcggttccgcacaatcacaactgcgtactaccggggagccatggggattttgcttgtgtatgatgggactgatgaatcatctttcaacaacatg

SEQ ID NO: 120041 - DNA, 530 bp, Arabidopsis thaliana columbia
cagctacaatacgactgactttagggaaagctcgtgcgcctgcaggtaccggtccggaattcccgggtcgacccacagatacaggtcttttaatatttatttatggaggaggagaggagactgtcttaatcgtttccgggtctcttattctgatccattcttctctcaagatctaagatttacctgttttgaaggggagaagaaattagttgtctcaacaaaccccactataaaggggggggagtctttcttcttaaacccttcaaaatacaaaccccacctcctaaaaatttctcctttaaacgacacaaaaccttatttaaagttaaagaaaactctcctggagataagccttccccagtccttatcaccctgtggtaacaaatgcaggttcctctatttgcggggggtgtaaggcaaagggcttcccttggcaaggagtttcctgggtagttggcacccctatttgtcgggttaagcctcggaactaccagggcgcgcgttggctttgtggagaaaaacgttatcct

SEQ ID NO: 120042 - DNA, 496 bp, Arabidopsis thaliana columbia
  unsure (1)..(496): unsure at all n locations
gcgtgagcngggatcctctagagcgtcgcccgcggggttaagcgngnattactnaaccatgtcatataaatgagataaataaatacatgacgacatgtcaacatgtaaaataaaaaggatttcattcactaggttcagaaaaccgtttgtttggccttcaaaggatcgaactggtcttgcttgctttgtatgcggggggagccggcactccaggaaatgcagcagcaggtactgaagcaataacggccgaggtggtatgatcctttagtgctgaaactacgcagatcgtatcaaatctgtttcgatgccgatatatatttgaagccaaaagttttccaacaatcatatgggctttgtggaagatatctttaacatgattatcatcacccgaagcatctgtaaatttggagatcaaatcttcagtcacaagctcaactccacgttctttagctttcattgcggggtgccacgatgtagagaaaccgtaaaccctgta

SEQ ID NO: 120043 - DNA, 495 bp, Arabidopsis thaliana columbia
  unsure (1)..(495): unsure at all n locations
agctccaataccactcaccttanggaaagctggtgcccctgcaggtaccggtcccgaattcccggctcacccacggcgcccgaagancaatataacaacaannacaanaaaacataaaaaaaaccctggctgccttgtcggataagttagcggatccctaccacaaccgaaggcccaaatatcccatcgattggttccaccaaacttgctgctcaaaccgggtatcttttatgggggggggggtttttttactggcaaccctaaaaaaaaaaatttctccttcaaatttttcaaaaaatcccccccccctatttaaccaaatccactttaaaccacccctcaaaccccaaaacctcctttcccctcccccctccacaaaaatcttcccaaaacacatggcgccctttaccgccccaaaaactctccctccccccaagccggcccccaccgcccctccacttcctttcatccccccccctcctaccacctcccaca

SEQ ID NO: 120044 - DNA, 249 bp, Arabidopsis thaliana columbia
gggggggcggcaccctcttccctttccaaaaaacccaaaaaaaatcctacctccacccgtcaatggggttcccgtcgcccacaccgcggacaaagctgggacactcactaactacccactccctacacgggcgcgtgcgggtccgcgcggatctcaacaaactctgccaccccttccgaagcacggcgccggttaccgctcctcgtctaaatgcgccccgctccaggccaatgttgaacgagcgccccc

SEQ ID NO: 120045 - DNA, 599 bp, Arabidopsis thaliana columbia
  unsure (1)..(599): unsure at all n locations
acccgcgcggcggcccgcgggggggcgggcacttaacgaggtctgactctcanaatcatttatgagcgagccccgcacgccgtacgtgagccttggatcctctagcagcggtcgcccttgggggtggttttttttttaaaaaaaactgcatgggggtgtagaagaacaagggctatggcaacacaaaatgggcgcctctaataaggtgacgggaccaaataccggtcacctaggagtgtattctgcggggacaacctcaggacccagcggcccttttttgatggggggggggggcacaccaccacccctgcaagagagagtgtgccccaccccctcagcacgggcggcgtggggagccacccggagtagcgggtccgcttgaacgacctgggcctgcacccggccggagggccgacgcaagcaagccgcggcccaggccaccgacccggggacgccactggaagggcgaccccagtcactgctgttcggtacgaccgtcgtcggttggacgcgtccgccataaaccgagaggccccctacgagggtgccccggactgactgtgcttcaggcggggaggatgggaagtgtcggtagccga

SEQ ID NO: 120046 - DNA, 299 bp, Arabidopsis thaliana columbia
  unsure (1)..(299): unsure at all n locations
gggggggggggtagtactgcccactgccatacgactgacttaaggaagctgggcccctgcggtcccgtcccgaatccccgggtccccacggggggggggatataaataaancancacgggaagttcttgatgtcctctggtttacctccctaccctgggctgtgcgcgaaattttgaaaaaaatgaaacctaaaaccacttataaggagcggaattgtgcgggaaggagggcctcttcccatttaattcctttaagggggggggggggcctctaacaactcacgcgtttcccacaaaaa

SEQ ID NO: 120047 - DNA, 521 bp, Arabidopsis thaliana columbia
  unsure (1)..(521): unsure at all n locations
atgacgtcgcatgcacgcgtaccgtagcttggatcctctagagcggccgcccttcgggttttttttttttttttttttttttttatatttatctttctttattcttgtttttttttttttcttttcattataggcaaatttgtggagatgtatattttatattcttatgagaaccnnggcgggggggccaaaaaggcttaaaaaaaaaaaatatctacggggggggttcaagagggcccaccccaaaaaaaaaattctcgcttttttttaccgccccagggggggccacccccccccacgatttagggggcggagaaataacaccccccactttttgtggaaccctggaaaaaaatttttgcttccgaggaaacaaagcaccccccagaagcccggggatccccccccctttattcggaaaaccacccccccccagaaaaaaaccgcgaaaaaaatttcctccttcctccctacaagggggggggaaaaaccagtgggcttgaaaaaaaaaaaaaaaaaaa

SEQ ID NO: 120048 - DNA, 523 bp, Arabidopsis thaliana columbia
  unsure (1)..(523): unsure at all n locations
cagctacaatacgactcaccttagggaaagctggtacgcctgcaggtaccggtccggaattcccgggtcgacccacgcgtcncggggacgcgtagattanntntaaataaaatcgggcatgagtactgtaatcttcgtttccttttcattagagggaaatatggtggagatgtataaaagagatcctcatgagaacccagacattaaacctataaggggtggtgtcatatgtccgggggtggggggtgaanatctaggacttcnaaaagttaataatgggggatggctacggggtaagggtctataaccgggtgggacgattcaaggaaagggagaaatggcttgggctactggtggagaagccctgaaagggggtggggggttttgaggaaccaaagcagagggcttaatatcccctatggaggggggggagggcaggaacaaaggtaggggtgggatgccaacactggtgtgggggggcctgggcccaaaggcggggggtggcttatggataaaaaaggct

SEQ ID NO: 120049 - DNA, 434 bp, Arabidopsis thaliana columbia
  unsure (1)..(434): unsure at all n locations
caagctacaatacgactgactttagggaaagctcgtacccctgcaggtacccgtccggaattcccgggtccacccacggtgcgggagattgaaattctcngttttccattcaagaaagacaccggtgacacaagggaaactccagccctcgatgtgtgcaagggtctttttaaaagacaaagcaagggtaatcctttaccacccacaagggactgaggatcacactcattttttttgggggggggacaacttctagtggggaccctcctaaaaaattggcccccaatgggcccaacacccgcgacccccgtccccgtttcttgggacccttacaaagcacttaagggccctcactgttttctcactttctaccgagtggcatcacgttaacacccttgattcccaagacatttttcaccccatgcagaaaccct

SEQ ID NO: 120050 - DNA, 496 bp, Arabidopsis thaliana columbia
cacgcgtacgtaagcttggatcctctagagcggtcgccctttgggtttgtgcttttaaacaaatgccaatcattgcctgatcaagaaaacagaaagaaaaaaaactttccttgcgtaaaactctacctgattattaacaatatcagaaatcaaagaagaaaagtaactttgaaattagaaacgcgtagattctttaaccctagggggcaatgcttcaaatggctaagtttctgctacttctgccttctcactctttcttcttactctaccaaccgcagttgttccgcgtattctttcttcgcaagtctatcactccgttactcttccctcatgatatcatcaaagttggcttccatgcacctatcatcatagtcttcgtcacgccctgcaaaacgatcagtcttgcacatctttctaaccatttgcgaggccaaatcatcttctgacattttcacaggctttgtcttcactcgcttcaatggtggtttgctaatca

SEQ ID NO: 120051 - DNA, 544 bp, Arabidopsis thaliana columbia
gaaaaacaaacccctccggaagagtacaaataaacattttttttcaaaggaggtaatccctttttaaaaaaatttattactaataaattatattatacttatgataatataatattatctttataatttttatttaacaagtaattataaaatactagaatcattaataaaattatgttatgtaacttaaattacacacaaaacaactttttttttagagaagttgtgaaaacaacaaataataataataataattaaaaaaaaacccccaaaatatatatatttataactatttttaaatttattatagaattatatagatttttataccagtataataaaatttctctaaactaaatataaattagactatgacaaatcagaaataactaaaggaaaattgatacatcatataaataattaaaatgattataatctaatcttcataataaatatataaagtagaaattgaaaacattaaactaataagaaaaacaagaatagccgataatacttcatatatcaggtaacatagtatattgtg

SEQ ID NO: 120052 - DNA, 510 bp, Arabidopsis thaliana columbia
  unsure (1)..(510): unsure at all n locations
tcttacgggggggngggggggggggggggtaggactggggggtacaacccccggactaagggaaagaccggcccccccatgtacccggcccgaattccctttcgaccagagaggaggccgtttaaaaaaaaatttaaagggccgaggcgagaggattcctctccttaactccgttcccgggcctcctaatcctcacccttcctcttctgaaaaaccaagaccccctgactctgaaccggcagaacaaatctcgcccccacacaaccctttttcttaggggttgattggagacnccaccctctccagaagagcctcacaaaaaaaacacaccccccccccctcgttggagaggttcggccgcgctcccgcatatacttggttaccttcactccagttgcgccacataatactacgtgcgcggcagcatacagcaatcgcgatttacgctcggagcgcgtggctgcgcgctcaatccccaccgccatctcgttcgttgtgcgtgctgcgatc

SEQ ID NO: 120053 - DNA, 344 bp, Arabidopsis thaliana columbia
  unsure (1)..(344): unsure at all n locations
aaagaaggaaacaacggcgggaaggggggagacaaaaaganngagggaaacgaaggggcaccnacagncgcaagggggangcaagggggattttcnncgtttttttgggggggggaanncccacccagggggaaacccaagagagaagcctcgccggcggggggggggaggtggaacacttattgaagcggtcagggggtgtcacgagcaggaagggctggggtggtttgtgggagagtgtttaatcacgtggggggcggggggtacgccaggggggtngggcgggggagagctagtgctggagtagggggcggcgtaagggtgggggggggnggagcgtgggg

SEQ ID NO: 120054 - DNA, 366 bp, Arabidopsis thaliana columbia
  unsure (1)..(366): unsure at all n locations
ttcctataaaaactattaaccttcccacctcttctttttaaattttctacaaaacaaacacacacaccttttctatctctctttcatcattcctcacaccaccctcataattcctcactttcttcttcacacaactcatttctttttttgcagagggaggaattttttttntaaccccctcctncttcataaataaaaaaaaacacctacaatcctcctcttcctctcttctccccccccctaccttctccctattctttccctctcttcccccctccttctacaataccctctcatccctaccctacattctttctctatcaaccatatccactcaccactccctcaaataaacccactcctcca

SEQ ID NO: 120055 - DNA, 489 bp, Arabidopsis thaliana columbia
gcacgcgtacgtaagcttggatcctctagagcggtcgccctttgggtttggttcttttttaaaaaaaaagccaacggtggggatgcgataacatcatgaagcctcacatagcagaataaaaaacttacgccacagcgataaagatggtctaccaacgtgcctaaaccctaacttccttaccagccataatcattattagattgcaggggtgagaaccagccatgcttaattagacagggccacgccacgataatcgatgaggcgagaccaacattccttggaacagccttggactttaacggatccttcatgtccatagacagcttgagaactttaaggagcataactggcaagatccctttaccgattcaaaattgtgaattagtgggccaatccagaggtgaacaggagctacacccattggtttaccgggacaaaccagacgaccggatcccaatggagccaatctaagatccgagcgcatgatgc

SEQ ID NO: 120056 - DNA, 640 bp, Arabidopsis thaliana columbia
ggggggtattactcccccaacttcaataccacttacttctacggaaacctcctcccccctcccactaccccctccccaatttcccgctttcacccacggggccagtctttctttaactaaactcacaccctttttttctcctaacataactaacccctaatattttctcacaacccttaacctccactcctctaacacccttacccccaaacccccctcaacccttttccttaccccccccccttccaaccccccctctttccacgacgggggccctctcacaatatctccacccctctcttaaacaaaaaaccactgtctctcctacaaacagtttcctgccctctcctcctccctacaccccctctctctccctctctttttccctcctcccctcccacgcaacacttcacccacctataccctcctctcgtctctctctctcaaccacccccccctccccttcccacctaatcgagccatcttcccccctcgccctcccccccctcccctccctcccccccccactcccacccaccccccacccccctcccctcccccctcctcccttcttcactccactcacctccctcccctccccctccccgcccgccctcctcctccccccccctcacatccc

SEQ ID NO: 120057 - DNA, 456 bp, Arabidopsis thaliana columbia
  unsure (1)..(456): unsure at all n locations
gccgcgtacgtaagcttggatcctctagagcgtgtcgccctttggttttgttctttagatattaaaaaacaaaagccaaaggatggtggtattcaacattactacatatgagagtgacgtaacatcaaggaaacaacccttagtttgctcattggctccaagccacatttgagtgcaacctaataaggaattcatattctttacggggggggggtttgctactatcggcctaacacaataatcagcanagtcctcagacccaaactagttttgactacctgtatctaataactattggtgggtttttccatattcttgacggtttgtggcgttggaacccaccataattgttgtcttgatgccttaaaaaatatgcatccccatgatttggatttctctcccttgggaatcattggcatatttggtcaccccataggggggggggaatttgaaaga

SEQ ID NO: 120058 - DNA, 525 bp, Arabidopsis thaliana columbia
ctatacaagattatgacgtcgcctgcacgcgtacgtaagcttggatcctctagagcggtcgccctttgggtttttttttttgaagagtaaaagtaaaaggattatgaattgctacaaagtgtgatgtatgtaccacataagggaaatccacaaataataaattcttctctcagacattaaaagtttaattatgggttaaccttttctgaagtccagcacttctctgcaggtccagtagccatggaagaaaagaaaagcctctgattagttttcagattcaagtaatcaaccttttctggctctagaagcagcaggcagtattcaggaactggaccacttgaaggatctaatttaacttgttggcttgattgctcgctgttgcaaggactaccgggagtaggacagacgtagataagccttgaccttaaagaattagcaaaccaagctttctctctttgctatatataaatcaaagccattaaaataaacaaagtgtttcttccttttcaaatactaatattaaat

SEQ ID NO: 120059 - DNA, 581 bp, Arabidopsis thaliana columbia
  unsure (1)..(581): unsure at all n locations
ggggggtatgtatcctccccaaactatcaattaccaacttaatcttatnggaaaacttcctttccccctctcttcttccctctccccaaatttccccttttcacccccagggggccaaaacccttaataaaaatctttcataaactccacttcccgcaaccaagacctcccaacacccttctaccactcctctcaaacccctttttctctttctcacaccacttaaaacccacttctaatcttcacgcccttttcttttatttcaactcaaacaattattattttttgtagcgggggaggatttttcttcccttcttccccccaaaaaaaacaacccactccccccctttcccccccccccccccccccttcccctccccctcactactcaccacacttcccccttccctcccccctcccccccaacccaccctctcccccccacctcacctcccctaccaacctcctctctctctcccacacccacccccctcctcctcactcctctctcctcccccctcacccacctcccccccccccctccctcctcctcccctcctcatctttattatcttctctct

SEQ ID NO: 120060 - DNA, 450 bp, Arabidopsis thaliana columbia
  unsure (1)..(450): unsure at all n locations
cgtaagctggatccttacacggtgcctacggtcgggccttataaaaaaactccatgataatataccaccacatttatcgcacacaaatgatcaaatttctagtaaccgggcaaaactggatctcatgtgattctctgggactagttagacaccctatccgatatttttccggggggtggccaacacccgtcaaaagcatttacatactccccanaatgccgggggttgtccactgatttttaggacctttcgacctaccttcaccggcgggttaccatccccacaacctttgttaaactaataacccggtctttcttctttttgacccctctcatccatttaagagcacctttgggaggatttgataacccaacacatcctcacctccctggaattaggtgggcgacattaaaacctgcttcactcgagggaatcctatcccgaatggtt

SEQ ID NO: 120061 - DNA, 495 bp, Arabidopsis thaliana columbia
  unsure (1)..(495): unsure at all n locations
cagctacaatacgactcactttagggaaagctgctgcccctgcaggtaccggtcccgaattcccggcttcacccacgggtgcgggcttggcttcaattttancaaaggatctgctcaatggccagaatattgggggtgtccggtcccaggagatttgtctctcccggggactttttcctcagaagatgaagtacactgaggttcctccgtaagcgtatgaacactaaacctttttggggggggggttgcacttncctaggtgcttccaaaataataataggcttccctgtcggggggttgattccccaccaccactaaacggtggagcctaatgccccttgccccgctggaaaggtcttttgaagggattcccctactcccttatgaacacgatccacaaggtcggtctgtctcctgaaccctcctcaaggcccttgagggtggcagcgctcgccaccaatccctgggggggggggccgcctctcctctgaacgt

SEQ ID NO: 120062 - DNA, 378 bp, Arabidopsis thaliana columbia
ggggggggggggaatactaatgggaaacacacccgccggattgtaaaggagggaacgcggccgcggggttgcccgccccgcactataactatttcttagcaaggggggaaaggcacataaaaaaaaaaacttcgtatctatctaagtgataaggcccggctacacctatcttactaactataccatacgacgagtaagttcgacgtgctgtcatataagtatcggtcaacactatgtacgcagaatatccacagactgacaatatacatcaacaaccaagagagagtttttttaggggggggggtgggagacacaagcgtatcgaacctatagtaaaaaaaaatccaacctcacaacgttatcggggtcggcgagcga

SEQ ID NO: 120063 - DNA, 472 bp, Arabidopsis thaliana columbia
  unsure (1)..(472): unsure at all n locations
cgccgcggagcngggacctctagagcggtgccctcggggtcgagccgcaaaccccattctatgaacacagtcttacctccttcatcggagtgcataccgcgatacccaacaggaggctcaccaagactaatctctcggtgtttctctattgagctattctttcttggagacaccaagtttcatacatttgtgagggggggagatagagcagagttaaaaagacccgactttgcgaccccgaaggaaggtacaagattgggtcataaccggggatcatcggaggccatgtcattggacgggaatcacatgccgcattagaaagggatgctccgtagacgacactaccatttgatgtctccggctataatatctacggtggctgaccctacggattctgacgtatgcgaacactcagtaacatcactctttctcaaaacattatcagtggtacgatagattctgctgctctatc

SEQ ID NO: 120064 - DNA, 472 bp, Arabidopsis thaliana columbia
cgcgtcgtagcttggatccttagagcgtttgccttgggtttgagctcgtttctttttttcttgtgcttttttggtgactttttgtttttgactcggcgagggaaaaactaacccccccagggtttttgattggggaagaaaaaaatgaaggacccctccagccattggcgggccattttttggtaattttttggggggggggaaccaatggggaaaataaccgaacaatgggaaaccactgcgtgggggggtttaaagggcaacatgaaccacgggagtaggctcccaaaccatgcaggggccgtttcgagggcaacccttttttatgggacccaaaagggtgacctttgaagaatttttatttcccgcgggctatgggggtttcctaggagaaggttgttggggagggggtccctgggaatggggggctgactatttacttggccgttgtgggctgtggacaattctgggc

SEQ ID NO: 120065 - DNA, 491 bp, Arabidopsis thaliana columbia
  unsure (1)..(491): unsure at all n locations
gcgtgagcngggatcctttagagcggttcgcctgngggtttaggccgagaaaacaaaaaatttggcatgtaaaggagaagcctaagaaatcgcaaaaggagattaattcggttgacgaatgttaggagcctaaaagagccaaaacaagaaggataaacatactctgttatacaagaacattcaaagaatattgtcggggtgagtcctatgaaatgaccagaagcctcttatttcacggccacggggcggagcaccaccactgtagtctttcctgaccttggccccggcctaggactttgtgactgcctttaccaccaccgagtgagattccctcagttttagtaggtccagcctggttgggattctgcgcacgagcctttcttgaacccacgttattgccggctttacttgctggccgttttgctgcagacggggtcgagggctacaggttcgtcactttggtgggttctttccacgagggaggaacactg

SEQ ID NO: 120066 - DNA, 321 bp, Arabidopsis thaliana columbia
tttttaaaaagaacgcccccacgcaaaaaattttttaacggggggggggaacattttcggggcggtcttttcaaaaaaaaagcgcgggagggggggcgttcctcttccccccccctcttgcttaagaacccccccaaccccacccgtcgcggagcccccctaattctttcctcataacctccatctcgcaagaagcccatgcccctgagaaaaccgggggcacaaacgccccttccaactcggcccgcggctccttatacccgccgcatgctccgggcgcaaccgccgccccaaacccccacccgggctcgcccgcccaac

SEQ ID NO: 120067 - DNA, 392 bp, Arabidopsis thaliana columbia
  unsure (1)..(392): unsure at all n locations
ctcgtagctgatcttaaggtcgcctaggtgggcccttaaaaaccttatgaactcactactttctcctcctcttctccatcccaaattcacgaacttcatcctaaacacaataaaccattcaaccncccctttctctttagggaaggtggatacacccggagattnttaaaaaactccacctaggggggggaaggtttctcttggtatttcttgagggctaccatgactgattgccatgaagaatcatccacaatgggggggagttgggcgcgggttcaagccgggagccgcgacttggttggacaagcggggctgtggcctcacacaagaacaaggcgccggttgggggagaacccagaacggattgcgggtaaagcggcccgggctctgag

SEQ ID NO: 120068 - DNA, 466 bp, Arabidopsis thaliana columbia
  unsure (1)..(466): unsure at all n locations
aagcttggatcctatagagcgttcgcctttgggttaagccaagtattccatgattcttaaacaaaatttggcttgcaaggaaaaacatatttattcgatatgaatactaatgggatggtttcaggtctttctttatttacttctctatacttttgttgagtttcgcagcgagtcaactttttttgaggaggtgcagnaagcactagactgaatggtgatcattgggttaaccccaacaggtgatggcaatatacttccatcacaaacaaacaacccctgtgcttcccagatctgaccattcttattcaaacgaccttcctccgcggtgactaccatcctacaactacccatgtggtgagccgagaagtacgtcgtccaatactctacttttgtggcaaccccaccaacaggatgaactttcgtgtagaaacttttccatgggttctttaggaatgggctcacactt

SEQ ID NO: 120069 - DNA, 496 bp, Arabidopsis thaliana columbia
tggcgtcactgcacgcgtacgtgagcttggatcctctagagcgtgccgccctttttttttgtttttagtttttttttttttattttttattttttggttttctggggtgtttaaaagatctttctataaatagatctctgtgacggttatataattggtgggatgtgaaacatatgattgaaaaagaaaaaaaaaagacagactttttttaaggggggggagctcacttgcgtgactagaaactgaaagaaaccctctacccaaaatgatgaatttttgcagataagtaatctaatagatgcattttaaaattctttgctcttacacttgaaagtcgagaggacctgtctcaaactaaataactgtctctggtgtgcatggaggagggcattcgaagaaaacacttaatcagtttagataagatctggagaagggaggaggttggataatatttgacaaaaagtttggactcactaaaaatggtagggggggaggg

SEQ ID NO: 120070 - DNA, 456 bp, Arabidopsis thaliana columbia
gcgtacgtaagcttggatcctctagagcggtcgccctttgggtttggttttttacctcaaaaatcactctttcaactacaaaggcaaaccaaaaataaaaatgacatttatatccaacaatcggttgtctgtaaatcaaaagacaagatccttttgtttggttcttacagcattctattcctgaagatcacttttttatagtgagggggggaggttcccagctggatctttggttgcttaggtaacttagcaatagatgacttattttgctggccttggaaagaaattcggtttattgaaatcccttggagtgataacgatggttgaaatatctggttccctggccataaaaaatagaacttgggagtaggtggtgaaccccgcaaccttttgaagggtatcctttggagcaaagaacgggaattccgtttgtggttttccaaagaagaggcgcga

SEQ ID NO: 120071 - DNA, 184 bp, Arabidopsis thaliana columbia
atacacgtctactcgctcaacctccccttacattcgaattattcatttcttttttggggggggggggtcaaataaatacgcccctgctctcataaaaaatctttcgatatgaaaatggtgttatgactatcgatatcgttacgactatacacaccccaccactaccaacgccctccgcttaacc

SEQ ID NO: 120072 - DNA, 540 bp, Arabidopsis thaliana columbia
taggtgcaactatagaagagctatgacgtcgcatcgccgcgtacgtaagcttggatcctctagagcggccgccctttttttttttttttttaaaattttcttagtacaaaatagaaattactttacttcagtgacttcacctgctctacatacaccaacattgatccataatgtattattcctctttgtttgtaatactctgcaacagtttcttctaggtgatctgttccataggtgaggatcgggttttttgtagacgactatagtgttgatctcctctgggttagccatatcccatcgacaagccggttgcggaacccgatgtctcgtgtattcgctaaccgtcgtgttcaactgcgggtcaaattttgcactcgacatgtgaaaaacaaacggtttttggcaatgattgcgactcacgggcctagtattgaatgcgtaggcggtgtaatccgctcttttgtacaattcaagaaagttctagatggcatttccatttcccggggagagaatgatccacggaacacctggaccggaaat

SEQ ID NO: 120073 - DNA, 611 bp, Arabidopsis thaliana columbia
  unsure (1)..(611): unsure at all n locations
ggggggggngggggggtaatactgccaagtacaaccccactgacttgggggaaagctcgtgcccctccaggtacccgtcccgaattccccgcttcgcccagggggggcgggcggaaaaaacactaanccactgggaagttagcgagcccctcctaaaaatgttgccattttctcacgaatgtcgctggagttaaaaaaaaattgtgggagaaaaaaaaaaacaactccacttggggcgctcgtgtacttatctcccccggggtctcatctttctagggggaggcgggggaaaaacctcttgtgtgtgtcttcacaaaaaaaaaaaactccccccccgcccgcgggggggactgatacgcgccccccctatcgggctcggcgccgcacacccccttgtgggatcgcgcgcccactcggggtactcccctgggccgcagcccggatgatgtaacgcgcgcgccgttctccccgcgctctccccgcgctccctcgcgcggcgggcgctgccaggcggtcgccgcgcgcggctccctggcccgatgggcacccggcggggggggccttccagcgcacggcgcgcgggctcgtgcgacccgacgggccgtcgcgcg

SEQ ID NO: 120074 - DNA, 508 bp, Arabidopsis thaliana columbia
  unsure (1)..(508): unsure at all n locations
aggtgcaactactagagagttatgacgtcgcatgcacgcgtacgtaagcttggatcctctagagcggccgcccttggggtttgttttttttttttttttttttattttcatctactttttattttttttatctttctttcgttttttttttttatcnattttgggggcaaaaaaagggccatttttttgaatggggttttccggcacaaggtttttcaaacaagggtttaaaatttggggggtttctaaaaaaccttgggggggcctttttttaacagataaaggccattgggaatcaacctttttctttttcccttttgggatttaaggggttaaaaagaagttccccttgggttttgcgtacctttttaaaggttgggggggtcacttttggatttcaaaccttgaaaaaaaaaactttttttcaccctttatgaaaatccccccgccgggggtattttttgtgggatgcgaacccaagtttttttttcccctttaaggggggggt

SEQ ID NO: 120075 - DNA, 397 bp, Arabidopsis thaliana columbia
  unsure (1)..(397): unsure at all n locations
tcctccccctccattacccgtcccgaattccccccttcnacccacaacggtcactcccaaacactatatttttaattcaccaaaccctaattctaatctcccatcctnnaaaattctcacctatcccccaaccttcccttnaataatttcattaaaaaaaattctcttcccaaacatttcccttctcataactctctttcttaccgaatcctttaannccataaaattttnttctaaatacaaacccccccccctttcttgcctccttccccccccctcccaacacctaactctctctctcctaaaacaaaaccccctcccccccccctttttctacacactaactttcttcaaactacttcccctccccacatcccaacacccccatcaccccccc

SEQ ID NO: 120076 - DNA, 536 bp, Arabidopsis thaliana columbia
aggtgcactatagtagagttatgacgtcgcatgcacgccgtacgtagcttggatcctctagagcggccgcccttggggtttgtgttttatttttatttttttttttttagatggagagttttttttttttgtgcggagcttcttaacctttcggttttcatcggtttactaaaccgaactgctcaatagaaaggatacgagcaaaaaggtgtcctacaaataaaaacccctgaaagggggggggcaactttcatgcgacccgaaaaaaaaagaacttccgggaccgatcgatgaacaagatctactcggtgacggtactatttccagattaagctcccagaggaaagaattttgtgtattagagaagtcctgaaaaaaaatagacctggttgaaatagaaaaaacactactgacccatcataatacgaaaaaatgtcgctttttctaggaataatctcctacaaggatcctaatttgaaataggaggcgccccgaaggattaacttaaatctgttcggtgcgaagggtcaaaaaag

SEQ ID NO: 120077 - DNA, 495 bp, Arabidopsis thaliana columbia
  unsure (1)..(495): unsure at all n locations
cgaacgcacgcgtacgtaagcttggatcctctagagcggtcgccctttggggttgggtttatttattttttttatttttaaactttttattttttttctaaatggcaatggatatattttttgtatttgattaaccaactcaaggtctctttttgaaaggaggccaagctcacctccgtcgacgagggcaaaaacaaaactttccgggggggggacatcccaggaggctatcccanaactagatgcttcagatgcctaccttcgttgccgaaactgcaaaggaaaacttctacgaggaatcgagtttctgatctgagtcttctgtggaaatcaggaacgcacgagtgataatcctactgatccaaaaaatatacttccacttaagaaacaaatggtttctcacctctgtaaataaagatggatccggaaaaagtcgtacctccctcactaatttgaatcacttgtttaactagctgagcgcgtataactcagatg

SEQ ID NO: 120078 - DNA, 484 bp, Arabidopsis thaliana columbia
  unsure (1)..(484): unsure at all n locations
ccgcgtgcggagcttggtcctctagagctttcgccttgggttaggcgtntgagaacacatcgagcactaatatgagtggtctaagatgcaagatcttgccgaagcttcactaagagggtataggcttgagtggactctataacgcaggatgctatgaatcctaataacgttcacaataagcaccactttttatacgggggagatcagactaaaaccgtaacgactcggctatggctcatatcagtactctaagttgtatatatactgaccattggtgaacttatgccttatttatgacactacgtatcacgtctgctacgacggcacattattgatctgggacttatgcgtgacgtcagagcttacctagaattacttattgtcggaggaggctctgccttagattgagaggaactaggattggggctgccaggctgtgtttcaacatccatcacatctggagatcggaggacgtgaccctata

SEQ ID NO: 120079 - DNA, 487 bp, Arabidopsis thaliana columbia
  unsure (1)..(487): unsure at all n locations
tgggggggaaaccacccccgcccccgggnnggggnggcccccnggaagaaacttccccccgcggggggggaaaacccccnnnnaaaaaaaaaaaacgccaccgacgcgcgcccagcgcgaccaagacaacacaaaaacagccagacaccaacgcacccccccagaaaacaaggacccgcccggaaggacaaccgcacccagccaggaggccgcgaacacagagcgccgcgctcgcctcaccaagcccccccgagagcacaaaagaaaattttttttataaagggggggggggggcacccccccacacgggcagcaagcgccgagacaaaaaaaaagccccccacagcgagcggggggggggggccggacacccaacaaaaaagacacaagcgagcgcgaggcgccgccagggggcgaaggaagagcagagagaccggcgacgcaggccgaagcccgccagcacggcgcgcagggccccacaacggac

SEQ ID NO: 120080 - DNA, 576 bp, Arabidopsis thaliana columbia
agcgcaggccagcgagagccggggggggaggcattttttttacacccccccctttcccggaaccgcccggccggggagggcgcggcgccaaattttccaccgggggggggggccgcacaacacaaaaccaccccccggcgcggcacgccccgggtgcagcgaggcggcgcagcggggaacggggagagaagcacgaagcgcgagccgacagccccggtcgaccaaaacgcgagcgtcacgccccgcgccacaccccgggcgcggagagtttttttttgggggggggggcaccacgcgcgacgagaggcaagaaaaaaacggccgcgcgaggagagcgggccgcggggcgaccgccgggccgggccgagccgcggggcaaggcggcggcgcggagagagcgcgcgacgaaaaaaatccccccccgggcgcgaaagaccggagacagaccgaggccgcgccgggtgacacgcagcgcgggcgggcggacagcagacaagcccgaccccaacgcccgaagacccagcccgtaccgcagacacacagactacccggagccccccagcagaagaagaaaaa

SEQ ID NO: 120081 - DNA, 588 bp, Arabidopsis thaliana columbia
  unsure (1)..(588): unsure at all n locations
cccccccccaaccaattttgcgggcggngnggaaacacgccacgcccgcgccgtgaagacatcggagagcccctctagaagacttgtacgccccacgggaggggagaggccccgccacaaaaaacacacccaagcagcaaccccagcaggcagacaccccacaggaacccagcaccgccaaccgaggcaaaccccagcagacccaggcaacaccccacaaccgcagggcaacctccccgagaagggccccacccaccacaccacgcccggcccacggcgccgccccccacagagacccctttttatccccaacggggggggcaaagcgcaaccccaagaggccgccaccagggaacaacaacacccccgacacacacaaaacaccaccccccgcgagtgcaccgcgcacgaagcaacgaggcacgcccgcgacaagaaggaagaacaccaccacgcaagccaggcagaacaggtcagcagcacggccgaaggcgtagcagacccacaggaagacgcccagaaaagacccaaaccgccccgcccgccgcgcaaccaagacaggcaagccagcacgagaaccgaatcgac

SEQ ID NO: 120082 - DNA, 547 bp, Arabidopsis thaliana columbia
aggcggcagacgcccagggttaaagaagaccattttattttgtttttacaatctcaaaattttttgatacaagcgacacaagacgcacgagccccggcgaaacattcacacctccacctttatttctgggggggggggacccaacaccaaacgatgattccactggcgtgatcgcagagtaatgaagcgttagcaccgcgggtttgtcggcaggacttgaaagccggtctaccaccgcgattaccatacccttaatcactggataagtaacacccggaccgggaatttttttttcgggggggggggcgaagccacgagaatatgcaagtaccgaaaaccgagcgttgtattacgagtggtgaagtacggtaattaactaagcttccctctaacgttaagaccggttattgtgaatcggcgcatcaattcatgggctgtctggaatgaccgaatgcatatagtataataaagctgcgaaaatagccacagaccgaccgcattagtgtcgatgcctagtttttctatgcattataggaaaaaagcccca

SEQ ID NO: 120083 - DNA, 425 bp, Arabidopsis thaliana columbia
  unsure (1)..(425): unsure at all n locations
nnnnnnnnnnnnnnnnnnnnnnnnnnnnnnnnnnnnnnnnnnnnnnnnnnnnnnnnnnnnnnnnnnnnnnnnnnttantgggtttttttttttttttttttttggggaacaacaattttgtgttagaaaaattacaaccctttagctttacatatttttgtaaaatttggggaagaaaaggaaaataactgaaccattattcttatatatttttttttattgaagcaacccgttaaaccagatattcacatataaaccggttaaaggggagattggcggcttacaactacatgatcatggactgggattttggtgtacttataagatactccatgactagtaactacctcaaatttaccaaacccatcaccattcaaaatgtgccttcttatttcaacactaccacaataatctaccacgtactt

SEQ ID NO: 120084 - DNA, 425 bp, Arabidopsis thaliana columbia
  unsure (1)..(425): unsure at all n locations
nnnnnnnnnnnnnnnnnnnnnnnnnnnnnnnnnnnnnnnnnnnnnnnnnnnnnnnnnnnnnnnnnnnnnnnttnntttgttttttttttttttttttttttttttttttttttttttttttttttttttttttttgggaaaaagaaacacagtttgatttttggggtataaactttaaatacagttccaacacaacctttaggccaaagccccacaaataaaagtttttttaaaagggggtttggggatgacataatttccaacatgaaacaaaaagctttttttatggggggcttagttaaaaaaaaacggaggcataaaactgaaaatcctttagggtgacgcgtttttaaaacccctttttttcaccttcaaaaaattataaaggtactttttccttgcagggagggggcctggtgggcaat

SEQ ID NO: 120085 - DNA, 460 bp, Arabidopsis thaliana columbia
  unsure (1)..(460): unsure at all n locations
ggaaagctgcggcgcctgccggtaccgggccggaattcccgggttcaccccggggccgggcgggtgcganaanaccacanaaggggaccaaaagaatatatccctcccagctcaaacgcgttttccagatgttccacaagaacggggacgggcgaatcacaaaagaagagctcaccccctcgcttgagatcttgggatctacctacccagggggggagctgcctcaatgatgccccaaaacacaaacattaccggatgggttccgtcaacctaaaacaagtttggattccgtcttccaccctcgttggggggtggaccttcacaaccggtgggggaacccgagggaggaggggtttgaaagatggcctttaacgtttttaacccacaaacgagaatgggttttttctttggggggggagttgaaaatttggggttgtgtttcctttgggacttaaggcgg

SEQ ID NO: 120086 - DNA, 427 bp, Arabidopsis thaliana columbia
  unsure (1)..(427): unsure at all n locations
nnnnnnnnnnnnnnnnnnnnnnnnnnnnnnnnnnnnnnnnnnnnnnnnnnnnnnnnnnnnnnnnnnnnnnnntttttttttttttttttttttttttttttttaacctacaaattttataagttgtaattccttttggactctgaccaggcaaatgctaaaccaggcatgcttggttcgcagttcgcaaatcgttattgtctgtggttacaaaagagaactaagaagcaacaatttttattcaatatctcagtttctttaaatagtatatccgatgatctttaagctctccttcactcgtttctttataggactgcaattaaagaggggagaaagatgctgtttttggagtttgaaagagtcactcaaggactttcttggggtcaagctgtccactggagtaactagaaggaactgcagagagttcg

SEQ ID NO: 120087 - DNA, 490 bp, Arabidopsis thaliana columbia
cgacgaagcaccagtgaaaaaaaagacaacctcttcaacccaatttttttacacaaaacaaccaggagcccaataaaccgccactttccccttttttcggggggggggagtgtccaacaaaacccaacgaaccccccgtccctgaacgctaccaaacgaacccaaagcaccgcgaaaaatacacgaaataaccaatatccatcagacgcacgtatcacttccgagaaagtatactaatgaaaaaccgtcaatcccgggttttttttttccagggggggaagaaaaaactagaaatacaagaaatatcgcaagacactaccgacctactcgcgtaaattccgaccctgtacagacggatcggcacactaatccccaccgcctttcaacctccgactgagagcaaacaaccaaccatagaataattgagaaatctcggctagtgatataagtcccggaacgaaagcacatcgacagatcggtgaacaggacg

SEQ ID NO: 120088 - DNA, 390 bp, Arabidopsis thaliana columbia
  unsure (1)..(390): unsure at all n locations
tgatacgttnnnnnnnnnnnnnnnnnnnnnnnnnnnnnnnnnnnnnnnnnnnnnnnnnnnnnnnnnnnnnnnnnnnnnccacgggtgcgtgcgggtgcgagaagaaacagaagggtacggctgcaagaagacgacagaagggatattgaagagagtgttgatctttcttctctatgatacgctctctttctgttttggtattggatcagatgtagcaaacttgagtgggaaaaaataaaggggggggggggannnnnttnggggggnnaaaaaaaaaaggggggccggtctaagaggatccaagcttacgtacccggggcatgcgacgnnataactttttttataggggcacctaaatttaattcactggggcggcgttttacaacgggg

SEQ ID NO: 120089 - DNA, 379 bp, Arabidopsis thaliana columbia
gacccaatagagcggcacgccacaagggagaaccgcctctctacaacgatccgcaaaacacaaaaacaagaacaggaccacgacaccaccgcaccacaaccccgcaaaaggaaaaaaaggagcgcccaagccgagaaacccgcgcgacgccgcgaaagggaacgcgggaaaaaccaaggaccacgaagcgcagcacacgattctttcaaaagcgaggggggccacaacaaaacaaagcaggaagaaaaaaaaccccccccaaggggcggagagagaaacacgcaccagagaggggacacaccaccgggcaaaaaaaaaagagcgagaggcagacgacacgcaccgagaagcagaaagaacggggagcaagaagacgcag

SEQ ID NO: 120090 - DNA, 486 bp, Arabidopsis thaliana columbia
  unsure (1)..(486): unsure at all n locations
cccccccngggaccgggccccaaacccgttttcacccagagcggagggcccgcgaaaaaaaacaaaacaaaccccggggcccaggaaaccaacaaaaggcgccggggaaaaaaaaaaaaaaaaaaaagaggccgagctccaccaaagaaacccgaacccgagggccgacgggggggcaggcggcggggaccgcaaaattttttttgggagggtgggagaaaacaaaagtggcgggcccagaaaaaaaaagccccaccacgccgggaggcgggactgccggccggcgggggggcacaagcccaatacacggcccgcggccgcgggcgaccacgcagacataagggaaccgagggcggaggggtggaaaagacgacgcaaagcgaacgcgaccacccgcacccagccgaagcacagaagacacaagtggacacgaggagcacagacccccccacccgacaaaaccacggcggagcgcgccgaccaaga

SEQ ID NO: 120091 - DNA, 385 bp, Arabidopsis thaliana columbia
cgccgcgtcgtaagcttggatcctctaagcggccccttgggtttggctttttataaaaaaagcatcaaatagggaaggttataaaaacccagaaacacccgagggaggaggaaaaaaaaaaatggcgcaaaacaaaaaaaaacgatagccctatagggggctcttcacttaacaaacttttttaaaaaaaaggggggggattatccggagccaaaaacaaaaaaaaaaattgctagggtaactgcaaatactaagcgccccaataaaaaaaacaaaaaaacgtccccagttggcccaaaacaagagaacctgcataggggtcaaaaaacaaacaaaaaagaggggcaattcccgggcttaggggtatttaccaagaaaagggggg

SEQ ID NO: 120092 - DNA, 389 bp, Arabidopsis thaliana columbia
cacgcgtacggaagctgggatcctctagagcggtcgaccttcgggttaagtcctttgtggaagaacactctaatcaaagaaagggaatttataaaccaattaggacaaaaaggaacaataactgccaacccaagaatcccataaacgcaaagaaaaaaggagaaaggcgagggcacaagggacccgccgttttttttttgggggggggcgatcgcgcaagacggggggatacagacaaacccccccgaccaccaggggcgggggggagaaacaaaaatgaggcgcaaaggaaagcacaacaagccgagacgggaagaataaccacgaggagggcaagcggcatgagagccaaaggggagagcaggaccggaggaggaacaaggagagcc

SEQ ID NO: 120093 - DNA, 515 bp, Arabidopsis thaliana columbia
  unsure (1)..(515): unsure at all n locations
aaacggggggggggaggaccgacnccaagcgacaaacgcagagacaaagccgacgacggaggggagcagaacgaaaaggaaaaccaagacaaacggccgcggaaaaacacgagaaaacacggaaaacgacgcgaagcaaccgcccagcgaaggaccagagaccgcgaggtgggaagaaaagggaagaaaccgccgaaggcgcggttttttttttcccgggagggggggagggccaagacagaacagaggggagcagagaaaaaacccaccaaacagaaccagagaacgaacaagcaccagcgaaaaccaagccggggagagaggcagacaaacagcgagggagccgaaagggagcgccgaagagagaaacgaaagaccaacacagaaaaaacgcgaaaggaagagaagaaaggagacggaaaggagcgagaaccggcaaagacaccaaaaaacagagaaagaccggcagcccgcacacgccgaaaagaacgaccggccagacaccagccgaaaaa

SEQ ID NO: 120094 - DNA, 428 bp, Arabidopsis thaliana columbia
  unsure (1)..(428): unsure at all n locations
nnnnnnnnnnnnnnnnnnnnnnnnnnnnnnnnnnnnnnnnnnnnnnnnnnnnnnnnnnnnnnnnnnnnnnnncttttttttttttttttttttttttttttttttttttttttaaaccgaaaccaaccccaaattttttcgggggaattaatccttcctggtttcaattaacagaaaccttgaaaaaaaaaaaaaaaaatttgtttggtttaaattaaaaactttaattactttttttttccttttttttcttaaaacaaacaaaaggggttttttggcgaggtaccttttttgtcctttggctttattatgccgtgggttgatttttggggttaaaactgccaagttaacttaggccttaagtggggggggtccccggattggattcagaattgtggcttccttgttccccgttaatggttccgggg

SEQ ID NO: 120095 - DNA, 429 bp, Arabidopsis thaliana columbia
  unsure (1)..(429): unsure at all n locations
nnnnnnnnnnnnnnnnnnnnnnnnnnnnnnnnnnnnnnnnnnnnnnnnnnnnnnnnnnnnnnnnnnnnnnnctttgttttttttttttttttttttttttttttttttgggggaacaaaaagcttccctatacattatttttattctttgatcatcatcatcatcatctgtataagaaaatacccaatcctatttctttccctattcacataaaatgagtaaaaccctattaaactaaagccatcccaatttgtctccccctttcttcatcacattcgaaacccaaaatcctcgaaatgacagcgattcaattgctgaccgaactcagacataatctgttgctgctgcggcgcctgaacaggactcccgtgttggccagtccagtccatgttagacccaggcatagccaaagtagcattaaccgtggtt

SEQ ID NO: 120096 - DNA, 428 bp, Arabidopsis thaliana columbia
  unsure (1)..(428): unsure at all n locations
gattgtnnnnnnnnnnnnnnnnnnnnnnnnnnnnnnnnnnnnnnnnnnnnnnnnnnnnnnnnnnnnnnnnnnnnnnnnnncttttttttttttttttttttttttttttttttttttttttttttaaagccaaaaacatctcactggttacattcataataaaattcaagtggtaacgtaacatcacttccctaaaatgttcctcggtaggacgcttatttcctacaaactcaaaatgccaagaggaagattaaaagacatgctccacatgttccggggatatgtgtgcacttgcttcgacttggaaccccggtttcaaacaaaccaaccaagtggttagacccccccattccctgaaattaaaatagcaattttttttcttcttcttttttttggaaaataagttttactttttcgggacacccagc

SEQ ID NO: 120097 - DNA, 431 bp, Arabidopsis thaliana columbia
  unsure (1)..(431): unsure at all n locations
nnnnnnnnnnnnnnnnnnnnnnnnnnnnnnnnnnnnnnnnnnnnnnnnnnnnnnnnnnnnnnnnnnnnnnnnnctttgttttttttttttttttttttttttttttttttttttttttttttttacgtaaataatttttttatttttttctttttcccttttcgattgatccaaaagcgagggcactcaagaaaccagttccccacccaaagaccaaaaattttctaagccacaggggaaagagtggaaaccccccccccaaaaaaaaaaaaagcggttgtggcccacctgcttaactacaaaagccccactcctgttggctggaaacccgaacggcttaaaaagggaccgggaccgcaaaatattcttttggggggcggcccgccaagggcgctggggagggataacccccggcgagaaaggagcagccc

SEQ ID NO: 120098 - DNA, 415 bp, Arabidopsis thaliana columbia
atagaagattatgacgtggcacgcacgcgtacgtaagcttggatcctctagagcggtcgccctttgttttttttttttttttttttaattctttgattattttttgccgccaaaaaccctaatgccattttaaaaccaagaataccttgctatataattcgacccgccaaacaaaaccactattttaaggggttcctcattgacaagtttaacccttttaaccggcgggggagacaaataacaaacaagtaaaccttccgacaaaagaaattaagggcttttaacaggcgctcactattaaatccaaaaaaaacccatttttttgttattcacattaacttgttcgggattctgaacaaattttttgttttttttttaaataacatttcacttttttttttttttgattgaaaaa

SEQ ID NO: 120099 - DNA, 537 bp, Arabidopsis thaliana columbia
  unsure (1)..(537): unsure at all n locations
gcctgcaggnnaccggnccggaattnccgggtttacccacgggtncggaggcatcatacgagaagccgaggaagattcacggcggatcatccaagaaaggtattaagattctcggtgttccatgcaacccccgtttcattcttcaaccagattcctttattctccgagggtcacggggaatgacatgggaaaaattttttttccgggggggtgggctttatccacacggtgttattgggggaacaaatttaaccgcacaggcggctactaaaagccgtggggtgaaagaataaaccgcgccgaaaaccgtgctcgatttttcctccaacctggattacgtctcctacgaacacaacatgaccctcccgcgtcaaagtggtcccccaattccatccactacacatcgtcaaaaccgccgcgaacacaaaaaaagcgatggaacttttcttcccagaacccaccccctttttttcgaactctcacctttcccccacctgcgatgaagcccaacagcccggcagcgaaaaaaataaaaag

SEQ ID NO: 120100 - DNA, 381 bp, Arabidopsis thaliana columbia
  unsure (1)..(381): unsure at all n locations
nnnnnnnnnnnnnnnnnnnnnnnnnnnnnnnnnnnnnnnnnnnnnnnnnnnnnnnnnnnnnnnnnnnnnnnnnctttttttttttttttttactaaaaaaaaatcactagcattgtctttatgaataacacagttgcttaatctaataaactgcctttgctggaacattttgttttttatttcggcattcacggaatgagactaaacgtaatgtgaatagatggatgcatcaagagtttaagttattcaatcaatctccatcaagcactcacatggtgatggtggtggtggtggtgatgatnatggcgnnggntgnnttactattgagcgtacctgctgcgaagtttttaccactgcgccactcaaatctgttcatacctt

SEQ ID NO: 120101 - DNA, 315 bp, Arabidopsis thaliana columbia
  unsure (1)..(315): unsure at all n locations
ggtaccgggcccgaattccccggcttctaactgggganagggggcatcttccacaccanttccttcccttgcttcgtgggggaagaccacggagaaatacaaaggtggctcttcacactccgggtccggaaacagcttctactcgaggactatcctctgggaaaatctctcaaaaatccttaccttttttgctggggggagccaaacttaacgggggggttcccttaccataacccgccctttttaccggggaaggagtttacccctcaaaaaatctcttatcagcccggggcgcggacttcacggatccctccc

SEQ ID NO: 120102 - DNA, 392 bp, Arabidopsis thaliana columbia
  unsure (1)..(392): unsure at all n locations
cgcggacgtacccaccagcacatctctccaattttacaatccagggggaggtagccccttcaaacaacacaaaccaattacatacactcccctagtacgcatgcctaaataaaccgaaacgcaccctctccacgtattcccatactagccacgcaagatcccaattcaataccaccaccaaatatacgatgtttctcgaagccttctcttatttggaccacaacgcccgagtcccacgaaggacattcttttttatttccgggggggggcgagacacgagtgattcagtcctctcacattatccagctagataatcaaatctgtgttcagacgcacacgactaactccatctccctacanattcaatactgtaaccctattgcatcatgtat

SEQ ID NO: 120103 - DNA, 420 bp, Arabidopsis thaliana columbia
gaggaacgcacgcgtacgtaagctgggatcctctagagcggtcgacctttgggtttgtctatttttttggttaacaaataaaacactcatttcatgcttacaataagttcataacccaaatgaaaattataacaattaggaagaggagaggctgcgagaagagaaggccttactaaggcgattctaggtcccaaagccaattttttttcccagggtgggggcgggggacccttcttgtgcaaaacaagtgttgtattagatcactacataaagatcggtggaagtagctcaccgtgccattgatccaggaacagccctaagtgatgggggtgcacgtagcctattgcgccaccgaaaaaagtagagaaggagacagtcggataataaggagggccacacatagaaaaaaaacgagaaaac

SEQ ID NO: 120104 - DNA, 396 bp, Arabidopsis thaliana columbia
  unsure (1)..(396): unsure at all n locations
catcaacttaaccccatcaaacggggcgcggggcgggagagagcgatttttttttttttaatacacaacacattatttaaagcaaaccccgacngggacgcgggggaagcgaccccaaacccacaattttacaaggggggggagggccccgacaacaaacaatcaaacccacctcgcggtatccgattagactgcgctatgcaccccaccatgtacctatgcaaacccaaatcccattcgacgccactcattactgaacacctaaatgctaaaagagacaagacccattcccgaagaaatttttttttgggggggtggggaaacataatgaaaggcaggtagcgaaaaaagaaacaacaggcatacgtaaagcagccgatcataaatctaatctat

SEQ ID NO: 120105 - DNA, 504 bp, Arabidopsis thaliana columbia
  unsure (1)..(504): unsure at all n locations
cactcactatgggaaagctggtacccctgcaggtaccgggcccgaattccccggtccacccacgggggncgggtntaatatcaaattcattactccatatggggcgaggtggggcctctaaacgctcaagttatattaaacgcttctgggattcatatttacttttaaatattggggactttttttccttcgggattaatttagcgcgatggggaagcaaaattgggggggtgggatacattaaagggttggataataaatggagcatgagaattgccaataccactcgctgccccacacgcagttccggaccaactactcccttttgatggccttggatgactacatctaccggcgcaatggatgaaagcacggatacctttntacaaaaaactctagaagggggggatgatattgggggacgggggggcctttaactcacctgacggccgccaaaatccatataccattttggggctttgggttgggccttcttttgccctc

SEQ ID NO: 120106 - DNA, 416 bp, Arabidopsis thaliana columbia
actctagaagattatgacgtcgcactgccgcgtacgtaagcttggatcctctagagcggccgccctttggtttttttttttttaaaatcaattaaatcgatattatttctaaagacaatacaacacagtgtaaaacaggggacaaaacagaacattctaatctatatactaatcgatgaaaaagcttgggactttgacacgtattaagctatcatcatcagactcttatgtttgttcttcttgttcaaccacttggtttctgaatagagtttcgtagtaaggtaaaatctttggaagcacatgtgacatccgcatgtttatactcatcatatcaaaggcaatgcatgtattgcgcatatgtgattcgtgaatcaccgggatctttgggtatctctgggtaaaaggtgtcagcacgg

SEQ ID NO: 120107 - DNA, 423 bp, Arabidopsis thaliana columbia
gctccaatacgactcacttttagggaaagctgctacgcctgcaggtaccggtccggaattcccgggtcgacccacgcgtccgggggctctggaatggacaacacaacacgatgatgatcgaagagccatggctgggtgaaagcactgttccaagctgtcttgaaaacattataagagacgacatggagatagttcttttggacactggttcctcccaaccctcaaaatctcgaaatggggcggcaatttacatagacctattctctagaggcagtattctcttggattgcggggaaggtaccttaggccagcttaaacgaggatgtggtttagaaggagctgatgaagcagtcagaaccttgagatggatatgggtctctcacatgcatgctgatcaccattcgggggcttgcaagaatcctt

SEQ ID NO: 120108 - DNA, 351 bp, Arabidopsis thaliana columbia
  unsure (1)..(351): unsure at all n locations
nnnnnnnnnnnnnnnnnnnnnnnnnnnnnnnnnnnnnnnnnnnnnnnnnnnnnnnnnnnnnnnnnnnnnnnccacgcgtgcgcggacgcgtgggcagacccctggggcaagtactcttatgtctactgtgttgatcttgtctgtttgaacagatgtaagaatcttagcanataatgtttggcttaataaactttgatgtttatgttcattgcatccaattttctctttttgaattgggggagngatgtgtttactcttgatacaactttgtgtttgatcgtttaagtacattntggtttatttaaaaaaaaaaaaaagggcgggccgtctagaagatcccagcttacgtac

SEQ ID NO: 120109 - DNA, 423 bp, Arabidopsis thaliana columbia
  unsure (1)..(423): unsure at all n locations
nnnnnnnnnnnnnnnnnnnnnnnnnnnnnnnnnnnnnnnnnnnnnnnnnnnnnnnnnnnnnnnnnnnnnnnnnnctttttttttttttttttttttttgaagctcaaatagacattttacttgtttgtataatatcatcaacaacgagatattttgtttcagtagattgagcttagtggttactataaaaacaaacgaaaatgccgctgaatgtggagggagaactctgtagattgatgatgctcaaggtattaggtttggatcttgatgctaaccttagggagccactgccacaccttgctgttttgattctgattatgattcggactaggtggttctgaacttctgaagatttggctgctcggttcatcctctaaccttatagcagaggacgagccaacaattgatactttgccaactttt

SEQ ID NO: 120110 - DNA, 432 bp, Arabidopsis thaliana columbia
  unsure (1)..(432): unsure at all n locations
nnnnnnnnnnnnnnnnnnnnnnnnnnnnnnnnnnnnnnnnnnnnnnnnnnnnnnnnnnnnnnnnnnnnnnnnnctttttttttttttttttttgtcctttacatccaatttatcgaaatatacaggaatgtacagatatatttactatcaggaactatctgtatttgcgttgtgatgaagagattttcaaagaagatcggaagatggttcaccgcagaaagcttctggttcgaaagttcttgcggtttcatcattgtacgctcctgggattggcagcgaggatctgtccctaggatccctgtatgttctataagacgttgcaattggagaatcaccaaggtttataacaagaatgagcgataatccgagaataactagcgtgtttttcagtctcgcaagaactggctttaccgagaaagatccaagaagacg

SEQ ID NO: 120111 - DNA, 421 bp, Arabidopsis thaliana columbia
  unsure (1)..(421): unsure at all n locations
nnnnnnnnnnnnnnnnnnnnnnnnnnnnnnnnnnnnnnnnnnnnnnnnnnnnnnnnnnnnnnnnnnnnnnnnnctttttttttttttttttttttttttttttttttttttttttttttttttttttttttttttttttttttggggggggaaaacccacaaattttgaagggaaatttttaacaaagagcctgaaacttgtttttatatgggggagttcccaaccaaattaaggaaagggcaccaaaggccttaacccccccccacattttataacaacttttaagggggagttttttttggtaaccttaaaaaacaaattgaattgcctgagtttgtttaataaaaggctcaccttttatttttttgaaacaccaaggatccactgggaaaaaagaatcaagtttggctcaacctggga

SEQ ID NO: 120112 - DNA, 425 bp, Arabidopsis thaliana columbia
  unsure (1)..(425): unsure at all n locations
nnnnnnnnnnnnnnnnnnnnnnnnnnnnnnnnnnnnnnnnnnnnnnnnnnnnnnnnnnnnnnnnnnnnnnnncttttttttttttttttttttttttttttttttttttttttttttttttttttttttttttttttttttttgggggggaaaacccacaaattttgaatgcaaatttttaacaaagagcctgaaacttggttttattttggggagttcccaaccaaaataaggaaacgccaccgaaggccttaacccacccccacatttgataaaaacttttaaagggggattttttttggtaaccttaaaaaacaaattgaattgcctgaatttgtttaacaaaagtctcaccttttatttttttgaaacaccaaggatcccctgggaaaaatggataaagtttggctcaacctgggagcttt

SEQ ID NO: 120113 - DNA, 421 bp, Arabidopsis thaliana columbia
  unsure (1)..(421): unsure at all n locations
nnnnnnnnnnnnnnnnnnnnnnnnnnnnnnnnnnnnnnnnnnnnnnnnnnnnnnnnnnnnnnnnnnnnnnnnnnctttttttttttttttttttttttttttttttttttttttttttttttttttttttgtaaagggcaaaaaatttttttaatatttgggaaatcggaaaaaaaaacttcaaatccgtttggaaaatggaacctccaacaaattttaggggaaatttttaagaaaggttggcggaaaagaaccaaacgactggccccccctttttctgggcgacaatttttttttaaaattcttgatgaacttccctcctttaagagcagggggtttaactttttttttgggtttcctacttgccaaccccctaattggaccggccgggattccttgtttaaaagcccttcttttgggg

SEQ ID NO: 120114 - DNA, 394 bp, Arabidopsis thaliana columbia
ccgcgtgcgtaagcttggatcctctagagcggtcgccctttggtttttttcttaaacaaaaaggcgcaattattgtctgatatgcaatcttgacagaaaaaagaccagtcttgtcgcggtttttcaacagtggcttaacgggatgagagagccctttccaaaatccaatcccgagacccaaacccgaaagatttttttatccgcagggggcgggtgccaattgggtgtgactactgcctgtagagcagattcagtcagtgctctaactacactgcccagtgtcgtacttacatcccttggatcaaaacaaaatccttcccttggaactcccgcggtctcacatcagggggagtttatattcactcaccagaaattccattaagcgtggccctgt

SEQ ID NO: 120115 - DNA, 365 bp, Arabidopsis thaliana columbia
  unsure (1)..(365): unsure at all n locations
aaacaactcacaaaccccacccacccaccagccccccgccgcggatagaaaagacaatttttttttttttattttcactcccacctttttttttacaccaaaccccccacgcggncaacacaaaaccaccccaaacccccctattttaacaagggaggccaaaaccacccaaacccaacccaatcccatcccacattccctttaaacccaatcaaaaaaacaaccaaaaaacacactccaacatataataacacctatattaaccaccactgacacaatccataacccaataatacacaccatctatcactattacccccaaaatattaataaattcaataaaaatccacacaacacaccaaaca

SEQ ID NO: 120116 - DNA, 442 bp, Arabidopsis thaliana columbia
  unsure (1)..(442): unsure at all n locations
aaccccaccccccccgcccccccccgcccgccaccaaataatttttttccaccccccccccccattcacgcgcacaaaaacccgcccccccccccaggaaacccacccccaacacccacactttcccaccacgncgttgaatatccttcccaaaacacaaatcaatccctcctcccctttaacaccccctttatattccttaaaccaccccaaaatatatccacaactacttcccattacctatcctttctttaccaatacccactcacctttatccttctttttcaatacaccaccatccccctatattattaccctctttttttcttgggtggtttgaaacacacttcaataaaaactcacctaaccaaaaaaacacaatccccaaaattctctccctccccaatttatctcgtacctcatattatctatccccttaccc

SEQ ID NO: 120117 - DNA, 503 bp, Arabidopsis thaliana columbia
  unsure (1)..(503): unsure at all n locations
aagatttccagctctcatcgatcactttgggaaagctggtacgcctgcaggtaccggtcccgaattcccgggtcgacccacggcgncgggttttccanatctcaacattnaaattcaaactcaaagctagagagggagagagatanatagatagagggggaanaanaanaccaacacggagctgaaacaatgattacgatcccataccttaccggtgtatcaacggatttcaactacggctgggggttcncgtttgggcagcttcccaatactatcgcctaatgttgagtgggggggcaccaacaatctgcaggggtaccctcccatctggtgggggcatgaggatttctacatccgacgatggatcatcgggatcaggactgtgtttgacctcccattttaagggcacctgatgccttgattgatgggggtaaaaaaatctctgacaataacaacagacgttaaagggaactacaaagactggggggggccttaattggggg

SEQ ID NO: 120118 - DNA, 429 bp, Arabidopsis thaliana columbia
  unsure (1)..(429): unsure at all n locations
nnnnnnnnnnnnnnnnnnnnnnnnnnnnnnnnnnnnnnnnnnnnnnnnnnnnnnnnnnnnnnnnnnnnnnnnncttttttttttttttttttttaagaatgtaagattctccactgatggatgtagaagttacagtgatatataatacaagattcttaatacaagaaaatgatcctcggcagcatcacaaaacaagattcttgtcgatcagtttttagaagaagattggaagatgaaaaccgcagctagaacaccaaccaatgctgtaacagctaaagcaaccgtaggcaatggacttgctactccaaaattctcaagaagtccttttccagtggaaatctcaacagtaatggcaactgcaaaaccaaccatggcgccacgaccaagccatatatccaaaccactgcttccttctgtactttgctcact

SEQ ID NO: 120119 - DNA, 429 bp, Arabidopsis thaliana columbia
  unsure (1)..(429): unsure at all n locations
nnnnnnnnnnnnnnnnnnnnnnnnnnnnnnnnnnnnnnnnnnnnnnnnnnnnnnnnnnnnnnnnnnnnnnnnnctttttttttttttttttttttttttttttttttttttttttttttttttttttttttttttttttttggggaaaatagctgaatattattgaccatgggttttattggaacatttttcaaagctttattaatggagtctaattgcaattttcacaaaatcaaaaaaaagaaaaaactttgttctggttggaactggtttatacacatgaacccggagttcaaaaaaagcccgcctttgtttttgggcacaattattttttcacaaatgcaaattcaaccaagtcgatggtttgagcaaaaccagggggtttgttttggcactcacagggttcgttttgggggtcactatcaacta

SEQ ID NO: 120120 - DNA, 423 bp, Arabidopsis thaliana columbia
  unsure (1)..(423): unsure at all n locations
nnnnnnnnnnnnnnnnnnnnnnnnnnnnnnnnnnnnnnnnnnnnnnnnnnnnnnnnnnnnnnnnnnnnnnnncttttttttttttttttttttttctgatgaagatgcttttttcattacgactcagaaaaaagatttacaatttagctttgctttgtggttccttgaactttcctattacaaaatcttctgacaagtttatttaccctctaagtatgttaatagtcatttaaactcttatctgattaagtaatttcgccatgttgtgattgtgaagtcccagctgcactttgggtacttttgagtttcttgctactcttctgcttaagtatctccttgatctctgcttccctcttatccacaacttttatcaattccttgaaactcggtgctcgtgaacctctccctgatcgagatggctca

SEQ ID NO: 120121 - DNA, 426 bp, Arabidopsis thaliana columbia
  unsure (1)..(426): unsure at all n locations
nnnnnnnnnnnnnnnnnnnnnnnnnnnnnnnnnnnnnnnnnnnnnnnnnnnnnnnnnnnnnnnnnnnnnnnnctttttttttttttttggaaaaacatatttgtattactcaattttagattttatacatgccagcgaaaggagtattcaccgatccaacccaaagagttccatctttttcttcaacctcacttatagatatccacttattttcatttttaccttcgaatacctctaatataacgccactatcctcgctcaacctcacggccatgccgttcccattgtacctggcccaaaccgaatggaccttcatccaatccaccggcaggcccaaagcggcacgtccaagccacgcgttcgacatggcgaactttgtcagctttgagtgttttgtgttcaagcctacccagaatccgccacgtg

SEQ ID NO: 120122 - DNA, 429 bp, Arabidopsis thaliana columbia
  unsure (1)..(429): unsure at all n locations
nnnnnnnnnnnnnnnnnnnnnnnnnnnnnnnnnnnnnnnnnnnnnnnnnnnnnnnnnnnnnnnnnnnnnnnnnnctttgtgtttttttttttttttttttttttttttttttttttttttttttttttttttttacaaaatttttattttttttttttttggaaccaaagttaaaccaaggctttcctttaagaacaggggaaaccaggacaaacgtttgggaaaacaaaaagaaatccctggggttgggtttaaaacttggctgaacctttagcaaaaaaaaagacctgacagacgggggacccaaatttttttttaatgaaggggggctcccgttttgttgacaaaaagggactctaacggggttggcctccaaagggagcttttgatgggggggccttgtccggggttttttctttttggggggtt

SEQ ID NO: 120123 - DNA, 421 bp, Arabidopsis thaliana columbia
  unsure (1)..(421): unsure at all n locations
nnnnnnnnnnnnnnnnnnnnnnnnnnnnnnnnnnnnnnnnnnnnnnnnnnnnnnnnnnnnnnnnnnnnnnnctttttgttttttttttggttttttttttttgtaaacaaaaatcaaaaacttagcttaccaaaaagggtaaataggaactcgtacttccatttgtatctcaaaaaagtaaaattgttccaaaacttatattgtgagagaaaacaacaaaacggattcagatacaacgtagtaaatcttactcaggtgaaaccatccacgactatgatggtggagatggatgtatggagatgacttatcagctaaaagcttattgcttaagaggagcttttttctctctgtctgcaattctagcaggggcgtttgagtgtgacttgaaccggcctcttcctccttcggctctctccttttt

SEQ ID NO: 120124 - DNA, 294 bp, Arabidopsis thaliana columbia
  unsure (1)..(294): unsure at all n locations
nnnnnnnnnnnnnnnnnnnnnnnnnnnnnnnnnnnnnnnnnnnnnnnnnnnnnnnnnnnnnnnnnnnnnnctttttttttttttttttcagacaaaatttcctgaacttccgcacaaatacatgaatgtacacatgtttaaaatagacaagatagaatcactagttaagtgtctgaaacagagtaatataaccagcaaatggctttatacgcagtgtgtgctagccaggaagagcggatgttaatcactagttaagtgtcttgtgatatgcaacaaaagttgacggctttaaat

SEQ ID NO: 120125 - DNA, 488 bp, Arabidopsis thaliana columbia
  unsure (1)..(488): unsure at all n locations
agctctcatacgcactcactatagggaaagctggtacccctgcaggtaccggtcccgaattccccggtcnacccacgggggcgggtgtcttaaattaacatctcttctaaaaccctactcnancttnanctnnacaacnaaaatanccacnatanctacaaactttnaaggtgtnaaaacagtanatgaagctgacgtgggcatctcctgttttatctcccacctccctggcttccggggggggctcaaacaaaggtggcccnactttataaaataatgaagtanatatgggtgggtaatgggggtcatttgacatccttggaccttccctcctgaatggctgggaagggggaggataaaaccaaaaggttggataatgaccccaaaattatccttctgggagtgagtctttaaatctatttccagggtactgaggcaaagcgtttggaaatatttatcaatccagtcccctcaggaactggaggggg

SEQ ID NO: 120126 - DNA, 432 bp, Arabidopsis thaliana columbia
  unsure (1)..(432): unsure at all n locations
nnnnnnnnnnnnnnnnnnnnnnnnnnnnnnnnnnnnnnnnnnnnnnnnnnnnnnnnnnnnnnnnnnnnnnnnnnctttgtgttttttttttttttttttttttttttttttttttttttttttttttggggcaaccttttttttcctaaaaatcaagcattggtcccttgttgacaattactggtatttaaataaggacataagattgccttgatagtttcattggatacataaaaagaatattacttgcttacaaaattttcgcctcacgctcgttctcagggggattaacccttaacgttcgtttcaaaatcaggctggtttgggactgagcccacccaggcccacttgggggcacgcgggtttacttggttcttagtctgggccacctcctttaaggggatataagcttagttcccattgatcgggcca

SEQ ID NO: 120127 - DNA, 126 bp, Arabidopsis thaliana columbia
  unsure (1)..(126): unsure at all n locations
acttaatacactcattaggaaactctccctcagtaccgtccgaattccggtcacccaccgtcggtcagccatcacactctttccacntctccccnnctccttcnattcttttaccctaactaaatt

SEQ ID NO: 120128 - DNA, 426 bp, Arabidopsis thaliana columbia
  unsure (1)..(426): unsure at all n locations
nnnnnnnnnnnnnnnnnnnnnnnnnnnnnnnnnnnnnnnnnnnnnnnnnnnnnnnnnnnnnnnnnnnnnnnnnctttttttttttttttgacttgaagctgagagttacccattaaattcaaaaattcaaccacaagaccatcttatttcactgacatatgtatatgtgatttcttacaaataatatataaaccaatatttaggtaaaattattattcaaaattgagaaaactaatttgccaattactttccgatttatgtccagttaactggatcggtaactaggcctctcttttttactatctaactatatatattactatattagaaatatccgctagtagcttcatctgaccgccgatcacctcacgctgatttgggtactgtaaggtattttgattccgcatctcctaggaatcccagcag

SEQ ID NO: 120129 - DNA, 506 bp, Arabidopsis thaliana columbia
  unsure (1)..(506): unsure at all n locations
tctaatacccactcactattanggaaagctgccacgcctgcaggtaccggtccggaattccccggtctacccacggtcncggggatttaattaaantttatncttactacaacgaananatcatccccttcttaattttctattgcttgttttgggtgctggggggcccttttgatttctaaattctttctccttcttattcaggaactggatttccgtctctaatattacttgggggggaggacaccccctatgtacganatgtctaaaaaagggccaatgacaaagatgccaaattgttccggattgccaatgtcaagcctgaaatactcagtgtggccccctcaaaatatttggctccatgactttctcaggccgaggggatggaataccctaaaacaatcccccgcctccccttaaaatttccccttgtgttgaggaaaaaccccggaagggagttaaaggggcctgaggccaacctccaaatgttcctaacttaataaaaa

SEQ ID NO: 120130 - DNA, 517 bp, Arabidopsis thaliana columbia
  unsure (1)..(517): unsure at all n locations
ggggaaacccgtcccccttccgngnccccttccccaaattccccctttccccccccgggttacgcgaaanaaaaaaaaaaccctccccncccttctttgaaagttttcaaaaattttttttaaaaatccccaaaatcccattttccctttttttttttaatcacaaaaaaaaacattccttcaaaccccaaatccattaccttngcctttttcccccctttatcaaggttgttggggcanacaacacccggccctttaaaaaccacccaaattctccgcctttctttggaaaaccccccttcaaatatttctttttcccattccaaaatttttaaaaaaaaaattttcccttttgggctcaaaatgtaggaaaaaggtctttatcttttttaaaaacctttctttgccagtttcccttgtttcacaaccccccacccccccaaaacatttcaagatcctcttcttttatccacaaaatttctttccaattccaaaaaaaaaaaaaccataacctctt

SEQ ID NO: 120131 - DNA, 523 bp, Arabidopsis thaliana columbia
  unsure (1)..(523): unsure at all n locations
nnnnnnnnnnnnnnnnnnnnnnnnnnnnnnnnnnnnnnnnnnnnnnnnnnnnnnnnnnnnnnnnnnnnnnnnnnnnnnnnctttttgttttttttttttttttttttttttttttttttttttttttttttttttttattgtatttatttttttttttttcttttattgataacaatgttttgggccagctgatgccatacttgatgctaaggaggagtcaaaaactgcaaacccgaaagaagaacagaggcaactagaacctaaaaaaggtggaaatagggaggaaaaaaaaagatgtaaagaaaatcaacaaacactaaaaggtgaggaatcccccgacggggaagcttggaaacccctccctaggagaagaaatagaggaggatgtggacttctaagaaggggaattttaccacgaaaagaagatgacggataagcgacacacacaggatttgaaccgcccaaactgaaaaaggtgtgtcaccaaaaaggtaatgctccaaacacggaaacggaaaatcc

SEQ ID NO: 120132 - DNA, 483 bp, Arabidopsis thaliana columbia
ctacaagagctatgacgtaggcacgcacgcgtgcgtgagcttggatcctctagagcggccgccctttgtctgtttgtttttttttaacaaaagttgacttgccactgcaccgaaagaaaaaaagagaatttttgaaaccgtaagcgaaaaacattggaaacggttccttgattcaaaagaaaaagctcgttctgacctagagacttaccacgcccagacttgtttatcgcgggtgtggactctgccgctcgctcctggcctccaattttatgaacttattgacgaaaaagcttcgaaaaccacaaggtgttgtaccatcactgagtcccgggttaagtatccgggacggagcgcgcaaacgattttattttattatcattacgcaggtgtcaaacgactgagctgtcgcttcaccctgcggattgctacctcgggagaagagggactaaggtgaactcttgagttcttggaaaggctcagggg

SEQ ID NO: 120133 - DNA, 510 bp, Arabidopsis thaliana columbia
  unsure (1)..(510): unsure at all n locations
ggtgnnnnnnnnnnnnnnnnnnnnnnnnnnnnnnnnnnnnnnnnnnnnnnnnnnnnnnnnnnnnnnnnnnctttttgtttttttttttttttttttttttttttttttttttttttttatgggaaacttatgaacagatttgtttcataaattcataattaaacccttcagatacaatcatgagccaaaaaagaaaaccaaaagttcaattaagttctacaagaagtttatgaaggggaaaaaaaaattttttttttttctttataatcaaatcattcactatgactcatacgattttggggcttttttttcaaaattttaaaaatccagaaatccacattggtggctctctatagattttgctacaaatccaggcttctttgtttccttattatgaacaccatttacgcctcgaggtcttccaatacccattttaggcaaaccacggtttagtccttccagcaaaacacaagctttacaccatttttgggtagaaatatacccgcattg

SEQ ID NO: 120134 - DNA, 477 bp, Arabidopsis thaliana columbia
  unsure (1)..(477): unsure at all n locations
ccccccttccttcctcttcaccggggttcctcttcgccaagccacccccctctcctctcgcacacttttccccgccccattgccccagccccttttcgcccctttcataaatccgggtggtgtggggccnccnccccttggggcgcgcctccaaaagcgagccaaacaccccctccctgttgtggcggggtacgtctccccccccctttttctttttttccacccctccctttctcgttctttgtaaatcctcctctcctttccctcctcccgcctattcttcttttttaacccctacacttctccactcccgttcatactttcactcccctcttctcccacctcactcccctcctcctcttctcccctttcttcccgcttccttcccctattttcttcttatcccgccatccactccctcccctacccttcccccttccctacatcatctcccctatctccaccttcttcttttct

SEQ ID NO: 120135 - DNA, 528 bp, Arabidopsis thaliana columbia
  unsure (1)..(528): unsure at all n locations
ggccgccccccccccgggcccccnnnccccgaattccccggatccaccccccggggtacagggcggcttaaaaaaaaaanctaaattttnnatcaaaaaaaattcccccctcccttttttaaaaggggggttcattaaccctttccaaactttgcgggatttatttggacaactcttttttaaaaattttttttccactgttattggtttggggaaattccccaactttttagcggggggggggaaaacccccctgggttcaactaaaaaaaaaaacacttcccggttttcttctcccattttnaatctcaacgaccaccttacccttctttttttttaaagaaattcccccacaacccaaaaaatctttttaaagggcaaacaatcccttacggcaaccctaaaaaaaaacaactttcaaaaagggaacccccctcataaaaaaaatcgcgcacccccaaaggggccctcccaaaaaaaaaaaaaacctcccccccgctttccttaaaaaagcaaactttctaaaaa

SEQ ID NO: 120136 - DNA, 455 bp, Arabidopsis thaliana columbia
  unsure (1)..(455): unsure at all n locations
nnnnnnnnnnnnnnnnnnnnnnnnnnnnnnnnnnnnnnnnnnnnnnnnnnnnnnnnnnnnnnnnnnnnnnnnnnnnnnnnnnnctttgtttttttttttagtgtttaatattttgntttttaatcacanacttcagtctaatttacatcataattacgtaaacacaattttcaataaacacgcctgggatttccttgggataaaactccaaccacgaacccgaaaaaccctggggaacccattcggttaagtaaaaactttgaaattttttttttttccggcgggttttttttcattcccccagaaaaaacccggggaaaaacccttttttaaaaactctggaaaaaaagggacccccttttttaaaaagggaaatctggggaagtaaaaatccccaaaggggtgttcccccctttccccaaaaatttttccccttttttgggcccccctttttt

SEQ ID NO: 120137 - DNA, 149 bp, Arabidopsis thaliana columbia
  unsure (1)..(149): unsure at all n locations
tctacaactcttcgcatcccgattcacatttgatcactatactaactcattaatcttggaattcaatcccttaacgagcaattnttattcctccaaaaatattctaaaaaaatcttaatctctacctccccactaaaatcaaacttttt

SEQ ID NO: 120138 - DNA, 522 bp, Arabidopsis thaliana columbia
  unsure (1)..(522): unsure at all n locations
tgnnnnnnnnnnnnnnnnnnnnnnnnnnnnnnnnnnnnnnnnnnnnnnnnnnnnnnnnnnnnnnnnnnnnnnnnnnncttttttttttttttttttgaaaagagtttgagaaaaaaacattttatttgttttttatcaaattaccacctcaccaacatagggttcctacttaatccactccaatcataaaacctatataaacaaaccatattttgtgcctaaatatactaaacttctggaagacgagagcttaaccgctgaataaactcattaccctctatgaagatattcaaataccatgtgattattggatgatatactactccgacctcaatcctaacttgcctttttaaccgatatggcctcaaactttttgacgaccgtgctgtccatgtatatcttcaccatcatagacatagcccttgaagcttcattcaagaaagacattgtatttgttgtgatgaaattacgatataactggggcatctctttgaggatctttgatggatggttcaataaaac

SEQ ID NO: 120139 - DNA, 521 bp, Arabidopsis thaliana columbia
  unsure (1)..(521): unsure at all n locations
atgnnnnnnnnnnnnnnnnnnnnnnnnnnnnnnnnnnnnnnnnnnnnnnnnnnnnnnnnnnnnnnnnnnnnnnnnnnnnctttttgtttttttttttaaaataattttggatggaagcttgtggcgatttaataaaatggagaaactccctttataacaaaacaatttctgtggcagcactggaaaagagacaaggcttttatgagagatacacatacagagaagaacactggtacccatacgaagggtccatttcttttaccgaagcaaatgcctctaatattttacaccgtgtaggcgcatgaggtgagaaattttcaatccttagacctgagcttcggcgaatctcaaccaaggttgttttgccagcttatggatctataatctacagaccactcccaagaacatggccggctaatccaaactctatcagacatcctggtacgtctactccttcctggattaaccgagcaatgtctgtcaatgtcagtactttctctgtcacacttttaccaaatatt

SEQ ID NO: 120140 - DNA, 525 bp, Arabidopsis thaliana columbia
  unsure (1)..(525): unsure at all n locations
nnnnnnnnnnnnnnnnnnnnnnnnnnnnnnnnnnnnnnnnnnnnnnnnnnnnnnnnnnnnnnnnnnnnnnnnnnnnnnnnnnctttttttttttttttcgtccagtcttacccttatcatccttcccttcttcgccattggattctcctactcccttttcttcttccttggtatctccttccgctgccgaagcctgctcactaaggtgcgaggtggaggccgtggctctattttcatgatcccaacacgtattgcggttcgctcataaaccaattctacaagctatagtggtcaaaaaactgcattcaccgacactagaaaactatataaggcggatgcagcagattccactcctgaaatcctaatgacccgatgctggatcatagtcgcacaagcttcacagcgcatgtgaaccttaagaaccagcgtcacaaccaccggaggctccactttcttctcttccacataggggccatcctccaatgctttattctccggcggcggacgccgatgatgaatcgtaga

SEQ ID NO: 120141 - DNA, 471 bp, Arabidopsis thaliana columbia
  unsure (1)..(471): unsure at all n locations
ccccccaagaccccgcccaattccccggtcacccccggttacggttctaaaaaaaaaacaaaaannntttcaaatccttttaaaaccccttccccaaaaacctactttttccnaaataattttttttnattaatttaaaattatccctccccttccacaaaacccacaatcccttccctatctttggggggggtcccaatcccctggtttccccaataaaaaaaaaattccccnaaaaaagcccttagaattccccttcccgtggcttttttactccctcttccaccttctaaaaatcaaaccccttcccctcccactttttaattattattcccttctttctttttcgcccccaacccaaaaaaaaaaaaacttctcccccagaacggttttctcttaaaaacaatccataaaccccttaaaaactccaattttttcccctctctactttctaaactcccaaattaataa

SEQ ID NO: 120142 - DNA, 348 bp, Arabidopsis thaliana columbia
actcactatagggaaagctactacgcctgcaggtaccggtccggaattcccgggtctacccacgcgtccgagaggaccctttttttacaattatacccttctccttcccagttctctcattatcctcctaacatttcttctctagatctgagaaatcaccatgggagtcgctgttcttcatcctcatgattctataatcaatcatttctccacaaacttgtgccgtggggtgcggcataaaaaaccgatcaccaattcaacactcccggagtccgtcaagtcaccaatccccagatctctcattctcctccctgctgctcataacccacaccaatcatgttccaaatt

SEQ ID NO: 120143 - DNA, 424 bp, Arabidopsis thaliana columbia
  unsure (1)..(424): unsure at all n locations
actcacttagggaaagctgctgcccctgcaggtaccgggccggaattcccgggtcnacccacgggtccgggggtatataccatacttcnantgacatcattcatcacnaaaagaaactatagtgaatgcttgcgctctgttgttactgcacataaaaaagagaaaaaaagatgctgcaaaaacctacaaactatatgtggttgtggagactgtgacaatctnagtggggtgggatcacggnccctggtgctacanatgacatataagttctacatacgatttctaagaatttgcttcggtcattgtgcttgggtaagggcttctcacctgctttaaaaagatggatttggcagtgcgatttactgagcatatatcgagtccttcctcactgcaaaacgcaagttatttgaatcttcaattttat

SEQ ID NO: 120144 - DNA, 478 bp, Arabidopsis thaliana columbia
  unsure (1)..(478): unsure at all n locations
taccgggcccgaattcccggggttacccacgcgtccggtgcaaatcaatctcaaaancaancctgcttcattaaatggcgagcttcattctctccaggtcattactccttctactcctgtctctcaccccattactctccaacatctcgatttccgaagctacctcatcgttctccttcacaatctctcggaagggtgccaactttnantccgaaaactttaaaaaaaacagccacgcttaactcgtggacgggggttcttcaattcaccttacttactaaggaatcaccggggtgggcaatccatttataaaaaacccattgatccctaaaccaattaaaaatccagtttttcacccgtatctctacttcttatctttcacaaatcctccaaaccggggggggaaactcaaattttaacggcttcctataaaaaaaaactttcatcacttttttttcccaaaaaagtttaaactttt

SEQ ID NO: 120145 - DNA, 485 bp, Arabidopsis thaliana columbia
  unsure (1)..(485): unsure at all n locations
ctgcaggtaccgggcccgaattcccgggtttacccacgggtncgggcacgcntacaatatctaatactcatataattacnctcattagtgcaataatccagacatcatacggtacaaatttgtaatccattctctcatgggggttgctatcatgaaagattcagacctctttaaagagtgagagtattaagatctttttctgggggggggggacctttaccctaacctccaacaaaacataaatnaattattcccgccggggccattagtttcctgccacttttaaaaggtaccaataaactataaaacatctctcgtgacaaaanctcctagggcctgttcttttggtcacacttcacttgtgaaatcaatggaaagcccaattttccctcatcgggggggcaaaaaaaactaacataacgttggggtggatctttacgataccaccatgttcaaaccttttttgggtctataaaacaaaaaaa

SEQ ID NO: 120146 - DNA, 470 bp, Arabidopsis thaliana columbia
  unsure (1)..(470): unsure at all n locations
aattcccggggtttacccacgcgtccgggggcgcgtaggcaacacatnaataacgcctggtggtctaaaaagcatgctcaanttacctcaacccatgaccttcaacttctgttcgggaatctcccccccctccgtccacaattgggagcacgctcacttttagaaatattaactctttacgggggggggatcacccctaagagtgtggaccatccaaaaaacccttccgggattgttttaactccttccacttctttttgcttacccttctcaccacaacgtatttttaaattttttccggaaccaaccggtttaaatccaatagggttttctttccaacggcgtccccatcaggaatccccccttttccccaaggtaaatattcaggggttttttttgttccccttccatgcaatgaaaccccaataaaatttttttccttttttttccccgaaaccttcctttacccc

SEQ ID NO: 120147 - DNA, 401 bp, Arabidopsis thaliana columbia
  unsure (1)..(401): unsure at all n locations
tttnccgtgctctcaaaacttatatcggatctcgaatcttgaatccgactcaccacctccggatcttcaaaaatccaccaacatgtcttctcctggcgaattctataactcacttccacctataacttatgcttggggggccttnnnccttttcactaccaaaaacaaaaacatctcccctttattgctgcccgtcacatttctttaaatcccttaacttttacctaagcagtttccaaatctgggaggctaataacaaacttttttttttctccgggggtttcttctatccattctggaaataccccttttcaataaaaccaaaatttggacttcacctccaaaaaggcccctttaaaaggccccccccccactttttttggaaaaataaatctcccaat

SEQ ID NO: 120148 - DNA, 657 bp, Arabidopsis thaliana columbia
  unsure (1)..(657): unsure at all n locations
ggggggggaagaaaactttatttttaacaaaacaaaacttattgaaagaaacccccccccgcccggaccccngcccgaaaacccccttccaccccgccgcncgggggcaaaaaaaaaaaaaaaaaannnaaaanggcgcccccacggcggaaaaaaaaaaaaccccaacccccaaacccccccccccgcggaaaacccccaccccccaaacaccccgccccccacaaaagggggngcaaacaaaaaaagcaccccacaaaaaaacacccccnncatttttctaccgggggtgttgggcgnacancccccctgggcccgctgtttacaaacccagccacaaccgcccccccacaggtgagaaacccctccnttttatatataaattgccaaagggccccccccccaacccgcgcaccaataccaccacacacaaaaagaacaaaacaccccgcccccccgacaaaaaaaaacacccccacaaatcccaaggcaaccaccaagacaaaaaacaccacagcgacgcgaaccaccccacaaaaaacaacccgacacacaaataaaaacaacccgcccgcgcctataacctaacacacacccccaacaacaaacaccccgggaagaaacccccaccaacatcaacacaccaacaaactaccc

SEQ ID NO: 120149 - DNA, 360 bp, Arabidopsis thaliana columbia
  unsure (1)..(360): unsure at all n locations
ttttactctccacagaaagaaaaaaaaaacctcctcttcttttntgatcctttaangaaaaagacnaaatggcaacggaatcntacgaaaccgccattaaaggactcaatgatcttctcattaccaaagcttatctcgggggcggtccccccnccaagatcaaancnttaacaaacangactaaaggagcttgactcaancaattcacacgcaatttaacgaatcaagacctgttttactcaattcaaaacccagaaatattttaaaaatagtactttgttcaatcatcttgccaaaactcaaaccccaaaatttctggtttttcctttctctgattctccaatttttccatctacattt

SEQ ID NO: 120150 - DNA, 491 bp, Arabidopsis thaliana columbia
agaagactatgacgtcgcacgcacgcgtacgtaagcttggatcctctagagcggccgcccttttttttttttttttttttttatttttttttgtttttttattttttattttttttttttttttttttttaagaacccatttggtgaattttttttcccgagggaccaaacaaaaacttccaaagggggcggggctttttattttttgcgaaacctttttttttgagcttttgccaattactggggaaaacatatttgaatcctcctttttccaaataattttgtgggaaataaagttccaacaatttcaaatgaccagcctgattctttcgtttgatctggcacccgttttttcattaatgttgtgacccaggcactgaagagttttttacacaaattttttgagtcatttcccgactgtacccggggtatccggtgaaaatacactttattggcaaagaaggcgccaaaacccccacacaatttgtgat

SEQ ID NO: 120151 - DNA, 307 bp, Arabidopsis thaliana columbia
  unsure (1)..(307): unsure at all n locations
aaaaaaactttaantttcaaaattaattccttccccctacaaaatcaccatgaaaacttcataagcttgatggggggtttttttctgggggggggggtcaacttnnccctttccttncccaaacaaaaaaaaaaaatctcaccaaaaaaagagaattcttgtaaaaccccgggctttaaatggatacacttaatccccaaactttactaatggaaacttcccaaagggaagaaattttatttttatctcccccctcaccctaaatggcttgcgccttcccttaatcacaaaattggggcgggggttt

SEQ ID NO: 120152 - DNA, 509 bp, Arabidopsis thaliana columbia
  unsure (1)..(509): unsure at all n locations
nnnnnnnnnnnnnnnnnnnnnnnnnnnnnnnnnnnnnnnnnnnnnnnnnnnnnnnnnnnnnnnnnnnnnnnctttgtgtttttttttttttttttttttttttttttttttttttttttagtttttttttttttttttggaaaacaaaggagatgaattttttgttggttgacacaagggggagaaacaaattgcctttttttgaaaagataaatgtagcaattttgatcaatagagagcactggatttgtggggaaggaatcacaaaaaacaaggggtttgtaatctctgtatctctatagaagatagtatcagggggttctttttaaggcaacatccaggggtgactgttaaccttctttgcacaaattttcttcaatttggaatgacgaactcttccactttatgttggaaaaggacaataaagcgatcgttttgtcattgtaaaaagagaaatgaccatgtctttttcaaaaaaacaaaacgtcttgggatggactttttaagct

SEQ ID NO: 120153 - DNA, 486 bp, Arabidopsis thaliana columbia
gcctgcaggtaccgggccggaattcccggggtgacccacgcgtgcgcgctgctgaggcatacaagaccctaacctcattgaagggtgtgactgcctttggatttgatttggttcgtggcaccaagacccttgatttggtcaaggcaggtttccctgagggaaagtacctctttgctggtgttgttgatggaatgaacatgggggggcaccacttttctgcgtccctaaacaccttacagggccttgaagggattgggtggtaaagacacccttttgggtctcaacctcctgctctcttttccacacccgtgttgatcttatcaatgagactaagcttggttatgaaatcaagtcatggttggcggttgctgcccaaaagggcgttgaaatgaacgctttggccaagggtttggttggtaaaaggacgaaggttttttttttgcaatgctggggctttgggttaaagggaattttccccagagtaac

SEQ ID NO: 120154 - DNA, 363 bp, Arabidopsis thaliana columbia
ttctcttcttcttcacatagatatccattactctactcctgtaaaatcttatccctcgggggtgaaattcccctttccctccttcttcaaaaaaaaacaactaccacaaccttggaaaaaaaaaactctaaatccacccgggaattaccccttttctagaaaaaatctttttcctccccgaaagtttttttaattaaccataaattaaaaaaaacctaaaaacctcttaaaggattttccttatttccaaaaccttaattcctacatccattgttgttcccacttttaaaacataaaaaaatatgattcaaacccgtccttcttttgccctaactcatttccgaaaatccaatttttttaccc

SEQ ID NO: 120155 - DNA, 447 bp, Arabidopsis thaliana columbia
  unsure (1)..(447): unsure at all n locations
ctgcgggggccgggccggagttcccgggtttacccacgggtccggtgcgcaatgatnatatccanngaactgctggtgttncactggctggactattgggaactgtaagagctcaagggcggccgtatccgactttgtgaccaaaagaagttgtggtggggctggaagggctgggcttggggttacttataggggggggggggcancttcccaaaatggcattatcaaaaanggtcaaccacacgggggttttaccctgttgataaagatgggcttggcaccgcggggggggcaaaacttgagccaggagctttcctttttgccaaaattcaagtgagatacgggaggggacaagtatcgttggaggggggaaaaggggggccccttgttctcctggggtatgtgggggtgggggggtcttttatggaggaagttttaggggggtgg

SEQ ID NO: 120156 - DNA, 513 bp, Arabidopsis thaliana columbia
  unsure (1)..(513): unsure at all n locations
nnnnnnnnnnnnnnnnnnnnnnnnnnnnnnnnnnnnnnnnnnnnnnnnnnnnnnnnnnnnnnnnnnnnnnnctttttttttttttttttttcttttttttttttttttttttttttttattgtttttttttttttaaaaaaattgttaaaaaaagaaagaagctcgaaaacgaattccacaaacattagatttaaaaggaaacttaaaagtatttcgggggggctttatttgcctagattaaaagaaaatgtggccccatcacgctccatacatacattatacattttttttgggttattttttagggaaagggggaaagggcaaaaacatttttttatccccttcatacaaaaacaaccctttggggttttttcgccacttgtattccgaccaaagaatttcttttttttttatgtccaccaccaataattggggatcgagctcttctatgagtttttcctcaagtgacgttgggcccgaaactgcccaagcttgtgtttccactcaggggg

SEQ ID NO: 120157 - DNA, 354 bp, Arabidopsis thaliana columbia
ttcctctctctggcttgggtcagaagctcttcaaacttcttttttaaccaactacccgcccctgttttataccattcacggatctaattcgggttcgaatttttttttcacggatgttggggaaaataacaaccggtttcaaccaaaaaaaaatcccccctaaaagggggggggaaaagtacgtccattttccttaactagccaacctccactgggtctcaaacctgaaaccgaagttcgggggaatggggccaagagggggtaagttttaaggggcccaaccaaaaaattacttctaagagtgcgcgcccaaaaatactccagggcgtaacgaaaatttaaacgccgggggaa

SEQ ID NO: 120158 - DNA, 201 bp, Arabidopsis thaliana columbia
  unsure (1)..(201): unsure at all n locations
ggacaaaaaattatttccttaccctcacacctgcgctctaatcaccttacacctttttagtccacttacatcagcttattctggtaaacctaatctcaacttttgcagggggttacatttacaggantttaaaaaaatttataaatttcatctggctcgaaaacacagtcccgtaaaatatcccataaacccccaatccta

SEQ ID NO: 120159 - DNA, 518 bp, Arabidopsis thaliana columbia
  unsure (1)..(518): unsure at all n locations
atgnnnnnnnnnnnnnnnnnnnnnnnnnnnnnnnnnnnnnnnnnnnnnnnnnnnnnnnnnnnnnnnnnnnnnnnnnnncttttttttttttttttactaagaaaaataactttttaaaaataatttttaatctatgttattattatacaaaccaagaaaactaagctttgtatgttaaaataaagattatacaaagtaagtattcatcatcttaattttaatgactatggtttacttggtcttgaggttgttgtgcatctatctttatcaagagaggctcatttaaatccgtcgaagcatcatcagtaacggtcagctccggcaaggctgcaaccgcttcgttcatgtctcctccgtgctctgctaaagcttttcttagagcgtccttcgccacctttgtaacacacaccattaatatcacggatattacaaggctcgaaatcaagaacgcccagcgacctggcgagaactcgctccacttgtgagttacatcagaaaggtcttttagagttgttcca

SEQ ID NO: 120160 - DNA, 194 bp, Arabidopsis thaliana columbia
  unsure (1)..(194): unsure at all n locations
ccaccatgggctattttaatttctggatcacatgaatattataactacaggcgtcaggctgacatatgccacgcgtatcanatactacaaaaaggctgtttaaaagataaaaacatcattgtgcttatgttatgagggggtggcnttttcctcggagaatcctctgccaaaaaattatcatttataaaccagat

SEQ ID NO: 120161 - DNA, 521 bp, Arabidopsis thaliana columbia
  unsure (1)..(521): unsure at all n locations
gaatgnnnnnnnnnnnnnnnnnnnnnnnnnnnnnnnnnnnnnnnnnnnnnnnnnnnnnnnnnnnnnnnnnnnnnnnnnnncttttttttttttttttttttttttttttttttttttttttttttttttttttttttttttttttttttttttttttttttttttcttgcgggaaaaaacaaatttggaaacctttagggtttaccaaaagcccaaacccctgggaaaaaaattaccccccccctacccctgaaaaagggcggggaacttcccccaaattcccgggacccaaaaacccaaactttagtcctcaaaaagttccggcacccccagaaaaaccccctggttaacgaccccccccaagaattgggaaaaccctttgaaaaaaaaaaaaccctttaaaaaaaaacaaggagggtttctacctgatgtaaaaaccggttggggagtttcccccaaaacccccgggggcaaaccccggaagctgggtggggggtaaacccccttaaattcttgcctct

SEQ ID NO: 120162 - DNA, 164 bp, Arabidopsis thaliana columbia
  unsure (1)..(164): unsure at all n locations
ctgcggaccgggccgaattcccgggttacccancgtncgggcngcgtaccanatttcntnacttattcttacctttctctaaaggaagcttatcttttactcagatcactgccctgggcttattccttgatctggtatatacaagatggctctgcgactctgag

SEQ ID NO: 120163 - DNA, 430 bp, Arabidopsis thaliana columbia
gggggggggcgagccccaaggggggccactcccttaatggggcggggtggggaagaagggaaaccgacgccccccaaaactccatataatatcgacgagttatggcacggacgatatggttcagtgcgacccgcccataatcgatccccggggtcgcactcccacgattaatgttggtcgtgctaaacatcgatgcgacggcgcccacccccccttaaagtcatgtcgtctcctgcccttgtttcatcacgtcagccctcatcgtgataaacaaagggcgtgcggacatcgagtgtcgggtgggacccactgatgagaaacaaattttcctacccccgttgggggtgcgaaattgcgacgggttgcgtgccactggtagtgtgtgctgtcacagtacgggactctatatgtctaatacagaggcagcgag

SEQ ID NO: 120164 - DNA, 522 bp, Arabidopsis thaliana columbia
  unsure (1)..(522): unsure at all n locations
cagnnnnnnnnnnnnnnnnnnnnnnnnnnnnnnnnnnnnnnnnnnnnnnnnnnnnnnnnnnnnnnnnnnnnnnnnnnnnnnnctttgtgttttttttttttttttttttttttttttttttttttttttttttttttatcttttttttttttttttgggcaatgaaaattttgccgattgaggcctaaaaaaacccaggtgttccatttataaaaaacattgggttttattcaaaaagaaccaaaccgggggaaattgaccccccgaaaatattttattttccccccccccgggggggggtaaacccccttcatcccgggtaatacaccctaaggggtttaaattggtgggcccccacataaacggttccaacccctgggcaccccccccggttttttggctaaacggttttgaaaaaggggggttcccggggggggggggttttcctttggccggggttccctcccgggggagctggcaccgccggttttttggcggggggcgacaatgtacttttttttt

SEQ ID NO: 120165 - DNA, 657 bp, Arabidopsis thaliana columbia
  unsure (1)..(657): unsure at all n locations
cggcggggggggggcggcggggggtgggggcgnactccaactttttttttttcggcccccttgtggggggggnggngcgggcgcgcgggcggggcccgcgacccccacgcgggcgcgggcttttnccccggccgttttcgggggcccccccacccaacaccncnccgcccgccnngcngcggcgcgcnacgggcgcggccgccggcgcggcgggccgcgcgccggcggcccgccgggggcggcggcgcgcgggggcggagcccccccccccccgcggccgacggcggccgggccgtttcccgtgggtgccggtgtttttttttgggggtgtggggggcgcnccgncgtggggggcttcgtcttgagaagcagttgtcctcccccgcccggttggttcggttgctgtgtcttcctgttttctttgtggttcgcgtgctgtctggttttttgttgtcttgcgcctctggtgcttctcgttttgtttgtttgttgggtggtgttgtcgcggcttgtttttcgtcctcggttgttttgtgctcgggctgttgttgcttgcccttgtcggcgtgtgtgggtcttttttgtgttttcccgtgtctcgttgggttttttttgcgtggcgtggttgttcgccgggttgtgcgttttctcttgttt

SEQ ID NO: 120166 - DNA, 438 bp, Arabidopsis thaliana columbia
cccccgggaccgccgaatcccgggttaccacgcggccggtcatgaaacactagtctaaaggatctttctatgctcacacccatacccttattttgatatacatccacaatcattccaacattgaagcttcaaatttttaccaactctaatttaactcattttttggggggactccattttccaatatttaaaaaaaaattaaccatctttttcgggtgggaatacaaaattccaactttaaacttttattgaacttaaaatctcttccctttttttccaatcaaattcttttttccacacaaactcaaaacctaaacctttaacctttaaaaaaaaaaggaacttctaaacccttttattgaagaattcaaaaaaatttttacaaattccacaactccaatttccctttctttattttcccaaaaaaaatattctttc

SEQ ID NO: 120167 - DNA, 458 bp, Arabidopsis thaliana columbia
  unsure (1)..(458): unsure at all n locations
ggtgnnnnnnnnnnnnnnnnnnnnnnnnnnnnnnnnnnnnnnnnnnnnnnnnnnnnnnnnnnnnnnnnnncttttttttttttttttttttttttttttttgttttttttttgttttttctttttttttttgttttttttttttttttaggggagaaaaaagaaacccccttttttaaaatcgccccgggtggataaaacccatgtgtgccaaacctttcttgttcccataaaagcgtgggcgcttaaaccccccccctaatccaaaagcttgccggggcccgggccctttttttacgggattttcagaaaaaaaaaacctaatttccctctttttcattggggaaaagggggcccatatggcctcccctctgaagaaccaaaccccccgtttttccgggggacccaccgaccttggaaccgttttttttaagcccgaaaggggcccccccggtgatt

SEQ ID NO: 120168 - DNA, 388 bp, Arabidopsis thaliana columbia
ggggtttttaatcttgtaaaagaggtttttgtgttttcaaggggacccccccctccctttttgtcaatttcgaattatcacaaacatgcggaaaaaactatcttttcggggggggggggaataacttcggggggggaccaaaaggattaaagttccattcacaagaattcccttccctccacttcgatttgtcttcccacacaatctttttgttttaccacgaaaatccgcccctctctttttttacagaactatggaggggccccccccccccccgctttcgaaggggcagctgaaagaaaatcccatttaacagtgggaccgggggaaacctcccccgtttcctcggaaagctcgcgcctttttgtgccccgttgcccgcttttgc

SEQ ID NO: 120169 - DNA, 509 bp, Arabidopsis thaliana columbia
  unsure (1)..(509): unsure at all n locations
aatgnnnnnnnnnnnnnnnnnnnnnnnnnnnnnnnnnnnnnnnnnnnnnnnnnnnnnnnnnnnnnnnnnnnnnnnnnnnctttttttttttttttttttttttttttttttttttttgggagaaacccaacctttttattacaaacttgatacaaaagcaactgatttaaactaaataaagccaataaataacattttcttagcacataaacaaaccttatttctcactaaacaaagtaatgtaatttgctaaatattggggtcttggcttggctggcttcattcacgtaaacaacaaaacatatgtctacatatgtctttaaggacttaaaagtaacacttatttaaatcatgggataccaatgattggtaaaaagggaaagaagctggcaggtgggaatccaaaacctcctgcccccggaaaattaatagtcttggaatctcggacgcgtgggtcgacccgggaattccggaccggtacctgcaggcgtaccagctttccctatagt

SEQ ID NO: 120170 - DNA, 124 bp, Arabidopsis thaliana columbia
  unsure (1)..(124): unsure at all n locations
aaccccctcctcctcgattcgttcccgtcaatcaatataatttcggcagagttnattcacctccctcttctctacatattgatccatattaaataactgtcttttntcctaaaacatttatcat

SEQ ID NO: 120171 - DNA, 522 bp, Arabidopsis thaliana columbia
  unsure (1)..(522): unsure at all n locations
agaatgnnnnnnnnnnnnnnnnnnnnnnnnnnnnnnnnnnnnnnnnnnnnnnnnnnnnnnnnnnnnnnnnnnnnnnnnnnnnctttttttttttttttttttttttttttttttttttttttttttttttttttttaacaaaaaaaaattcttaggcttagcggttaaaaaattttaaactccgccaaaaatcaaaataaatttgtagttttttatcacgggagagtgtacccctaaaacagttcaatctaattaaaaagtcctccacaaacgaaacacctttttagccatgcgtgttcacagcttcccaaagcaagtttttcaacacaggattaggcgcatctttagcttgaatcgccgcgttcttcaaagtcctaatcggccacacattaacttcccaccacgaaagactcctatacgggagattatgcttcttacaaagcttcttaaccaccggcgatactggccggagatgacaaccaggaacccggggaaaccaatgatgctctaactgaaactgcc

SEQ ID NO: 120172 - DNA, 520 bp, Arabidopsis thaliana columbia
  unsure (1)..(520): unsure at all n locations
annnnnnnnnnnnnnnnnnnnnnnnnnnnnnnnnnnnnnnnnnnnnnnnnnnnnnnnnnnnnnnnnnnnnnnnnnnnnnctttttttttttttttttttttttttttttttttttttttttttttttttttgttttttttttgttttttttttttttaaaaaaaaaggtgggcattttaaatgcgacccaaatctggggagccccaaaaaaaaaaaaaaacccaaaaaatagcccccccaaaaaaaatttttgggaaaacaagaaaaaaaaaactaagttttttaaaacgaaaaccgaaacccccccgagtccaaaggggtttaaagggggaccatttcccagggggtttggaggggggaacccgtttaaaaccacctgggcccaaccccaaaggaaaaaaaaaaaaaaaacctctcaaaaaaaggggaaaaaaaaaattactgtgtggcagtgccaagggggaaattctttttggggggggaccaagggaaccttttgaattggggcccaagaaaatcc

SEQ ID NO: 120173 - DNA, 353 bp, Arabidopsis thaliana columbia
  unsure (1)..(353): unsure at all n locations
ctgcaggtaccgggcccgaattcccggggttacccacgggggcggggagggttatgggattctcccacgttttatgacttcaactgttgctatccggcaaaggcgaacactgttagagaaggagatcaatgctaacgctcttaacatacgaggcagtggctaaaaatcttactcacttctacacttctcantttattggggggggtgactcaccaacgatatctctcctaagaacatcatacacataaccgggttgaggctcagcctacagttgaacaccaccctaaacgggtatatgacatataaaaaatgattctttacggggaaagaatttcaatgttctttcttcacca

SEQ ID NO: 120174 - DNA, 267 bp, Arabidopsis thaliana columbia
gccccccgccgccaaccgtcccggcggccctcacacctaatataccccctttttccttttataaattcatccctgttgtaacaatgcttccttctttctcacattttagggtgggatttctccctacaaatataacttcccaaacatcaaactaaaactgtctttcctatctttgcaactaagtcttcgctcattctcaatcatttttcaatttatgtctcccaatttttcaaatttccactttaacaattgtggatataatttcct

SEQ ID NO: 120175 - DNA, 510 bp, Arabidopsis thaliana columbia
  unsure (1)..(510): unsure at all n locations
attgannnnnnnnnnnnnnnnnnnnnnnnnnnnnnnnnnnnnnnnnnnnnnnnnnnnnnnnnnnnnnnnnnnnnnnnnnctttttttttttttttttttttttttttttttttttttttttttttttttttttttttttttttttttttttttttccccctggaaggggaaggatttctttaccttcaaaaaacaatgttttaattttttccacagttaaaaagtatttccttgttcctaccaaacatgaacaaaagccgggttttttacacataaaaaattgcccaaaacccccctcccatgaaaaaaccaagcctatcacttttgaaataagggcccaaaaatactaccttccaagctaaccaacccctaaaactccctttttacttccatccaatttaacccaaaaaaaaaaaccctcattggtgtctaaacctaaaacctaaacgttttttaattaaaaaaaaacgggttctttccagggaaatacttgaaacccggcattttcag

SEQ ID NO: 120176 - DNA, 343 bp, Arabidopsis thaliana columbia
gtggggatagttatgtatttgtgctcttctgggtttaatgaacatagagggtatgctaataaatatgagttcttggaatcaaaaccccttggctctcaatatttctggggggggtggcctcaactttgggggctgttctaaaaaaaaagcttccatctgaatggggggttccttttatcaaatatttttaaagtgggaatccggcaaacggaaataaatttattgagatttcctttcagcttcgcctaatgaggaaaacgccgctaaccttttgcttatttttgctcctttaaaggagaccagttaaaccacttttccgaaaaaaaaacccttctaaggggtt

SEQ ID NO: 120177 - DNA, 495 bp, Arabidopsis thaliana columbia
  unsure (1)..(495): unsure at all n locations
gaaagcgaccccgcctgcaggtaccgggccggaattcccgggtttacccacgcgtccgagaactaagtgaccaggaaaaanatnagtnngaagaaccataccgccaccgtatctgctcgtatcgccgccattatcgccgccaagaaacgtcgcaagtctggcaaacgcagcatgtgtcagggaatgtgttttactcttcctacactttaagaggggtggaatgaaaggcaaggtaaancttatattactaaaaagaaaaagaaaaggagaaaggtgaaaagtananaagacaanaaaccatctcctatgtctattgaaggtgttgaaaagatggatggtccaccaaagtttctgatgttaaactgggatgagattgagagctcatttcgtaaagattttacataccagggaacaacatgataagtctttggttactaatagtgcggggatttagttctcgaaatgttactcatctgggaattgattttttggccc

SEQ ID NO: 120178 - DNA, 182 bp, Arabidopsis thaliana columbia
  unsure (1)..(182): unsure at all n locations
ccgggcccgaattcccgggttgacccacgcggccggggctgagttaaaaaaaactcnatnccattttnctttnaaagtcatggataaagcgtctcttgaggaccggaagaaggttaatccagctcanacccgagagggatattctccaactattgggatcatcccgtttctacccacattgg

SEQ ID NO: 120179 - DNA, 496 bp, Arabidopsis thaliana columbia
  unsure (1)..(496): unsure at all n locations
nnnnnnnnnnnnnnnnnnnnnnnnnnnnnnnnnnnnnnnnnnnnnnnnnnnnnnnnnnnnnnnnnnnnnnnctatgtgtttttttttttattgttattttttttttttctgcaaaaaggggttgaaaaatacgtattccaaatccggggtcatacattataaaattaggaacagaccgcgccctttataaaaatggaaagagagagataagggttcatcatcggcttaagcagcatggagttctttgcccttcttctccctccgccgcaagagactgggcttgaagccgaccttaaacaacttctggacctcctaaaactagaaccctttggtctcaggaaccagcaaccaaatgaagaagagcccgatcgtggagaacccagcaaagagaaggaaggttccaaaggacccgatagcatgggtgagtgagaggaaactctcacttcctatcagggtgggagacccaattcgagacgggggctattcctccaccaag

SEQ ID NO: 120180 - DNA, 494 bp, Arabidopsis thaliana columbia
  unsure (1)..(494): unsure at all n locations
ggaccnggcccgaattccccgggttaccccgcggccggggcgcaaaaaanatancaatttcctccccctccctnngttatcatccctnnaaaaatcttttttcngtttacctttnatattacttccatcacctctcccccctttatctcttaaaccttctcccccccaagattaaaaggggcccctttttttcccgggggggggccccccctcccccggtnggcccattacaaaaaaaaaccccccccaacctgtgggggtgggcccctccctccccgaaaccattgagaattggttgtttccggctttctccctaaaattcccccctcttttttccacttttccccttattttttcgcccccccctcccccccccccggcgggctattttaaaacagcgacgcgtttcccgggtatccaccccctctttttttgcgaccttccccccccgcttcctctaaagtgccgttcctatatcccaacccctttccccc

SEQ ID NO: 120181 - DNA, 472 bp, Arabidopsis thaliana columbia
acgccgtgcgtgagccgggatcctatagagcggtctgcctatctgctgttctttcctgtgtgaagaaggtctagaaaaaaaacgggaacagcttgcaagactagatggcacataaacaacgaactccccacaatggagtgtcaccacagtttacatatggcgtaatgtgtgatgtggacacaaagcttcacacccattttttttttggtggtgggggctaataataccgcaaacccaagaatatctccgcattaggggttgggtcaacagttaatcattattccctcaactccaactggcctggacaatccaatttacatttggaattaaacaacagcatgtgggatttggataaaactacaaatccaactgtgcgctcttctttcaacggctattttcaaacgaattggaacaatttgagacgcgccagacgaagatcactttgctacaatctgggggttacagggtcctc

SEQ ID NO: 120182 - DNA, 424 bp, Arabidopsis thaliana columbia
  unsure (1)..(424): unsure at all n locations
tacttaatttnacactcttctttnnnttttctcttccaccttctttttcgggatatcattcaacaaaattctctcttcatttctttattttcttnntttttttattatttttnaaatcttttttaggggggggggccctttccaaaagaaaattataaaaaaaaaaacctcctcttacggaggggggtggggtttcctctttcatttagcttttgcgacggctgcaaactttgcgccaggggcagcggccaagctggcttggggttttgggaggaaaggggtaaaaacccttttttttaaaagggggagtgtttggtttggggggttggggtgggggataatgccggggtttgggtctaaagcgcaggttggcgcggaggtgggcgtgaagatgcgggaagaggcgggggatttgggtgaaggg

SEQ ID NO: 120183 - DNA, 514 bp, Arabidopsis thaliana columbia
  unsure (1)..(514): unsure at all n locations
nnnnnnnnnnnnnnnnnnnnnnnnnnnnnnnnnnnnnnnnnnnnnnnnnnnnnnnnnnnnnnnnnnnnnnnnnnnnnnnnctttgggtttttttttttttttttttttttttttttttttttttttttttttttttgaggaaaaaagttaaaggattttgaagatgagaatttgtcgcaaaaatgatgtgagaaacttttccgttgccaccaaatgggggtttgaaggaaaaacaagttaaaccaagggaatagtctaccctttccatgggaaatcatacaggactcaagataatcctcctgaccgaagtaaaggaagaaaaaccccgcaagggggaaatttggtaacccaacaaaaaccgttttgaagggggcccaagtgaaggaagcttaagctggtttttattctccagggacagggactccttggtttagcttctcccggttgagcttttttttggaaacgggctttttttttcttggagggagggttttctgagcataaacgtaaagcc

SEQ ID NO: 120184 - DNA, 367 bp, Arabidopsis thaliana columbia
  unsure (1)..(367): unsure at all n locations
cctacctccattgtaacaaaaaaacaaaccttactaagggtacacaaacattttttttgggtgtgcgggnccttaccaaatgagaaaaaggataaaaaccactcggcccccggtgggggcggacttctcataaacccaaaactccccctctnaaagataacccgtcttttctttttaactcaccccccttccttcagccgcatatctaaatattattccgggaaaatacttactacccccacttcacacccatcacaaatatttttatagaaattcaacctttccccaaaaaaaaaaaccctgtagacccaatacttttcatttataacacccacttttccctcaccccaatatccctaatgaaaat

SEQ ID NO: 120185 - DNA, 372 bp, Arabidopsis thaliana columbia
agttgggcccagtggtcaaggagacctattcctaaacctggggaattctttttcgggggggggggggtaccctcaaggggggcggcttttactaaaaaggaacccctcatgtgcggggggggccagacaaatcccaacaacccttccttgagggcccaacccttcacatggagggctcctcaaccccgaggaggagattggcccaccccgggatcttcttgtttttgggtcccagggaggggggagaaaccccaccgccggggggattccggggggcagaaacccgggggcacggaattaaaaacgggggggggggggggaccgcttttgtttaccaaggaagcctgtggggggcttgaaccgggttttttt

SEQ ID NO: 120186 - DNA, 394 bp, Arabidopsis thaliana columbia
  unsure (1)..(394): unsure at all n locations
caaatccttttcacaaaaancaaccaaaaaatacaaaccataacacttccatcattttcaacaacattcctcaatctcttcacccaaacccctaaaaaatccaaaaatttttttcttcaaggggtggtannaaactcattccnatcaattaaaaaaaaattctccccccaaacgggaaaaaattcaaangaatttccttctaaagtttcaaccaaacccaatcacctacaaatcctaccctttaaacaacttatccacatccaaaatttaaaatccattccccacattttccctcgaggatttagaggatccttatctcttcgttgctcttcctccaatcccctcatctcaccctttcttccctcctttccccccccattccacaatcttttcc

SEQ ID NO: 120187 - DNA, 470 bp, Arabidopsis thaliana columbia
cgcgtgcgtgagcttggatcctctagagcggtcgccctggtggtttattcttaacaagatcatagctaccttcaacaccacaagtcatatctacacagtttcggcactttccatcttactgataattaccaccagaaagagcttaaatagtataaaatgccccaacaatcaaatcttcttcatggctcgcatgcataaaggtggtgactaaagcgctgctcgatggtccaatcagctccttgacctcttttgcttttgctgtatgaagcggacactgtgcttcccaagttcaaatgtcttgatgcttccatcatctagagaaaccgacaatgtggatgtgtctccagaaacgtctgtcactgttcccttacgccatgagttttgagatccatggacttcgactctctttcctattgaatctttacccaactttttcaaaatccagttagcatccatcatctaggcggtcc

SEQ ID NO: 120188 - DNA, 350 bp, Arabidopsis thaliana columbia
  unsure (1)..(350): unsure at all n locations
aaatggacccttttctgggcgctcactgaagttttcnattaaaggtttggtggaaaaatccccaaagaaaagcaaggagtgtggggaaacactcttcaagtaaaaagcatgctattttttaaggggggtggctaanttcgaggctggaattcataaagagatcgatcttagagagggggctgggtggtgttagaattgataatgccggttcccaaaatcaccaacactccggccgttaatagtactttattttgcgtttactcaccccataagccttaaagttaaaaccccaccacgggttgcctagtcctgctggcctcctccaagattgcctttagtgcctttcggat

SEQ ID NO: 120189 - DNA, 564 bp, Arabidopsis thaliana columbia
  unsure (1)..(564): unsure at all n locations
gggggggcggccccccccccgcgccngcgggctctccttttccccntgttggggggcccccacccactctttncntcctcctcttctccttccttccctctcttccccccccccccccctctcccttcctccttttttcttttttccctctctctttcttttttttctcnntttcctcttttcttttttcccccctcctctcccccctttttttcggggtttgattggggccccccccccgggggggggcncccctttctactctctccccccnctctcncggggcgcccccccctctctcccccttcttttttttctccttctttccccgccccctgccgtgtcccccgccccccccccgccctcctctcgccctcctccgctcgcgcgcgtcccgcgcgccgtgggctcgctgtgtcccgtctttcngcggtcgccccttctccctcttctctccccgccttttctcgccttgtgcctcgtcttcttgggctcgcctccttgtcgtggtccctgctccgctcgtttcggggctgtcccccgttcccgccccgcgctccctct

SEQ ID NO: 120190 - DNA, 500 bp, Arabidopsis thaliana columbia
  unsure (1)..(500): unsure at all n locations
acgtaagctcggaattcggctactagttttcgnctctggggtagggcgcccaatatctccgccggcgggaaaaccatgtcgcacttcggaaggtcaggtccaccggatatcagcgacacctactcacttctcgtccttaacatcaccttccgtacgactgctgatgatctctatcctctattcacatagtcngttagaagtgggggacgcccccatccccaaagatcgaaggactggtgactcgcgtggttttgccgttgttccctataattataaagaccaagctcacaaagcatgtgaaaagggctaattggaaaatatttttttatggccaaacaaatacctggttaggtttgcgaaatactgggccaccatgctggaaaaaatttccaaaaggaagagtttgtggcacccacccgcccaagccaccgaaaacctaaaaagcccgttagcctatggcgggaggcgccctcctagggagggggcccccacccccccta

SEQ ID NO: 120191 - DNA, 491 bp, Arabidopsis thaliana columbia
  unsure (1)..(491): unsure at all n locations
gcaggtaccggtccggaattaattcttgggtcgaggggcaagcggtcngaggcacaacctttttttttttttggggaggtagaatgctatgaattccaaaccagagaagattcaaataaaacagagacttaaaaggctgttcaaacagtaataattcttgcacatgaacactaaaccaaaactatcttgggtataggagtgtgcanncancactcagtattttgagggcacctaccgcaagcaagggatactacgggggggtacactttccagggcttaatggggaaacatcatcacggcaagcgagcgtgttttttatgatacaccggatcacttttacaggggggtggagtcattccgcagcataagggagtagactttaaaaaagcggagtcaacctttggccagagggaggagggttcccagagagggggggcctctatttgcttcgcctttcaggagaaagcttcttaaagggggaggccttttgc

SEQ ID NO: 120192 - DNA, 171 bp, Arabidopsis thaliana columbia
  unsure (1)..(171): unsure at all n locations
cgggccggagttccctggtttacccagggggcagagcgtaccaaaaaaaannaacacnncccaggggcnctcnagnnnnnaacgctatgaancgccgagacgatgctgctactactctattatgtggcaaatcaatgtctgcggaatccctaaatcttcggtccgaggcca

SEQ ID NO: 120193 - DNA, 499 bp, Arabidopsis thaliana columbia
  unsure (1)..(499): unsure at all n locations
agcnggganccaanagagcggttgacccgggggggangaggccaacaaaacaaaaacangaagaacaaaagggggaacaacacaaaaccacaccccccccncggggnggagacccaaagaaagccacaccaaaaaaagaaangggaaaccaaaaaacagaganaaaagccggaaaggaaaccgttcctttaagggagcngggggagaaacccaaannaaaccaaaaagaaacgcccccccccaaggaagagaagacccaacccaggggggggaccnnagaaacacacaggggggaaagagaaaaggaaaaaaaccaaagggnggaccaaagggggggcagaccccaaagaaaaacccgggggagaaggccaacaagaggacccaagaaaacccggaaaccaaacggaacccccagggggcgggcgggggaaacaccccaaaggaaaagaaaagaaaacgggagagaagaaaaggccccccgaggaccccaaaaagagca

SEQ ID NO: 120194 - DNA, 430 bp, Arabidopsis thaliana columbia
  unsure (1)..(430): unsure at all n locations
gtaagcngggacccacnagagcggttgcccggggggggggaggcggnanaacnaaaaanagcgccgnnnaccggggggggaaaacagaggcccccaaaaaccagaaaaccagaaggggccacccaaccctttaaggggacaaagggcacaaagcaagaggccggaaaggggacccaaacaccaaatcctccttggaagataggagccaaaacaaggggggggccccgaaaaagcgcccccaanngggggggggggggccccccccccaaaaaggccaaacacaggaaggagggnaaacccggcggggccaaacaccgagaaaaggcggggagccccacccccccccaaaggacccaagggagggaaagggccgcaacaaggcccacaaaccagaacaagaaaaaaaacggacccaacacccccgcggagc

SEQ ID NO: 120195 - DNA, 181 bp, Arabidopsis thaliana columbia
  unsure (1)..(181): unsure at all n locations
tccgggccggaattccctggttacccacgggtccggggcngntaaaaaaaaaaaacccnccnnaccaggatancaatcttccacctcacaaataccaagttaccgtcnttnaaatctattatcattccagggcggggaacaaaaaatgggtggaaactcattgctgggaaaagcacaaaaa

SEQ ID NO: 120196 - DNA, 233 bp, Arabidopsis thaliana columbia
  unsure (1)..(233): unsure at all n locations
gcgttagcngggaccctctagagcggtttccccggggggncgaaggcgngcaacgaaganaagacagaganngggggaaggcanaagnnaagaaaagagagacaanaccggaagaaaagggcaagaaagtatattatgcatctaaaaatagaaagacacgcatagcatttgtggtatcaaaaattctttttctcgagagaggaaaagncccnganagcaagngaggagacagg

SEQ ID NO: 120197 - DNA, 438 bp, Arabidopsis thaliana columbia
  unsure (1)..(438): unsure at all n locations
acacacaaagacaccccaggccccaacagacacaaacccnaaaatttttccccacaccgacgacagcagcggcaccagcgaaagaaccaacgggaaaaaaanntttcccgcaagtttgagnnaaacagcgggggaacctgaggaaagaggccccccccnggggggggggggggggggccacccaccaaaaggggggaccccnncccgacncaacaaccaggggggagggggggaaaacaaaggagctacacaaaagaaaaagaccgccccaacgacagaagcaggccaggaagcgacacccgccaagcgacgctgagcccaaccgaaaagggggcaaaaaaggccaaagaacggcgccggtgaaacacaaacaaacagccaaaagaggaacaacgaaacacccggggggggagcacaaaaacaaaaagactaaggacg

SEQ ID NO: 120198 - DNA, 442 bp, Arabidopsis thaliana columbia
  unsure (1)..(442): unsure at all n locations
aaaaaaaaaaancccgggcccaaaagggacaacatccccataagcaaaaccnaaaaaacacaccgccaagagaccgagatgtttcacaagataaatgaacccaaccaaacaaggagccctgggcgaaaaaaaaatttctcttaagagagagggagaaaaaccgggcgccaacccaaaaagaaaacgcccccgcaacaggaaggggggcccgcacaaaaacaagggaccaaaaacccaagacgagggggccccgggggaaacaggacgcagaaaaagacaacgggcccccccaacaaggggggaaaagcccccaagcgccgacacccgcaaccccgaggcaagaaagagaccaccggggggccaaccaacccaaaaggcgcgggaagccaaacacaaaacgaaaccccgacccgcacacaacgcccccgacggaagggcaaga

SEQ ID NO: 120199 - DNA, 401 bp, Arabidopsis thaliana columbia
  unsure (1)..(401): unsure at all n locations
ggggggacccccccccacaaaaagcctctccgccggcccccacaggggacgcaaccaaggggcacgaaaaaaaaaaaaaaaaaaccctcccgggaagttgggcccccaaccgggggcccnccggaaaagaaagccccccaaaaagggggggggagggggccaccccttttggggggaaccaacccnccccacgaacgaaccccggcgcggaaaagggcggcgcgttagaaaaaaagaggaaaccccccaggagggcggccacgggggagcggggccaacaagcagaggcagggacaaaccaagtggcaaaaaaagagaagaacacgggggggggcggcgccacccaccaacagagcgggcaaaccacaaaaaacaagcggacgggcgtcccgagggggagg

SEQ ID NO: 120200 - DNA, 487 bp, Arabidopsis thaliana columbia
  unsure (1)..(487): unsure at all n locations
ggatcctctagagcggctgccccggggggaggaggcgnnnnnnnaaaananaaggcgaaaaaagggganncacnnacacgccaacacgcaaggagcgcncggaaaccaaaaaaaaggaaaaaaggaaaagaaaaaaaggaggaaaaagaaagaaaccgaagcccacccaaaggccgcntttaatggaagtggggccaccatcaaaaaggacgttaatgaggagacagcccaaacacagtgggggagggggccaaccatatcttggctatacggcacatacgtcaggcggtttggcactgcccttacccttccttgttcctgtccggccaccttggacggggggtacctgttttttctttgagcggagacccgactcggcgagtttttatacccggggccggaaaaacgagcttaacactcccctcactacgggcttataaacggacaaaaaaaatgccggggcctcccaaacgtttggaaaacccca

SEQ ID NO: 120201 - DNA, 416 bp, Arabidopsis thaliana columbia
  unsure (1)..(416): unsure at all n locations
aacacccgccgagagacacacgccaggaagggaccagcggtttgaaaccggagggggaaaaaaaagcgggaaaaaaaagaaaccccacagagaaaaatttaaggaagtaganccccccggggggcaagggcaaaaagcccccccnaggggggggggggggggcccccaatttggggccagtccccaaaaccaaacccggaaggggggaggcccaaaaaccctgaagcgggggcttgaaggaagcagaaaaccggggaaccggctgggaacccaaagagacgcgggaggaaacggaggtcaccggggaggaccagacccccaccccgcccgggaccccccgaaaacgaagggggggggatatcggcggacccaagcgagctccacaaaaaaccccgaggcgagatggggaaaagggg

SEQ ID NO: 120202 - DNA, 166 bp, Arabidopsis thaliana columbia
  unsure (1)..(166): unsure at all n locations
gagggccttccccaggggggcgaagtcccggaaacaacagaaacacagcanccacagagaaccatgaggcctccttcaaaccaaaagacataaacaaaagaaaccttgacaatgtttcaaaaagggagcctcacaaatcaaagacaatccaaggaggcttnnaagg

SEQ ID NO: 120203 - DNA, 500 bp, Arabidopsis thaliana columbia
  unsure (1)..(500): unsure at all n locations
ggtaccgggccggaattcccttgtttacccacgggggcgagggcgcgtacacacattaccaaggctacaacagagaaggaagatattattacaaaactgtttgagtttttggagaaacctcatgtgacatgtgatgtgaccggtgacactacaggttctgagaaagagaagtcaaggaagggagcaatactcggtggtgggccaanaaaacttgacctacaggtagagagagcatncctccaacgatcagcggaggagccaaaaaattgtgaagaaccacaaaggttgtcaaaagaagttagctcattctgatgatgaatctggagaggagaagagagaagaagaaaacccgggggggagaaggcggaaaagaaagaagagaaaaaggggggggagaatgaaaatggctttccttataaaactgagggtgaggcgccttaaccttttaaaaggaggggaaaaaatgattttgggggacttttaaaaaaaaaacacaaaag

SEQ ID NO: 120204 - DNA, 132 bp, Arabidopsis thaliana columbia
  unsure (1)..(132): unsure at all n locations
caacaggacgcctnanaagggggggngncacacaacaggngcactactcagagctgacttatggcaggccaaatgccaagatgtattatctcatccgaagaatatagacgagtaaaatctgttgggaagaac

SEQ ID NO: 120205 - DNA, 354 bp, Arabidopsis thaliana columbia
  unsure (1)..(354): unsure at all n locations
cccccggtccgccgattcttttacccgggcgggccttagagagactctctacgagccgttggggtcctattgctgtatgggggctttgtatgtggactttagctaaacaggactggttggcgnngaccgattttattttggggtgggagncacggggcagcgggctatgcaaccagggtggaaagaacatatttgtggggggtgatcggacgggagttatctctttagcactaggttatacccgccggtgctggtagaggtccacttcctttaaaggccaaggtgcaagcttttggtactactaaactatgcccgaatgactgtcaccgaggatgtgtccaaagtatctttggc

SEQ ID NO: 120206 - DNA, 298 bp, Arabidopsis thaliana columbia
  unsure (1)..(298): unsure at all n locations
aaacgggaaaaaaaggggaagnagattacatgagtccgcttcgccatcatctatgagactattaataaaagtcttcaaaaaaatttcgttgtgacactacaaaacaaannnagaacttatatggngangagggccnanaaaccacgcggaggacacaaaaaaagaacccacccnngggggggggggagaaggaccccatgcgggcgggaagcccaaagccccgaagcanaaggcgaagangaaggcgaaaaaaacggggaaagccangagnccaacccccccggggcccaaaaaggca

SEQ ID NO: 120207 - DNA, 351 bp, Arabidopsis thaliana columbia
  unsure (1)..(351): unsure at all n locations
ganccactagagcgtttcccgggggtttatgcgaaanacgcccngnncaacgaacggataggagggggttttttattagaaacttggagaaaatccagaattttacccggggatttttttctttatcaccacacctaaaaatggaagtgtctttccaaaagcacttaaaactatttttttagggnggggaagggaaaaaaaaaaaaaaagaagcgagggagnccncccccaagagcggcggggggggggagcccaagagccgncccccggcaacaaaaccnangacaggggggcgcgaaaggaacaacaaaacaccacggggggncggccagggacacggaaaaaggggac

SEQ ID NO: 120208 - DNA, 476 bp, Arabidopsis thaliana columbia
  unsure (1)..(476): unsure at all n locations
tccggnccggaattcttgttgacccacgcggccagggcgaaaggcacatctctgcgccttttctacaagaaattcaccaaaaaagcttgaatatttatcggaatcaaagcttgggtttttaatcctggtaaagccatgtcacatatggtgtgtcagagcgttgtcgctcccaaactcttaaatcgggggaggagcccgnnnacctatccctcggccactaagaactctcccttgtaagctccggcggggcttccatagagcttcttcctcctcgtttcttggcgatgattcagtttcaggactcgagcgtgtgttacagttaccttctggagttgagttagggcccttttcctctggctctttcttctgaagtacttagatgtgtcctgggaggaaaggcaaatttgggtcggtaggagctgttactttggaaaaggggaacttgtttgacccacaaaattctgagaccacccctg

SEQ ID NO: 120209 - DNA, 489 bp, Arabidopsis thaliana columbia
  unsure (1)..(489): unsure at all n locations
aaaaaaaannacnccgnaaaggggggcaacaacacccngggggcaagcccccaatcagcgccgggcggcgggagcgggggtgtccacccagagcaagaagggaaagccggcggagagaacgggaaaagaaaaaaacaaaacaaactttcctctttgggggggggggggcccccccccggggggagactagtggaaaaaaggcccccccgacggggagggggggacggccccacatataatataaaccccggcaagcaggggggaggagacttggggcgatagataaagggaataagggtgcccacaacccgcagcggggggggggagcggcgtggagaccagaggcccggcggcgcgcgggcgagaagaagcgggggggggggacccgggagaatgccagacggccggccccggcgagagcggcaaggggcaatcgacgtaagcgaggggcgagcggcgaggcccggcccacacacgagagggaacagg

SEQ ID NO: 120210 - DNA, 442 bp, Arabidopsis thaliana columbia
  unsure (1)..(442): unsure at all n locations
acaacnaccaaggggagncaaaaggggaagncagaaacaagaggcagaaaaaccacggaaaaaacctagtttgacggaaacattaaactcatttcccaaataaaaccccaaaaccgaggaaaattcccttctggggggtggcccaacanncaggagggaccaagggagaaaggccccccccaaggcggggcggggcagacccccaggcaaagggcnnggccaaacccacccaacaaccgggggggccaaccaccnacaaaaccaagggcaagaaacccggcacgcccagaaaggaggcccccacccaccaaagcccccaggccgaccccaaaaagagnggacaaaaaacccccccggcaaaccaagggaaaaaaagacccaccccagcaacgcccccgccgccggcgcccgggcgagaaaagaggcacaccccaaaaacccc

SEQ ID NO: 120211 - DNA, 402 bp, Arabidopsis thaliana columbia
  unsure (1)..(402): unsure at all n locations
agggaccggnccggaatccctggtgacccggggccgagcgccaaaaaaaaccacgccgacgaggggccncnacccgcagaaaaacaagaaaaaaacgacgagggaaagaacaccccacccgagggaaacgacggacaacgggcgagggcaaaacctcctggagtggccaaaggggggcagaccagaagaacccccanaggggggggggagaaacaagtgggggaggccaaacccccacacgcggcgggagacaggggagacccaggggggagaaccaaagaaggccaaacgacaaccggcccaaaggagagggaaagaaagaggggggacaagggggcgaagaaaacccaaaacaggagggaagaaacccccaagaaagggggcgccgcgacgcaaagggga

SEQ ID NO: 120212 - DNA, 375 bp, Arabidopsis thaliana columbia
  unsure (1)..(375): unsure at all n locations
accgaggccggaattttcttttttacccacggggccggagtcggaataataaaccaaccccccannacggggaaaaaccancactcacaaacaactnnnccatcccaaacaacacaancacnggtatttaanaaccaaccaataaactttcctacaagccatatacacgtgcgggagagggaaaannnntttctcgggttgtggggaaggcccacgaaggggccattaaaaaaagaaaggccccccaaggaggtttgggggggccaaggctttttttgggggggaacagggtcctgggttaggggtaccctaactggggggagcgctcgcgcccacgagagtttgggaaaaaaaaaaaaaaactgggggggaaca

SEQ ID NO: 120213 - DNA, 401 bp, Arabidopsis thaliana columbia
  unsure (1)..(401): unsure at all n locations
caacaaaggggaaacccccccccccttattttttaaggggggcaaagggtacaaggctccaaaacatgcaaagagagggaacccnntttaaagaagttgganaccaggcccggggaagcctggaaaaaaaaggcccccggaaaggggaggcgcacgccaaccaagaaaaaaaacnacccccccccccgacaggggaaaagcccgcaaaaacaagggagnnaaaaagacaacggggaaccaaaaaacgggcaaagcgnncgaaaaaaaaaaacccggggggggcngaacaaacccngaaccccgggcaaacccccgaccaaaaaggggaacccccgaggccaccggggggaagaagcccccaaggaaaaaaaaaaggccccccccccccgggggaaaacggc

SEQ ID NO: 120214 - DNA, 501 bp, Arabidopsis thaliana columbia
  unsure (1)..(501): unsure at all n locations
cgcctccaggtaccgggccggaattccctggtttacccacgcgtgcgaggcgcgtacacgattcaccaggggtggttggactttgatttttccttgtagcatacttacaacagatgacatcggtggtctcaatgttggagatgggtttgtacagagtaaagctatgttcaacatcctcattgcggcnntctttctaaagggggagggagancnggatccacgagttctagaagactcccttgctcttgcaagacatatgcccagtcaagaaggtaaataaactcttcttttggtctgtaatttgggttgctctttccggtaacaatctctaaacagactacacccaagctataaacatctgctttgtctgttaaagaacctctcattgcatactctggagccatgtaccctctgcatcaatgaaatattaaggcgggaagtgttaaccctttcgcaaaaaaaaagaaagcgaaaagagacagccgggcggggtgcgctatg

SEQ ID NO: 120215 - DNA, 151 bp, Arabidopsis thaliana columbia
  unsure (1)..(151): unsure at all n locations
aacaaaaggcggacgaatctttattatgcccatataaaaagcctctttgtttaatgaagaaagccaccaccctgnntttccgcaagttgggagggaccacacgggcgngacccggaaaaacncccccaaaagggggggggagggcccaacc

SEQ ID NO: 120216 - DNA, 147 bp, Arabidopsis thaliana columbia
  unsure (1)..(147): unsure at all n locations
ggtaccgggccggaattcccttgtttacccacgcgggcgaggacgcgtacaaaataanccacaacaaaggcgtgttcnctcggcaggaggtgntgctctcgtgcttccagagccatctaccaccgggcgttttattgagcaaccgta

SEQ ID NO: 120217 - DNA, 500 bp, Arabidopsis thaliana columbia
  unsure (1)..(500): unsure at all n locations
gtaccggnccggaattcccttttttacccacgggggcgagggcgcaanaacaaacnccnnnnnncnncaaaaaaaccnctcctttatctccggaaaaattcactcactggtgcttttgattcatatcacaacacactacactctaatggctcgggcgacggaatttcaaggcgcatccctgagtttttaatagggtgcgggcgaataanatcgggtccatgggtggaaatcaccacccagagctcgaagaactcgagtatttccaaaaacacgtagccgaacggttcctcggatttaatcacatgtccatctccggctccttcctcctcctgttccggcgggttttaagcgggtgatcccattctctcgacccctgggtgccgaaacctttaaatgttttaatggcccgggagcagagtcaaggggggggtagaccccacccaaactcgaaatcgcctcttaaaaagggttttccggaaagcctaaaccggttttaaggg

SEQ ID NO: 120218 - DNA, 400 bp, Arabidopsis thaliana columbia
  unsure (1)..(400): unsure at all n locations
aaaaggggaaancacaccccaagaagtcaacaaagggaacgaggancaccccaaggatctttttgagaaaaaaaaaaccctctttgaccaatgtggtggaaaaaaccaaaaaagaggnaataactgggaggtcgggcnaacacagcccccaaaacnggccaaaaagaccccccaaaggaggggggggggcaaacccaccacctggagaaaccaacgcgaaccccgaagaccccagacgggggagggncaaagaggggaaaagaaaagccaccgagaaaggaaagcccccacccaggaaacccgggggggcggggcccaaccggggaaaggccaaagaacggggnggccccagcgggaagaagggccgaccccaaaacaaaaccggggggggggaaacaag

SEQ ID NO: 120219 - DNA, 402 bp, Arabidopsis thaliana columbia
  unsure (1)..(402): unsure at all n locations
aaaaaanananaagcccaaagggggggaaacccccccnngncaacaaccaaaaaccccnaccnccccaccacnnccccctctnnaaagaagaaccaaaangcatactcgggaaaccagcagaaccaaacagngnnttanctgggagttgggacaaagcaaccggcccttttaaaaaagaacccccccctccgagggggggggggggaaaagacaaaaaaaaacaccacccccaaagccgccattctttgggggcgggggacaacgaaaagctttctcgaaaaaaggaacccacgaacccgaaaaaggagggtgcgcaaacccacgtgcgcctaaaatctgcgcgaaaaaggaaagaggggggtttcccaggaaccttggctaacacagctggcgcagggggg

SEQ ID NO: 120220 - DNA, 443 bp, Arabidopsis thaliana columbia
  unsure (1)..(443): unsure at all n locations
caggtaccggccggattccttttaccccggggcgggggcggtattgaaacaaancatgganncaggggtcggntagctaatccaaatgaagattatatatccccacatagagaagcaaatattatctcactgaagattggtaaagtccagcaagaaaatgagataaaagagaaacccccctcgtcggaagtgggaggngcccagagccgcggcgcaggacgagaggcccccccagcgggggggggcgagcaacaaaaagaaccancncgccacagaaaggggacaaaacacagggggggagcacacccggaagaaaaaacagaaggccacgggaagggcccccccccggggccccgaaggaggcccaagaggacgggggagaggaannncaaaaggaagaagcccgccccggcagaaggcacccgaaagggaaaaggcccccc

SEQ ID NO: 120221 - DNA, 482 bp, Arabidopsis thaliana columbia
  unsure (1)..(482): unsure at all n locations
aaaccaaacaggggggtngnntnngnactaataggacacggcgcaaaaagaaaagccgaaggaggtttttttcaaaagagcctaaacgacaacgggaaggcgaaaaaagaagagggacggggcgannnctccagggattgtttggaaaaaacgggggggcgaggcaaaaagaaggggccccccaagggggggggggggggggagcacacaaatggggggaaacctcttcctccggtcggcctcgtaagaggggagggcgggagcaagagaggcgggtgggggagagcccaaccccgaaaaaggcggggggtcggggtgggggagcccgccacacgcgggcgagaagacgggggaaaaagggagaagaaacaagtgcgggagcgcgggccggggcagaaaaaagggcttaggagaaatgagaaagggagaaagacaccggggggcccggggtagtaaacgcccgaggagaacaaagggagggg

SEQ ID NO: 120222 - DNA, 509 bp, Arabidopsis thaliana columbia
  unsure (1)..(509): unsure at all n locations
ggtaccggaccggaattcccgtggttacccacggggggcgagacggataacaaaaaaccacccggcccncggaggagcaanannnnaagnagnngagagacncccaaaccacacgaagacaaacanggagctttataataacaaagcgggggagcttaaggagccgagacgcggaaagccccaaaaaaaantttggggatgttggaaaccccccgaggnaccaacacagaggggcccccccangggggggggggggggccacccaaaataagggcaccgccccccggngaacaacgggggggggggggaaagccccgccggcacccaacgaaaacgcccgggagcacaacccccgcnccccaggggggaggaaagaaaaagggcccccccgaaacggccacccaacaaaggccccccccgaagaggcaaaaggcacaccccccgaaggcgggaaaaaacgcgggggggggaggggggcccaccacgagagaccccaaaacggacgaacg

SEQ ID NO: 120223 - DNA, 379 bp, Arabidopsis thaliana columbia
  unsure (1)..(379): unsure at all n locations
gaccaaaaagcggctgcccgggggcggaggccgaaaaacanaaccccaccacnagggggnagngaacgaaacgaaccaaacagaccagcggcggagacagacgccaattttaggcaggcggcgcacaacgcaaagaaaccaaaaaccaaaacaaacaggaannttttaaggaggttgnggacaccaacggggggcaaagaccaaaaaagggccccccaancgggggggggagggccccaaaacaaaagagggaaacccccccccggggagaccacacgggggagagccaccaagccaagaaaacacggcaacacaagcccaacgggcggcgaacaaagcccaaagccaccggggaggggccacggcgcacaacagccaa

SEQ ID NO: 120224 - DNA, 226 bp, Arabidopsis thaliana columbia
  unsure (1)..(226): unsure at all n locations
aaacgggcgaggacacaancanagaaccaggggaggcaaccaccaaagggggggcccaaagcagnccggccanggaaaaaaagacaggccanagnncagcagccnaacccaacaaaacnnaanttaataaggggtggcaaaaacccacggcgacaggaatngcgggacgagcccaccgacggggggcgggaacccccccacagncgccggagcccccaccaaagag

SEQ ID NO: 120225 - DNA, 413 bp, Arabidopsis thaliana columbia
  unsure (1)..(413): unsure at all n locations
ccgcaggtaccggnccggaattccctggttgacccacgcggccggtggccaatggcgacatggacaccaagctctctgcagctcagaattgccctaaatcacggtatcttcaaagctccggagagagcgaagatgaccaagctcagtcgtcgtctccgtatatcatggccgtcgcgcgagaacnngcagagccanttttnntgaggggggggtnngagagannnacgggtcnnggatcgtttttcggaggggtgggctcgcattcggggagacgagtgagaacaatctctcgcgggtggcgagttggtttaaagggaaccccttgttatctggagtgtgctgggaatgggttttgtttcggtggggcttaacttaccgcaggcttttatctttccaaaacggcaatggtctta

SEQ ID NO: 120226 - DNA, 491 bp, Arabidopsis thaliana columbia
  unsure (1)..(491): unsure at all n locations
aagcnngganccactagagcgtcncgcgcggggggtattgtntnttaacataatacanggccgaaaacagaggaaacaccaaaaccaaatcctttatctcatcattggcacaaaacacacagaatttggagacgaaactattggcagctcaagggaagggattgctaaaagcacacaacacgcttttttgaagtggaggggccgaagacggaaaacaaccgaaaaaaaccccccgaancggggggggggggcgccccagaacttaacgggtaccacatcatgcgcccaggagaaagctgggaaggcctataaggctgactctaatcaggcactctccagcatgtcgaacccatcctgttccccatatcgaaagaacccaaaaacccggaaagaagatgggaaactctccccctgcaagaaaaggggtgcccgaatatgggatccgtgaaagatcggcggcacaccacccccaccccccaaagacaatgaat

SEQ ID NO: 120227 - DNA, 430 bp, Arabidopsis thaliana columbia
  unsure (1)..(430): unsure at all n locations
cgaagcnnggacctctagactttcgccccgggggaaggcgtgagggccataaagggcttctctactggggggcaattgtgacaaaaatatgaaactttttaaaccaacaaaaatgaacaaagatatcaaaagtaacattctcaagattcacactacgggtgtcttggagccaagntttgctggtgctgcgcgacanacgcngnnaacatggagaactggggaggaacagcaccgaaagggggggcaaagacgaaccttaagggggccctcccnaccnnncccaagnagaaaggggcacaggaaaagcncncagccacggcgaagagagnncacgacagaccaagagcccccggaanaacagaacccacgancccaagcagcccacgagacaggcacggcgcagggcccaccaagaacccgaccaacccga

SEQ ID NO: 120228 - DNA, 504 bp, Arabidopsis thaliana columbia
  unsure (1)..(504): unsure at all n locations
gtaagcngggatcctctagagcggttgccctggggggttgatgcgttttttatatttttnaaaacaaggggaggggcttcaatgaatgagtacaaggagataaatatcatacatagaatcttgtaattgtgtatggaagattacaatttgcacttgaaaaaacagaggtncactctgcctcggatcctcgttctnagatgaaccccaagcccacgcgaaacagcaccgagggggccggcgcaacagtggggctccctggaccttaaactagaccctttggaaaccccaaaggccctgggatggagagtctacgtttgccaacagctttcatactcaagaatccttcattaagtccttttgatcccctggccagagccaacgagaaaggggctaccggattttatttcccgcggaccccgggggtcccccccgaaaattccggaccggggccctgggggcggaccacgctttcccttatagggaggtggaattaaaagcttgggg

SEQ ID NO: 120229 - DNA, 450 bp, Arabidopsis thaliana columbia
  unsure (1)..(450): unsure at all n locations
gcctgcaggtaccggtccggaattccctggttgacccacgcgtccgagcgaaataaatacggnagacctttctcgttggctctggccaggtgatcaaaggacttgatgaaggaatcttgagtatgaaagctggtggcaaacgtagactctacatcccagggcctttggcgtttccaaagggnctagtttcactcccagggagtgcgagagnngcgccaaacagcccggtgatattagacgccagcttagagttcataccaggtctcgattcagaggaagagtgaaactctgttttttcaagtgcagattgtaatcttccatacacaattacaagattctatgtatgatatttatctcattggactcattcattgaagaacatcacattgnttttaaaaaaaaaagaagagaaaagnngggggggccgccggtctaaaggatccaagctta

SEQ ID NO: 120230 - DNA, 396 bp, Arabidopsis thaliana columbia
  unsure (1)..(396): unsure at all n locations
cgaccaggcgagagaggacgaaggccccccaacatcttaaaccttaaaagaacaaaagaaaccaccgagagggggagggaagacaaaagaggggggcccctcngggaagtttggggaccccgggggggcgacatggagaaagaaaacccccccnngggggggggggggcgaaccaaacactggagggactcccacagccaaaaaacccgggggggaggaagattgaaagacaaaaagaaaccgagggccaccgggcgccccgaaaggaaaagggaaaaaagcgcgccccccagccgaagccagaagaaggaaaggccgggggcccgcgaacgcggccaccaccaagagccaacgaaaagggggatggaggaccaaggaacgccgggaagaaaagca

SEQ ID NO: 120231 - DNA, 471 bp, Arabidopsis thaliana columbia
  unsure (1)..(471): unsure at all n locations
gacctctagagcggcttccccggggggnaaaagtcccttaannaaccaaaacgaaganctgaggggcnnacagaaagagcnacagaccgcccatnnccagagcgccaaagggaacttttttacattagagactcgagatattccgcgggaaggcggcgaacatcaccaaagcttgccttaaaagaagctggggcccgccccnggggagacaagctgcgggagaaagacccccaaaaggggcggggggagccacacaccccctgggcaagcgnncccacgccccaaaaaacccccggggcaacaggggggnanggcaaaaaaacaagaggaaccccgggccccgcccagggaacaccccacaaaagacccaccagcgccccccggggccccacgcgaggcccccccgagaacaccccaaaccccgaaaaaggaacggcaaagaaaccaaccccgaggaccccccaaagagcc

SEQ ID NO: 120232 - DNA, 190 bp, Arabidopsis thaliana columbia
  unsure (1)..(190): unsure at all n locations
aggtaccgggccggaattcccttgtttacccacgcgggcgaggacattaaaagcaacccgccgcagaacaccggggccnacctgctagaggcccatcagcngagagaggcacacctctaatgcacagcggagactaccctggatagcacaacttagagctactaaaaaagcttggattgccggagggaac

SEQ ID NO: 120233 - DNA, 390 bp, Arabidopsis thaliana columbia
  unsure (1)..(390): unsure at all n locations
accaacccaaagcaagcgcggggancancccgnncacgagaaaanacagggggcaacagaaatattatcccaagttctaaatcagagagaaaccacacatatacaaccgnattncggaggaagacaaaacccctttcatanagtttggccnaaccccaaggaggccgaagcgaaaggaggcccccgaaacagagggcggggcccaccaccgactagagcagcnnaaaccccggggaaaaagagggggacccaaaagnccgaaaaagacccaaaacggccagaacaccgaaaaaaaaaagcgccgggcccaaaaaaaagaaccccaacacccacaggaaccacaaaaaaaaacncagaacccccaaccgccggcaaacaagaaccgggggg

SEQ ID NO: 120234 - DNA, 537 bp, Arabidopsis thaliana columbia
  unsure (1)..(537): unsure at all n locations
cccccccgggggacnaaaaaacccccccaaaaancaaaaaaacccaaaaaaaaacccccacgaggggaaacaaaaaacccacggaggacaaaaaacccccccccaaaaaggggagggacagacaaccccccccttttttttaggcaagtttaaggccaccaccaccgggggggcctcaaaaaaaaaaaaaaaaccccccctnaccaaagagagaggggggggccaacccaaatgatgaccgcgccccccccccccaaaaaaagagccagcggccgcgagggacccaaccccccacaagcaacaaagaaacccccacggacaaagaggggcagcccccacagggcgggcaacgccgccggggacaaggactcagacaaaaacgaaaaaaagagaccgcgaacacaagagcacaagaggcatacccgagcgacgggccgcgtatacgaccgcacaaaaccagaagcgcnacccccgcgctgacacaacacacaacacacacggccgcggcgcgcacaacagcggcggcacagacaaaca

SEQ ID NO: 120235 - DNA, 400 bp, Arabidopsis thaliana columbia
  unsure (1)..(400): unsure at all n locations
aaacaaacanaaagcccacaaaggaagaacaccancanactttttgggggagacgcaaatcacactctgaccaaacaggaaggaggaaanagggaggaaatacacgcntgttggcaccnccccgggggggcannggccggaaagagcccccccggcgggggggggggggcccacccacactggggggaaccccanagggcccaacacccggggggggggggaggacaaaacnnaggagggaggggcccccccgggggccggaaccggggccaggaaagcaacgagagcgccgcgcgggggaaagggggccaacaagaaggaacccccggccgggccaaagcccgggcggaagggaaaaaaaaaaaacccaccaccccccgagggaggcccgggaaggggg

SEQ ID NO: 120236 - DNA, 459 bp, Arabidopsis thaliana columbia
  unsure (1)..(459): unsure at all n locations
aaaaaaaaacccccccccaggggcnnnnnnnncccncnnncnaccccnncccaccnacaaaccacaaaaaaaacccaacccaccacaaacaaacaaccacaacccccacaccaaaaaaaaaacaccccctcccggggagacgggccancccagggggccctccaaaaaaaaaaaccccccaccaggggggggggggggcaaccacgacagagggcccgcccccccgcccgggccaccgccgcgggcgccagcccggcagaagacccgggacacaccacggcgcccgcaggcgcgccagagggacccgcaaggcaggccagacgcaacgaagaagaaagaacgaagagcggcgggagccacaccagcagaccgcagagacggcccgcgagcgcggccgggagggcgccggaccgacgccaccgcgacgcgcgagcgaaggcggcacagaggccggaagga

SEQ ID NO: 120237 - DNA, 489 bp, Arabidopsis thaliana columbia
  unsure (1)..(489): unsure at all n locations
cgtaagcngggancctctagagcggtcgcccgggggganaggcgcnnnacnnnnnncncacaacgaaaacggggcangaggcaaacaacnggggaacccaaaacacaaaacaagggagggcagcagggaaaccacccccccgcggggggggaagaacagggagcccaaaagcaaaaaggacagacccctcaaagacgattggcacccggacaggacagaaagaccaaggaagaaccaccccgnagggggggggcgggaaaccaaacatggggggacaggggngaccgccccccgaccgccagagacacgcccgggcccggaagccggaaacccncgcaagggaccccgacccgggccaacccccagggaggagcccgccccccgggngccagcagcaaaccgcgggaacaagggaacagngcngaaaaggggggggagaaccaaaaaccggacccaacgggcccaaaagaaaaaacgcccaaggcgggg

SEQ ID NO: 120238 - DNA, 568 bp, Arabidopsis thaliana columbia
  unsure (1)..(568): unsure at all n locations
agggaccgggccggaatnnctttgttgacccaggggggcgaggcgtccaaacaaaaacaacccccnccnnccggggagaccanggcacctngcaaagacaacacgggaggagccccccgccgagggggacaaggcgccttcttttgggagccctaaaacgggcggtcagagggagtgatgaggaacagcccaaacaagggccctccatggagagttggggcacaaaacccggaggggggcccgcgaaaagagagaacgccccccccaaagggggcgggggggacccaccacgcgagaaccacgcgcgacgacgcccccgaaaggggggggggcngcggggaggggcccaccagcaaaagggggagggaaacccgcgaaagggagggggcccaacccccggggcaccccagggggcaaaagagggggggcccccccagcgaagaaacagcaaaagggaagcccgcgcaacggccaaagggccccacccgcgggaaacccgcgccccgaaggcgagccccacgggggcaacggaagacccccgcaagggcgggcccacaaaacgagaaag

SEQ ID NO: 120239 - DNA, 453 bp, Arabidopsis thaliana columbia
  unsure (1)..(453): unsure at all n locations
aaaangcgggcagaagggggggnaacaaancaannnaacnnaagggaaccacaggaggacacancggaagnnagttttactatatggaactacgggatcacacaaggaaaacaggggaaccgggaaaaccnntttaaaganagttgaacaancacccggaggccncaaggcaaagaaggcccccccccaggggggggggggccaccacccctttttggcgggggctggnggcttaaaaactgggacccgggggaatccaaaaagaaggaacaaaagaggcgcccgaagggcggagatagcgaccccccccaaaggaaaaaacccaaggcgggcctgagagacgggaaacctctgaagcgattaccacccagggaggggcagcccttaaaaagagaggggggggggaaaaaaaccccccgggggggcggcaggggggaaagggcagcgacggaa

SEQ ID NO: 120240 - DNA, 163 bp, Arabidopsis thaliana columbia
  unsure (1)..(163): unsure at all n locations
cggtccggccggaattcctttttacccgggccgagtcnnttcaagaagnatgggctgggaatgtcttaggagcaacatgttgtaagtctctattattgctcaatggaattttctttatcaaattgggatggtagctgaatctccagaagataagaaaacaggc

SEQ ID NO: 120241 - DNA, 434 bp, Arabidopsis thaliana columbia
  unsure (1)..(434): unsure at all n locations
gccaaaaggggggggcccnncggancacaaaancnacaaaagcgggaagaacaacgagaagccacaatttattaaaaacaagctcacagacaaatattaaaacggaaattaagagacaaaggccccctttaagggaagttcagnaancccacagcgggganatcgggaagaaaacaccccnnnggggggggggggggccacacaaaatagaagangccaggggaaaagcaaaaaccggggggggaaaaaagggctaataaaacgggggggccgacgtccgctgcgccataaaaaagtcccaaaacgccggctccgcaaaaagcgccaaaaaagtccttttggccaaaaacccaaacgccaagctaaaactaagcggacgccgggggccaacccggaaaaccccaccgggaacccgcgaggggaacaaaattacc

SEQ ID NO: 120242 - DNA, 495 bp, Arabidopsis thaliana columbia
  unsure (1)..(495): unsure at all n locations
aagcnngganccacnagagcggnctgcccaggggggcggagacgctaaaacaganaaaaccaccgcnccgggggaacaanaacgaaaaagacggcacgaggccgaaacggaacccaacacgcaccggttttttcaaccaaacaaggaagaaagaaacaaacaaangccgaacagacaacaaaantttccccccagtangaaaanaacaggagaaaannggggggaaaaaacccccccccnagggggggggggggggccccaccccanaggggggagcaaccccccacaaaaggcancacagggggggggaaaaagccaagngcccaccggaggccccccgcccaaggaaaccaggggggaccccgcancccgccacaacccccaacccccaagaaaaggggaaccaaaagccgcccgaagccnaggccccaccagggcccaaaaacccaccgccaaaaacccgggggggaaggaaacccccccaaccaaaaacac

SEQ ID NO: 120243 - DNA, 439 bp, Arabidopsis thaliana columbia
  unsure (1)..(439): unsure at all n locations
gaccctaagcgtcgccggggggaggcgnaacaccaaaaacacaacaagggacaangagcngccaccaaaaaaagacccggaccaaaacaaaaaaccaacaggaaccaacccaaaacccnnnancacacggcaaagccatttttttgggggggccgacagnaggctggtagtttctcctgatggcgcatcctcctgagagtgagcaggaatcttgactgatgaagctctctccatttccctctcaagctcttcctcagacatgagagtggtaaactgcccctccagcgatttagctgctgctaaccatgcagggactataccgagcaggatgactccaaggtaaggcgtggaattggcgagtgagccgaatgtaaggatcatgaactgctggattagagcaccgcctgatttccccaatgggttgcagaccacaataatt

SEQ ID NO: 120244 - DNA, 479 bp, Arabidopsis thaliana columbia
  unsure (1)..(479): unsure at all n locations
ctaagcnnggatcctctaaatcgtccgccccgngggaaagggcngngaagacaaaanaaacacnnacccaggggaacaccacaagcaaanncacagggacagcaagagaaaaaaagaagaaaacagngaagagagagaccaccaaacaaaananagggggggagacaagagcagaaaaccggggggttctcattcgggagaggagacaccncccgcgggggagaaaccagaaaaacgcccgaggacccggggagggggcacccaaagaaaaaggccaacccanggccncggggagnncccgaaagacagccaaaacaagaaagggaagccccaaggggagcgccgccaccggggcaaaaaagccgggccaaccccaacaaggagggggaaaacacaaaacgcggcccccgaacgagaaaaggccagaggcacggaaaaaaggcanccggcgggggggaggggccaaagggggcacacca

SEQ ID NO: 120245 - DNA, 461 bp, Arabidopsis thaliana columbia
  unsure (1)..(461): unsure at all n locations
agtaccggaccggaattccttttttacccacgcgggcgaggcgactcaaaaaaaanacgaacagcagggagancccaaggggactatcaacaaagggaaaaacatggcaagaaaagaaatatcaagctatcaagtaacatttcatgcaaaagatcgcataaaccccaacggctcntttctggaagttgggcaccccaagggcggaccccagaaaaaacccacaaggggggggggggaccacgaaatttattggacaaaatacacaggaggaagccccgggaggacaccaaagcacgacccgcgcagcgagacaatgcgtcgcactacggcaccaaagacaataaaccgacgcggggcccgcttacagaacgcaaaacccacgcggacccccagcaacaagcccgcgcaaaacgacactaaccaaaagagaagagagcgccggacctccagggcgaaaaaaa

SEQ ID NO: 120246 - DNA, 325 bp, Arabidopsis thaliana columbia
  unsure (1)..(325): unsure at all n locations
cccccngcaannagccaacaacagaaagacgagncccaaaaaagaatccagggaggcgacaagacagagcttacatatagagacaagccaggagacaaaattttctcgaaagttggggacaagacccgggacgaaacaacagagaaaagcccccccanncggaggcagggggagnacccccaaacccggggcgncgcnngaacancccacgcacaagggcgggcgggaaaaagagcaaaaaaaggggagacaggagacccgaaaggccaaacaggggacacaaccccgcaaaagggggaaaaagcggacaaggggcagaaaaaaa

SEQ ID NO: 120247 - DNA, 170 bp, Arabidopsis thaliana columbia
  unsure (1)..(170): unsure at all n locations
gtaccgggccggaattcccttgtttacccacgcgggcgagggcgcnaaaacaaaaaacacagggnaangagggaaaaggngagcacncancaccnncnaaacaacggagcaacaagaagcacaaggaagacgaggcggcgngggggcaanaaaaaaccaaaggcgggaca

SEQ ID NO: 120248 - DNA, 238 bp, Arabidopsis thaliana columbia
tgcaggtaccgggccggaattcccgggtttacccacgcggccgaagtctgttttcactaaaccaaagagcgcggagagcaatgaggatcaactaaatctcgctgagccgcggctcaccatatgggacaattatgtgtaccgctctcgaaaggcgacaatcccatcgtgaaataaacctctcagcgagggtttttttaagtggggtggcacgacagccggcgaacaaaaagagaaggag

SEQ ID NO: 120249 - DNA, 203 bp, Arabidopsis thaliana columbia
  unsure (1)..(203): unsure at all n locations
agcnggganccactagagcggcttccccggggggacgaagacgcnnaccagccaaaacanccgcaaagggggggagaganganngncgangggaagaaaacgggaaacacaaaaaaaaagagcnaagcncacagacaagaagaaaggccnanaccccaggggcaacgagcgacccaacattttttttggcagcggggagaaca

SEQ ID NO: 120250 - DNA, 127 bp, Arabidopsis thaliana columbia
  unsure (1)..(127): unsure at all n locations
acccacaanaccacagaaccggggggcncnacgggganccaaagacaaaacgagggccacggncncaagaccgggaggggtcttgagccacatggatcacacggaccccacatcttctcactgtgaa

SEQ ID NO: 120251 - DNA, 440 bp, Arabidopsis thaliana columbia
  unsure (1)..(440): unsure at all n locations
gtgccggnccggaatnncttttttacccacgggggcggggcggttaacaaanaacctaaaanannatggttntctggactaccttaaaagaagggccccaacttcctttaagcctagaggtcttgaaagcacatgggtctgactccgagaagcttcctatgcattacaaagggcaacattttttttggggggtgggaacaanncnccaaccaannnnttataaggagacgccccccttatggaaaacacaggcccagaggggattctcaggaactcatcacaaagcccccgctttcatcttcagggcgccctcacatacaaaaaaaaccccacatttgaactgcgaacaggagccttctggatgacaccaccaaacctttcggggagaaccccccttggggaaactgggatgccgggggaagggcctttccccagggccc

SEQ ID NO: 120252 - DNA, 155 bp, Arabidopsis thaliana columbia
  unsure (1)..(155): unsure at all n locations
gagcggtttaccgggggggagtaggcgccaaaaaacnaaanaccgacacannaaagagggcaaacngaacaacaaactataagaagaaaatctaaggaaacgcagaccacacaaatctcataaaacttaggtttgatctggggccactaattaat

SEQ ID NO: 120253 - DNA, 492 bp, Arabidopsis thaliana columbia
  unsure (1)..(492): unsure at all n locations
aggtaccgggccggaattcccttgtttacccacgggggcggggcgcgtacnctttanngaagaaacaaaaaaggacagaaagatctcaacttttttcaacccaaatcttcaaatctggaggaacgaaacagtaagagattgaaatcaaacatggaagaagatgaatcaacaacaccgaagaagaanttanatttgggagttgaancncccaccggggaggaatcgaaacgacaggggcactcgaggcacgaagcaaccggnaaaacganncgaancattatcactctccttcgaaacctatttactcagatgggtttattccaaggagatctgggtccaatttcgcgcttttcgattgggcattttttccccgaataagaaagatgggaaagaggagggggctggtcttatgcaagttttttaaaaacggcgctttttggtccgtgacgccggaaaaaaggaatgttgtaaatgggtttcctccggccgggg

SEQ ID NO: 120254 - DNA, 153 bp, Arabidopsis thaliana columbia
  unsure (1)..(153): unsure at all n locations
ccaaaaggattaccgggggttagccggacacccaaaaacccgcacaagagggacanaagagaagccgaccaacaaaccaccgcncgcancccaaaaggcacancacttgaggcgacagacacagcccaccncnaaaacaagaaaaaacggggg

SEQ ID NO: 120255 - DNA, 438 bp, Arabidopsis thaliana columbia
  unsure (1)..(438): unsure at all n locations
cgtaagcngggacccactagagcgttcgcccggnggggttatgcagaatcacccaagcaaaacagggnccgggggagaaagaaaaaaaaacaaacagggcacaagaaaaaaaaaaggaaagagaagcctttatgaaccccatcataagggacctgggaaaaaaacgaccagcgccgccacaattctcttcttaaggggcggaacaaccgcaagcggagaaaaaaaaaaaaaaaccccccaaggggggggggggggaggggcaaaacaaaccagcgccacccncncccaaaaggaaccgaccgaacaaagagagcaacgacggggccccccccgcaccaacggaagaaaagggaggcaccggaacaacccaagagaccaggggaggacggacggcggaaagaggaacaccaggaagggggggcccggggacgaaacaaa

SEQ ID NO: 120256 - DNA, 469 bp, Arabidopsis thaliana columbia
  unsure (1)..(469): unsure at all n locations
ccggaccgganaacccgggtcgaccgcgcgngncattgcggatcacagcnngaacaccccggacggggggganggaaccgcncgcgccaagccngggcgcgagagccaaacggagacggatgtttcggnttcgacgccagtgacacgtcagaaagctgctgcagcaaaacaaaacattcctcctaggaagtaaggnacacaccgggcgggcacgaacgaaagaagacccccccggaggggggggggagagcacaacaagcggggggggcccccgaggaacaagacgagacgaggggggacccggcccgccgagaaaccgaggagaggaaaccccagagacgaaaacaggggagaggggaccacgagccgcggaccagaaaagcaaaggggcccggggggaggagaaccacggagaccagacccacagccgcaggcacgcacccaaaaaaaggaaaaaaaccggcaggcc

SEQ ID NO: 120257 - DNA, 494 bp, Arabidopsis thaliana columbia
  unsure (1)..(494): unsure at all n locations
ccgtaagcnnggatcctctagagcggtcgcccggggggtttagtgcaacttacctaaatttaccttcaatttgaggggtttttttatttttctatcttttgggtgaaaaagaaaacgagaaaaactataacttaggcccccctcccccaaaggaaaaaatttaaagaacccgaaacaaaaaagaatttcctctttcggcgtgggaaaaaaaccccccgaaaccggggaaaaaaacccccccaccccaggggaggggggcaaaccacgcacccacccgaaaaaaacccccgggggcagccccccagagaggaaaaacccacagggggaagggcccccccccaaaaacacaaanccccaaagggaaccccgggcccccaaagggcaaaaaaccgccccacgggggaaccccaaaaggggggcgagggggaaaacccgaaaaccccggcacccccccccggggggggggggaaacaaacccccccacacccaaaccg

SEQ ID NO: 120258 - DNA, 219 bp, Arabidopsis thaliana columbia
  unsure (1)..(219): unsure at all n locations
tgcaggtaccggaccggaattcccgggttgacccacgcgtccattgcaacttacctatctntacattcaatatgaggagtttgataatgctgcaaccactgttatgaatcattctcctgaagcatgggagctcatgcaattcaaagacattgttgccaaggttgcgaatgttgagccccacaanatggctcctcacggngtgcgggcaagagcacccgg

SEQ ID NO: 120259 - DNA, 464 bp, Arabidopsis thaliana columbia
  unsure (1)..(464): unsure at all n locations
cgtaagctgggatcctctagagcggctgccctggcggtttgaggctttttatttttattttttttctttttttggggtttttttttcttgttctttatcccttatcgtttgtttttttgaaaaaaaaccacaaaggggcttccttttttgtaaagacgcaaaaataaagggggagaaggccccaaactttctctttggaagtgggaccccgccacccccggccccaaaaaaaaaaaaaccccccccccccccttgggccgcgaaaccaccccccgggggggggaggccccccccaacccacaccgggggagaccccgaaaggagaaaaanangcgggcccccgaaccgggggaggaaccccaccaagccgggcggaaaacacacccacccggggggagggggaaaacaaaaagcccgggggggcaaaaaggaacaaaccccccccgcgggggcccccccccgag

SEQ ID NO: 120260 - DNA, 466 bp, Arabidopsis thaliana columbia
  unsure (1)..(466): unsure at all n locations
gcaggtaccgggccggaattcccgggtttacccacgggggcaggggcaaggaggaagatatcntnacggtatctgataattctttgactgtgcatgagcccanagtgaaggtggatttgactgcttatgtggaaaagcatgagttctgctttgatgctggtctagatgaggatgtttcaaatgactattttgatggccggcagaattnacccaataattcccattattttacaagagactaaagctccatgctttgcatatggccaaacagggatgggtaagacatttacaagggaacccttacctatcgaagcaggtgaagatcttatgaagggtgttgggcaacccgataccggaatcagagggttaaatggggggcgtaactttttttgaaatatagggggggaaaggctggtccatcttcttaagggagaaaaaagaaacttttgctggcaagagaatgggt

SEQ ID NO: 120261 - DNA, 490 bp, Arabidopsis thaliana columbia
  unsure (1)..(490): unsure at all n locations
ccactagagcggtctcccggggggggagaggccannnaaacaaaaaaancccccnnnncccgggggccaaaaaaaacgcaaaaaaacaccccaagggggcgccaacaccaacaaaaaaaatcaaacccccggggggcgggagaccaaagaaaggaaaaagggggaaaccaaagtttcctctaaggaaagataggaacccacccaggggctcctcccagaaaaaaaacccccaaaagaaaggggaggggggcccccaaaaaacacaaaccccaaagaccccgcttcaaaaaaacgggtatgcagaagcaaaacccccgccgcgcgcgcaaaaaacaaaaaaaaccccggcggaaagtccaccgggacccaaccccggggaaacagcggccccacgggggggctcgacgggccccccccaagggggagccccccaaaaaaaaaccccgcccaagaaaccccaccaggccccccccccccaatagaaaagaaa

SEQ ID NO: 120262 - DNA, 340 bp, Arabidopsis thaliana columbia
  unsure (1)..(340): unsure at all n locations
cgaaaaaaaccaggcncaaacggggcnnggnngcaaaaacaaganccacacccccgaaggccgcaagcggaccaagagctttacgcancaaacgcaccaaccaggggagagaaccacaanacccggcnacggggagccnctcttggaaggtggaggacccaacagggggcngggccgaaacaaggagcccccaagagagggggggggagccgcccccacacaagggacggagccccngagacgagaccaanccaacaccgggccgggggggagggggaacggagcaacccaacaacccggggccgggnggggggggccaaaggggaaccgggccacaagg

SEQ ID NO: 120263 - DNA, 331 bp, Arabidopsis thaliana columbia
  unsure (1)..(331): unsure at all n locations
tgcaggtaccgggccggaattcccgggtttacccacgggggcggagagcnngacacacaaaancangcgnaaacccggagnncnncgagnnnnnccgancnacgacaagggcggacgcngaaaccnnngcnnnccaagcngagaacaaccaggngcnnncccncagcagcaagacccgggacgcgaacttgtanttggggggtggggaacncancaggaacncnncggaggcgggggaccagacnagaggcgaggccgggacggacaaaagcaagcgcganggnncaccngagcncnncanncacagcaggcccgacaagacnaacaacac

SEQ ID NO: 120264 - DNA, 424 bp, Arabidopsis thaliana columbia
  unsure (1)..(424): unsure at all n locations
aaaaaaaaacnccaaggccaggggaacaagaaaccgaaccacacgaaaaagcaacggacacacacacagaaacncagagggagcggaaggggccacaccacagacaccaaagaggggcagacaaacaaaaaaaaactcaaggcagatgggaaccccccgaggggaggngcaagcaaaaaaagcccgcccgnngggggggggggggggggcccccaaaaaagaaggggcncaccccgaccaacaggaggccgggggccgacggcccgcaaaagaaacagaccaagcggggggggaccaaggggcgcccccgaaagaggaccggagccgggagagaaacaaaaaacacgaccccaagggggacaaccacccccccacaccgaagcaacgaagagggagaacaacccggagcaaaggaaaaccgaac

SEQ ID NO: 120265 - DNA, 406 bp, Arabidopsis thaliana columbia
  unsure (1)..(406): unsure at all n locations
agacgcagngaagcgaaagagagcgaacggacacaccgcacctatcaacggagggccancagacacanaagaggacgagcnaaaacaaagggggaggaanntttangggaagtagccaaaaaaacgcggaagggcangaaaagagaaaacccccacnaggggggggggggggcacaaagaaagagagagnnccacccggcccgagggggaggacggaacagccaagccggaagcagagagnangggnaccgcaaacgacgaagcaccaccgagccccccccccaacccacnccacaaagccaagccggggagacggcacgccagaaaggagcgcaaaagaaccggaaaaagaagggggagcaanggacgaaaagggcccacagggggacccggaaccgaccccccc

SEQ ID NO: 120266 - DNA, 179 bp, Arabidopsis thaliana columbia
  unsure (1)..(179): unsure at all n locations
gtccggaccggaanacccgggtttacccacgggggcgaagactntggacaaacagggcggccgnnncgggcgctngncnngagaaaangaagagagagagacangggaagaggcagggcccanctttagaggatagagaacaagatcaataggcaagttactttctcaaagagaaggcc

SEQ ID NO: 120267 - DNA, 486 bp, Arabidopsis thaliana columbia
  unsure (1)..(486): unsure at all n locations
ganccacnagagcggtttcnccgggggggcgaaagcccnaaaaaccaaaaaacaggcgcaaggcggggaaaagagccccagganacgcccacccacangacccaaaacaccaccagggcgcttataacacccagggcagacaaaaggaggaaaacggggaaaaaaacaacagagacatanttccacgagatggcgacaccgcgggggaccaggcgcaagaaagaaaccccccaagagggggggggggaagcccccgacaaagcacngacccaggaagggccgccccagggccgggggggcccccgggccaaagggaaaaaagacgaggggccgcgccccagggaccgggggaaaccaaggggaaaacaaccggggggggcccggaccaaagcagggccaaagggagggcgcaagagccccacagagggacaaaaaggggaagaaccccccggcggggaagcaccgcccccaaaccgacacaggggg

SEQ ID NO: 120268 - DNA, 508 bp, Arabidopsis thaliana columbia
  unsure (1)..(508): unsure at all n locations
accggaccggaaaacccgggtttacccaggcgggcggagccgcgagagacnnacaaaaccgagagaagggggaaaaaaccccagcccgccccgccgnggaggagaannacaccacgacgagcgcttaatcgccgcggggcgcctaggggcacaacgccaagagagnaaccaccgagcgngnntttcccccccgttnggggnaaaccngggggagcaagcgaacagaagagacccccaangacggggggggggggccaacacaaagacggggggcncaacnaanangagaacaaanggaaacggagcggggncggggacccagccaaaggaggccnnggaagcaccgccccccccgcaaaagggccgaaagagaaaagggggncaagaaaaccaaagccncggaagagacccaaaaacagcgagacgccgacgggagaacacgggccccggcaaaaagggccaggccccggaggcccccgggcgaaaaaaccccaaggaaaaaggggcc

SEQ ID NO: 120269 - DNA, 490 bp, Arabidopsis thaliana columbia
  unsure (1)..(490): unsure at all n locations
aagcnnnggacccactagagcggtttcccgagggggtgtagccgngaaccccacaaaaaaccccgaccnagggggaggaggacacngaaggaacaagaaaaccgaagaacaccgacaccacggaagattaaacccaaaaaacccccgaaaaagacaaaaaaccaaaaaagggggaaaaaggcccctttacaaaaagatggaaacacccccgggggaaagaaaacaaaaaaagcccccccncncgggggggggggggggcacacaaccgaggggggngccacccaccacaggacgggagcaaccgaaanagggagaaaaaangcagggcgagcccgaaagaagaaaaaccaaacggcccccgccccagaaagcaaggaagaacccaccgggcacagggggaagagcacgggagaacccccaaaaaccccaaaaggaaaccgagggggaaaaaagaacaacaaggggcacaccggggaaaccggggaaaaag

SEQ ID NO: 120270 - DNA, 482 bp, Arabidopsis thaliana columbia
  unsure (1)..(482): unsure at all n locations
cgcctgcaggtaccgggccggaattccctggttacccacggggcggaggcgcgtacgtgacaattaaccttgacctaaagagaggaggaaacggaaggttcttgaaaactgcggcttacggacactttggaagagacgaccctgacttcacctgggaaggcgtcaagccactcaagtgggacaaacctcatntttaaaggntgtcggcgncnggnncnggggtcattccacaaaccaattatctgctcactttggtattgctctggttctgagggttatgggggttatggatcattggacttgagctatttcaatgggggtgtgtggttttatggcgaccttttaaaaacaaaacccacgcagatgacgcccgacccaccccccccgggggcccccggttnaagggggcggggcgggggggggccgccttgcaaggccccacctttcctggcggggggccctgaaataaaataacccgtcca

SEQ ID NO: 120271 - DNA, 458 bp, Arabidopsis thaliana columbia
  unsure (1)..(458): unsure at all n locations
aacccaaacgaacaccacaannggggagcnganacggacancgaaacaagggggccccacgcaagagaagacngaaacaagtttctccagaaaagagacatgcagggacatacaaagaaacacacanacggaacccccnttataggaagatggaagcacncaaagggaaagagnngaagaagaaacaccccacngggggggggggggngacaaacaanggaggggggccaaccccggacacgaaggggagaggcaagccacaccggggggaacagggcccgacagggnaggacaaaacaaaaacaagccaacggggggcggaagcccacgagggcagcggcccaaaacccaccaacggggggcgggaacccccacgaaagaaaaaggaagaagaaaaccgagcaagcacggacgaaaaaaaaaaaagacgcgcccccaaaaaaggcgggaacagggag

SEQ ID NO: 120272 - DNA, 401 bp, Arabidopsis thaliana columbia
  unsure (1)..(401): unsure at all n locations
gaccnnnagagcgttgcccggggggttaggcgncnaaaccgaaagacngcccgganggggggcaanaagacncagannccaanacacaaaccccagaannnaagnncncacacttttagaaccagatatatatatatatgtagagaagaaacgaaaccacgcgcgaatacattaactccnggtaagaaacncnccgaacagagagnganaaggaagaccccccaaaccagggggggggaggacagaccaaacccagggagaacgggnaaagcaaggaagcnaggaaacagggccaaagagganaagnngggcggaaacgcgcgaaacccgccancaccagacaaacgaggagaaccaccaacacgncggaggagaaggacagggcagnccccgaacggaga

SEQ ID NO: 120273 - DNA, 436 bp, Arabidopsis thaliana columbia
  unsure (1)..(436): unsure at all n locations
aaaaaaaaaaaaaannnnccttcccnccccccccccaacactctaaactttttgcacaccccaccacaaatcttttctctcatattagttttttttcttttaaaaaccacatttacgcccttatttatttccccccccctaaaaacacccccccttaacccctttcccaaatttttttttttccaaccacccctcccctctttttttttnaacggcgggggtgagagnngnttttataanccccacaagcgtcccctcttttaaacccaccaaaattttcccttttaaaaaatttttttcacccttttttttaaaaaaccccccaaaatttttttcttttttttccccacatccaaaaaaactttcaaaatttctttttccccccccccttttccacaaagccctttttattaaattttcacacctaaaacctttt

SEQ ID NO: 120274 - DNA, 402 bp, Arabidopsis thaliana columbia
gatgttttggtgccttagagacttgacgtcctgccgcgtcgtagcttggtcctctgagcgggcgcctttgtttttgtgtttagactctctatcttcctattcatatttgcagcttcgtttcttgcttaatagcttctgttttcatttgctccagtttcaagctctcttgcttgagagcttccaacttttttgtttcctcaatctctaatctctctgcttctttctggggggggtcttcgcgttctcttctcaagtcttctagttccatcctgagagaattcaccaaacttggggagagagcattcgtcatcagcagcttcttgtagcctcatcggtgcttcattaagctcatttggaatgatcttaaccgggttcatctctgattcatgagctttcttcatc

SEQ ID NO: 120275 - DNA, 329 bp, Arabidopsis thaliana columbia
  unsure (1)..(329): unsure at all n locations
gacgtcgcacgcgcgcgtacgtaagcttggatcctctanagcgggcgcccttttgttttggttttttagtgaacataacaacttatatgtttgattaaacgtaacaagatcctcaacttcacaattatatgtttgattaaacgggacaacttagtgaacttacaaataaaaattaggaaactatataattcaatanatacattttgttntgagggggggtaatcaaatcttcgggtgcaacaaaacaaaataaaacaattgggtccaagggtcgggaagaccccggaaacaccaatggctacaatcagatgaacgggcaggattttttt

SEQ ID NO: 120276 - DNA, 396 bp, Arabidopsis thaliana columbia
  unsure (1)..(396): unsure at all n locations
cccccccctctctttttccttttccttttcctcacaaccccctttattttaagggccccgtttttccaatgcgctcccccttcccccccttttttggtttttttcttccaaaaaccccgacccgcangttttttcccttttggcgggggggtgcccccncnnccccttttcccaannccccccaccagcaaattttctcgaaagccttccctccccccaaattcccgcttcttttttcccccaaaaaaattaataaaaaagtttttaaatcccttttccccccccccaagtggggcccccccaatttaaactctccccccctttttccccgtgttaaaaaagactccgcgccccaaaaaataccaacaattccccgcacttttccccccccccccc

SEQ ID NO: 120277 - DNA, 440 bp, Arabidopsis thaliana columbia
  unsure (1)..(440): unsure at all n locations
ttcccccctccctaaactttaaacctttaaacccccccccttttggttttttttttttaacaaaaaaaaacctttttttttctttttaaaaaaatgcctccccaaatagttttttcccttaatttaaccccaccctcaattgggtttaatttttaaaagaaaaaaatccctttaagaagggccaaaatttatttgaggctcctctttttttcccctttaggggggccttnctctttctttcttttccccctttaaaaaaaaaattccangtttgccttcctttaaaccttctttaaacccacttttaggggatttggatttccccttcccctcctttcttaacccaaaaaattaaaaaccaccctttctttttttcccctttttttacctcaacccccccgagaaaacacctccgtttcccttaaactttaaaaccctaa

SEQ ID NO: 120278 - DNA, 172 bp, Arabidopsis thaliana columbia
  unsure (1)..(172): unsure at all n locations
aagcttggatcctctanagcggtccccctttggttttgttttttaaaaaacacanattttactacatctgttcttacaaaacccatttacacaagagccctctgtaaagccaatgaaaaacctctaaactctgcaactctgttcttgtttttacatacactgatttaccatt

SEQ ID NO: 120279 - DNA, 370 bp, Arabidopsis thaliana columbia
  unsure (1)..(370): unsure at all n locations
aaaaatattttttcctttcccacttttttttacaacgcggggttgtctgtttttccccccctctaaaggaagcccccccaatttttttccttaaacaagaggcgcgcccctcttttaccctcttttatancctgagggggtggggnggaacatccaccccccaggggccgtnntttaaaaaaccataaaaaattccccttccccttttttttttcccctttcccccccccttttttttttctttttttcgcccggngcccccccaccccgggtttttgcccccccctcccgggccccgggcctctccatccccccttggcccaacttccggaggggggggttgctctttccccacaaccgctctccctta

SEQ ID NO: 120280 - DNA, 333 bp, Arabidopsis thaliana columbia
  unsure (1)..(333): unsure at all n locations
acgcgtacgtaagcttggatcctctagagcgtccgcccttgggttgggcgttttaaaaaaaaaaaaatntatgtgatattttccagtttccacactagtacaagcgcttttgacacctaaagagattgctttgtaagaaggcaactggatctccattctaatagtacaagataatgaagcaacatattctcccagggggtgggtacctttaaacgttcacccacacaaaaaactcaacaccanntttctacttacctatncttnnntaaaattnncaaatcaacaaacatcatatttcctctctacacctcactggaagacccactccttaca

SEQ ID NO: 120281 - DNA, 395 bp, Arabidopsis thaliana columbia
tacgtcacagccgcgcggcaccccgccccccccctctctcttgggggggggggggccctcttctttttgggccaccttctcaaaaaaattaccgcgacgtgctcgccgggcggcgggctctccgcctgcgcgctcgaggccctttcgggtcggtacgcgggcccccccgcctcttcgtgtgcggtcggcttgcttcgcttcccggttgggcgtgccactgaccgtcccgtgttgcgccctcctgcgaccggcgccgctcccccttcgttgcggcgcggcgcgacgcggggcgcctcgtgggcgttcgctcgcgcgggttcgcgcccccgcccccggccgccgcggcggccgggtcgcgccgcggccgacgcccgcccgccccccccgcgcccctg

SEQ ID NO: 120282 - DNA, 525 bp, Arabidopsis thaliana columbia
  unsure (1)..(525): unsure at all n locations
ctgcaggtaccgctccggattcccgggtccaccccacgggtcncgggtgtcnggtacccggtntttanngaaaaatacaatcccgtgccaatttcattaattaaatgggcggacccacccgggggccggggggccacccacccgaggattgggtaatccaaaaatataacacagccctccgagcggatatttttaacttggacgggcgggtttcttttaactcttgtgggggtgtgggaatcctttcggaggctccaatccggatttaaagaccacccgaaaacttttntattcccagagggggggggggaggggagggtaaaaaagtttcccaggggcgggggggaattttttgggcacagatggggcccttgtnaataacttgtgaaaaaattgggggttccttgggctcttttcaaagaaccacgccctcccccactttaaaggcgcgaatattttcttgccctattaccacttcaacgtgtagtgggttccttcgcaagggttttttttaaaagagggaaa

SEQ ID NO: 120283 - DNA, 508 bp, Arabidopsis thaliana columbia
  unsure (1)..(508): unsure at all n locations
agtnnnnnnnnnnnnnnnnnnnnnnnnnnnnnnnnnnnnnnnnnnnnnnnnnnnnnnnnnnnnnnnnnnnnccacgggtncggcgtgaaggaattttcattgcaggggcagtctttatagctgctactatgggtcttaatggctactactacatggattttacccaagccgggtttttgcgcgggtggtcacaaagccaacccggtctagtttccaatatttggtaatgggcgggtttattcggtgggggggaaaaagaggagatgggttnccaattaaaatttgtacatgtaaagaaaggaaaaagattggtgactttgtaccaacacttgggttacctttatatctttggggtatatatcccctactttattataaaaaaaaaaaaaaggggggggccgtttaaagggaccaagcttacctgcggttgcttggcaaggataatttttttttgggggacctaaatcaaattgctgggccgggggtttaaaccgggggaggtgggaaa

SEQ ID NO: 120284 - DNA, 463 bp, Arabidopsis thaliana columbia
  unsure (1)..(463): unsure at all n locations
acctccctgccccctcctaacttgacctttnagggggccccctaagcccggggggtataataatatttttttttctctggccctccactctccccccggcttcaacccctttaacttcaaccaacacaaaacaccttaccccttttctaccctctcctcttttccccactttttaaccttccaaatttttaggggggggggtctcctttaaggggatcctttaaaaaacctcctccacctttacctaacaccctccccccttcataaactaatcccacccccttcaccttctttaataactccttctcctcagcgggagggggcgcttaacggcgggcccgccccccgggcctgaccctgcccgggtggcgcggagcccggggcccctgttgggtttcccgcggctgcaaagacaaacgcccctcccctcggcgtcggcggccggggcgacgccacaccctgg

SEQ ID NO: 120285 - DNA, 299 bp, Arabidopsis thaliana columbia
  unsure (1)..(299): unsure at all n locations
tgattcgccagcttaatcgactatataggaaactggtcgcctgcggtaccggccggaattccggtcacccacggtccgggtgcgtgaaggaattatannatnttnatgggtggagaggaggattatgaagtgcttaagaggtctaatactcctcacatgttttgcaaaacccttactgcgtctgatacaagcacccatggggggttctctgttcctcccccagctgctgaggatgggggcctnctctggactatagccagngcccgacttctcaggagcttcttgctaaggatcttcat

SEQ ID NO: 120286 - DNA, 401 bp, Arabidopsis thaliana columbia
aattgtccccacattgtgataatatcgcatcccgcgatttatccgcgactttttttttgtttatttctcatttttgaagaggcacccggccgtccccgggaccaagcgcaccggaacccatttttccaacagggggccggggggcgaaaaaaagaagttgatcacccatataatagaatcaactccgcgtgtcgccgtttactacacgcataggtgagcgcaccgcgagtcatagtctctctctataaccatccaattccctcatattgatttgtatggtaggtgcgcgcgcgaaacgacattttttttttggcggggtggggcgaatccgaagcccgagcatggggtcaatcaaataaataaagattcatcctattctatcagcggcgttcttttacgtc

SEQ ID NO: 120287 - DNA, 358 bp, Arabidopsis thaliana columbia
  unsure (1)..(358): unsure at all n locations
tcttcaaaaccccccacccttttttnaaaaattaaagggggggggggctnaatcctcaggggtgtctctaacaaaaattttgagtgtgtttgagggggctcaaggagccgggggttttgggtttccccttctccctggggctcccgggttggggaactcgtgggttcaacccgcggggggccgggggttgggggttaaaggtgggaaaacccccctccctccgtgtgtccgggggccacccctggggacctggcgtgtgtggccccaagggagagggggcttttggggtttctggggggggggttccgcccccaaaaaacccggggggggctgtggggagacgggggagggggggggg

SEQ ID NO: 120288 - DNA, 399 bp, Arabidopsis thaliana columbia
  unsure (1)..(399): unsure at all n locations
gtttttttatataaatttttnnnnnaacgggttattactaataattttcggcccactaataaagttcattccttcccgccaaaaaactatctattataaaatctatcactatacctttcgtgaacaagctaagatccttccattccctataaaaaggggggttaatttagacgatttcaattataaaattttggacctcgtttcccaacttgtccctaacctgtngctctctctcatttctccacattgaacatcctaccaaaaattttcctaatcaaaatcaacttccccgattcctaaaaaataactttaacgggcccaccaacctttgcctaaatataatcccctaccccctcttaaaaaattataatttccctttaacaaaaagttgccaaaaaa

SEQ ID NO: 120289 - DNA, 500 bp, Arabidopsis thaliana columbia
ctatgacgtcgcctgcacgcctacctaagcttggatcctctagagcggccgcccccgcgcttttggttttttttttttaattttaataatcttttaaacccctatttttttttcttcctttattttttttaaatctaaccttttggaaagggggtggagttcacctttttttaacaaaacttccccccctttgttcgattttaaacaaaaagtttaaattgtgtttttttacaaatcgaaaaaaatttgagaaaaaacaacctaccctcccctaagttttaactaacccaattgctcccaaccccaaatttctctttaaattccagctcctcggtgtttcatttaaaaaataaacactcttcctttaaaattgaaaaaaaatcccccccctttttcttataaaagaaagtttttcccttttcttaaaaaaaaaaaaaaccaactccctttcataaaaaacccccctctcaccccaaaagtttttttaatccttttaaaaa

SEQ ID NO: 120290 - DNA, 355 bp, Arabidopsis thaliana columbia
tttttttaaccataaaatcatctctttaaattaccatccctgttcttcaattacacaagtgattccaattccaatcaaaccacaaaccctaaagatcaacacaaacctaatactctttgatcattcctttaaaccccttctttaattttttctaatgaaggggggacttttcctaggtgttattattttaacacaataaaattatttatccaacttttcccacaacgggataacattctcccagtatcggaattttcaatcctctaacccaaattattcccaagaatcttcctcctccccttaccctttaaaccctcaatataaaatctctctaacccaaaaacccctttgcttt

SEQ ID NO: 120291 - DNA, 519 bp, Arabidopsis thaliana columbia
  unsure (1)..(519): unsure at all n locations
tctgacgtcgcctgcacgcgtacctaaacttggatcctctaaagcgggccncctttagttttgggtgttttaacaaaatattattggtttatataatatatctaacacacacgaaaataccaaccctaaaagctacatttagatttaaaccagaccattgattcttctataaatgggtcggggggatcccttaaaaactctttacccttttatcaggaggggggattttttcttaggtacgggaaaaaaataaggggtatgaggaaaactgtggtcctttcggtaaaataacagggggccttaccccttcaaatgggggagtgggccccttaaagaaaaggacccaagcccggtgccctcccccgggtggccccaccaagaacaggttggtttttgttggggctttggaaagggcccaacacaacgaccgcaggtgaagcatcttttgtggttttggccaaaacctcaatgcccacaaaaaaacgcgcaaagcccccgcgagaacgggaagctttttcc

SEQ ID NO: 120292 - DNA, 165 bp, Arabidopsis thaliana columbia
  unsure (1)..(165): unsure at all n locations
tggtttttttaaataaaacctcaagagagagccagcctctaataagaaaaaggtgaanatcccggcttacatattatttaataaccactctctcaaggacctaggaataacaaataatccttggaatggttatcaaatattatctanttaataacaagggggggg

SEQ ID NO: 120293 - DNA, 568 bp, Arabidopsis thaliana columbia
  unsure (1)..(568): unsure at all n locations
gtgcactctagaagagcttgacgtcgcatgcacgcctacctaagcttggatcctctagagcgggcgccctctgagcgggggggtttttaattatttttttttttttacccgggaggggagggaggacaaaccactacacttttttcttgttccttgggcaacgagaaacaaaaaccttctactttttttcatcaggccttttcctctttgttctctaaacttaaaattttgaggggggggggtactttccttagggcgtatcaaacaaaaaaatcttaaaaacgtcaaattttggccatctcccctccacagagccccaacgacgtcctccgaggacaccctggaccctttacccaaagaccccctcgcgcttttacactctccaaacccctgccccgcgcgacggagccagggccataaaggtctattacggctcttttggtttttcccatccccaacctaagttcgtganatctagagccatctaaacgggctaacaccctcaaaatcctagagacgtcgacctccccttcggcaccgcctctttttgtctttccacactattgct

SEQ ID NO: 120294 - DNA, 540 bp, Arabidopsis thaliana columbia
  unsure (1)..(540): unsure at all n locations
atgacgtcgcctgcacgcgtacgtaagcttggatcctctagagcgggcgcccctcgcgcgttggggttttttaattttttttttatttttttcctttcgttttgattttcatacttttccccctcttccccccccnacaaaccccnnccnaaaaaccccaaaaaaatgaaattttaaagccgccctttttaacccccccttttaacccctcctcgagggggggtgttaaaaaaaccgcgccccanaaaaaaaaatttttcatcacccccgtggaaagggaggggggcaaaggggtggggggggcatacgcttttagcgttaggggatcgaggggccgggccacctccgggggggcgggttattgcccccccttatgtgggaatttctttggggaggcggggggtcaaaaaggggttgtctttgaagggggtgcaaggggggggggggcgccctgggggggggggacgacgttcttttagacaaagcggggtggggaactttaagggggcgacccgcggggacccccaacgtggggggggg

SEQ ID NO: 120295 - DNA, 440 bp, Arabidopsis thaliana columbia
cctccactacattttatacaaaaaacctccccttcacatccttacctttcaaactccatcccactctatcacaacttttttctccctaaagaattaaacccccccataaaaaaacaaatactcctttcttatcactacttcatttccccttctcctttccttaatatctatcaatctatcacctcaccactttacactctctcctccttccccttctcaattatataattacattatacatacaatatataaccaatataaattctacccttacaaacacttatcctccaccacataaaacatccatctttcctcttcctcccacaaaaaactaattacttatctaccatcttaacccaaaaccatctcctctcttaaacaaaaaaaaaccatattcccttctctctctctcttaacttcaaattacacaataaaatatc

SEQ ID NO: 120296 - DNA, 496 bp, Arabidopsis thaliana columbia
ctacctaagcttggatcctctagagcggccgcccttaggcccgggggttataattaaaactttttttttttcactcctcccaacacacttccccaacaccctggaaaagaaccaatctttaaaagcctcccaggtttaaaaaatccattccccaaagggggtttttattttttaataccacccgttttttattttggggagggtaaaaatcttttttttttttaaaaaaaaaacgtttcccttaaagttttttttggaaaaaaccccccgggtttttttaaaaaaaaaaacaaccaatttccctttaaaacccttcttccggtttgaaacccctttacctttccccccgttggaaacctggcgcccgaaaaaaacctattttttggttttgggggggccctctcccctgggaaaattcctcttttaagggaacccaaaaagccctgacccccctctttttttttttcacaaaaaacatcttttttttatcccccaa

SEQ ID NO: 120297 - DNA, 458 bp, Arabidopsis thaliana columbia
  unsure (1)..(458): unsure at all n locations
cccctttagtttttttttttttaaacataaaaagacatgcaaatttatttattcaagcgacggttctataaaactgtaaaatatcacaaacacctgcaaagataaaccaggattagaaaccccctaccaaagcacaatgtaagaaacattcccaccttcacactccattgggggctanattnaactcaatgaccattttccaaaataccctttnaaacacctgtttgcccgaaaacaaagtatgtttgcatttttacaaaagggtattcctggacaccctcttaaaccagggatccctttgttcctgggcttcctcttgtgccccaaggtcttttttccttatgccggacccccggaataggaaggggaaagcgcccccggcaaaccccctaaaaaatttcatctttattttccccccggaattccggacccgtccctccaagcctaccctctttccc

SEQ ID NO: 120298 - DNA, 426 bp, Arabidopsis thaliana columbia
  unsure (1)..(426): unsure at all n locations
aaaaactttttcttttcttttccaaagggcttaccacacacatacataaggttaagaacctttaattgcccgccaaatttattggggatgaaccataaaactatactactaattgccatttgattgggctgtatttccaacaaggggggggggganaaatatggggggtgcagcaaaagaaaaagaaccggcggctcgttatggaccaaaaccttaacagctaagctcttaacgaccccacgacaaggggccgcaaaccttttgtagaactttaaacggggggactgctcaattcaattcggtgctttgtgggcgagggaaaaaaatccaagcgtttggcatggcctgagtgaacgtccccgtatgccgttgggggacaaaagttggaatgttttgaaaatttgatgggggggagggggggatttc

SEQ ID NO: 120299 - DNA, 531 bp, Arabidopsis thaliana columbia
  unsure (1)..(531): unsure at all n locations
nnnnnnnnnnnnnnnnnnnnnnnnnnnnnnnnnnnnnnnnnnnnnnnnnnnnnnnnnnnnnnnnnnnnnnnnnctttagttttggggtttttatacaaatttactcattgaggagatacaacaataaaacgatgcagactcaaacatagagcaaaagaagaaacttgggcgctctattttaagatttttttcttacaaaactaaaatctacaaaattactggaagccactaaaaccaagggggggggatttgaccccataactttctaaacttaccaaaacacacccttttaaccggttgttgaaatcaaacttgggtctgagctggtcttgcggatagatcctaaaacccatgtttaccgggggttgggggataatgaaatcgggaaccaccggcatactgggggggattcactttcaaactgaaaaggcatcaaggggcgactgaacggggggggggggggagtcctcttactagattcaactctaatgatgggggcccaacgagttgtcttgacttgaatgtgcgatg

SEQ ID NO: 120300 - DNA, 527 bp, Arabidopsis thaliana columbia
  unsure (1)..(527): unsure at all n locations
ttaggtgcactctacaagactttgacgtcgcatgcacgcgtacctaagcttggatcctctagagcggccgcccttaagctgtgggttttttaaattaaacatatattttatatccatttaaaaagtgtgaaaaaactcttttcacaaaataaaactatacaaattgcccaatgggggctaatttttataatacccaagacaaacgttgatataattttttggttgattccttcaccaaggggggggacaccctttcaagagttgcctgttttaaaaagccttcacactggaggggctctttcttggactacgaccctctaataaagctaaccctnccatggggggcaacttttttcctaagggcctcctggacaatgggcccaaccaataccttttttcccttacaaaacccttgtaaagtttgtttccccaccaacgcggtttggccaggtaacttaatgtttccaatacaccctcaatttgttggggggttacaagacgcccccctttttgcgtgccttttgaga

SEQ ID NO: 120301 - DNA, 541 bp, Arabidopsis thaliana columbia
  unsure (1)..(541): unsure at all n locations
ccctctcaattttttaccacctccctaacttctactatacatcaaacaattatctaacccctctacacacatcaaaacaccttattaggggtcctctcttaattcactcactcttctctaattatttcttctccatattaacaaaactacaatgctatcctcactacactctatttcctctaganagaggggggaaataaaattctccttaatttcgaaaaaattttgaccccccacctttttttttaaaataaaaaaaaaaattttttttttttgtaacaccctttctccgctttttttaaatcccccccaccccccccccttttttaacccctttataaaaacgacctcctttttgggaaaatattaacccccctctttttttaaaaaaaaaaaaaaaccggtgggtaagatacccaaccacccccccttttttaagaggagggggtttttttttttactattttaacttctcttttcccncaaccnctctttcctaatcattttttaaaaaaaacccccctcttaccccccaatcttt

SEQ ID NO: 120302 - DNA, 500 bp, Arabidopsis thaliana columbia
  unsure (1)..(500): unsure at all n locations
annnnnnnnnnnnnnnnnnnnnnnnnnnnnnnnnnnnnnnnnnnnnnnnnnnnnnnnnnnnnnnnnnnnnnnnnnnnnnccacgcgtgcgcggcttcgatggactctcactcttcccacctgaacgagggcgatcggtcccgcagttctcagactccttctacttctcattgcggctccgactgcgtcacttattctctccacaaacgcagactcgccaccaccacgggagggaatgcatcccgggggggaagatcacgcccctgcttattactctttacctccttcctccttctctgccgatactcgggacggggctttaaccctccacgatgaactcgagagcatctccggtcgcggggccatacagagtcagatcctgatgaatcagaggatatagtcggggatgatgaccaggaccaattttctccctgacaggaccaggactcttctattcgaacattaaccggccgtcgactcgattccagctttggaggccac

SEQ ID NO: 120303 - DNA, 536 bp, Arabidopsis thaliana columbia
ctacatcaccacctagaaaccgctaaccactgatcattttcacgctgttctgctttctcgtatcccacatagtgtctgatcattgacatgcaccagacacgacatagtgcgtctcactctacaataacagctcccacacagttctatctctcttatttatagggggagggtggacgatttaatcttcttactcatacagagtaaaaaaaatgagtgtcctaccaggtcgcaattacatctaagatatgaactcaataaataggcacttgtatctttataccgcaacggtactctgacgacagttatgattacgaagtggtgcacttcgcataacgataataactatcagaacacttcgctaacacacaacatactagacctcgagtgagcaagaagtaagtagaaactatgtatattgaatatatctttactatcatacacacctacttctcatctaattatcgtaatcaactggtaacttatatatcatcttttgtataattcagtgagcttatatccaaactcttgcccttcca

SEQ ID NO: 120304 - DNA, 377 bp, Arabidopsis thaliana columbia
  unsure (1)..(377): unsure at all n locations
nnnnnnnnnnnnnnnnnnnnnnnnnnnnnnnnnnnnnnnnnnnnnnnnnnnnnnnnnnnnnnnnnnnnnnnnnnnnnnnnnnnccacgcgtgcgcgctaagcaagtgtaaccctgaatgttctcttgtgcctactccaagaatgacaatgccctggttctaactgtagaatacacagtggagctgctacacctctctatcctctagctgagagggcaactactgggtcatctactagaatactttatgaggggggggangtnagtcttctgttaggctattcgcacgttatcatctctagaacctgtccattttcacccacatattcagaatcgacatcttcgtatgggctccgaatcaccggcagggcagaaggta

SEQ ID NO: 120305 - DNA, 502 bp, Arabidopsis thaliana columbia
  unsure (1)..(502): unsure at all n locations
cctcccctccccccctccctaacctttgatcctcttaaaccgtccccttggaggttttttttttttattaaaanaataaagattctattcctaaaatttaaaaccaccttattttcaaatgcccacaaggaaacaatccttttaaaaattaaaactccccaaccaaataaaatcttccccatccaaaatcaaactaaaaggggaaaaatccgggggtggaatttccttctgtgcttaaaaaattataaaaagccctctttgttcttttttttcaaaacccccaattcaaagtggacaccctaccctttaatcaacctcttcttatactaaaacctcttacaaaaggaaacaaacctaactactccttaccaaaaaccgggggaaatcaaatcctcccccccaaaacctaaaaaaaaacctttttattttcaaaaagataacaaaatctttcgaccctttggctccccccttaaattttccccccctctccttttaggcttac

SEQ ID NO: 120306 - DNA, 332 bp, Arabidopsis thaliana columbia
  unsure (1)..(332): unsure at all n locations
nnnnnnnnnnnnnnnnnnnnnnnnnnnnnnnnnnnnnnnnnnnnnnnnnnnnnnnnnnnnnnnnnnnnnnnnnncttttgtttttttttttttgtttgcaattcaagtcttctttctcatttcagcaaatattcatatacctgaattacatagggaaagtgagaaatgtgcaaatacctcaaaatgagctcatcgcgataacaagtgtatacttaataaaatagagactaaaaatgccgaaaaccacacctggggagagggtgtttcatcatcctactgcgaaaaccacaaaacctgctcctgtgatccacggtccttaaagctctaaccct

SEQ ID NO: 120307 - DNA, 567 bp, Arabidopsis thaliana columbia
ggtgacactctagaaagactatgacgtcgcatgcacgcgtacgtaagcttggatcctctagagcggccgcccttgaggttggggggttttttatataaattttttttttttttgtttatttttgggagaaaaaaaaattatgtttttttttaaacaattaaaacgggaggtgggattcaatgtgaagagggagatttcaactttcaaccaaacccaaaaatgagacctcctttccaaggagggggaggaaccctccggggtgcgcactccaaaaaaagagttttttgacttctctgtgagagatacaaaaaatcgccccgttatatagcctggcgcaggcgttttattacaccggtggaaacttctccgactctctcctctccctagaaacggatctttcgggccgggtgaacaagatgggcttgagaaagccttttcttcaagtgtgggaaagaccgtgtagtgaagtcttgtaaacacgccgtgtaaaaacaggttcgcgagaggtgtggtaacaacagtgaccggccgctgttgtgtggatccttcacaaatggggttgtcgtg

SEQ ID NO: 120308 - DNA, 125 bp, Arabidopsis thaliana columbia
cccgacggcgtataatccgaccggccaaagcagatactggttttttagacacaccccatgtaccccaagaggaaccacgccggcgagagcacacaaagtatgggccacgtttttccccggggggg

SEQ ID NO: 120309 - DNA, 528 bp, Arabidopsis thaliana columbia
  unsure (1)..(528): unsure at all n locations
nnnnnnnnnnnnnnnnnnnnnnnnnnnnnnnnnnnnnnnnnnnnnnnnnnnnnnnnnnnnnnnnnnnnnnnnnctttagtgttggtttttatttaaaaatctttactttattatcaaagaatcaaagaatccaaacgcacaaaattaatagcttagtttattatctgatccacattttcaaatggatcttaacattactcagacggccatgtatacaaacgcctaaccgacgcgaggggggggtttacaattcggggactcttctccactcttaaaagccagagaacgcctttttgatatattgaccaccacaaagcttacccttgagagtaaagtctcctttatgggccatgactcttctaactatagctgggctttaacatgccgcccaatctgaaaaacctggcgaggggctcgagggtctgccaacccttaaacgttatggaaaaatgtgccctgaacgctttgagtctttaatagacgggtccttatctttgggaggatgttttatggcacttttaaattctc

SEQ ID NO: 120310 - DNA, 507 bp, Arabidopsis thaliana columbia
  unsure (1)..(507): unsure at all n locations
nnnnnnnnnnnnnnnnnnnnnnnnnnnnnnnnnnnnnnnnnnnnnnnnnnnnnnnnnnnnnnnnnnnnnnncttgagatttggggtttttaatttttctgtttataaatttttaaaaaaaacgttagcgggtgacaacaactgtaacagaaataaacaattcactctcttgattaccacttttagaattctagcgccctatttaaacaaagggactcaccttttacaagatggaacaggggggggtgtgaaattgtgggggggcgcctttcaataaggcttaacctgcctcctgcatccttttgccttatcccactccttgacacgatccaattgtgtggcctccggggtgggaaaactgcctctttggggatgaaacttttgaaaacacccaaaaccttttttttttctcccccgagcgaaaggattctcttgccctttttttcacctttgattgggctcttttaacctgctaccgaacggcttagtactcccgcgtcccaaaata

SEQ ID NO: 120311 - DNA, 498 bp, Arabidopsis thaliana columbia
  unsure (1)..(498): unsure at all n locations
nnnnnnnnnnnnnnnnnnnnnnnnnnnnnnnnnnnnnnnnnnnnnnnnnnnnnnnnnnnnnnnnnnnnnnncccctttagttttggtttttgcaataaaaggaacataaaaccaacatgaggattctaactgaaatgttttcttatgtatatcgaaattcgtgaacaaaggtgataggtatctgtttgtcacctaacataggcggtatcagaatcttcttcttcggcttcttcttcggggggggttgctcaatggtctttacgtcaaggataagagccaaatcctgaactgagaccttaatgacgtcgcttctaacaccaatatgggtagcataggtactcatacagtacataccaggagaactgttgccacaccaatgggacttggaataagcaatttgaaaggggaagagaggagtgcacccaaaggagcaccaacaattgaagaagcttgaccggttctccctacaccgagcttatccattataagcaaaccggg

SEQ ID NO: 120312 - DNA, 463 bp, Arabidopsis thaliana columbia
  unsure (1)..(463): unsure at all n locations
gatcctctanagcggcccccctttcgtttttttttttncaaacaatatattcattccattcaagagagtaaaatcccctccctacaanacaatantcacagtacttacatataaactcttgcaaatttatacttaaacatattttcagaaagataaaaccatttgaagattatcttattttcacgaggaacctgatcaaatgatttctcaaagaatataccataacaattctctctaaacaatacttccttcttaaaaatctacctttggtccgacttctctaactaatattccatgtccggacaaagaccaccaaaaaccgaattaccctccttccttaatctggcattatcaaaaaaaacctctggcagcatcttccttactaaatggtctgttcacaatcccttctaattttaacttaacctttcccctccctttaaaaaaccctggtctaacaattaaa

SEQ ID NO: 120313 - DNA, 194 bp, Arabidopsis thaliana columbia
  unsure (1)..(194): unsure at all n locations
ccccactggtctcctggatactttatgccgacacgggccaaacagacacttttttttttctcttatctcccgcaccctttcttactngcagaaggaacaccgccgccccgtaccgccgtagccaaagatcgacacgccacacccctctattccccgggggggaagagggcgcgcgataaaaaaaaaagatgggt

SEQ ID NO: 120314 - DNA, 553 bp, Arabidopsis thaliana columbia
  unsure (1)..(553): unsure at all n locations
nnnnnnnnnnnnnnnnnnnnnnnnnnnnnnnnnnnnnnnnnnnnnnnnnnnnnnnnnnnnnnnnnnnnnnnnnncttcgggggtggggttgttattttctttttcaaaaaaaaaatttgattattttttaaacaattcaaactggagttggaatacaatgtattggttgattatacaaggcacaagcaaaggcaaaaatataacatctggacaaagaaacgaaaaacccatcatattttgggggcaaggaaggggataatgagatccttgaaaacctcagaatatcaccagtaatagccttggccatgcttgtattatacatggggaaaaactctccctttactttcataaaatngatcctctgcacgccgtcacaatagccccttggaaacgaatccctcattttgttcaaaaacccttaatgaaaatcttcttaccacctttacaaagggttttttaagaggtttcactaacaaagattggccacttcaataaaacttttcagatcaatgttttctggacattcaaaaacatcctttacaaatgggacccc

SEQ ID NO: 120315 - DNA, 516 bp, Arabidopsis thaliana columbia
  unsure (1)..(516): unsure at all n locations
ctatgacgttgcatgcacgcctacctaagcttggatcctctaaagcggcnccccttacgttttgggtttttttatttaattttnnctntaaataaatcaattaatcaacaggtgtttgtcagagcaaaatcagaagaaaggaaaaaaaccaaaaaaaccgctgccacaagataaggaagaaagaagaaaaagccgaggaaaggtccataatctttctagggggggaagttccacctactatgatcctcaaaaaagcggggggaaggaccctcaaaaagactaatctttgggcttttttgagcttttcccatgggtaacttccaaaacaaatgttagttttcaaaaaataccgatgcacactttactggtgccataaacaagcaaaaacagagtggatttttgtggcccctttttcactcctttggacaaaggaagttggaaacattttctccccatttcctaaaagtggaagcaaaccccctctaccggggccacaaaccaaagggacaccaatga

SEQ ID NO: 120316 - DNA, 534 bp, Arabidopsis thaliana columbia
  unsure (1)..(534): unsure at all n locations
ggtccactctacaagatctatgacgtggctatgcacgcgtacgtaagcttggatcctctanagcggtcgacctttagttccgggtttgatttaaaaacaatatttatctatcacaaactgatgatgcgacttattgtgcgatacgtataacaattcaaggggacatgtaatatgttttattcgctggtctgaaactacgaacccttagggtgactttggctactttatcatggggggggggataaatttttggggggtgacattaaaacaattaaaggggactctgcagaggaaggtatctcagtagctggaggccactctatttgcagggggggagtgttctttttccttaagtacttagaaacttaccccacagttgatgctgggtctacaggagttgcttctgaatgtctgggaggcacctggtgaaactgtaccggttggttatcccatctggccgaccgttacgccaagtcaccgtgcatttgcgttctcacgggctgatgcgggaagtgggctgtgtgacacaaccgg

SEQ ID NO: 120317 - DNA, 507 bp, Arabidopsis thaliana columbia
  unsure (1)..(507): unsure at all n locations
atgatacgcttgttgnnnnnnnnnnnnnnnnnnnnnnnnnnnnnnnnnnnnnnnnnnnnnnnnnnnnnnnnnnnnnnnnnnccacgcgtncgggaagactctaaattggggggaaaaagcattaccaaacaccaaataaatatgtctgatctgaataactcatcatcactcattctaataactttgattttgggcacatcagatctagagtccgagagccgggtcccaagaaaagacttttgggggggggttggacggatcggtgcttttataaacataagcataggtatggggggagggtggtccggatccggagctggtcccagttttggattccgaggaggaggatcaaggtcttcttactcatgtaggtctagttctttttctagctacggggggggggaggggatgcaggatcccaaggtggatcatcccccgatcccatgcggggtttgggtccggaggacctttcccgtcaatgtctattaataggaaggggaagaaaag

SEQ ID NO: 120318 - DNA, 498 bp, Arabidopsis thaliana columbia
  unsure (1)..(498): unsure at all n locations
gacgtggcctgcacgcgtacgtaagcttggatcctctagagcggtcccccttgagttttgggttttcnataatnaattatanntnaatatattactggggcgtgaaaatatttagtaacactaagtcgaccaaaaaaaagatgagagacgagaaagtctaaagaaagtgtaataagttagattgctggagtttacacatctatgctctttctcctgggggggccaccaacaggggaggtgggaacataacagtagatgttttgtcgggcaccaaattggatccgggggggtcccgagcattgaaactttaaaaattaagctggtaattggagctttttgttgtcttcccgcttaggaaatataatagaagaagtcgggatagagcgaggtttgaacaaaccctgcgatcctggtatgcaatgaacaagtgcgggtcatgggaatgacggtagatccagtgggggtgtttattccacggggccccccagggggaatttg

SEQ ID NO: 120319 - DNA, 521 bp, Arabidopsis thaliana columbia
ttgacgtcgcctgcacgcctacctaagcttggatcctctagacggtccccttaagtgttggtttttttatataacatccataaaacttgatcattatcacagggaggggagtagcaaagtttctcaataaacaccttcttaaataacatccattaaacttgatcattcactattactaaacatggggaacagaaacctcatcatatgtataaaggggggggattatttaaaagacctaaaccataaatataaaaaacctccaagaagctgagaagagggattggtttcacagcgctctgaatcccctcaaaagctactctaactctttccttaaaacctagaaggctgactctttacctctacactttgtttttgcagcttaaacacatttgccataaccctaaacaccaggtgcccggtttctcccaatttcacatcccgaaaaaagcaaccaaaaagggcgtatataactttctaaattttttgtccggtgttttccttagaattcaaaggatcttgct

SEQ ID NO: 120320 - DNA, 547 bp, Arabidopsis thaliana columbia
  unsure (1)..(547): unsure at all n locations
agtgcactctacaaaatcttgacgtcgcctgcacgcctacctaagcttggatcctctagagcggccgcccttgcgcgggggggggtttaaaataattactttttttctcctcggcccccaggcccccgccggggggaaaatttttatcaggcccatagactagattttacttttaacccaaaagccaaaaaacccgaccccccccccttggcccgccccaaactagggggggggttttttttttagatccaacccccaaaaaccatccctcttatttttaagaaccccactcttcccaatccttaaggggtcgttagagaactcccacccctcaatctcaccggccgctcttaaacttccaggcgccttgaaaaaatacctttgttggcccccccacaaaccccttnttccacgccactcgtggataccaagaaagagaagaacattctttggggccccactcccccgcgaaccgcgcgggggccgtcaccccacgaaatattcccgaaccccgggcccgctggtggggggaccccaatgttcgccc

SEQ ID NO: 120321 - DNA, 508 bp, Arabidopsis thaliana columbia
ggccccccttgagtgttggtgttaaaaccaaactaacaatttccttccctaaccgagcagagggtcctgcaccgctaagttctgggggttcatcaatgggcctccacaccttcccccctcaacctacccttttgacgcgttaagggtcttctggattccccccttcttaaaaggggggggggttctacaaggggggggacccactaaaaaaaaccccttctccgggatccagggcccccccttctctcccccgcgtgtgggccctttcaaaagccctctccccccctcgccggggtctccgggccccttttttaactgggggtcgcgtggaccctggcccctttggggcgtgggggctcgttctttttttccccgtgctctaggacgcagggacccccgggtgcaaccccgccagattgtcttcttaaggggggcaccctcgccctctcaaaccgccgcgagagtcttgctctcttcttttgaaattgccctcccccttcccccacgg

SEQ ID NO: 120322 - DNA, 498 bp, Arabidopsis thaliana columbia
  unsure (1)..(498): unsure at all n locations
taggtgcactctacaaaaactatgacgtcgcatgcacgcctacctaagcttggatcctctaaagcggccnccctttagtttttgtttttagaaataaaataaatcttatttttggtgcaatcctaaccctaaatcaaaaccactacataaggcgagggtttcaataataagtggtagggaataataataatggataggatatgagtactaaggcagagaggaaacaaaaaaccccctcctgggggggggctctcctcaggggtcaaccaaataaaaaaaccacactgggaaagcttgtttaagcctggatgggaaatgtcctgatgggtgtaaacaatttcattgggtccgggaaaacttggcctttcctctaattatcctttggggggaaagaattctttcaccccggattggacccgagacttggatcctggcccgggtttacccccacctttggaccaagtccaatgggaaaccatttgaaaattgtgggctggg

SEQ ID NO: 120323 - DNA, 316 bp, Arabidopsis thaliana columbia
  unsure (1)..(316): unsure at all n locations
gctggggggggtggnnnnggggggggggatctatttagtggcactctcaaaaaactctgacgtcgccttcacgcctacctaagcttggatcctctanagcgggcccccttaagtttggggtttttaatttatacnctactttatattcatgaggcatgggaagaattacttcaacattattgggggtgatttgggtttcactatacccaggaaataacaattgtattggcttaccaaacatgagggtagtggttactacatttggcccttataggggggaggggtaaaaccanaggggggggtaccttgggaaaat

SEQ ID NO: 120324 - DNA, 488 bp, Arabidopsis thaliana columbia
  unsure (1)..(488): unsure at all n locations
tctatgacgtcgcatgcacgcgtacgtaagcttggatcctctagagcgggcgccctctagcgtggggttttttaaataaaattttcnaggaggaatcattcccatttatcaaaatgtgtgcagaattacaatggaaaaaaaataatgcaaatcaatcccaatataaatatatatttactctaatttacaagatagaactccaaaaaaaaaaaaaaaaaaaggggggggcccaaaaataagataaaattcaactataaataaagctgtgtggggggagttttctttcattcatttcgaataagaaaagcgggctttcattctggaaagcaaacgcttcaacttggtttttaacctcacttttgtttttggtgggggcataaatttttaaaaaacttccttgggggaactttccatgcttctttttgagaacgattttttttatttaacccctttttataaaaaaaatcgccctttggtttaaaaataaa

SEQ ID NO: 120325 - DNA, 543 bp, Arabidopsis thaliana columbia
  unsure (1)..(543): unsure at all n locations
acgtcgcctgcacgcctacctaagcttggatcctctagagcgggccccctttagttttggtttttttaaatttatttggtttttttttttttttttttttttccaaaagtggtggggggggcccaaaaatgtgggggggaggattttttatttacggggccaacagggctaatctttgttcccccacaaattttccaaagggcctttctcttcttggggggggggccttnttttcagagggtccctttaaaaaaaaattttttttaatcttaaccaacccttttgaaaaccccttcaaaccccaatgtttgctaaaaataaataacaaaggggcccctaaaaaaaagaaaaccccccttctacctaaaagaaaggccctcttgtgcgggaaacacatttttatgctgcccaggggggcaacttggtcggcgccaataacgaatctccttccctctgcaggaagaaaacccacttggggaacaaattatcctacccctaagcataaactttttcccacctaataaaacccacagccccaaaggg

SEQ ID NO: 120326 - DNA, 498 bp, Arabidopsis thaliana columbia
  unsure (1)..(498): unsure at all n locations
tggtttttttttttttaaaactacaacccccaaggggggggaaatttaactttttgaattttggaaacatacccaattaataccttgccaaaataagtcgccaacttttcgaacaaaaccattaaaactttttgggcgaaaggtaatgaacccttctcaaaaggtgggggggtaataaattgcaaaaggggttnggccacaaaaaaaacctacccccactggaaattaaaaggggaggaaaaaagtgggtgttctgaggaatttcgcccaaaaaattaaatgggggttgaaaaccctgcaaaagttgaacctacctaaaaaggggcaataactcgggagggggggggaaccgcgacccaaattgattgtaaaaagacaaaagccccccccaccataaccaaagcctctaaaaatagatttttccctcagaaaaagagggggactactccccacttccaaaaaggaaaaacatattttggccggggcccttcctcaaaa

SEQ ID NO: 120327 - DNA, 495 bp, Arabidopsis thaliana columbia
  unsure (1)..(495): unsure at all n locations
agatacctccnnnnnnnnnnnnnnnnnnnnnnnnnnnnnnnnnnnnnnnnnnnnnnnnnnnnnnnnnnnnnnnnnnnnnnnccacgcgtccgggcgaattaaggttctangatctctgctcttaaaactcttatcgccgctaaaactctctacccatcggagagcctctctaaagggtatcttcatgatctcactcaatacatatgggttcggtactatatgggttttgcttctgattgggccgtattcgggggggcggttanagggcgggttatgggttcccccattttggctggaagggccatgctctgtttctttacaggttcctctccggcttggtagatatcagtttaggtcctgatttactgagaaaccaagcttttgagcttaagtatggtagggttctnacggttattgagaaatattataaactgggtttcaaggttattcctttctggaatttcttttgggaggctgattataagggacactgct

SEQ ID NO: 120328 - DNA, 523 bp, Arabidopsis thaliana columbia
tctggcccctgttcacgtattatacccgtcccggggataaaaacaaagtttttttcttttttttattccccattttttcgccggcggcgccacgccgcgattgccctgcgtccacatccccgatacgcctacgcctttttccccggcggggggggggggcggaacaaaaaaaatgttgttgtctctttatattcaattaaccctttgttcgtctttttttgatcaggctcttttcgtccgcctcctccccgtctaaccctcccttccccctccgacctccaccccgctcctcctccctcgcccggcgcttttttttttcggggggggggcgcggctcccgttccgcgccgttccctccaaaaaacaccctctcccgctgccctctcctctccacggcctggttttgtcgcttcctgttgtccgtcccaccgcgcttgccatgtttatctcctcgtctttccgtcctccctcgcactcttcgccccgctcggccctccgtctcccgcctctctctttccgccat

SEQ ID NO: 120329 - DNA, 198 bp, Arabidopsis thaliana columbia
  unsure (1)..(198): unsure at all n locations
nnnnnnnnnnnnnnnnnnnnnnnnnnnnnnnnnnnnnnnnnnnnnnnnnnnnnnnnnnnnnnnnnnnnnnnccacgcgtccgagcaggtnaatcattattctctccctacaggcctctatgtggagattgaggttctcttagatgattctatcaccttgaccggttccactaattacactacagacttctattggatc

SEQ ID NO: 120330 - DNA, 358 bp, Arabidopsis thaliana columbia
  unsure (1)..(358): unsure at all n locations
tgaaactccnnnnnnnnnnnnnnnnnnnnnnnnnnnnnnnnnnnnnnnnnnnnnnnnnnnnnnnnnnnnnnnnnnnnnnccacgcgtgcgcgtaagagacctataatttcgagaaatataacaataacaataaatgctctccttcaaacaacactagttgtatcatagtcataaatctttatgtccttctcacgcctatcgatattctttggcttaacgagagacctccatatccgggggagtcactattcctgccgtaactctttactcacatagtgaaagtttcacacacacaaattctactcaagaggaagactacatattgcagtgtcaggactaactaacactactactggct

SEQ ID NO: 120331 - DNA, 197 bp, Arabidopsis thaliana columbia
  unsure (1)..(197): unsure at all n locations
nnnnnnnnnnnnnnnnnnnnnnnnnnnnnnnnnnnnnnnnnnnnnnnnnnnnnnnnnnnnnnnnnnnnnnnccacgcgtccggggatgccctttnttattcacgatgaaactacatggattgcgggaatataagctaaggcatgaccccctttggattaatgcatcataggaagcttgtatgatggagctctaaaac

SEQ ID NO: 120332 - DNA, 256 bp, Arabidopsis thaliana columbia
  unsure (1)..(256): unsure at all n locations
ttttgggtggatatgcctgtttagagttatattatagtttattcatggatggggatacgtttgtaatctcntgccatatctttgggttgtcaaagagagggtgttcttaatgtcaattgggggggggggcgcaantttccaacttattctcttaaaaataatacccggcttctctnatttttttaagggggaaattccctaacctgtcaattactttttttttttttttaacattctaaattttgttgggttgggg

SEQ ID NO: 120333 - DNA, 472 bp, Arabidopsis thaliana columbia
  unsure (1)..(472): unsure at all n locations
aatacgactcacttagggaaagctcgtacgcctgcaggtaccggtccggaattcccgggtcgacccacgcgtccgcgcgcgttactgtgaattaatcnagagatctaaatatccgccatggacagagcacaattgatcttgttaggtctacctatattcttgttttgttcggatctcttcaacctcttcactcctccggctcctaaacctcagcctcaccgtcctcatgagggccgcatattcctcaccagcatcgtcctaatgcgatcatccccgaaaccctagactttccttcacagaagacaagtggcttangaggagcaattggatatggaaatacagtaaagatcaacttctgcgtctcctgttcttacaagggaactgcagtcaccatgaagaaaatgttagagacggcttttccccgtttaaatgtgattctcgcaaattacccaccaccagcaccaaaacgcct

SEQ ID NO: 120334 - DNA, 694 bp, Arabidopsis thaliana columbia
  unsure (1)..(694): unsure at all n locations
cccccccccccccccccccccccggggggggganatanatttgggacccgtggcgncccccaattctttngcccgcccccttccccccctttccttaganttttnatttcctcttcaaggctttcccccccttaggggtttgggggtctcccccacctccacaaaccccccncnttcnnnccccccccccnccccccccccctttctgccccccccacttttcccctcctcccccccccccgccaggcttccttttttacccacccccctccctcttttattccccccccccccccccacccacccccggttttttttccctctctttttttgcggcctgtcttggccacccnctccccggctggggccgnctcttataacccatcaacacccccctctttttcccccgccctcccccccggccccccccccctttttttccccttttccctctcttgggcgggcccccccctttcttttttttttcccctccccccctcccctccccccttttcccccctcctttnccccccccccccttcctcttcccnnttttccccccccgccccttttccccccctcccctctttttctctctcccccctctcttttttcccccccctcctctttttttctttctttccccccccccccctttccctccctccccccccctcccctccccctcctcccc

SEQ ID NO: 120335 - DNA, 453 bp, Arabidopsis thaliana columbia
  unsure (1)..(453): unsure at all n locations
atgatactccnnnnnnnnnnnnnnnnnnnnnnnnnnnnnnnnnnnnnnnnnnnnnnnnnnnnnnnnnnnnnnnnnnnnnccacgggtccgagcatgtgtacctaaacagcatcatagaatgcttgatcttaccatcataggctatctgcaatgaactgaacgctccaagcttgtcatggagaacgacaacaaatgatcgctcttgagccataacatctaagggaacatttgcatatcatactgggagggagactgaatactatgatgttcacatccacattacatgactcttacagaggtgctgcggaggatgcttaaacnacatcttacgagatcaagcccgtgagacagcttacactcatgggatttacccagaacaaagctgtcaatggggacttacagaaaatgaatagcttgaacacacttttctccctggctcctatttacccctca

SEQ ID NO: 120336 - DNA, 381 bp, Arabidopsis thaliana columbia
cccccccccattttaccaacaaacctacccccctattacatcacattctccatcattttttcccggggggaagcttcaaaaaacatatcaccccaaacatttatccccttcccccctcccccaatccccccatacatctcaacacacatctctaatatctatgccatattttactcactttactttaaactcctccaatattattaaagactccctccacttcccacacataactaccacaattttttttttcggggggggttacccaccaacactacacttgtccatctctaaaaaaaaaatacccccccccatttcctaacatcttttactttcactacatcctttcctcaatctattctgtcacctcctttccttccc

SEQ ID NO: 120337 - DNA, 486 bp, Arabidopsis thaliana columbia
  unsure (1)..(486): unsure at all n locations
ttaaatccccacctttccgccttttcctggtgtttagtgttttaaaacaaaaacncccccccccccccccccctcgcctctccccacctctctattttaatattataacatcagtcccttccccacgattctcccatctccactatctcctcttaactattcccccataacccatatatacaattttttttttgggtgtggggccacnacccaccggtgggtcggtaaaaaaaaaaaaaattccctaccatttacctccctccgctcccccacccccacacttctcccacttatatgaccctactcccatcatttactcaaataagccactatctccttaccacgtctcacctactacatcactattgtagactcaccccttccacctacccccttaccatctctcctcctttcccgtacttcttccaccactcacttttccactcactcttcacctcattacttcccacattctctaccaccacc

SEQ ID NO: 120338 - DNA, 453 bp, Arabidopsis thaliana columbia
  unsure (1)..(453): unsure at all n locations
aaaacaatttaattaatccatgaacccacccaactttaacaatttaccaccagtaaacaaagccttccaaatcaaaacaaggctttaaaaaaaatattcgcatcccaccctaattccccttttttccccaaatttaatagggggggtaatcctcatatacggagngagttaaccagnatccttttttgtttgggggggggttttttgaatccttgtcctttaacccaacaaaaaaccaattgcagaacccctctttttattcttcttaaaaccagaaaaaacttacacccttttgtttttcaccaaccccttgcccattttttttccttttaccttggccattttaaacctttttccccttccccttttttataaaaagagcccccttttcaaattccccccccttttgaaacaaccccctttttttcccctctgacaccccccaatttttcc

SEQ ID NO: 120339 - DNA, 366 bp, Arabidopsis thaliana columbia
  unsure (1)..(366): unsure at all n locations
tcggcccccccctcccccccacttttttttttgggttttagtacggggnncccctcctggtggtgggggtttttctagaaaattaaatgtctcccctcccgctttgcgtgttctcgtttcctccttgcgtcgtcccgctggttcctgcgccccgtcgtgcgtccggttgtgtgctttccttttcgtcccgctctcttcctgtctttgtccctgcgcttccctctgctgtctgtttccctttcttctccgcgtcctgctccccctcctcgttctcctcccttcgtctctttttgacccgattgctcgcccgcctggttcttctcgcctgtcgggcctcgcattcctctccctgttcttctcgctcgt

SEQ ID NO: 120340 - DNA, 519 bp, Arabidopsis thaliana columbia
  unsure (1)..(519): unsure at all n locations
atgatactccnnnnnnnnnnnnnnnnnnnnnnnnnnnnnnnnnnnnnnnnnnnnnnnnnnnnnnnnnnnnnnnnnnnnnnccacgcgtccggtgaatggagggagcaactctttttagtatatggactcccctatgggtggcttctccgctcctatagaaactcggtatgcctcaatccacactggtctccaaccagggttaattttaccacagcctgggcctaatttgaacctcagttccgtatggggtctgacaatctcgcgtctctcccacgaataatcacttccagctacgccgtatgggtaatcttccttcctcaccttgtaccttctatggaggacgttgaggagacttacattatggtgaaacctcttggcatacaccgtggccttggaggaaaatcatttctcggtgggagaaagaggagattaaacttattgggctcaggatgtttcaacgcccaacagaatcggctgaggagcattataaggatcttattgctacatcattctttccta

SEQ ID NO: 120341 - DNA, 469 bp, Arabidopsis thaliana columbia
  unsure (1)..(469): unsure at all n locations
atgatctccnnnnnnnnnnnnnnnnnnnnnnnnnnnnnnnnnnnnnnnnnnnnnnnnnnnnnnnnnnnnnnnnnnnnnnnccacgcgtgcgggttgcacaggaaataaccattatctataaacaaagataaaaagtaattatcgagcctatggtatgcactttaaattcacaatcgcaacttgaaaactcaacaatggaaggggtgcttccgattatttatccaaatacatgggattaaaaggggggggccggcatatttggaccctataatacaaacaatcgatcttcttacgggaggatcttttgcatctggtggggctatctactatcctactacatacgaaggagtgaatgcactcccaatgctggaccaactgacatatttccaacactatatagagaaagtaatacggtgataacacaagagaagagcctctataacgtgggcaggtttacagaagaccaatc

SEQ ID NO: 120342 - DNA, 507 bp, Arabidopsis thaliana columbia
  unsure (1)..(507): unsure at all n locations
atgatttccnnnnnnnnnnnnnnnnnnnnnnnnnnnnnnnnnnnnnnnnnnnnnnnnnnnnnnnnnnnnnnnnnnnnnccacgcgtccgagaagtaatggtggactaaatcaaatgcgtactggtatagcagatatagtggctgttgcgcacatcatgaatgcaactttagtcattcctgagctggataagcgatcgttttggcaagattcaagtgttttttcagatatttttgacgagggaggggggattaaatcattgcgaagagatgtcaaggttattaaaaagctcccaaaggaagtggaatctctacctagagcaaggaagcatttcacttcttggtctagtgttggatattatgaagaaatgactcacttgtggaaggagtacaaggtcatccatgtcgcaaaatcagattctcgccttgcaaataatgacctggctatcgacgttcaaagactgagatgtctggactatatcgnggtctctgcttctctccctgcattga

SEQ ID NO: 120343 - DNA, 321 bp, Arabidopsis thaliana columbia
  unsure (1)..(321): unsure at all n locations
accccccaaacatagaccccacctccctccccatattctcctgggggggggagtggtgtatacaaaacccgaatccagtttatgtccgtcggtgccccacctccccatacctattctcaatcaaccatccagtaacgctcaaccacccgtatcccgcgtccccaaagtatttattgttaccccccacaccgcaaacaaaagcgatttttttttgggggggggggcgcggcccccacgcgcgaggcnctacaaaaaaaaaaatattcctcccaagcgttcgcctcgccgggtgcgccccctcacgccagtttcacaccgcac

SEQ ID NO: 120344 - DNA, 509 bp, Arabidopsis thaliana columbia
ttttctcactcccctccctttttgagagagctcgacccccccctcgcgtccccccacccgcctttcctttttccccccccgggggagggggtggtaaaataaactctcctctgcttccagcctccctcatcccgccttatttcctctgtgctcttactgcacccttccatcgtccttctgagtgatctctctttattgccctctctaccaggtcggtttgcgactgccgtcccctcctcccggggggtggtgcgcgtctcaccccctcctttcataaaaacatcccacacgcgtcccagcttttgtcttcattccacgtcgctccatctcccctctttacgcttgtactgtctgctttctctccccatcgtactccctggcacccccccttcactcctcctcgcgttcgacacctctatcgcttttttcatattctcctgcactctcattcgcgccttccccctctcactgcctctccctcgtgctctcacctctcttctcctctcttt

SEQ ID NO: 120345 - DNA, 348 bp, Arabidopsis thaliana columbia
cttagaatatcgcatgcaagagggggcgaatcttttggacgccccccgcaattaagcgggcgaacccgcgcagagagacggacgcgggggcgccatttaaccggggggggggggggggaaaaaaaccaaggtccatcgcaattagtgaaaagcgaaagatagctaaatcaaaaatatcgtctatctcaccagttagcacccatatccgccgcatgagcgcaaacctgcttgtaatacactccctcgccagcagcacgcagaagcgcatggagtttttttttatacggggtgggggaggaaggagcaaacacacggcagttgctgcacaaaataatagagtcgatgcgt

SEQ ID NO: 120346 - DNA, 518 bp, Arabidopsis thaliana columbia
  unsure (1)..(518): unsure at all n locations
atgatctccagctctatacgactcatatagggaaagctggtacgcctgcaggtaccggtccggaattcccgggatccacaaacaagtttgactcagttgacaaaaacagaccaggggatcaaagtcatatcgtcccatggggaggaattcgtggcagatgtcgtcctatttgctactggcagaagtcctaataccaaaagattgaatttagaagctgttggtgttgaacttgatcaggctgggaggtgtgaaggttgaccagtattcacnaactaatatacctagcatatgggctgtaggagatgccacaaaccgaattaaccttacacctgttgcgttaatggaggccacctgttttgcgaacactgcttttggtggaaagcctactaaagcagaatacagcaatgtcgcctgtgctgtattttgcataccaccactagctgtagtgggtctcagcgaagaagaaacagtaaaacaagcaaccggtgatattctggtcttcacctcaggctttaatc

SEQ ID NO: 120347 - DNA, 502 bp, Arabidopsis thaliana columbia
  unsure (1)..(502): unsure at all n locations
atacgactcactttagggaaagctcgtacgcctgcaggtaccggtccggaattcccgggtcgacccacgcgtccggggtagttatgtttgttggaaacaaggtgctggaaagacnacaacttgtactaagtatgcttattatcatcagaagaaaggatacaaaccagctttggtttgtgcggatactttcagggctggtgcgttcgatcagctgaaacagaatgctaggggggctaanatccccttttatggaagctacacagaatccgatcctgtgaaaattgctgttgagggagtanatacgtttaagaaagaaaactgggatctcattattggtgataccaggggtcgccataaacaagaagcttctctctttgaagaaatgcgtcaagttgctgaagcaacgaaaccagatcttgttatatttgttatggatagcagtattggtcaagctgcatttgatcaagctcaagcctttaagcgagtgttgctgttggagctt

SEQ ID NO: 120348 - DNA, 668 bp, Arabidopsis thaliana columbia
  unsure (1)..(668): unsure at all n locations
cccgcccccccngcgtaannaaanctccccacgcttttgcctcttttccccgtcggggtgtttggggtttccctacccccanccccccncccccccccncccccccccccctccccncncncccccccnctcccccttccnctctgcgtcctttccgttctcccttccctctctcttttctcccctcgcccntctgccggtgttccttctcgcctctgttctgccgcgcccccgctccgcgccccttcgcgccctttttttttttgggtttgtctgggcgccccccccccgggggggcgccccccatacgcattctccccctctctcttttcgtcgtgtttgctcccttcccccctcctcttgccctcttctcctctctctccccttctcgttctctcctctcgccgcccttttccctgtgtcccgccccgcgccgcccgccttccccccgttnttcctccctttnccccctctccccgtggtgccgtttcctgcttctccgctgtgtcccccttgcctcctctctgcgtcggtctttctccctcgtcctgttctgcgttccttcccgctcgcctcgtcttttctcgtttccgcccttcctccctctcccccctctccgttttctctgctcccctctctccctccttttctcgcgccctccctttccc

SEQ ID NO: 120349 - DNA, 502 bp, Arabidopsis thaliana columbia
  unsure (1)..(502): unsure at all n locations
gggagaagcacccgacgcccgcaggtaccgggccggaattcccggttccacccagggggcgaggggggggaaaataaaattacattctttacaccgctttgatcagctccgaggcgtgttctcaatagtcgaaacgggtaatgacacacggggctctacacgatatcagacagctgcaatgtatgcttagaaaccccacacgccatctttttttcccgggagtcggggcacaccacggggggggtnatacggatccaccgtcgcgtcccgaggagagcgtgagccgcctccgggggttacctatctgactgccgctcacgggggtgtactggagcccctgggactccttcttgaccgtttcctggggtctttccagctcaggagcgtatggctgaagctcggagggcgggaaagcgggccccgtgctccgcgtttgcgcgggggaacccgaacggggccgtaagggtggtcttgcccgcgcgggcgggagacggcggtccag

SEQ ID NO: 120350 - DNA, 335 bp, Arabidopsis thaliana columbia
  unsure (1)..(335): unsure at all n locations
gaaaaaaacaggacacagacccaacaacattttntctccaatactcccaacatttcacaccgcgccccacgcgagcgcagtttacaattcaaacaaacaanaccgcccacccactttttaagagaaacacaaccagcacacacaaacacgcaaccgcagaccccaccagacaccaagacacccaccaaccactttacaaacacccacaggggggccacacccgtcccctccgccgaaaaacaaaaacagccggacccttcccacaccaccctctcacagccgatgacccaatagtcacccatccagacccccacatctacaaaccttatccaccc

SEQ ID NO: 120351 - DNA, 258 bp, Arabidopsis thaliana columbia
aggagctctccctcggccgccgattcccgtccccccgtcggcaaaataaatgattcaaagcttgtctgcttgtttcttataaacaacacgcttcaaaacctctctctcacccccagaacgcataatcccaacgcgggacggcaaatcagttaaaccagacgactaaacctaccccgtattctggacccaaactacatttcttcacctgtttataatcgtaagctccgggaactactcgctctcctttttacttcttcg

SEQ ID NO: 120352 - DNA, 259 bp, Arabidopsis thaliana columbia
ttttttttttaaaaaataaaatactcttgcccatacataaagggcaaaattgattaaagaggattatcatcagaatttttccatattacatatagggggatgggctctttaattcaacaaacccttagcccaaaaaacaaccttccccctaaacttttaaatattttaaaccggggggggggcctttttccctttatttcaaaacaaacccacacacaaaataaacgggggggtgaaaaagccccaagccggggggggt

SEQ ID NO: 120353 - DNA, 368 bp, Arabidopsis thaliana columbia
  unsure (1)..(368): unsure at all n locations
aaaggcaagagaggccacgcgccccaagacccgccccccccatcaccacaaccccccaacccagaacagcaccccgccacagcctaacgcccccccaccaggccactcacaccccgaggaagaaggcgaccagacaagaagaagcggccgaacaaccaacaaaaaaaacaccnccgcgcccccccctaccacacacgaagacacgccaccaccaagccgacgatagcgccaccccccggaacacacccgccccacaaggcccggcgacacccccaccccgcgagcacacacacgcccgacacatgaagaaagacgagaccaccccccaccaacgagacaacaagcaacaaacgaacgcccccgcaccc

SEQ ID NO: 120354 - DNA, 545 bp, Arabidopsis thaliana columbia
  unsure (1)..(545): unsure at all n locations
ttaggggaagctacgacgcctgcaggtaccggtccggaattcccgggtcgacccacgcgtccgcgctttttcaaattgtcgtctaaagtctctaaaaccaccatccgaaggtcttgacaggagagaattcgaatgcggacaggagaatttccttccgtgattttttccttggaagccgaaaaacgaagtttancttaccctccctgctgagaagaaggggtgttattgaccctggtgtgggttcggccccgggaagtgagggattttttaaaaaaggctactggaccactgggccccaagggcccaggcggcataaacccccaggaggggtaaccaagggggagggccacttacccaaaaggaggctgaatcccacccaattgaaacccagcgcctggttattttccccaatgccagcccttatttttctgggaccccaacgcccttttcccaaggggggattggacgcctgagaaggatattacactgggataaacttatcggggtccaaaagaaccctttgatcgcgcgcgaggggttttctt

SEQ ID NO: 120355 - DNA, 373 bp, Arabidopsis thaliana columbia
gcttggatcctctagagcgggcggccttttgtttttgtttttataaactgaaacttttaggattgacccacttaagaagggagggctagaaatggggaggctaaaacaattaacatacataccgggggacacaaggaaaaaacagaacataatgggaaagggggaaacaaaccacttaaaacggtttaaccaaaggggggggcataaagggggggggggggggggaaaaccaacaacaaaccccttttatagggggggggcccccttcccttacacggagccagagaagacaaaaggggggggaaagtgtttaaaccaaccagaccttttaaaccaggatccaccccccgggggggggggtttttcggggaaa

SEQ ID NO: 120356 - DNA, 447 bp, Arabidopsis thaliana columbia
gctactatacgactcacttagggaaagctggtacgcctgcaggtaccggtccggaattcccgggtcgaccacgcgtccggggtggatcaccattgacattgctctctggaagttcgagaccaccaagtactactgcactgtcattgatgcgtctggtcatcgggatttcatcaagaacatgatcactggtacctcccaggctgattgggctgtccttatcattgactccagcgggggggggttttgaggctggtatctccaaggatggtcagacccgtgagcacgctctccttgctttcacccttggtggcaagcagatgatctgctgttgtaacaagatggatgccactacccccagtactccaagggcaggtacgatgaaatcataaggggggtgcttcctacttgaagaagggtgggtaccaccccgaaaaaatcccatttggg

SEQ ID NO: 120357 - DNA, 300 bp, Arabidopsis thaliana columbia
gtacgtaagcttggatcctctagagcggccgccctttttttttttttttatcaccaattcttatctttgtttgatggttagaatcatatatggttctggacaagaaggttatatatatacacacacaagcaaccatttgttgctttttggatacaaaacaaaaagcaattaaaggaccaattgattaagcctaaagggggtgaattgatcttctcatgctaaaaaaagcatacaaggggggggccaatggttccatccaaaaccgatttaagggcaaaatttttaaaccgggttttctat

SEQ ID NO: 120358 - DNA, 410 bp, Arabidopsis thaliana columbia
  unsure (1)..(410): unsure at all n locations
gtcgcacgcacgcgtacgtaagcttggatcctctagagcggccgcccttttttttttttttttttttttatttttnnnnnnnnnnnnnnnnnnnnnnnnnnnnnnnnnnnnnnnggggaaaaaaaaatcacccgcaggcttccctctttggcttgccactttttattccccgcggaggggggccaaattatcacccccaaaggagggggtacccccctgtttttcccctattcaaacctattatgcgctgacccccttttttcttccccaaggggggctcaaataaccccgccctagcccaggggggccccccatcctcttcccctggggccccgggtgtgcttttaaaagccccccccaanaaaaagcccgggggggccccccccctcccctgggccccaaaaaagaaa

SEQ ID NO: 120359 - DNA, 264 bp, Arabidopsis thaliana columbia
  unsure (1)..(264): unsure at all n locations
gcttggatcctctagggcgggccggcctttttgttttgggtttataactatattttttattataaaaaaagagggggaaaccctctttaattctgggatcgggattagnaaacaatcttttctaccccccagaaaagacccacctttagggcccaaaatctgatgagggttctctttgagaatttgctactctgggggggggactaaaccaaacccattttttccataaaaaaaggccaccttttaaggctttttttttttttt

SEQ ID NO: 120360 - DNA, 330 bp, Arabidopsis thaliana columbia
  unsure (1)..(330): unsure at all n locations
gacgtcncacgcacgcgtacgtaagcttggatcctctagagcggtcgcccttttttttttgtcttgaattcacttttttcaagtttggatacatgtaagagaataaataatttaaaccggaatctatttttgttggttcggtttgaattggttcatctaaattaaacacatggctttcaaaacataacccaaaacaggaaccacttacatttttgggggggggaacccttacaaaaatttggacgcatattattccaccctttaaaatctttcctcctcccagggggggtaatcctcttttccttgggcatgatttttatggcacttggg

SEQ ID NO: 120361 - DNA, 156 bp, Arabidopsis thaliana columbia
cctcgactttaatttaatttaaacatcaccgagttattttaagacacttttttttgacacaccctagttcagcttatatcgataccaaatttctatattagtaataaagaaaccttacaatcttaaacatacatttcttattccaaaaacctactt

SEQ ID NO: 120362 - DNA, 464 bp, Arabidopsis thaliana columbia
  unsure (1)..(464): unsure at all n locations
ctcactttagggaaagctactacgcctgcaggtaccggtccggaattcccgggtcgacccacgcgtccgcgcacgcgtacgaggacgcgtgggcttgcaaaaaatatanactttgggaagcttgtttttcgaacggttggcttttccggggcagatatccggaatcttgttaacgaagcggctataatgtcggtaaggaagggacgttcttacatatatcaagggggcattgttgatgtgttaaataaacaattgctcgagggtatgggtgtacttcttacagaggaagagcaacagaaatgtgaacaaagtgtatcttacgaaaaagaagagactttctggctgttcatggaggctgggtcatatgagggtgtggctcattttgtttccctcgatttgactgggcatgcattttcgcagctccttcctggtgggaagggaaactgctgtatcggttttctatc

SEQ ID NO: 120363 - DNA, 376 bp, Arabidopsis thaliana columbia
gacgtcgcacgcacgcgtacgtaagcttggatcctctagagcgtgcgcccttttttttttgttttgtttcttcttaataatctttttatgtgcgaaagtttcaatagtcttcataacagaccaaacataacatctaaaacattactgttacaaattctgaaataagctcctaaaaaatatttacaaaacccataattattatgaagttgttaatgggggaaaatcaataccggtgagattctcttgaaactaataaaaaaaaagattacgatattatctcatttctcggaaggggaagggtcactcaccgatcttggtaacaccggcggatctttatctttagaggaattgaaagatcttttgcaggggaaaatgg

SEQ ID NO: 120364 - DNA, 271 bp, Arabidopsis thaliana columbia
gacgtcgcatccacgcggacgtaagcttggatcctctagagcggccgccctttttttttttttttaaggcatgcatataaacattggtattatgtggtttccggtagaaaagtaacccagaatggttttaaaaaatagaaagaggttggctttgccttttgaaaaaaagcccgaaaaacgcccggttttgatcctataacctcactaatatcctccggtctttagggggggggggggtagctttcttggtccctggttcctcttctaaaaa

SEQ ID NO: 120365 - DNA, 418 bp, Arabidopsis thaliana columbia
  unsure (1)..(418): unsure at all n locations
gggaaagctgctacccctgcaggtaccggtccggaattcccgggtccacccacgcgtccagctacatgganagactctcgattcccgccgcttcttggttttccggcggaaccattcctccgacgaaggtgagagtttctccgccgcatcatctcccggggacctcccaacaggaattccccatcgcttgggccgccattaatgccctcttttccgtgctaganagggacctactgggagggaggatttttaacaaaatgttccatgaaagacacaaaaagaaaatggacattttcatatttaaaggtttctgaatcggcctctgggtaaaaggagaatcctccaaaactaattgatgtgaaatcccaaggggggcctttttttttcagctggtgaaacaaaaagataccccgggaaa

SEQ ID NO: 120366 - DNA, 385 bp, Arabidopsis thaliana columbia
caagattatgacgtcacacgcacgcgtacgtaagcttggatcctctagagcggccgcccttttttttttttttttgtttttttcctctttctatcaatttattttcatcgtttctggtgtaaaacgtaaacccagtttcagaacagtcctttgtgctccatcagctcataactccggcttcttctcctaattccctttttttgggggggtcctgattattagggggattcccgtaacagataaaataaaaacatgggctcgatcaatagacacgagctttgggagggaaagtgtcaatctcatcggtcaggtgtccatgtgaacaggcctataatccaatctcactttctcatcttccaatatcccaatgtatgcttcatccatt

SEQ ID NO: 120367 - DNA, 629 bp, Arabidopsis thaliana columbia
  unsure (1)..(629): unsure at all n locations
aaaaaaaaaaaaaaaaaaccggcgaagctaaattaggggaacccanccccccnacnncttttgnaggggnnaaaacgccaccccgccacgcgaagggngggggaccccncccaggagcttgttccgccccggcgggggaaaaagggcgcccccacaacaacaaaaaagcacacaaccacgggggaggcgcaccacaaagaaacagcgaaaaggcccggacccacaaaagaaggaacaaaaaagaacgcggaaaaaaacaaaaaacgcgagacacaccaccacgaaaaagacccaagaanaaaanangcaaagccaccaagaacaaacgggccggcaaccagcaaagaacagacggaccgcttcttcttaaccgggggggaggggggggaggagaccacaaaaaagacaagagaacgcaacaaacaaagaaaaaaaaagaaaagaaccccagaagaacgacaaaagccggcgcgaggaacacaggagagacaaagaaaaaaaaagatagaagaagggcgcgacacaaggaagccggacgagcccaacgcaacgaacgaaggccaggaaaaggacgcaaacaaaaagaaagaagcgcgcgaggacacccccccagcgcaccgcacacacga

SEQ ID NO: 120368 - DNA, 507 bp, Arabidopsis thaliana columbia
  unsure (1)..(507): unsure at all n locations
cccccccctttttgtggttttaggagctccntttttaatattaaaaaaaacccccccctcctaaaaccccgcgcggggcgggtaaaaaaccccacccaataaaacaccctctttaaaaattttttaaaaaggttccctctccctccacctcaaacccccccccccactaaaaggtctccacccctcttttccttaaaaaataaaaaacccctctcttttttttttaagggggcggggggggagggttttttttccttaaaccgcgcccgtttngggaaaaaaaccacaataaccccaccagttctttccccaaaaaagacaacaaaagggcgccccgccccccccggaaaaatttctcccaggcccgggttccccctctaaagggccccaccccccttttttctcctttaagggggggagcgccacatcttaaaaaggcttttgggccaaaatccccgcggccccacaggctcttcctcccttccggaacaaattttcctccccccc

SEQ ID NO: 120369 - DNA, 349 bp, Arabidopsis thaliana columbia
  unsure (1)..(349): unsure at all n locations
tttgacgtcacctgcacgcgtacgtaagcttggatcctctagagcggccgcccttttgggaggggttttttttttttttttttttttttttttttttttttttttttttcggaaatccttttttgtaaaaacaatcgtttttttattatgggacaaggtttggggcccaatttttacaagtttcgaaaatttttttgcaaacaaaaaacacctttgtgttgttttgntttttattgggaaaagggggaacccaattttttcttgggtttttttcccaataaaaaaatggttgttgttacagggtttaaaaacaaaaacgttacattttgaaacaaacggttttttttta

SEQ ID NO: 120370 - DNA, 445 bp, Arabidopsis thaliana columbia
atacgactcactttagggaaagctcgtacgcctgcaggtaccggtccggaattcccgggtcgacccacgcgtccgagtgaagacaatgatgggcttgatcgtttcaggctttcgcctgctgagttacgtaaagagttggagaagcgtaatgcggatgcggtgtttgctttccagctgaggaatcctgttcataatggtcatgctcttcttatgactgatactcgggggagacttcttgagatgggttacaaaaaccctattcttttgcttcatccgttaggtgggtttacaaaggctgatgatgttcctttagatgggaggatgaagcaacacgagaaggttctagaggatggtgttctcgatccggagactacaggggtttcgatattccccgcacctatgcattacgctgggccaaccgagtgcagtggcacgcaaaggctaa

SEQ ID NO: 120371 - DNA, 222 bp, Arabidopsis thaliana columbia
  unsure (1)..(222): unsure at all n locations
cccctttttttttttttttattttaattanattttattatattattattgaaatacttatttcatacaacataactttaaactgatggggaaaaaaattcaaatgacacaccaacttttttattagatagatttatcttccgttgtatacaatataaactcggggccttcnatctcgttctcctcataaaaaataattaattaattgactcctacctttccg

SEQ ID NO: 120372 - DNA, 394 bp, Arabidopsis thaliana columbia
  unsure (1)..(394): unsure at all n locations
ccggctactatacgactcacttagggaagctcgtcgcctgcaggtccggtccggattcccgggtgaccccgcgtccggagctcgagtaattattaactatctttttgaggagaacgagatcgaaggttacgagtttctattgttacaacggaagataaatctatctaataaaaaaggtggtgtgttcatttgtaatttttttcccccatcagtttaaaagggtggggggtgaaataagtgtttcaataataatataataaaatctaattaaaataaaaaaaaaaaaagggggcnggccggtctagaggatccaagcttacgtacgcgtgcatggcacttnataacctcttctataggggcaccctaaattcaaattcactggccggcggtttta

SEQ ID NO: 120373 - DNA, 450 bp, Arabidopsis thaliana columbia
  unsure (1)..(450): unsure at all n locations
atacgactcactttagggaaagctgctacgcctgcaggtaccggtccggaattcccgggtcgacccacgcgtccgcggacgcgtggggtcctccgaagcagaagactcaggccgaatctgacgccgctgctgctgctgttgttgctgccaccgtcgtctctacagatccgcctagatctcgtggccgtccaccgaagccgaaagatccatcggagcctccccaggagaaggggattaccggatctggaaggccacgaggacgaccaccgaagagaccgagaacagattcggagacggttgctgcgccggaaccggcanctcaggcgacaggtgagcgtaggggacgtgggagacctccgaaggtgaagccgacggtggttgctccggttgggggctgaattaatcggtcttatgcatttcgggatctttagttactgaaaaatggaatct

SEQ ID NO: 120374 - DNA, 373 bp, Arabidopsis thaliana columbia
aagattatgacgtcgcacgcacgcgtacgtaagcttggatcctctagagcgtccgcccttttttttttttctttctctaaaaataatccatgtgttgatagattctattacagaataggcctaagctgcttcacttgaagaaactaaaatgtgcttgtgaatggtgaaagaccacactgtagacactcattattaacaatctaattgggagaaagaagatgatgcgctagttgactactccttgatgccacgaatcttgttatgagtttcaaagaatctctcccactaaataaaatgtttataataaagaacttgcgcagccattgatcccgctcagctttcatctgcttcagctccttccggatcacatgcc

SEQ ID NO: 120375 - DNA, 344 bp, Arabidopsis thaliana columbia
  unsure (1)..(344): unsure at all n locations
gacgtcgcacgcacgcgtacgtaagcttggatcctctagagcggccgccctttgtttttttccttttttttttttttttttttttttttttttgtttttttttttttgtnnnnnnnnnngttttaaccaaaggaaaagtttgcccataaacaaaacctctttggcttttcccccagaggccccccttctttgggggggtttcatttcccaagacgggggctcttaaaaggtggaagggggaccaaaaaggggtgaggattttaaaccctggaccaccccctttctttttggccctctttagaaccccctgttcccccgggggggccgggggatccccagttttt

SEQ ID NO: 120376 - DNA, 414 bp, Arabidopsis thaliana columbia
atacgactcactttagggaaagctcgtacgcctgcaggtaccggtccggaattcccgggtcgacccacgcgtccgcgcactgcttcctccgagagccgtcgtctcctcctctcttgcgcctctgagaattccgatgatctcatcaatcatctcgtgtcgcatcttgattcctcctattcgatcgatgagcagaagcaagctgctatggagatcaggctcttatccagggggaacctgagaatcggatcaaaatcgccaagggcggtgcgataaagccggggatttctctgatctcttcttcggatcttcagcttcaggagtatgggggcactggaatcttgaatctatctctctgggacgagaacaaagagtcgattgcttctttcggggcaattaagccggttggcagggctt

SEQ ID NO: 120377 - DNA, 471 bp, Arabidopsis thaliana columbia
  unsure (1)..(471): unsure at all n locations
ccgcccccccccacccacccaaaaaaaaaaaaaaacaaaaancccggcagctcgttgnggcctcccccagactantgaggngaacccacgcgtacgtaagcttggatcctctagagcgttcgcccttttgggttaggccctcctctctaaaataacccccctttttgaaaaaaatgggggggtttcctctatacaaaaggggtaaaaaggggttcttaccatgttaaacccccagggggagaagaaaaagaaccgatctaccaaaccccaccctccccaaaaatttttttcagggggggggacaacctttggaacctttctccttaaaaccttcaccacaccccaacttgggccaatgaacaaccaagtcttttaaaaccccccctaaatctccaaccccttgtttcaagttcaaaacccataaccctctttttcaaacccctcccaatgaacgaaaaacaaaattttttt

SEQ ID NO: 120378 - DNA, 442 bp, Arabidopsis thaliana columbia
  unsure (1)..(442): unsure at all n locations
gcctgcgggaccgggccggatncccgggtttattatgggaggagaccgtgtctgtgctgacgtggatgcttcccattggtttagaaggtcaatccaaactcaccacgacngtcggcgtttaatcgtttaggggaactgtggacaaatggtgatcaaaacgctggggttttgataaaagagctctttgttttttaacgggggggggggttcacccgggtaacaaagatcaagggagtccaagaagcggtcatgaaatcgatgtaatcgggattctacatggggcaacctgggtaatataaatgccaccatatggcttcggcaaaaacaagaaacccggctccaaggcgttccttgaatggggatttgtgggaatattaacgaggggggaagcttgggggattcaaaaaaaagcgtttgggaggaaagggggaacggctttaaa

SEQ ID NO: 120379 - DNA, 454 bp, Arabidopsis thaliana columbia
  unsure (1)..(454): unsure at all n locations
agctacaatacgactcactttagggaaagctgctacgcctgcaggtaccggtccggaattcccgggtcgacccacgcgtccgctttgatcttgttgggaacaacactccggtgttcttcatccgtgatgggattcagttcccggatgttgtccacgcgttgaaacctaacccgaaaacaaacatccaagagtactggaggattctggactacatgtcccacttgcctgaaagtttggtgacatggtgctggatgtttgatgatgttggtattccacaagattacaggcacatggagggtttcggtgtccacacctacactcttattgccaaatctggaaaagttctctttgtgaagttccacttggaaaccaacttgntgggatcaagaatctgactgatgaaaaggccaaggttgttggaggagccaatcacagccacgccactaaggatctc

SEQ ID NO: 120380 - DNA, 607 bp, Arabidopsis thaliana columbia
  unsure (1)..(607): unsure at all n locations
cccccacgaaaagacacagaagacgaagaaaacagacagctttccaccccccaggggggggaaaggaccccacgcgaacaacacnaaaaaaaacnnaaannaacagaccccccacccggcgaaacaccccaacaagcaaacaccacaacagccaaaaaggacaagaaagagcgcaccagccaggacaccacacagccaaacaccacacccacacagaacgagcagagaccaccccaacccgcccacacaaacaccacgcccccttttttcacaaggagcagcagaggggcaaaaacaaacccagggccaaacacaggagacaaaaaaaaaacacgccgccccgcgaaaaacgtcaacagccgcgcccggcacagccagaggcgagaaggaacgagcggaacacaagccacacgaccacaacacacaaccagcacccanacacaacgccagccacacaaaccaacgaacaagaagacgacacccgacccgcacccacaaccgaacaacgacacacaagaccgaaagcacgaaccgaccaaaaggccacgacgcacacgacaaaacgcgaaagcaaagcagagagcgaagagagacaccacaggaaaag

SEQ ID NO: 120381 - DNA, 349 bp, Arabidopsis thaliana columbia
  unsure (1)..(349): unsure at all n locations
acggacggcgcgaccgcgcccccggcaacgccgcaccacgccgagggcaagcccagaaaaactcccctgggacacccgggcgcgccccataaagaggagaaaaaagacgcgcccccccggagccagcaacagcccgcgaccagccnttttcacaccgcggcggcgcaagagcccaacaaaaacaacaccggagcgcggcaccgccccccaccaccgccccgcgccgcaccgcccaccaccagccgggaccaccggcccagcgaacgccggccacgcacgggcccgcgcgccgcccggcccccgcacaccccccgaggaacaccagcccccacacgacccgcgagaggcg

SEQ ID NO: 120382 - DNA, 410 bp, Arabidopsis thaliana columbia
  unsure (1)..(410): unsure at all n locations
cgaatgnnnnnnnnnnnnnnnnnnnnnnnnnnnnnnnnnnnnnnnnnnnnnnnnnnnnnnnnnnnnnnnnnnnnnnnnnnnncttttttttttttttttttttaatccaaagccaaatatatacttcttcacaaagcacacacaattgtacatgaaacttggacttaatccccccacacacacacatttcacactatactttacatgacaaacaaatgcattaacaagtgagccacgagattcttctgtgccattctccaaaacaaaaacaatcaagaaagggcagagagaaccaagatcgctttcgngtgtgttagcttgtgtactggagcaagtatgtatcatcatctaatgattcaaatttacctggttcaacaatcttaaaaccgggcttctggtataattcctga

SEQ ID NO: 120383 - DNA, 190 bp, Arabidopsis thaliana columbia
atcactatttgggagctcgtccctcggtccgtccggattccggtcaccccgcgtccggtgatggacgacacttcaggctggttctaactccatgacagttctgttcttcggcaagactttaggtggttcgacggtgaccaatcaccgagcggaaagggatgaaaacagttcttctacatttggggggggg

SEQ ID NO: 120384 - DNA, 365 bp, Arabidopsis thaliana columbia
aatgccgatttagtttggactccatatttgtgttggtctcaattttttaaaagaactacccagtttccctacgcgtacgtttgtataccgcatccgctgtgccaccgttgccgcccaattttctccccgctcgacccaagcccgcgatctgtccttcctcattttgtcatttacctctgtgacggacgcgcgtcagaagcgtcctgagtaccatgaagttttagataaaacatttacatcagtatttcataacttatctattcgtcgatgatccagggacgcttttatcgctcgggcgcgtcctcgtatctcgtcgttgtagcttgatgtccagatgtattagtgtgtcccggacgtcagggcct

SEQ ID NO: 120385 - DNA, 484 bp, Arabidopsis thaliana columbia
cccccggaggggaagggagacgcgcgacgccgccacctctccccccccgcggggccaaaggcccccgcgaaaccacaaaacgcacgggcccgagaccggcgcgcgccgcgggccccccgaggcgcaaaaacccaggagccacgcgccacccggccgacagaccccgacccggagagcccggcgcgccgcaccccagcgcccccccgcgcacaagcaggggcgaacgggcgcgcacgcaccgccgacaccgcccggccgcgccccctccccaaggagggcgggggcccgacaccgcaggcgagagcgcgacgagggagaaagacaacacgcacgccgggacgcccagagccgcccaccaccgggcacgcgcaacgcaggaacaagcgcgacgccaacggcccccgcccgaaccgcgcgcaaggagaaggcggcggaagcaggagagacagggagcgccccgcagcagcagaccgcgccaggccgc

SEQ ID NO: 120386 - DNA, 552 bp, Arabidopsis thaliana columbia
  unsure (1)..(552): unsure at all n locations
ccccccccnnnttgnnggggggaaaaaccccncccccccngaaaaaaaangaaaagagaaagacgcaaattcccccccccagggggagaagggcccgnaanaaacaaaaaaanaanncanannaagcaccgngncacaccacaaccaaacgcacgagaccacacaaagaccccagaaaaaaaaacgacaaagcagacccgaacgcaaagcaagagcaaacagcgagcgcgacaaacgaaaaccccacaccaacgaaacaacgaacgcccgcacaaccccacacgccccctctcgtacggggacagacacgggccaccccccccccccgcccaccgaacaacaaacaaaaaaaaacacccacccccacacacccaaccagcacaagacccgaccaccaccccaaaaaaccaagagccaacagagcgaaacccaaaccaaaccgcaagcaccacgccagaagccacccacagccaacaacacgacacgacagaggcaccacagccccaaagaacacgacacgcccagagaagcacgcaccccacagccagcaac

SEQ ID NO: 120387 - DNA, 165 bp, Arabidopsis thaliana columbia
  unsure (1)..(165): unsure at all n locations
cgcgcagcgcccccccgaaaaaanaaaagaactgttgggtgcaccccccaaaattagggggagctaccacgcctgcagggcctgggacccaatacaggggtcgacccaggcgtgcgggcttattggctcaaaagaacgaggggctcaatcccggggagaggggag

SEQ ID NO: 120388 - DNA, 432 bp, Arabidopsis thaliana columbia
  unsure (1)..(432): unsure at all n locations
accgcaggccacaaaagcgccngcgccccgcccgcccccgaccaaggagaaatccgagggacacgagacggagccgacctctgggccgaacgccncccccggcggacacagagacccacaccccaacccccacaacactttacacccccaaggggggcccccgcccgcgccgcacaaagnaagaagccccgcgcngcagacgcgggnacgcggagaccacggcgagcacgcacccccccccacaaccgacacagaagcgacgcaccgcgagaccccanacacagagcgaccgcacagagcaccgacgtccgccacgccaccgcgaacgccgcgcggcagagagagcagcgagcagagaacgacgaccccacacaaggcggcacagcgacacaagagcagagaacaagagaacgaacgcccacacgggggggg

SEQ ID NO: 120389 - DNA, 481 bp, Arabidopsis thaliana columbia
  unsure (1)..(481): unsure at all n locations
cccccccccattaannagaggagacgcccccccccccggccccccccccaaattcccccgtccaccccggggggaggggcggggnaaaaaaaaattttttttggggcgggggccgcggggaacccaaacgcgccccctcaaacccaaagggggcggggcggcgcacgccccccaacgcgcccttttttccctcacaaaaccgggggaagcgggccgccctcctcttttcaggggcagtagggccccncccccggcgggtggcaaacccagccaacgcccccccctcctccccgcccacgtcccctccccttttacagagagccccgcgtgctctcgcccctgtagtttcgcccccggcgagagtagcacccgccggcggggcccgctgtccccccagcggccccccgacacgccgcgcccgcccgcggtcccgcccacccgaagccccagcgccccccgccggggccgggcgggcggggcg

SEQ ID NO: 120390 - DNA, 758 bp, Arabidopsis thaliana columbia
  unsure (1)..(758): unsure at all n locations
caccaacaaaaaaacacgcaagaaaaccccagggaaaaaaaaaacaaaacccacacccacgcacaaacctgnacaaaggnanaaccccccccccccccaaaatttttnnnnnggggnaaaaaaacccacccgncccgccccaaaaagcaaaccgnnaaaaacacaacaacaaacacacattttttcacacccacccagggggggggaaagaagaggcgcgccgcaataacaaacaaaaaaanaanatacaccacaccncacaatacgcgcacgagagcagcagacacggcccaacagacccggccgcagccaccccgcacacaacaaaacacaaaacagacacaagaaaaacacaccaaataaacacaccgcaacacaacgacaaaaagcggaccaacacaacacaccctcaaaaccacaacagccacgacaaaaaaaacaacacaacgcaaagccggccaacaacnaccaaaacaatcatttttcttcacagggaacagataaggggaaancccaaaccccagcagcggcggcccacccaaaaaaaaaaaaaaaaaaaacnccccccccaacaacaaaacacaccccacaggaacccaccccccccccgcagaaaaaaaacaaacacaccgacagacgcacacacagacagagaaccgaaacacgcaacgccgacagcaaaaaaaaaaagaacgacaacacgccacaaagcagaagcaaacaacaagacacacaaaaacacaagcacacgcaaagag

SEQ ID NO: 120391 - DNA, 570 bp, Arabidopsis thaliana columbia
cccccccccacgacacgcggaacgcacgccccacaccgcggcaggacccttttacaccccgatggcgggcggggcacgctcggagagcttcaaaaaaacacccgcccgcgacggttgcagagcgccggcgaacacgccgcgccgcgcgcgcgcccgcagccccacggccccaccgcgcgccctgcgcgaaccccgcccaccgcccagcgccctacaggggcccgccgctcgcagccgcgcccgaccaggcgggagccgcccgccagcgagcacccgcccgcgccacgccccaggacaccgcgccccgctgtttcgttcgggagggagcgcgcggcgcgcccgcgcccgcgccgcggtcccgccgagccgcggcggcagaaagaccgaaggacggggcccccggagccgccggggcaagggaggcgaggcgagcaccaacgagagccgcgagcacgccagccccagcccggaggagagcagcgaggcacccggggcgtcaacgccgcggggcgaacagagcgccccgcccacccagcgcacacccggccccgccccggcagagcccccccc

SEQ ID NO: 120392 - DNA, 326 bp, Arabidopsis thaliana columbia
  unsure (1)..(326): unsure at all n locations
ctcaactcccccttccttcccctcctccccccnnnnnnttccaaaaaanaaaaaaaaaaaacttttccggggcttacccaacccccctaaactataagggggaacacggtcccccctccaaaaaaacccggcccccaaatttccctttttccaccccccggcgtcacgcttgaattaaaactaaaaacttttgaaaaatcaaatgggcccaacttttcnccacaccatttcccaaccaaatttttaaattccccccccttcaacccccacccattaaagggaagcccttcaaaatttccttttttcccttaaaaaggggccccctt

SEQ ID NO: 120393 - DNA, 568 bp, Arabidopsis thaliana columbia
  unsure (1)..(568): unsure at all n locations
tgggcccgcggcacaagagaggggattattgggaacacccccggaaatttttggagctggcctgcgcgcgtacggaaggctttgggtcccttctaagagcggcgcccccccttgggggttgggggggggaaaaaaagaaaaaaagggcctttttttttgggggtntaacatgcgtttgagggcgcccctaaataaccaaattttccaccccgggagaccccttttaataaaggagggagggagaagagacccctgtgggaggggctaagggccttttgaaggcttaaaaaacagggagccccctttnttttttttattaaaaggggggggcggggtttacacaatttatttctttattttcaaaacacaagaagattattgcccctttttgctttttcttaaaaaaaatccttttattggccccaaaagaaaaaacttcatttgcttgggaacactcaatgcaaaacggggacttgctgggttccatccccaggcacgccccccatttgtgggcgggttttcaatgaggggaattaaaccttttccccccaaaaacccaaggggggcc

SEQ ID NO: 120394 - DNA, 638 bp, Arabidopsis thaliana columbia
  unsure (1)..(638): unsure at all n locations
cccccccccctatctgttaaggagagaaaacccgnananccccccgacaaactcctccattcccccttttttccccctcttcccccccccccccgcgggaacgccgggncaatatactaaaaaacttctttttccccctccctccccacctctccgaatctccctccccgtcgcaactccccccaccccccccttttcttctttttttcccccctcaaaaaaaaaaaaaacccttttcttttttcttttctaaaaacacaccttaatcccaccacaacccttttttttctttcccgggcccgcccgggccaaaacaaagtccccgccgtgccttttaaattcacctaaaaccccccccccggcttttttctatgatcccccccatctaccaccactgtttcaccacccaagaacgtgtccccccacaacccactgcttcccacctcccctctctctttttccctcgccctactttctacctcttctcacttctcccaccacctctctcgcactcctctcccgtgggcgatctacactcctcccactgcgtcaccccctctttttctagaaaaaaaatattttttctcttcttatccgccgccaaccaaataaaataatcaaccccccccacctttccc

SEQ ID NO: 120395 - DNA, 289 bp, Arabidopsis thaliana columbia
  unsure (1)..(289): unsure at all n locations
taaaaaatctactggcttaacctccttttcaaaaaccttcaatttaaatcagtccgtatctcatacaactcaaaaacaaaagggataataaaaaagccaccatttggggctatttagaggttgcaggcaaaaaaaagattttttcttaataaaaacctgggcgttttaaatattcatcccaccccagaacctgtatatgcctttaattaaatctaccggggaaatatnccatcctaaaaccccaaactcttgaatttttgaacctttataaagggtggtaaaaaaaaaa

SEQ ID NO: 120396 - DNA, 573 bp, Arabidopsis thaliana columbia
  unsure (1)..(573): unsure at all n locations
aaaggcacgagccccgccgcagcgcgccgaccccccaaagggacacaaaccccccccaatttattgggaacaccccccccaatttgaggggnnaaaccaccccccccggaagggaagggccccccaaagggttccccccccggggggaaggcccggaacaaaaaaaaaaaaccaccccccgcgccccgcccccaccccgccgccccccgcgccccccccccccccccaaacaaaaaaaaaaacccgctcctctcgcttctttctaacccccggacagaacccccccacccgccagggcgaaagagaccgcacacctcttttcccggggacgaagggggacccccgttgccccccccccccccaaacgcaagaaacccccccccccccgcgggtgggcgcgcgcggcgaacaaccaccacccgcccaccccccccccaagaccccggaagggacccccccccgcccccagcacccaacaccgccgcccgcccggaaaaggccccccccccaccccccccgcgcagacccggcgccgcgcccccccgcgcgccgggcgagcaagaccccccccgg

SEQ ID NO: 120397 - DNA, 461 bp, Arabidopsis thaliana columbia
  unsure (1)..(461): unsure at all n locations
aggtgcactataaaagagctagacgtcgcatgcacgcgtacgtaagcttggatcctctagaggccgcgcgcctngttttttttttttttcgttttanaaacacacnaccnnttnaaaaagcaaccccgggaaaccacgaggcaaacagaactcccaggtgcgccgggaccccatttgttcccggccaattactttaaggatctttccccccccctccggagcggggcgagtcaaaaaacattttttctcgggggggggggggttaaactttttggcgttccgcgccaaaaaaaaaaggcgttgtttttgtgggcaggaacgagactcttcctcccgcgcactgggcatttcgggccatcgcccgcgctccccctctctaagccccagcccgtcgatgacatgctcggggtgtcggtcgtgctcgggtcgttaggcgccttcggtgttccccggggggcgcc

SEQ ID NO: 120398 - DNA, 684 bp, Arabidopsis thaliana columbia
  unsure (1)..(684): unsure at all n locations
cccccccggcccactgcagagcagagcgccagacgcagacgccacacggagacacgcagagcgcgccccgcgaggccgcccgacaaccttttccgacgccccgggggggcgcacccggcccaccccacaaacacaaaacgcgcggcccgacgcgcagacaccgacgacgacggacacacagacgagccccgacggccacggccgcgcaaccgccgcacgcccaccccccccacccacgggcacacgcgcgcgacaggacccgcacccaccgcccgcggcgcgcagagagagaagagccgcgccagcgcacacgcgacgccgcgcgcccccccccgccccgcggttttttgcagagacgaggggggagacggcaccgccggaagacacagacgcggccgcacccgcacccacaacacacccncacgcaccacccccacacgcccccgccgaatagccgccggcgaccggcgagcccgacacagaaccgcaccccccacgcccaccgcggcgcgccggcacgacaccccggccccgcgcgccgcacgcgaagcgcccgcgccacccacagggcgccggacagacacggcacgccgaagccaacccagccaccacccccgccccaccgcccgacaccagacccaccaacaaagcagccaccccagaccgccacgcccagcgcgcccc

SEQ ID NO: 120399 - DNA, 156 bp, Arabidopsis thaliana columbia
aacaaacctaacgagcaaaaatcaaatcttctctctgttaaaatctcccgactaagaaagcgttgttttccatttatttacggggggggtaacaatacttttgggactaaattggggggggcggaatcatggccggcccaaaaagtttagggggaa

SEQ ID NO: 120400 - DNA, 401 bp, Arabidopsis thaliana columbia
cgcccccccccgctttcccgcccccaaacgcatcaacaactcaccccgtgccccacacgagggacccccatttccaaaacgccacgggggggagcaccgcaccaaaaaaaaaagacaacctggcccgcaccggacctacaccgcggtagacgccgcgctacggccccccccagacggctgggcgcgactcccccgggcacagagcccaggttggttgtccgcagacgagttgtaccgaaacccacccaaacccgagcgccgcccgccgcccaccctccccacgacccttgtttttcacgccggggggggagagccaagccccccgcccgacacccggccgaccccccagaacaaaaaccacccgccagcctcactcgccccgcgcacacgcccccgaccgg

SEQ ID NO: 120401 - DNA, 476 bp, Arabidopsis thaliana columbia
cccccccaagaccccgccccaaatccccgtttccccccggggccgggttttaaaacaaaaagggagggggggcccaaaaaaaaaaaagcccccttactttacaaaaagggcaccccccttggccatttttccccccccaaagggcccccaggtctcttttttaaagaaacaaaaacccccccccttttccttggaaaaaatattttgaagaaagacccgccctcttttcccttgtggggcgaaaacaccggacgcaaccccccttattgggttttccccagcctgcgttcttcaaaaaaaaacttcacagggctctctaaaaaatgggagggaaagggcttgaaaaaaaaaacaaacaaccccccaaaatcccccccccctttaaccaaacgaggagaaaaattcagagcccctttttcaccccccccttcaggtgaaccaaaccctcgccccctctaatcaaacccccggggggg

SEQ ID NO: 120402 - DNA, 545 bp, Arabidopsis thaliana columbia
cccccgccccttcagacagaggccagcggagcgagagcacaccaagacacccagagcaacacagaactttaacaccgggggggggcaaccgcacacaaaaacaacaccccccacgccacgcggcgcgcgagccaccacagcaaccagcggcggccgcgagcccgccgccacacgccggcgaaagagacagccagaccgcaagccccccgcaccccccacgcccatacacaacgacgagcccagccgagcgcaagccgcgcgaccgcgcaccttttttgcaccgggcgggcgagagcagaggccgcagcgcgcgccaggcacagaaacccaccacccgcacgccagatacccacgagcaggccaacggggccagagagcgccgcaccgccgcccaggcacgaccacgcaagacaacgaggcgcacggacgcacggcaacgacccccgcacggagacagccccccgaccgcccctgggcgcgcggccgaccaagaagcgacggaagcgcgatacaagaccaccgcccgccgcccgacgcgcccgcag

SEQ ID NO: 120403 - DNA, 515 bp, Arabidopsis thaliana columbia
aacagccccccccccccttttcccccaccacaccacaccgcccccccagcagagacaaaccgacgcaacccggagccaactttcaccaacgaagcgggggcgaggccacgccgcaaaaaaaacaaacaagtacccgcgaccgacgcgagcacaaaggagaccgcggaggcaccgccacccccagcacccaccccccagcacaccacccaacagccgccgcacccaccccaccgccaccaccaaagagaccgagcacacacgcaagccaaccacccaccacaccacgaccccctctttcaaaacgaaggggcggccgcgcacccccacaccgcgcccccccgccgaaacacccagacccgggccgcccaaaacccaaccccccgccccaccggccaaagaaaacgagcacccaccacagaacacaaacagcccccccccggcggcaacccccgcccacgagcgcagacgccaggaacgcacagcgggcgcacaggcccgaccaacagcgcaccccg

SEQ ID NO: 120404 - DNA, 284 bp, Arabidopsis thaliana columbia
actggtccttaacggcgctttggttggttttttaatatttaaaaaagtttttcaaagaaccaaagataattggcttaactacaatgaaaacataaaatttacttaaacgggcagtcacaataaaattaagacatcgcccgtgatttttattttttcggggtgcgcgggttacaaagggggggggatccatttaagagaagaaccttgaaagattggccgttgataatggagggttctgagccctccaatgggggcaagggtcggcaaaaaactcctactttgat

SEQ ID NO: 120405 - DNA, 359 bp, Arabidopsis thaliana columbia
cccctctttatcttttatcctcctaaaatcttctaatgtggtctaatctctttctcaaaaaccaaacacttatctctcgattatatcacaagggagatatgttttatcaggggggggggacccagtggagggggcccggccgccaaaacaagaagaacggtccaccgattgggttccccgaccacattctttccagaaacggctaaggggggggtccctctgctttttcaccaatggtcccccccctggggttggggccggtgtttcttagggttgcccctacccctttggcccatcttcgggtggggggcccttggagggaccattttgggggatggcatgggtcattaacggtgtcc

SEQ ID NO: 120406 - DNA, 366 bp, Arabidopsis thaliana columbia
  unsure (1)..(366): unsure at all n locations
tcccactcatttagggaaagctcgtacccctgcaggtaccggtccggattcccgggtcaacccacgcggtccggggacgcgtggacanaacgcgtgggggcttttcccggaaaattatttgctgagttttcttccttccatcgccactttcctggaaaaaaaaactaaatttcctctctttctttaagctaaaggagctttctgtgatcaattttttctatatttctgtgatgggcgttcttatttcacgcgctttgggattaattattttaacccactatggcttaggatctggatattatcactttatgaattctcctttttttggataaggttgttaagttcttaaatgagggaatttttagg

SEQ ID NO: 120407 - DNA, 416 bp, Arabidopsis thaliana columbia
ctatacaagagtcttgacgtcgcatgcacgcgtacgtaagcttggatcctctagagcggccgccctttttttttttttttgccagcgaaaaaacaaacaaatctataatcccctaagctccgatgatttctggtggctcctcaaccattgtctcatcaggtggcctgtctaccttcacaccaacatcctctggtgtgtaatctccatgcacctccatgagctttccaaggggaaacttgggagcctttaggatcttcactttacggatgaacacattctgcaacgggtagatgccctgtgttgccttctcaatctctcttccaggggcctctgggatgaacttggccactagctccttgaggtcacaagatgaagcctccttcaccataatctcactcatctttctgcggatctga

SEQ ID NO: 120408 - DNA, 278 bp, Arabidopsis thaliana columbia
gggccccccccgggggttagggggggtttttttttttttttttaggggtattaaaaacccctatttcattaaaggggagaaaaacacccaattccaactttgttttttgaagagggagaacaaactttcaaactttcacaaagggtgatttatttcaataaggaaactttaattaaggttttttttaaaaagggaaaggaacatttaaccccggggttgctgggagaatttgttttttttggggaaaaaaaaatttaaagttagatttcccctcgggg

SEQ ID NO: 120409 - DNA, 673 bp, Arabidopsis thaliana columbia
tctatttttctattctttacacccctatatcccctcctcaccccctcccttatcactcctaaccccacccccaccccccacccctttttccttcatcaatcttagacccccaaattctttttctcttcttttcttctctctatttcttttcttattcctttctctctctttccttgtggtcgtctctagtctctttccctcccaaaattaactactctccttcctttttcattcatcttcctactctttccctcttctcattctttcctccccttcctctcttcttatcatcttctcctcttctctactaatcctcctctctcactcatcctactcttccactatttcacatatatgcctcgcatcttatcttctcttatatctctctacaccctcccctaccaaccccacttccttctttctctttctcccccgcggggtggtcttcacatcccccctccacctctctattcctcttcttataaaacaaaataattccacattctccccttcttcatctcttctttctttcttccattcctctttcaacttcttactatctattttatataccctattattcattcttcttcttcccttgacctccaaccaatcgttcttattatattattctctcctctttcttctaattacactgctccatccttattcc

SEQ ID NO: 120410 - DNA, 647 bp, Arabidopsis thaliana columbia
  unsure (1)..(647): unsure at all n locations
tcccccacactcccctttttttgccccacccaccggccggttccaaacaaaaaaaaaaaaannttcctccgggntactaaccccctccatttagagggaagaactcctgccccccttcagggtgcccccgtcccccaaatttcccccgttttccacccccccgcgggtgaagggagagattttttttaaaaaagaattttcctcttttttaaagagggggaaaagggggcccccttttaaaattttccccaatttttctttcccagggttttccaagggaaaaaaattctttaattaaaattttttccaaacccttttccccccccatttttttttcngggggaaaaaattttaaaagcgtcgttggggtttaaaaggccaccactcttttttccccccttattcattaaaacccccttgcggccgggggagaattaaaaaaaaacccccaaattttaaaatttaaaaaaaaaactttttataaaaaatttcccccaaaaaaactttgcctgggagtttttcccaattttttttaaccttttacgtgtcccttacgctctccccccaaagagggaaaatttttttttacccaaaccttttttttattttttttaaaaaaaccttctttccaacaatgtttttttttt

SEQ ID NO: 120411 - DNA, 262 bp, Arabidopsis thaliana columbia
gttttaaaaaaaaattttttttcaaactatttgccttttataatttcccaccacttttaaacaagggtttaaatatttaaaacttttacccaaaaggggttccccccaaaatttttgttacccccaaatttcctacccctttttttaaaaattcctttatacccggggggggggaaaaaacaacttctggttgtttttaataaaaattcccccccgaaaataaccagacccaagttaggggaaaagactttccccatttttt

SEQ ID NO: 120412 - DNA, 474 bp, Arabidopsis thaliana columbia
ccaaaaacaaaacaaaaccccccccgcccccgcgcccgcttgaagcgccgcggagtcgcacacctcctgccccgccaccctctcggatccttccaacagcccctccatctactcgtcccaattatattgcaacacaacgttacacaggcaccgacgtttcctccttttgggttgttggtcaccccaccccacctcttggcgccctcaaaaaaaaaaagcgccgctggtgggtattccaccctacctctttctcgccctcataaggagtccgcttcatatcgcgtcctctcccgttccacgataactccaccaccactcacgcccctctgccccatcacacatcccgcttcctaccgtagtcatcgcgcccttcaactcgaatacttcccccgtgcgcccctctccatattgtcacactcccagtacgttcccacagtcaccaccaagttcttaacccccatccaacatcccaca

SEQ ID NO: 120413 - DNA, 353 bp, Arabidopsis thaliana columbia
ttttggtttttttttttaacctaaacagggttttgttattcaatttaaaggaattaggggggggaaaccctaattccatcaaactggaaataaggaaaccaaccttttctaaaaatcttattttcccaagggggttgggtttaaaacctcctaaaatattcgagggcagacgtgaaaaaggaccatccttttaaataaaaaaaaaaaaaggcttctgggggctttctttttaaagtgggagaatggggaaaaatcattttcaagggggtgcctgggtaaaaaaaaaaaaaaccttttgggtcctccaaaaacttttttaagttttttttctcaaagagaactaaaaaaagagg

SEQ ID NO: 120414 - DNA, 676 bp, Arabidopsis thaliana columbia
  unsure (1)..(676): unsure at all n locations
ccccccccccccaccttccctccgtccaccgcaccnnnnnnnaaaaaaaaacaaaaaaanaaaaaaaaaacctccnttgggcnaaccgaccccccccccacctaanagggaaaaagcaaccgccccccccctcccaagaccccgcgccccccaagattccccctttctccccccccggggcggcagggggtgaaaaaaaaaataaaaannccccctgtttncaaaccccttttcaaaaaaactcccacaaccccccctctgagggaagaggtttttccctccctccccaaagaaacactcttcaaattccccaacggagagagggtccttctttctctttgttcacccaccccccccacggcaaccccccccttttttttttgggcttgtctggcgccttcccaaaattgaaggcggggtttaaactcacttaactctaccccctgtttcttccccctccccaaaacaaaaacctcttctttaaaaaaaaagtatttccatccctcttattaaccccctttttcccctatttctctccaaaccttctttttctaaaacccgcttccttcttctttttaacttcatccgcaaacaccctccccccttttcccccttttttcacaagagggggggtaaaccccccccccccccttttttcctcccccccacaattcac

SEQ ID NO: 120415 - DNA, 494 bp, Arabidopsis thaliana columbia
  unsure (1)..(494): unsure at all n locations
accccccccccccgaccacacacacaggcgacgccccccgcaagaggcatttccccccaccggggggagaagaggcgccgccccaaaacaaaaacaaacaccaccgcccgccgcggcggcaagaaagacgncaaccgagaagcacccacccagagacaccggagcccgagcgcacaacaagacgggcgcacgaccgccgagcaagcgccgcagcgccacgccaccccgcacccaggacgcagaggcacccgcaccagaggacacgggcgcagcgcgacgggcgagcaaacgacgcgactctctttttccaccgcgggccagcagggaccccacacacgaacgcccacccgcgccgcgcgcctccgaagaagaaaaacacgatcgcccagccgcgccgcgccgcacgcgcggccgagcacccgccgcacacccggcgacccgcagcgccagcgcgcggcagcgcccgcgcgcggacggcccagcgacgcgccgca

SEQ ID NO: 120416 - DNA, 278 bp, Arabidopsis thaliana columbia
aaaaacataaaaggtttataagttttgttattcactgttattcaacctgaaacagcttttaatctagatgctgaagttgcatatattacagataaacaaacacataggtattacaacgttaccacttacaatggggccttcatggatacgtaaaggctttcttatcattcgcttgtacctcccttgagatttagcctggagaccatattccggacgcgtgggtcgacccggaaattccggaccggtacctgcaggcgtaccagctttccctataggga

SEQ ID NO: 120417 - DNA, 547 bp, Arabidopsis thaliana columbia
  unsure (1)..(547): unsure at all n locations
ccccccccggggggcgcggggccccggaattacccnggttttcacccccccgggggcccgggcccccccaaacacaaaaaacaattttttcaaaaaatttcccaattttcccattttttccggggcgcaaagaggggggatttttttatttggaattttttgggaggggggaaaatttcaatcttctcctaaaaacatataaagaaaacactcttaaattcctacaaaagttttttcttcccgggtgtatgggggaataaaacaaaaattaataaaccacgcgattcgctccgtgtttcttctctggaggggagggggggcggggcgaaaccaagaaaaattttccccctttcaaaaattttttccctatttgtgggggccccgccaaggtcccaaaacactttttaactctttctttcccctctccctttgttgggttcccttgaaaacctcccacaaagtggggaacggcctgaacaccgcacacatttttccctcttcccgcggtctttttaatggggtaaaaaaccccccaagacaccccccg

SEQ ID NO: 120418 - DNA, 402 bp, Arabidopsis thaliana columbia
  unsure (1)..(402): unsure at all n locations
caagattatgacgtcgaacgcacgcgtacgtaagcttggatcctctagagcgggcgccctttggttttgggttttttttttaaatttttttttttttttngggagggaaaaaaaataacaaataagttggaactaagcatagaacaaaataagcttacactagatttaatttgggaacagtaccaaattagcaattaagggggttttcttttctgaggacttgggggtacagaaccttctctatggaatcacaggaacaaaaataaacctcctgcaatctcataatcccaatttcctacacagaacagtcccaccgggaatcaatgggacaagagtggaagatgagaagacattttttgtttgttggcccttcaactaaaatctggatagggggctgttttg

SEQ ID NO: 120419 - DNA, 358 bp, Arabidopsis thaliana columbia
gagcgcgggcggacccgagacaccgccgcgccacgcacgacgcaggcgcaccgggccccgccactccttctgcgaaccgcccccccccagattcgggggagagaagccacggcagccacgaacagccccgcggagcacgcccgaagtttcccgcccacgggggcccacacccgcggcgaaaaaaacgcggcggggcgcccggcgccaccagccccacacacgccacgcccccacggcgcgcccagccgcaggcccccgcacgagaacacgggaagggagcaggccgccaccccgccccgcgccgccgacgccggacagccgagcccgacaaccgcggtcgaagcaacgcacccaggca

SEQ ID NO: 120420 - DNA, 322 bp, Arabidopsis thaliana columbia
  unsure (1)..(322): unsure at all n locations
gggggggcggcgccacattcttttctacccccgggagctgaaaggggcggggcaacacaaaaaaaaaanccccccccccggccggcggccgtcgttatcccgcccaggcacactacccctccgcactcccacaattccctaccatctagtacaagtaagtacgccgcgtccggcgagagcgacacagatgagtgagagcaccaccccgcacgtgtccgggcaacacagagaacaagcagtttccccttccctttttgggggtgtgggggaaacacccacccaacaccccggccgcgctcgctctaaacaaaaaaaaactcgt

SEQ ID NO: 120421 - DNA, 522 bp, Arabidopsis thaliana columbia
  unsure (1)..(522): unsure at all n locations
aaaaaggggggggagaagaagcagccgagcccaccatttctccacccccccggcgcgggagagggcccccccccccaaaaacaaaaaaaacnaccccgccccccgacccgcgacgccccccacacacacgccacaacccggcgcccgcacgcaccaacccagccccgccacccgcccccgcgccaaaacgcggacancacacagccaccgcaacgcgcgcaccccgagaccgcgccgaccccggcagcgcgacacagccagagcccaaggagaaagacgttttttctcaaccggcggaagctgcgggaagacccgagcgaaccacgccgcgccagcccgacaaaaaaaaaaaacagcggcggcagacgacaccagcaaacgagggcgacgccacgccgccccccagccaacccgcccccgcagccccagccccccacgcagccggcgccaacccgggacaacgagcaggccaccgacgagagccgcgcacccaaagcaacgcgcccacggggaccacagccg

SEQ ID NO: 120422 - DNA, 485 bp, Arabidopsis thaliana columbia
ccccccccccttcccacgacgcgcacgcgccacgacgcacggacacggcgcggcggggcgacggccgttttaacagcggggggcgcgggccgggcaacaaaacacgcggcgcacggccgcgacccccgccgccccacgcagcccaagacgcgacgcgccgcgccgggcggacaccagcggccgggcgcgaggacccacacagaacgccgccaggaagggaagcccccccgaccgccaacccgccgcccaccagcttttttccgagcggggggggagccagaccacccagccggcgcgcccccccggcaaaaatggccccggcgagagcccgccgccgccgacgacgcgcgcccaccgcgcgcgggacggaggcgcgacgcaaggcgcggcgaggaggccgggcacgcgcgagagggaccgcgcgccgacacacggagcagcgcccggccagcgacggaggccacaccaccggacgcgcgcgcgcg

SEQ ID NO: 120423 - DNA, 354 bp, Arabidopsis thaliana columbia
  unsure (1)..(354): unsure at all n locations
ccccgaaaagagaacgagagaaccccccccagcaagatttcgccccaccccggggggcaaggcccccaacaaaaaaaaaaaaagcaccccaccaacgcgccgagggaacgcagccaaacccgacccacccccccaaccacccccccccccgcccccgccacccccacagaagaagagcgcacaccgcagcacacagcgcacnacgagagaggaagccgccagagggacagagagaagcgagaggaagaacccttcttttctccccacgggcagacggggacaacaaccnagagcgacacgcccgcagccccgcaaaaaaaaaaaaacccccccaggcccgcgagacgccaccga

SEQ ID NO: 120424 - DNA, 441 bp, Arabidopsis thaliana columbia
  unsure (1)..(441): unsure at all n locations
tttttttttnttttgttgtgttttaatgggggggaaaaacacaatgggaaaacaaggctgttaaaaaggccttgggccacgggaaaacaaccaaagggggcgaaaccttaaggagggctatgttccccttctttggagccggaggggaaaaccncccaaacccggggcgcgggtgccgcccccccaaagggtggcaaaaaatacggcaaaaaggggggtataaaaggggcgcccccagaggggggaaattccttaaacaaaaaaaaccctttttttttgtgcggcggagaaaaaaacaacacaccgtgcggggttncccactcacacgacaggggtgtttataaaggcgcccccggcgaccagcccaaaaggaaacagcgggcgttaaccgggggcgccggggggggcaacaccgcgccaaaagagaccttttctcccagg

SEQ ID NO: 120425 - DNA, 365 bp, Arabidopsis thaliana columbia
  unsure (1)..(365): unsure at all n locations
accgagacgaacaccggcgacggcgagcgccagcgccacggcagcgaggcgacgccagccgcgaccgcggcacacggagccggccgccaggaaggacgagcacggacggcagaggagcggcgcgcgagaagagagacaagcgccacacaagagacacgaggagccgcgcgcgcggcacagacgcgaccagcaagccggcgcacgcagcgccccgccgaggcaaacgaggagcccaggagccgccgacgagagaaggaggaccgccgcaacaaagcaggcgcagaacacaaagacgcgcgcagcccgaggacacagcagaaacgagagagagnacacagcgagccaagagagaagcgaagcgcaaa

SEQ ID NO: 120426 - DNA, 612 bp, Arabidopsis thaliana columbia
  unsure (1)..(612): unsure at all n locations
atacgacttactatagggaacgctggtacgcctgcaggtaccggtccggaattcccgggtcgacccacgcgtccgggattatggactacaaacacaacatccgtaatatgtctgttattgctcatgtcgaccacgggaaatccactcttactgattctttggttgctgctgctggtatcattgcccaagaggttgctggtgatgttcgtatgactgataccagagctgatgaggctgaacgtggtatcactatcaagtccactggtatttctctctactacgagatgactgatgaatccttgaagagtttcactggagccagagacggaaacgagtacctcatcaatcttattgattcacctgggcacgttgacttttcttctgaggttactgctgctcttcgtattactgatggggctcttgtgggggtcgactgcattgagggtgtgtgtgtcagactgagactgttctacctcaggctcttggtgaggagattcnacctgtcttgactgtcaacaaaatggacaggtgttttccttgagcttaagggtggtgggggagggggcgttcccagacttttttcgaggggtttggagaacgcctatgtcatca

SEQ ID NO: 120427 - DNA, 311 bp, Arabidopsis thaliana columbia
acttagggaacgctggtacgcctgcaggtaccggtccggattcccgggtggacccagcgtccggacaacgcgaattaaaggaaactgttttatttatccgcgctttactaataccgcaaaagctgaaagctttctatgtcaaactactaagacctttagaggacacattcttgactacactttgaagtcgaaatactgttatataaggaggggggtccttttggccaacagaaattatgtacataatctaacccgccgaaatgtcgtcgaaagaataattgctccgaactgaagaaataatcaagaccacc

SEQ ID NO: 120428 - DNA, 307 bp, Arabidopsis thaliana columbia
  unsure (1)..(307): unsure at all n locations
nnnnnnnnnnnnnnnnnnnnnnnnnnnnnnnnnnnnnnnnnnnnnnnnnnnnnnnnnnnnnnnnnnnccacgcgtccgggcactgacgcatgtgatgatggactaaccaaagcgcgtctattgttcggtataaaaccatatcacaaaccccctctttgtgcctcaagctcatggtgcttaaagcatataagttattccgggcgagaccggtctataacggagtccacgctatagcaacactcgcggcatagcgacaggactattctctgtgtatacgggaaaactctaaacttcgatctcaataggc

SEQ ID NO: 120429 - DNA, 813 bp, Arabidopsis thaliana columbia
agggaacgctggtacgcctgcaggtaccggtccggaattcccgggtcgacccacgcccgtccggcttgtatgatgatgaaatcgggacatctgtctaataaaaactcggtgagatctggttatagtcttatttaatcacgtgtcacctgtgaacgactaaacagcaaatattaaactgtctgacactcttgctttatggagaatggagaggaatatttattattgcagatgttattcgagggtacacagaacaagctactgttgatgaatgtccatgcggacctgtaaagtaactattcctcgggcacttttgaatgtgattgccaattgaaggacagtaccccccaaacgcgtgggtgctgaggacaagaaacctaagtctaatgctgagagggcttattttgtttacaaccatgaagagaaaggcatttaaaacgaacgtccttgcttcttccggtgtacaaaagattaccttattgaacagcttggagactttcttagatacgcaatctgaccctcttggggaaaaaggcaaaaattgatgatttttaggattgtgtaacgccttgaagcccttttaaggtacaccaggaattgtcaataagcggctggggtggggcgttttaaatgtccccatttgttccaaactcagccgaattgtggagctttaatttgttaattaacagggaggtttttcttttaaaaaaaaataaaaggggcgccctctaggggtaccggctcctgtccagggatctaagggttatattttaaagagggcgaaaatttactcagggcggagttcaaaaattggta

SEQ ID NO: 120430 - DNA, 503 bp, Arabidopsis thaliana columbia
tgggaactaaccgatgtttttttgtaccatttgggggattaatccctatagttatggttattatttgagttggatggactagatcagcgtggttcctcttgcactattcgcgccaatggacatagatacttcatacttaagatatttaacatatgctggataccagagaagcagacgaccgaggcagagaaggacaccgacgcgcgtttttttttaacacgattttgacgaggctcaatctcgactaacatgtgcaaactttttatataaggaccaacgttcgatttcgtcatatgtggaacccccgctcgtcactgaccacacgctagtacgtgagcaccatcaccccctctcttctgtatcctttactagttagcccacgttcttaatgatcattcgtcactcaccgccctctaccaagacggggcgcatctcgcttagacttatgtcacacggagactctgaaaggccggaacagcgatcggcatgttcataaatttgcg

SEQ ID NO: 120431 - DNA, 869 bp, Arabidopsis thaliana columbia
  unsure (1)..(869): unsure at all n locations
ccgacttatatggggaacgctggtacgcctgcaggtaccggtccggaattcccgggtcgacccacgcgtccgcggacgcgtgggccaaattctcttctctctatctctctcgcgtacgccgcaccgtagcgaccaattgaatccacgaggaaatctcagtaaatactatggcgaccaacgaacccgagcacgagctcttagacgaggaggaggccggagctaacgaggatgaggacaccggagctcaagtcgcttcgatcgttaggcttgaggaggttgccgtcactaccggcgaggaaaacgaaaatgccctccttgatctgaaatcgaagctttatcgattcgataagggtgcaaatcaatgggaaggagagagggagctggtacttgggaatttctaaaagcataaaaaccacgggaaggattcggtctcgttatgaggcattctaaaactttgaagatctgggctaatcactttcgttaaatcgggcatgaggtgtcaagaacacgttggaaatagaaaggcatgggggggggacccctcgggactttggtgatgggaacctcaggagagagctttttgggtccgatgtggcttttttgagaattgcaaaaatttatgcaaaagttcagagaagttgttgggtctgaaaaaaaaaagaaaagagcaagatgcccgtaacctggtggccttttggaaaatggctggggagagacaaaacggggagaaaaccaaccgaagcggggggaccggaaaaccnaggggaaagcgaaaataaaagaagcgggcggaaatttggggagcaaaaaacaaaaaaggggccccccaaaaaaggggatattaattgccaacccgggggaaaaaccca

SEQ ID NO: 120432 - DNA, 405 bp, Arabidopsis thaliana columbia
tatggggacagctggtacgcctgcaggtaccggtccggttttcccgggtcgacccacgcgtccgggtggtgattggcctctactgagagtgatgaaaggaatatttgaaggaggacttgagagtgccaacagaggggctgttgatgaagaagaaaaaaatgttgaaggccactggggggagggacttttcaattcgggggggggggaagggggaacacagacactcgaacctttttggttggtgcccaacccggggaacaaaaataccacaaggaaggggggatggggacttgacttggactctccccaaaggttgcccctctaaagcctttgctaacccacgttaatttatttttggaccctcctcaaggtattcccgtaagtcaaatatggaggtaaaatttt

SEQ ID NO: 120433 - DNA, 558 bp, Arabidopsis thaliana columbia
  unsure (1)..(558): unsure at all n locations
ctaatcgacttacttagggaacgctggtacgcctgcaggtaccggtccggaattcccgggtcgacccacgcgtccggttttctttggaaccctaatcaacttgtgttttatgttgacgatacaccgatcagggtgtacagcaagaatccagatgtttactacccatcggtgcagacaatgttcctaatgggaagtgtgcataacggatcgataattgacccgaagcagatgccttacattgctaagttccaggcatcaaagattgaagggtgtcagactgagttcatgggaatagataaatgcactgatcctaaggtctgggggaatcgcaaacagctaagctctaaagagaagacactgtacctaaacgcaaggaagacggacctggattattactatttgtctgacagacagcgataatccaagggtgcctcaagattgtngaaagttacacttaaaaaaagatcaatacctgtcacaggggttaagcctacaaaacaattatcttggaaaaataacctattgttactggaagaatgctttatgataagccttttt

SEQ ID NO: 120434 - DNA, 633 bp, Arabidopsis thaliana columbia
gggaacagctggtcgcctgcaggtaccggtccggatttcccgggtcgacccacgcgtccgaaaatatatttctctctcactttccttggttttctcgggggcttcttcttctcctatttctccctcaaatcgttttctccagttttcttgggataaatcttcctcctttctgcagacgccatgttttacaaaggtcgtgccttgccaaaatttggtgaatgggatgtgaatgatcccacctcagcagaaggttttacagtggtattcaacaaagctaggggatgagaaaaaaaccgggggcaaaccgggatcaccccggtaaatccaggggaggtcatgttaaattctgaggaggagatccttagtaaccccaccctaaaaaaagggttctggtggatgcaagctccagcttggggctctttgacaaacacaaagatggattttgcctgctgctaaaaaaaaagccccagtgcctacccctcttaaaagcaatgggttctttttttggtttaattggccggcttttttgaattcaccccccacccccaaaaaaaaaagggttcctaagaagatttgggacctcacccccccttttgttcaccgattatgatcccttcttataaaaaaaaaaaa

SEQ ID NO: 120435 - DNA, 769 bp, Arabidopsis thaliana columbia
gggaacgctggtacgcctgcaggtaccggtccggaattcccgggtcgacccacgcgtccgcggacgcgtgggcggacgcgtgggcaaataccaaaaacaagtcataagaatcaaatgggggttctctttcaatccttcaactctaaagatgattcggacaagtttttggatattagaagttttggcatttaatagtctttggatgatggaagctcgggatctatctaacaaaggaaagacaatttttgatttttggcggtgaattgtcgaaacatacccgagttttgacaaaatttggagcagttggtgatggaaagacctcaacacaaaagcgttcaaagaaaccttacccagcttgttcaaaggcaggcggcgggggggggcatcttattgttccaccagaaaaatggttaaccggagtttaacccccccaccctttttactttgttttccaaagaggggcaacttttctttgttctaaggaagaaactgaatatccagtggggggccccttggcctttttacggaaaagggagaaaaggcagcgggcccaccttttgcttgtctattcctgggcacaaacttatttgtgttttttttcaccggtacatacggaactataaacaggctaagaaagttctcggggggagaatatctcaaggggggattaagggggacacaaacctcaccactcggaactttttttttaaaaggtgaaattcgaacccaaaatatggtcccccggggggagaattttctttgtttgcaa

SEQ ID NO: 120436 - DNA, 846 bp, Arabidopsis thaliana columbia
  unsure (1)..(846): unsure at all n locations
aaaaaaaaaaagggggctgttggggactccctanccttcactatagggacagctggtacgcctgcaggtaccggtccggtattcccggggggacccacgcgtccgaaaggaccaaaacgcagcgttttcttccggagatcagtcgggcggaaagcggctacctttttgtctgcctagaaaatttgntcggttctttcttttactctctttagacaaaacccacgtattttttgaataagggggggggagagattcggccttggaaaaaaacactggtttcgccaagctaaaactaccccggggggaaaaagcaatatagtggaccccgaaaaagaaggctggttcattttaaagacgaggaaaatcactgggggggggtttgggagattttcattgtgggggctgtgcgagaacccctaggcatggttccgggtccagggtgtcccataaaattcctctggggaacccaagtggtgaatattttttaataagggattgaatcttcttgcccccggggattctgtgtagacggccattgcccccgttgtataatggggaaaataattcgtggggaaaccctcttctttcttgggtgccccggaaatctcttggggtgcccgcttttcttttttgggttccgcgcgggtgtgaccggcgaattttcaccctgttttgggtccaccgaaagaacgcaagatgagatttgcgcgggcggtaaacaattggcggttcctctctgtcttgcgccccggtcgggtggggttatttgggatacacattgtgacacgcgcgtataattcccgggggcgccgggtggcccagtggacccaactcggtgctgtggcc

SEQ ID NO: 120437 - DNA, 672 bp, Arabidopsis thaliana columbia
tacgttcactatagggcaaagctgtacgcctgcaggtaccgggccggaattcccggggcgacccacgcgtacgttacaacagggttctctcaacgcattcccttcttgaacatacggatgtagctggcctcttggaaacgaagccatctatgacatttgccgcgagaccctaaatatcgagaggccaacctacacaaacttgagcaggggggcatcacaaaaccatttaatcctttgaaaacatctttgaggggttgagggggccatccaacgaggatatcactggagttccaaaccaatgcttgtcccaaaatccccggaacccatttaatgctggcatccttagcgccccagtatctcacaccccgcaggggttaacacacaagcagcttatcaagcccgctgaaacacaccaacggccctgtttctcgacccaccctacgaaagaggggcaaaggtggcgacccggaaacacgggcaagggaccatgggcgggccgttctgatagaacccgaggcagaaccttcgccccccaacaaagtccaacgcctgttgttcggccacaacaagaaagcaagaaggcgtggtcactttggtagcagggcgggccctagtgggatcacaggcgacgacgaccccgcgcccctccacccgtgtggtgacggggggacc

SEQ ID NO: 120438 - DNA, 248 bp, Arabidopsis thaliana columbia
ctactacgacttactatagggaacgctggtacgcctgcaggtaccggtccggattcccgggtcgaccacgcgtccggaggaaaagacgagacataattggtgagatccaaattcacaaatgatgtgcaagcggcttcggagcttaactccgcagagatccggaggagtgcaagctctcaccgcgagcaaaagaccattgtccccaactttatagggaacgggggggggacccagatggttgaaaacag

SEQ ID NO: 120439 - DNA, 548 bp, Arabidopsis thaliana columbia
  unsure (1)..(548): unsure at all n locations
nnnnnnnnnnnnnnnnnnnnnnnnnnnnnnnnnnnnnnnnnnnnnnnnnnnnnnnnnnnnnnnnnnnnnnnccacgcgtccgatcctactctcttaacctttgaaatggctgattcgagtgctgctgaaacaacaaccggtgcttcttctccccccgggggttctgatgagaactctaccagattcaaccgatccgggtgccaaccatcgaggagatggggggtcaanaggtttggaacaactgcgccgatcgcgctgtaactaggggaatcatgggaggaggactcgggttgatgaggggcttgttcctgggggcattatataatcctattacgcatgatactatgacgggtaggaggcagtttgtggttcacggcaaaacattgggggcagggagttggaattccttgaagacctttggagttatggggtttggttttcttctgctggagaatgcattgccaaaagggcaagacttagcctgacacttgtaaacaccggtttagctggatgtgttcccgggggtccaaggcccgcccggggggggg

SEQ ID NO: 120440 - DNA, 774 bp, Arabidopsis thaliana columbia
  unsure (1)..(774): unsure at all n locations
cgcgagctctatacgactcacttagggacagctggtacgcctgcaggtaccggtccggaattcccgggtcgacccacgcgtccgcggacgcgtgggttttttattctttcctctttttcttaagtctttagattttctactgcaggctataaaaaaaaaaaaagcctacacggctgtatcagaactttttgttctggattgtaataaaacatctcgataaagagatgggctttaccgtcttaacaaagaaaaaaaaagaggccggccgttctataggatccaagcttacgtacccgtgcatgccacggtataactctttctttagtgncaccctaattccaatttcactgggccggggttgtaccaacgtcgtggacttggaaaaacccttggcgttacccctaatttattggcctttggagcatcatcccccttttcctccggttgggggtaatatccaaaaagggcccggccctgatcgcccctttcccaacatttgcccctcccctaatgggaagaagggaacccccccttgtttgcgggcccttttatccggcgggggggtggggggggttccccccaggggtgaccggttctctttgcccaggccccttaaggcccgtttcttttggcgtttcttcccttcctttttagcaacactttgggcggttttccccggaaagctctaaattggcgggctccctctagggttcccgtttgaaggcgtttcggccctctcgccccaaaaacttgtttgggggttggtctccgtgg

SEQ ID NO: 120441 - DNA, 642 bp, Arabidopsis thaliana columbia
  unsure (1)..(642): unsure at all n locations
nnnnnnnnnnnnnnnnnnnnnnnnnnnnnnnnnnnnnnnnnnnnnnnnnnnnnnnnnnnnnnnnnnnnccacnngcgtccgctgcacacgatgatcaggacgcgccgggcgagagaaccgatacagtccatcaggctatatgaccaatttgctcagatacaagacagcctcctactcttcttcccaacaaaatagcaatatccgtaccgccgtatttgtcccgggatgagggaatactacaggatactacacaatgctgtatgaaacatgggctgaatactgatctactgatgtggctgctgatgcataaaagattgattggtttaataaatgcaggacgagctggatgtacaacactagtggaggcggacgctccggacctggacttttcatgagtggacatttattcaactgatgatgctcaccgggaaaccctagaactctttcaaggagaagagattgagtttgactgtactctgaactggaggagggacaagctcactctacctgggattatacaggagctttcattttttcttgctcgacgaactgggggcgccttacttgctaacaccaataggcccttcggagatactaatttaacaacaaggcctctgtacgatggtcaataaaatcgggaaa

SEQ ID NO: 120442 - DNA, 479 bp, Arabidopsis thaliana columbia
  unsure (1)..(479): unsure at all n locations
nnnnnnnnnnnnnnnnnnnnnnnnnnnnnnnnnnnnnnnnnnnnnnnnnnnnnnnnnnnnnnnnccacgcgtccgaccacgcgttcgcccacgcgtccgcaaagtacacatcacctaaaagtaaaaatagacaaaagagaccttgggctcacgcctctctctttgtcccggcaacaactaacaacaacactgatttacctttctctctaaggcgaaacccttctcttatgtgaccactcctgatgcatccctactccgccggcgtgttcggggaactcacaaaaccaccaacagctccactccaaccactttgtgacctaatatcaaacgtnctcttcctactgctcctctgttccctcaccggtccgttccttgatgggacggtggcaaatcctccgatccaagctctacacactaaactcatctctctcttccttatccgaatcacgctactggtcacaagatcctgtgctacacac

SEQ ID NO: 120443 - DNA, 823 bp, Arabidopsis thaliana columbia
  unsure (1)..(823): unsure at all n locations
nnnnnnnnnnnnnnnnnnnnnnnnnnnnnnnnnnnnnnnnnnnnnnnnnnnnnnnnnnnnnnnnnnnccacgcgtccgcccacgcgtccggtggcgtatcatttcatcgatcgagcagaaggaagagagccgtggtaacgatgaccacgtcacggcgatccgtgaatataggtctaagatcgagacggaactctccggaatctgcgacggaatgcttaagttgcttgactctagactcatccctgccgctgcttttggtgattccaaggtcttttaccttaagatgaagggagattatcacaggtacttggctgagtttaagactggtcaagagaggatagatgccgccgaacatacactctgccgttacaaatctgctcaggatattgctaatgcagagcttgctacaacacacccaattcgtcttggtcttgcattgaacttctctgcgttctatgacgagatcctcatttctcctgatcgtgcctgttacctcgccaaacagggcctttgatgagggcgattgctgagctaggcactcttggtgaagagtcatacaaagacagacctttgttcatgcagcttcctcgagacaatctcactcttctggacatttgaaatgcaggaagatgctgcggttgatatcaaggaaggagctgcgccaaaccggccgaggaacgaagtgatctttaggtggaacggtagttttttttgggtttggattnttcctttcccggcatatgtttgctaatcatctagaaggcgttttgcctatcgctattttaaagctattcatcatattttgggggaggtgaacataagg

SEQ ID NO: 120444 - DNA, 302 bp, Arabidopsis thaliana columbia
tacgacttactatagggaacgctggtacgcctgcaggtaccggtccggaattcccgggtcgacccacgcgtccgcccacacggacgtgacattactcgtcaaacccaaattaccaaagcttatgcagacgctgatgagcaacacttgaaagccttcgaggatgcaccttctcctgtttcatatgaccatcatcctcgtcttatgggacacgacggctggactcgctcgattgcaacatcatgacgaactcgagccatgggctatacagaacctgctaacacatgcacagcgtttacttacca

SEQ ID NO: 120445 - DNA, 821 bp, Arabidopsis thaliana columbia
  unsure (1)..(821): unsure at all n locations
nnnnnnnnnnnnnnnnnnnnnnnnnnnnnnnnnnnnnnnnnnnnnnnnnnnnnnnnnnnnnnnnnnnnccacgcgtccgggagcgttctcttctctccttgagcttctcttaccgccattagagctccttcacaaactcataaacctatttgttgagccaggcttggcttaaccactggcctttttccagactaaattatgtattgctcttcttcgatgcatccaaatgcaaacaaagaaaatatctctacttcagatgtacaggagagttttgtacgaataacgagatcacgagctaaaaaagccatgggaagaggagtatcaatacctccaacaaaaccttcttttaaacagcaaaagagacgtgcagtacttaaggatgtgagtaatacctctgcagatattatttattcagaacttcgaaagggaggcaacatcaaggcaaacagaaaatgtctaaaagagcctaaaaaaagcagcatagggaggtgctaacagtgccatggatattctggtagatatgcatacagaaaaatcaaaattagcagaagatttgtccaagatcagggtggctgagcccaagatgtctctctttcaaactttaaagatgaaaaattactgncaacaagagatggatcaggtgtcatggagttacttcaagttgagatattgattccacgtcgaaaatcacagggtgcagcttgatggctgtgtatatattacacatacatgtgcaaacttaacaacgcccttggctaatatatgagcttggcaggagttcaccaactaaaatctatgctgctgaaattctacatcactgt

SEQ ID NO: 120446 - DNA, 479 bp, Arabidopsis thaliana columbia
  unsure (1)..(479): unsure at all n locations
nnnnnnnnnnnnnnnnnnnnnnnnnnnnnnnnnnnnnnnnnnnnnnnnnnnnnnnnnnnnnnnnnnnnnccacgcgtccggtttcattgaaaatttcaagaaccctagttaataacgataatgggttcgagagttttggcttccttctttgttttcttaatcttcacggtcatcacattgcctcccacgatccaagcttgcactccttgtactcgtcctcatcctccggttccgaaacctccacaacacggcggtggtggaggtggtgntancaagccgcctccacatcacgggggaaaaggtggggggaaacccccacccccacgggggaaaaggtggaggacccgccgcatcatggaggagggagaaggagcaccagcagaaccggcccccgccgacccgcgccgcccccacgaccccgggccaccgaggcaccacggagaggcgaggaggggcgcgagagagcgacgaagcagccg

SEQ ID NO: 120447 - DNA, 754 bp, Arabidopsis thaliana columbia
  unsure (1)..(754): unsure at all n locations
cgcgaagannnnnnnnnnnnnnnnnnnnnnnnnnnnnnnnnnnnnnnnnnnnnnnnnnnnnnnnnnnnnnnnnnnncccgcgtccgcccacgcgtccgnnaangagtaagnggacgcgtgggcggacgcgtgtgtcttttaacttaatgtaacaaggaaccactcttttgggtctgtggggctgcctacaagagttacatgggaaagtactttaatgagtggtggggaattatcctagtgtagaacatgcagaattatgctacatacacgatggtttcttgacccttctaataagctgaggaagaccaactatgaagttacctatgtgacaatgattgaagaataatccttgataatcattgggactactacaagattaatagcctttgacaaaggattggttaccatagagatctagaattctgcatcacataaaactgtttttttaaatgatccaaaattaagggaaagtgtgtttttaacagtgtttatggatatagaaaacctgaaagggtgggggctaatgattttgcaaggtagtaacacctatattttttctgaaggcaaataaggaaactcgatagcttcccgctggaatgatttttaggttgttgcaacgtcgggatccctaaatatctctgagataaatcggttctttaaaaggataagggttgtataaaatatgcagaacagagaaaaaatggggttcgagtacgatcctttaacgtacaattttaaaggttttgtataaaag

SEQ ID NO: 120448 - DNA, 237 bp, Arabidopsis thaliana columbia
cgactcatatagggaacagctggtacgcctgcaggtaccggtccggaattcccgggtcgacccacgcgtccgcatagtcactctttgacttactattatggctatggctggagttggcataatgaacatagccatttgggtttgggactcggtcttattccggacccaccccgcactgatgaatctccataatattgttttcgggcccgggggggcccttttggttggaaagaaaca

SEQ ID NO: 120449 - DNA, 482 bp, Arabidopsis thaliana columbia
gggaacgctggtacgcctgcaggtaccggtccggaattcccgggtcgacccacgcgtccgatcaatttgattccaaataacattctcatttttacacagcctattttgggacacgacaaccttaaatctacagattccgtttatttgatcggaacaatctttctctctctctctagggaaccgtttttaaaaagctggggtgtctcttggttccagaaattaactatactgtaacgcggggtgacctggttagatcagccggtcttcaattgcgggtcctatatctttggttcctaccgaacatccaacagagtcccgacccttttttcaacgtaatagagatgccatgggacttaccattaacctgggtggggacacacaacgaagagagcccccaggataccccattcctcaccctttggttcacatccttgattattcttttaacacacaccccagcgttaaaggctccttcttgctgg

SEQ ID NO: 120450 - DNA, 601 bp, Arabidopsis thaliana columbia
ttaataaatttttttccctaacctttgacaataaaaatagaccgacgggaccccccccataccaaaccaagataaaccggaaacaaccttctctcccagggagaggggaaaaggggggccaaaaaaaccaacaaaaccaactccccaaccaaacaaaaccttttacacaaaaaaaaaagaatgctccccttcacccaaaaacacaaagaatttccaaaacccaaaccccctttatagaaaagacaattccccaccatgcccaacaaaaaaccccaacctgaaagggcatccaaccccctgaaaaaaccccccgggaaaaaccaagctttcccacaaaaatacccccaagaaaaaacaaaacactttaatccccccccccccccaaaaaaacccgcccaacaaaatataaaaaaaagcgtaacaccattttgaaaagaaaccaacccactttaaaatactaaaattggggacccccccccccccccccgggggccaaaaacaaaaaccccgacccggggggggccccccaaaccaaaaaaaacctaaaacccttgagggaagacagttccgcccccaaaaaacacccccacaaaacgggccc

SEQ ID NO: 120451 - DNA, 817 bp, Arabidopsis thaliana columbia
  unsure (1)..(817): unsure at all n locations
aaaaaaaaaggcccatgggaattaaaaattgctttaaaatccataacccatttaaccctttccaaaatgactccccctataaaactaaaataaaggcgaacctctgttttctaggggggggtttcaaaaaaaaaagccgggccaaaaaaaaaatccttcttcccccccacaaaacaataacaacccttactaaaattgtgcccaacccctttggggaaatgccttttgacaaccaaaaaacccacccccctaaaaaaattgggcccccgaaaaaaccaatggttccccaaagttccaccaacccccctataacccccatgcctgggtcccccccctttagacccccaggtttaccccaccaaaacccccccctgaaattttttttcttttaacgccccaatttttctccccacccctaaatttcctttttttccccatgtcccaaaaaaaacaccttcttttctctcaaagggggcgcaaaagccacaaccccaatcccccttaaatattttctccacttctctttttctcctaaacacaaaaaaactttgtaccccccctttggattttttttccctcacacaaaacaaaaaaggtcttccccccccccccccaagngaacaatcctcctcctcctctttacaccaaaggaaacccccttccctatccaccatttcccgcctataaaaagacccacacaacaagaacagaaacaaacgccccattaaacactacttcctcgagacaatcccccactttaatatcaacaattgcacagaaacttcaccacccacacctatcccttttttagaaaaaa

SEQ ID NO: 120452 - DNA, 610 bp, Arabidopsis thaliana columbia
  unsure (1)..(610): unsure at all n locations
cccccccacaaaaaaacgccgggggggtgttttttgggggggccccccaaaaaagggggacgccccgccgttctccccttccttnctcttcttcttttttttnnggggcttgtcgggccccncccctggggggggttctcaatttttattttnagcccgaatggccgcccccgcgccccgcgcccctcctcttatagtgcttctcccccccccttcttcttctccnctacagaacctcctgtttttttctcccccccccgcccgccccccccttctttcccccacattgtctcgcgccttgtcccccccacctccctcgctccccaccaccgcctctcgctctcttgttcttcccacctgctctttcccccctctctttcctctcgtttgcggccccgccttctcttgctctgcgcccacttctccccccttatttccactcgccgcttgccctgctgttcttctctctctttttcgcctcccgacctctagccgcttcccgtccttcactctcgcctctacccaccacgcttcccccacgggcccgcccgctcctcgcccctccgttctcccgctttcctatgatctctcctcctgctcgcctcccgcc

SEQ ID NO: 120453 - DNA, 734 bp, Arabidopsis thaliana columbia
gttttccctcttaaacatttctttaaaaaaggtgtgggcgattttaacgcgcgcttttaaaacatataaccaaatttcccaggtttttttcttctctctccttccaaagattcccgattccccccctaatcaaacccccatttgtttaaaaccaaaaatttttttccttatagaatataaaaacccaagggtctctacaaaactccttttttaaaaaaaagaccctcttttttttttttatcttacaaaaataaacccccaaaggctgaaaatccctgtgccctcccgggggcccccgattttctcacagatttttctttttgtaaaaaaaaccctccaaattttttgttttcccgggccccctaaaaaaaaaattggtttttttataaaatattttgggaaaaccccctcccttgtaaccttttattattaagaagacctcctacccccatccctctttaaaaagcgggttacaacattcttcaaaaagaaccttccctccccccttcccccaaatcccccaaaaacccttttttttttttttaaaggaaccccaagcactttgcccccctataccccacgacaaaaaacagatggcttttataacacccccccaaggacgccctttttctctctcctttctcttaaccatatttcgctcctaaacacgattatcccgcggcataaaattatgtccaccccgctatcatccctccttccccaaaaaacccccc

SEQ ID NO: 120454 - DNA, 338 bp, Arabidopsis thaliana columbia
  unsure (1)..(338): unsure at all n locations
catgcacgcgtacgtaagcttggatcctctagagcggccgccctggcttttttttttattttttnttaatttttggaataatattataaagagaatcagcaaagattcctaaatacaaaaggggaaaagagagaaagactgctcggccggagcactgatcaatacttgactgggtttctttattggctcgggggctatatctctaaaggggagttcttcaaaatggagatgcactgcgggaaaaaaaagacgaagctttttattttcattcaccggctaactaaaatgctttttaatctcagatggggggtgggggggcttactttcaagctctccat

SEQ ID NO: 120455 - DNA, 535 bp, Arabidopsis thaliana columbia
  unsure (1)..(535): unsure at all n locations
tcacctctaacttaatcctctaacgccgccttctttttttttttaaatagcataatttaaaccaattatactcacataatttaatctcactagaatcaaaccaaaaaaaaaaggtcacaattcttaactttttttctcagggataaaaccttnaaaaaaaaaattaaaaaaaaaaactgatgaaccaccattaaaacctcgcccaaaaaaaaacctctttccttatcccctccgaaaaaaaaaatgccctcaaaaaaaaattccccacctcatacaacaactttcctctgaaacaaaaaaccctctctaaaattccaaacaatccccctatttttctcttgggaagtggcccctaaccctcacaaganttatatttaaccctccaaacttttttccccctctctttttgccaactccaatttatttaattctttccccaaaaaattgggcaaccccccccttaaatttttattctcaaataaaaaaaaaagaaaaactctttccccctaaccccaaattagaaaaacacatctcc

SEQ ID NO: 120456 - DNA, 671 bp, Arabidopsis thaliana columbia
  unsure (1)..(671): unsure at all n locations
ttttaaaaaaaggcccctcccgggataaaaaataaaccagggagcccatttacatgcctataagagccccaaaccccgggcgtgggggctcaataaaaaaagaagatatcctaaaaagtgtttggaaaaaattcctcttaaggaggggttgaagggaaggnaatttcggggaaaaaaaaaaattattaaacccncccaaattttttttaaaggcgtncccccccccacccgagcttttgttccttccaataccaaaacctggggaagggggtggggggttttccctccccggtggcccatttttaataaaaatgggggagggaagaggggggagccccaacgggcccccacatcctcccccaaagcgtccaaaactctcttaaaccaagggggtgagttcccgagggtaaacccccaaatctcaaacaccccgcgcggggtggtgggacacacccccataatacacacaggggggggagggacaaaacacccgcctttggcttccactataattctgcgcggcccgcgtgtgggcccaccccgaaataattccccgaccgcgcccccggggggggaacacagtttatccattaaggagggaggacataacagggggcgcgcgaaaacacgacaaagggcgccctcgcagaaaaaaatttcgccgcccccac

SEQ ID NO: 120457 - DNA, 216 bp, Arabidopsis thaliana columbia
  unsure (1)..(216): unsure at all n locations
ggggctttttttttttttttattgaaattgataactaaaaccaaatggcgttatcttccttggaagaaaatctcacactgcttaagggaagggggacttattattggtatgaggggctcacaaatcccngtnttaaaccagagggggagggaaatttttttttccacccaaaaaaaaaaaacctgatcatttccccgtgtcccattacggtttcct

SEQ ID NO: 120458 - DNA, 837 bp, Arabidopsis thaliana columbia
  unsure (1)..(837): unsure at all n locations
tttttttaaaaaaaaccctaatttttcctaacctttaaatactaattccatagatcccttcatagaatttggattaaaatccctaatgggatttttattttacatttaaaatcctctaaaaggcaaattaaaaaactttcttaaaaacgggttgtgtggtcttnaacctgggttgaaagaaaattatttactcttcgctggccagacccacaaactttcccacttcaaattccaataaaaaactgagcaaaaactcaaattaccccttggggaacttggttttgtttttaaggaaaacccaaaggggccaaaaaccgtttttttgctctagggggacccaaaaaaaaaaattaacccccactttaaacggggttgggttcctccaaaaaacctaacttttttaaaggcctggaattattgccagggtggggttctttccttttttcacgcaaatttttgcggggaattttttttttaagtctcatctcccggaaaaaaaacaatttttttccttttgggaccctaagaaaaaaaaaaaaaaaccggaatttttttttaaaaaaagaggggttctttttctaaacggggacggggtttgggtgaaaaaaaagatattttttttttggcagaaagccaaaaattttttttttaagggcttttgcggccgcaggtccccttttagagctggtttaaaagattttttaattttttgggggggtgtggcaacaaagccccacaccccctaggcgccgaaaaataaaaaagaagaaaccgcccacactttacagggtgttcgccctacccagaaaaagcgctcgcgcttttctacaaaaataa

SEQ ID NO: 120459 - DNA, 651 bp, Arabidopsis thaliana columbia
cccccccttctccccgcctccctctcttctattcgatgttctttgttcccccttgctcccccctcgtatatacccctacaaattctcctcttctcctcctttccctccccctctcccactcctatcatccttcatcattccttcttttcctttttccttccctcccttatagcctactcgttccataatcctccttcctttcctacgtgttcatctcctcccgcctcccccctcttctctttactactcttctcgcacccccattccatcaacccccaacaaccctcctccactcctaccctcttcccgtctctttcccttctccccttctccccttcctttctctttttcattcaacccagctcctctttgtattctcctacattccccattcccccctctccccccataacccttctatctctctggttcagttcttctcgctgccctcacaaaccccttatccccccctccctccccacctcccgccccaccatacacttctctaccatcttcttccttccccaccttttaattcccttatcatcatctaagtgatgcccagccactcccttcttccctcgttcttctctttcctccatcttcttcatctctctctccatcccccactcccttatcctaccccactcc

SEQ ID NO: 120460 - DNA, 857 bp, Arabidopsis thaliana columbia
ctatgaacacgcatgcacgcgtacgtaagcttggatcctctagagcgggcggccttcgtttttttttttttttttttaaacacaaagaaataaccctttttattggggctttttttttgtgcttacacaaggttttgggaaacaatcaagatttcaacaaaacaaaaaacaaacaaaaacggatggatctttttctcaaatggggggcaaaagggaggggaattaataaaaaaaagggggggggggttctttttcttcaagggccttgtttctaatctcggaaaaatccgtaaatttgcatttttttttatcttttaaactaaagattttttttagaaagaacaaaaactccacaaaaatttttccaccagggggtcttttcaccaaaacctaaaaaaaggtgggttgctgaaaaaactggaaagggttggttttcccaggggcttctcatgctctactcaaaagatggggaacccccccacagggtttgaaagaaaaacccttgttctcccttacaaaggagaaaacaaaaatggcctccttataatcctaaaaaaaggtttgcccactgcatcctaagcgggggaaaccaccacaccctttgttgggcgggtcacctcgtcttaaccgtaaaaaaaagctgaagggtgtttggcgtaaaaaaaggccccgggggttgataccgtttctccaaacaagaaaaaccgcagggtcacggggtttaaaagattttttctctaaaacgaagctcttttaaaatggcctttttttgggggagattttgaagagacaaactttttatttaataaaaaatggagattaggtggaaaaggccgaagggggttaccccccaaaaa

SEQ ID NO: 120461 - DNA, 691 bp, Arabidopsis thaliana columbia
  unsure (1)..(691): unsure at all n locations
tcccctctaactgatcttaacgcccctctttataattttttttttaaaaaccctttaacttttttaaaaaacccaaaacatctttcttcaaaccataaacccctctcctttttttccgggcaatttttttttttcaaaaacacacgtttatttttccttcctcccacctaaaaattttttttaacccaaactaaaaaattcctttccccccctctttatttcctaaaacaacgcccctttaaaaaaaaaccccctttccacaaaattaaccttctttacccccaaaataaaaccctttttacaaaaaaaaaatccttttttttcagccccaaaataaatcccccttataaggccccccctcccaaaatatcacccacaatgttttaacccccaaaaaaacaacccagtctccctctattaacccctcacccacaaacccctccctaaagaagtcctcccattactttttatttcacccctccccccaaaaaataaaaaggcccccccccaaaaagtgggccctccccttctataaaccacaaagttgtttncccccccaaagcccaaaatctctcttaaacccggaaaacctctcaaaaacaattatactcaaaaatttctctcccttaaaaaaaccacccccccccttaaaaatccccttttcacaataacccccaattatttanccccc

SEQ ID NO: 120462 - DNA, 802 bp, Arabidopsis thaliana columbia
  unsure (1)..(802): unsure at all n locations
tttaataataattttttttntnnttttttttaaagccaaatttttatatcacatatatatgtttaagcacattcaagttctaaaacccacctccaaccccttcatagggaaaagtttctaaacggagagcttttttttttgcaaacctaaaaaaaaaaacaacacctttttgttggcctaaaccaaattaaatcccccttttctcttttttaaaaaattttgttttgggggcacttttttaacattggttccttgggccataaccaaaagatctttttcttttttttgaaagctttaactttttttcctttcaaaaacatctaantctcgtattttttttcctcttaatcaacaaaagaggcgtggaaaaagaaaaacacacccaaaaaccccctccaaggttgtaaaatgttttttatataaccccacaaccaaaaacaaatatcccttcaacaccaatacattaaaatttttttcttacncttctccctccccgggcaaaatttatacgctgggttaaacaaaaaaaaactttgtttttaaagcgttcccccccggttttccccttcaaacacccttcttatttccccccagaaccccgccgcctctttaggggccctcccctatatatccccgtttttaaaagaacccccccccccttctttatttataattttaaaaaaacaaaaaaaaaaccccccgtgagaaccccttttccaaggaaaaataaaagagagggtcctcccagaaaaaacctcttgtcgcccttacccattttcccttaaagnggaaagcccccgcc

SEQ ID NO: 120463 - DNA, 714 bp, Arabidopsis thaliana columbia
  unsure (1)..(714): unsure at all n locations
aagcttggatcctttagagcggccgcccggcttttttttaattttttnttttttttttttttttttttttttttttttttttttttntttttnaaaaaaaacccccccctttctccaaaaaaatcccctccccaattttttaaagggagtgcccttaacccctttaaaaaaaaaaacaaaactttaataagggggggcggaggacctttttttccccttttaggggggggaagacccttctttggaaattgaccccaaaaaacccttattttgctggggaacccccaccctttaaacaggtttgtttcccctccccccctgaaaaacctaacgtccccccccttgggataacctttttccccggcgcttaaagggggacccctttcccttttttttccccccttctctttccctaaaaaccttcaacccccccgtgtgaaaaaaaaccctccccctttcaaacctttttagggctcccccggtgcacaccgggtaaatccccccattttttccccccgccccattttccaaaactaatccccggaaaaggtccccgacaacccccctttggggaaaccataatagctcccccgcggtccgcgggggggttctttttgtgtttgccccaaacccttcccaccccaaaataaccccctttcgggcgtttaaaccccttaaaacgctttaaacaaaatacccccccccgcgggacct

SEQ ID NO: 120464 - DNA, 671 bp, Arabidopsis thaliana columbia
  unsure (1)..(671): unsure at all n locations
aaaaaactccccaagagtgtaaaaaaaaaccaacacccgcgaggaggaggttttttctcctccccccccacaaagaaaacctaaaaaatcccaaaactctgaaaaaacaagcccgttcaaagaatttcttattaatagggattgtagggccccnccgggggggggttcaaacttattttaccccaaaaattacccccgccccgccccccccccccttgttttcctccccaaaacacagaaaatcttattctagcgcctccccccccccgggtttgcctgtgtaccacccccccccaaaaaacgctatgtgtcttgctaccctctcccacgtcagagcgccttcaggcaagaacccccccaaagaacacccgcagcgtgatccaccccctatacaagacagcccgaccacgtgacttctctctcgcacacgcttgcggcgtacctccctccctgcacccccggtgtttctcgattactcagcacctgcgcgctctcctgctccgcccagcagccctcctcccccgacccttaacgcgcaccgcactactctctacgaagcgctcgcgcacgtcaaaaacgcatcttccgccaatgactccaacgcctccactagagtgcgcgtgcttaactccacgccctctccactacggccgcggctacgttttctcctt

SEQ ID NO: 120465 - DNA, 779 bp, Arabidopsis thaliana columbia
cgcatgcacgcgtacgtaagcttggatcctctagagcgggggggctggtttttttttttttgagtgacaaataaatattccaaataacggggcttcttcacacattgggatcagtttacagaaaaattcggttcaattttttggttcaaaggagctttatgctttgatgaaaagcggtatgtaaaatggggtgcgggaattcagggagggagacgagaaaagaaacaagttattggagggggaatcccaagcgcgaaatggtcggggggtgggataagcgccaaaaaaaaatattatattaaatcttttaaaactaaaaaaccagacctctggtttttgtttggaacccaaccagggggaggggggggggggctaacattccctttatgccttgcttggggatggtggtggagagccagccaagccccttatagagtccttctcaggggggggccatgggcttttaagggaccaggggcgtgacgaaaaaaatgaacccccaggtgtgcagttttttaggggggttctcggggggggaaattttgcttgttaacaatacaagcgaacgggctccctaatctatcctcattaacgtcggggaaggggggcctggttaaaagagggggacgtcgttgggggccaaaaaaataaggcctgggtttctggaagatggccccacagggggggtgtgggtggcccccacctcccgggggggggggggggtgttgcttcacagcctcacggggaccccggggggaggggggcgagcccccccaggg

SEQ ID NO: 120466 - DNA, 889 bp, Arabidopsis thaliana columbia
  unsure (1)..(889): unsure at all n locations
ctatgacctcgcatgcacgcgtacgtaagcttggatcctctagagcggccgcccgcggttttttttttttttttttttttttttttttttttttttttttttntttntttntnnttttctaaaggaagttttttctggggctttatattatggatcgggggatttgggacccctttgaacaaaaattctttccttttaaagtgcgccgcgggccccttcgaggccaaaataaaaaataccgcccaaaaacgaataaccccctagggggaaagcttaaaacccggaagaaaggtttggggctccttctgcattaaaaccccccccgctccgtgggtgaaataccgggaaccaaacttacggtaaaaaccaggaaaaacaggggccccctccccttttggggaaaaaaaacaaaaggcccttcgggtttttgttcccaaaaaggacccgccccctggtttaagggaaacccgtctttgtttcccaaatttttgacccggggtcttttttcctttttaaaaaaggcccaaaaggggtagaccaccctccaaaaattttttgggtttcgggtccacaccccgagcgaaaccccttcgagaaacttccacatcctttttggcgcccgggaaaaactttatttgggtgttaggctggaaaaaagggatttcccacaaaggtgacgggtgcgtcgttggggttttcacttggggagaaaaaaccatttttttcttaagcgcttttctccctttttccccgaacggcgtgaacccactttttgcggaaaaaacttcacaagggtcgcttctccgcaggagaaagtgtctccccgagcaaagtggtgaccccgcttcgaaaccccttctaagaacccgtttcgtttttgagggccgca

SEQ ID NO: 120467 - DNA, 921 bp, Arabidopsis thaliana columbia
  unsure (1)..(921): unsure at all n locations
aaattttagaacanccccccccgccttccttgagcttggttcttttaaaccgcggggctgcttttttttttataaaataccggatttttttaaaaagtctttnaaatttcggcccaattaaaaatttcctggggtggccttcggccctaaaatacccaaggctttttaaatctaaacctgaatttttcttcatgggtgttgggcccccctcgggggggaaaaattattatttttcccccccccccccggtaaccccttctttttcccgcaatagggaaaggttttttttcccccccccccaaaaaaagagagcgtcttttcaccgggggggccccggttttaaaccttttttgtttccccaaattaaaggacggggacccccccgccctcctttcttttaaaaacccgcggggccccattcttatattatgccccccaccccaaatttttttcttgataatcctccaaacccccgggcctttgtttaaaataacgcggcctcctctctttccctataaagaaaaaagttttctctttttcaaaccctccccgcgctaaacaaaagaccgtccccctccccctccccccncgagtccccactttaaccccacaaaagaatggcctctccctgccttgggcgccccacctgtcttaacttacccccgcccactgttttccactcttccttcctaaagtgtttcttttcgggccacatcttctctctacgtcctccccgaggggcgggttttcgcggcagccctcctttgctcgcgcaccggaccccgctacgctttctctggccctcccttactcgcccctcctcgcgcctccgccacgagccaagggatgggcgtgccctcccgcgcctgcgcacccccctctttgtttttgttgtcgacccctgtcttcggcgccgtccgg

SEQ ID NO: 120468 - DNA, 616 bp, Arabidopsis thaliana columbia
gggggggtggtttttattttggaaatttatttttcctttaaaggtaggggtttaacaccaccatgttcaatttttctaccgaaacccccctaaaggggttaataaaaaaccctttctcaaaggggttgaaaggaaaataggggggggcaaaaaaataagtggaaatgggggagctatcccccacaaaaaaccccctctttttaaaggggggcccctcgggggggggggttttctccaaccaccgaggggaactgcccccttctccccacaaaaatttacctgtagtagagcggggtaggcgaactccccaaacttcttgtggtttaaataacaacccacccacggggacccccgggctttccccttaataaaaaaaccgggggtgttttttgtccgggcggggggcaccaaattgcgcttgggggggtctttttctttgttttaaaaaaggggggggggaaacccttttttaggcgaccaaaaaaattatcggggagggggcaccctttcacccgtattgggaaaaccccctgggggggagttcttttgtgctcacgcgggggcccccagggagattgggccccggtgaattaggaaacccattccacgggggggg

SEQ ID NO: 120469 - DNA, 239 bp, Arabidopsis thaliana columbia
  unsure (1)..(239): unsure at all n locations
tccatccaccctcctagcttgtccttagacgccggctttttttttttttttcaaaaaatttgttatactaaggaaatcctgccctcctccaatttattattttatcaagaaaaaaaaaacctttatccaaagggatctgggatttaaaggggggctcttaacataatagaatgagcgccctnncctaaatattcgccccacccacataaaataaattttaacctttattaaacaaaaaa

SEQ ID NO: 120470 - DNA, 463 bp, Arabidopsis thaliana columbia
  unsure (1)..(463): unsure at all n locations
cgtagggcttggatcctctagaggcggggggcgggctttttttttttttgacaaccaagatttattttcgcttaagagggggctttggtttaacaaggaagaagaaagataacccaccttccgggattttccctcattaactttctttaaccaaattgttaatttgtcggcggactttttcacacccgggtgcgtgggncataataagggccgcagggggaaaaaaaaaattcccaaaaagacaattttcccctctcccaaattataaccccaacccttcccttttctttcactaatcagcgggcgtgggggccgcgaacaaaaactaacaaggggggtccttaacccggggagaaatatccggggcggggggtcccctttaactttttgcgggggccaccctgttgggggggaacaaggtgggggctggggacaaacccccccgcggggcgcggggggggcc

SEQ ID NO: 120471 - DNA, 884 bp, Arabidopsis thaliana columbia
  unsure (1)..(884): unsure at all n locations
ctacgtaagcttggatcctctanagcgggcgggcgagccgtttttttttttattttttattcaacaaaggttggtgctttaaaaaaacatgttcatggtcatcatggttttgagactgaaaacctacattttgactttacaaaggaagggccccctttctctttttttggagtgagggccaaaccggggtttgaactataacctcatttgaaaaggggctgaaaccccctgaaaacaagccctcctttaaccctttggagggggtggagcctcacagaggaaaccagtgggggaaacccacctcggttttagcccgtttgagtgcttccttaatagaaaagagaggttatcccaaaaataataaacgggcgcttccccccctgtttaaaaaaagggttcccctttgctttgggacccccctaaaaagaaaaacatcagtgggaacgggcttgtgcttaagagaaggtttttttcaactcccgcgccccaggggagaaaactcctgtggtaaccccatttggagcgggtccccgcccgtgggtgtttgaaaggtcccccaaccctaggtgtgtacaaaccgctcttcttttttgccataaacgaggggtgggaaaaaaaatcccccacacccctttttgggcttttttgtgtgggaagaccccgtgagtgttttttcttctcttgacaggggcgctccttgtgcgttaatatttggcgcccgttccgcggacacgacaagacgttgttccacgagtgtgggggaggtgtgatgacgccccctccccttcttcttctttctcccacgtgtcctcgctccgcgcgcctgatgctggtacatgcgcgggggggccgcaagcccattggcttgtcttgaaaccacacaa

SEQ ID NO: 120472 - DNA, 815 bp, Arabidopsis thaliana columbia
aaaaaaaaaaaaaaaaaccctctttcttatccggggtgtggggggaaaaaaaagggggggtatggaattaatactcgcgccccccggggccccccccccccccctctttttttctcctttggggcccagggggggggcgccccgaagggacccacccccccccgggcgggggcccccgaaccttgggggcaagaaacccccagggggttcccccctggtgggggaaagagggaaaataaacctcccgacccccaaaggggggcccccctgggggaagatccccgcgggggggggcgggcgggaaaaaccctcttctttgtgggggcgccccctctggagggcgccccaccccccgtagtggagaggtgcgggcccccttccacctcagaccgttggtttttattgggccccacccccgccccactgcctgttttggtgtggggaccccaaagagggagggccagacatttttttggttttggcgggccctgcccgtgtcataagaaaaagaacacggcggggcgcccgccacagcaccctacggcggggggggcgcccccggtaggcgggccccaataccgcaacgggatgtctctccacgcgccaccgcccgcgtacagccccgccccccctctttgcgggggcggcgcgcgcgggaaaccccaaagacggacggtcggccaacccactcttgtgttgggggggggcaacaaaagacgcccccgggcggggggggcccgacgtcccggggcgccgggcaccccccttcctagggggcggacgggcccggcgagacgtgcgcccggccgggagca

SEQ ID NO: 120473 - DNA, 909 bp, Arabidopsis thaliana columbia
  unsure (1)..(909): unsure at all n locations
ctacgtaagcttggatcctctatagcggccgcccttttttttttttaatattttaattttatnatcccccttaaaaaaaaaaacaaaccctccttcctcttattaaaaaccacaaccttttaaaaatcccaaagataacactctttccgaacacacaccaaaaaaaattttatannggagggagtcggtcattttttttggggattggctaaaatattaacacnccctttccccaaaaaaaaaccctcccccccgaaacctttccccttcctcccggagggctgcccaaaattttcttggcattttccccccccaaaaacatttttgaaatgtacaaaaaaccttttttttttttaaaccccccttggccccttcccaaccataaaaaaaaggattttggaaaacttaaaacaacacctttaaaccttgcccctccttttctaaaactcaaaaggggttttaaacaaaccccttttcccttaaaaaaaacccctctccccacaaacctataacaacccaccggcaaaaataacccccacccccgcactatttcccccgcccccccgtgctccaacccctaaatttcccccaaccccccccccaagcccacccaattttcccctttaggagaccncttattaaacgcccccccaaacaatggcaactctctctcccctcagaaaatatntcctccccccccctcccacccaaaaatacaaccgaattataaaattaaccccccgcccccaatatcagacctcccccccttttttcctcacccctccccccctttccaaaaagaaactttccccccactctatataactccccaccccggaaagccctcttcttctcccccccaattttttttttccaataaaaacccacttgtatcccttctcccccccc

SEQ ID NO: 120474 - DNA, 770 bp, Arabidopsis thaliana columbia
  unsure (1)..(770): unsure at all n locations
ggccttctttttttttttttatatttagaaggaaccttttcttttctttaccccaaaacaaaacccccttttgggtttatcctcccgaaaaagaaaacttatcttttttcctacccncttacttttngattggcttactttactaaaagagaagtcgttttttcccccatgggcttngaaaacacaaacccacctcctggtggttggattccattttgtnccccaccttcatatcgccttcttcgggtttttcccaccccaacctttttttctaaaaaaaaatcccttaaagctaaatccaataaaaacccccctcccctaaaaattttgtctggaaaaaaacttcaaccaaattgggaaaaaaaaaatccccctaaaaaccttgattcgaccccccctttgcccattttaaaagaccgaaaaaaaacctgcccctggcgttaagtttcttcccgggaccttttttttttcccccccaaaaaacccctgaagcggctacccaaataattgccccacaaataaaccattttccccctccacaaaaaccctttaaaaaaacactcccccccccttaaatctcctcccattccttccaaaaaaaaaacggtattggccccttttccacttttcttcccgcacccaaaacaccaagtaacctttttgaccaaaaacaccccttttaataaaaaaaacccccccctctttctaagggcccccccccgacacaccccctaaatcatttccctcagccccccccccctcaaaacttc

SEQ ID NO: 120475 - DNA, 614 bp, Arabidopsis thaliana columbia
  unsure (1)..(614): unsure at all n locations
agcttggatcctctagagcgggggggctgtggttttttttttttaataaaactcaacccggaaaaaccccttttctgtttaaacaaacctaattttttggtttaaagaaacccggagccaaacaaaaccctctttaatttaccccaacaaacaaagggaaaaaaaccccttgaaaagggggggggggggttttttcttcatggggggggctgaaaaatataaattcncccctccccgaaggggggggaaaggggccaccaaggtggggccccttctctttgcaatgcgcaaaacattggtgttgaaaacccaccctctttctctctccatttttgtgggtataaagaaaaaaaacccccgcttttgtgtttcaaccttcctgaagaaagatttctccccccttctaaaaacccccctctaagaagaaaaaactaataagcctccttttggaaaccaaaaaccaaattgcgcttttagatttgcgttgggcacaaaaggtccccccgagggtatccgtgttaaaaacaagggctcctctccccttttttatttacgccccaaaagaggagagagggggtctcctccccagaggggaagaagaactttggcccttt

SEQ ID NO: 120476 - DNA, 346 bp, Arabidopsis thaliana columbia
  unsure (1)..(346): unsure at all n locations
tgcccgcgtcgtaagcttggatcctctagagcgggggggctttttttttttttttaaaaagaatcaaactaatctcgggttaattccggacgggacatggttgggaantttctcggattcggggaacaaacagaaaaacctcaggaaaatttactaaaaggctttacttttttaataggggggggacaaatatgggaacatattttttaaaaggtggataaaaagaggtgttataaaaaccgaaggtggaaaaaaaaaaaaaaattctattttcttgaaaaggggggaacctcccgggacccaaattaaaaaatttgcgccgggggggttttacgggccggggggg

SEQ ID NO: 120477 - DNA, 464 bp, Arabidopsis thaliana columbia
  unsure (1)..(464): unsure at all n locations
ctatgacgccgcatgcacgcgtacgtaagcttggatcctctagagcgggcggcctggcgctttttttaaatttttttttntntggcccccaaccatttacaaaaactcctgtttcttatgctttgggctaagctacagggttcgtttcccacgttaaaacactaacttgatattttttttgggggggaacaaaactgagcattactgaaaaatagtgggggggaaatggaccaacatttttttcgacaaaacggggatgcgggacttaggagggaactggttcaaggggggcctgctcatgcccttcccggttaaggttgactgccaaatttgcacatcccactcctcccgggctactaagggatgccccttttgcccattccttttcacaacctcgctttgtggccaaaagggaggaaaccttttttacgggaagccttccttaggaacgggggctaaccaac

SEQ ID NO: 120478 - DNA, 892 bp, Arabidopsis thaliana columbia
  unsure (1)..(892): unsure at all n locations
tttttttttttattggggcagaaatcaaaagaaacccaaaaaccttggaaacaaaacctcttgaaatggtgaaagctccttcccttccccaaatgggatttccagaaattcccaaaacacaatccacactgaaaaattccccgtgtcaaaaaaaaacaaaacgggggggggtgtcccccgggaaacgaacggaaagaaaaaacctggntnttccttccttcccaaggtggcccttcggggggaaggggctttttcttttgggttttttggggccccttttccaacaaaaaccaacaatttctttctttctttgggggggggaaacctctaatttcttttggcttngggcccgaggtttaaaaaaccagggagccctttgaatttttccagacggggtttggggtccaggggtccaaaagggattaatcttcngtattcctgtgtggggggaaagcgcccttattgggcccgaggggggatttaccccccccctagggcccccccagtgtggaaccaacccttccctaaaaaagaaattttatctcgcgtgaattgggggccgcggcccccccgtgggggggggttacacgaccaaaagcccttggggcggtggcttttggccccccggttttgtttagaacccggaaaaacaccctcccgtgttttggcctttagccgaaaaaaaaaacgccggggggtggggtccccgcggtatattccgcgcgcgcccctgggggccacccacttttctttaagagcggcctatagagcggcgggaacgaatgggcttattgntgccgtggaaaaatttattcccccaacccaaccaaatcaggcgcgagagaagggtgagggtcggggcncaaaaggagataacataaaataggccgcg

SEQ ID NO: 120479 - DNA, 603 bp, Arabidopsis thaliana columbia
  unsure (1)..(603): unsure at all n locations
ctatgacctcgcatgcacgcgtacgtaagcttggatcctctagagcggcgcggctggttttttttttttatataaattacgcaagataaaaattatacgaaacgaagaacttttacattattcacatttccccaaatgaaatatattaaaatttatatctttggggtgttttctccaccaccttcttctttttaataatgagggtgggtngtttaggaaggaggcttgaacaggattgaaaccttaagggctagcattactccggggatggagccaactccggcgaccaacgggatcatcaaacaaccacagcttaacatgtggagacaaacccacttaatactccatctctaaaccttcctgtggcttaaatacatccccaccggaaaggaaaccgggaagggccaaaaccctaacgccctaaaaatcccttacgagggcgttgaaaaacgggttaagcgtggatatcaaagggggcaaaaccacaaccccgcttcgggaaactggtcctgaaacgtggacttttgccggggacccaaaaaccaggggtccgggttttggattcctgggccaccaagggccgtgggggagaacctagggggg

SEQ ID NO: 120480 - DNA, 621 bp, Arabidopsis thaliana columbia
  unsure (1)..(621): unsure at all n locations
gatttactgacctatataagactatgacgtcgcatgcacgcgtacgtaagcttggatcctctagagtcgggcgcgctgggtttttttttatttttttttnttttttttggagatgaaatgtgttattttaagaaggcaagaaagtagaaacaagtttaacaaaagattcattaaaacaatgattacccaacaggaccagggaaggattatatataatctaagcgtgtggggctccaaaagtgctggcgggatgattaaaattactaaaatcacgatttcttccaaagcggatttttctttggtcctttttttcttgggcccggaaaagaagttctccaaggggcacaagggaaaatttcctacactctaaaccgaaaaaaaggaagggagggaaatgggtgggttttttacttggtgggctttttccccatggccattcccccaataatgtccaagggtggttgatttacagattcttggtggggagtggacaattcttggttggtgtgtttttggcattcccccattattttaaatcccatacgggaaccaaaaaaaaaccggagtcttagagcgagggaaagggcgccttttgctggttacttttttttttgtgggggg

SEQ ID NO: 120481 - DNA, 627 bp, Arabidopsis thaliana columbia
  unsure (1)..(627): unsure at all n locations
attaccctccctctactatcttaacccgcttttttttttaaaaatcctttaaaggcaagaaacttctaaacttacaaatttaaaaaaattacctatatatctatagcctattttcatacaaatataaccatttttttatttgagtgtnccccaaggagaaaaaattaaaacccttttaaattctttgagctctccattaaaacaaaattcccattataccttataataccttttaccatttttttttttttgcaaaaataaaccttttttttcttaattcctccccccaactttgaagaaaaaagtgtattcacctcttttacctccaagaatttcaaccccttanaaatccacccccctttttttttttttttatataaaatcctctttcctctaacaatttttttcttttctttaaaaatccctcttaaaaaaaaaccccccccaaaaaaaggcgccccccaattttcacaaattaaaatggtgtcactaaaacttgccaatattttctccccccccccgcccccaaaatcttntaacctctccctctctctctgcccngtccccttaattagaaattagaagggcccccttctttgggtctctttgaattaaaaaacccccctg

SEQ ID NO: 120482 - DNA, 705 bp, Arabidopsis thaliana columbia
  unsure (1)..(705): unsure at all n locations
tgacgccccatgcacgcgtacgtaggcttggatcctctagagcgggcggcctgtttttttttttttgacgacgggaaccaattactatacttatgtggggtaatataacagttaaattcaatctgggagacacattttcacattctttagagaaagcataccaaagggattgtgggaaaaaattccttttgcaatgtgggcgggggggctatcttctcttttttcttcatgcaaaatctggaagcggggggggtaacataattgggaacctactttggatctccctaacacaggttcaggaccgggcttgcgggaaaatgatttgacccttgggccttggcaacttgggaaccctcgggggcttctgagaggggagggggatcccttttttgctaaacccattattttttccaattggttaggggggggaaaacccaatttcccaggggacaaaacccttaccctttttctttttntggaaaacaaaggggtcctgaagggtgttcacaaacccaaccactcccttatttttgagtctccggcctggcatccccttcttaaaactgagaccttgctgggggggcaagggtgaaacaaacaaagttgtgggggaacctcccccgttaaaggggccagcccctttttaaaaattttttggggttaacccgggggaaaacttccgggggaacccctggtggggggaaa

SEQ ID NO: 120483 - DNA, 699 bp, Arabidopsis thaliana columbia
cttgactcccatgccgctacgtggcttggtccttaagcgggcggcgggttttttaattttttttttttttaggataaagcctttcggtaaaatccagggttgtacttgacaaaaaaaaactcggcccaaatctttaatttgcattttaaaggggggcggtcatcattttttgctccgaaaaagaattataaattttccctgtttccgcctcccccccttggagggggggggtttttttttttaggccccgggggggccttaatgggagggcccgggggggttggctccttgggggggggccccgtttggtccggggtgaaccccacgcaaatatcccttgttttcggggcgctgccacctgggggttggccagaagcgcttccgtggggggcattttccctacctttgtgggaaaagtcctaaccgtttttaggggggggttcccgaagcccggtgggtcaccggggccaagtgtttcggggccttttcccctaaagaccccctgtgagtttttttaacgcgggggtgaattttttggttttggggggggtttttccccggtcaagtgaaaagccccttcgccgggggacggaacctttttaattacctcggttaggggggaacttttcttttaggtttttgggcgcggctttttaaggaggggggccctccttttttttgaagcgttttttttggggc

SEQ ID NO: 120484 - DNA, 751 bp, Arabidopsis thaliana columbia
  unsure (1)..(751): unsure at all n locations
taacttgatctttaacgccgcctttcttttataaaatttttttttttttttnttcttttgaaacaagatttttaaccttaaataaacaccctacaaatttttaattcccacctaacaatactgattaattctttttttttgaattcccccccaccctttaaaaaaactttaactaaaccctaccctcacactaaaaaaatttaaaaaagaaagttcaaaaaaacctttaaaaaattccttcaaacaaaagggacattccctttttttttcaccctttttttataagtttatattttctccccccctttaacaacaaaaaatacacttcttattaccaaaaatttaaaaanctttccccctctctttttataaaaccccgtatttgtatctttaaaacacccccttctacacaaaaaaaaaattttaaaacccctcttaaaaaataaaaaccctattcccctaattttctccttttaaacccttttaacaaaaattttttggacgccataaacttcccccctttttaacacccaaaaaaattcccggggttatcttttttataaacaatgtgtgatttataaaacccttccctttttacaccttttaaaccaacccctccccaataaaaaattcctaaaaaaaaaaaattttgcaaactttttttcaacaccacaaatttttttccccacaacaaaaattttcttctctttccaaaaaacccccccctccgccttcaaaaaataaaccctat

SEQ ID NO: 120485 - DNA, 829 bp, Arabidopsis thaliana columbia
  unsure (1)..(829): unsure at all n locations
tacttgacccctgcccgtcttagcttgatctctagagcggcgccttttttttttttttaactcaaagggtttctcattatcaaaaccttgggaaaatttacaaaatctccatttgtttagccttaaggggagtttctttatcttccctgattacaacaaagggttnggtttaaattctggggggggtaacaaaatttccagacagaaataatccttaagagcttttctctggcactatcctcttcttcttcttttaataacctaaaaagggggaagcattggggccctttttaaaggggaaaaaagggtggaaaataagtaaaagagagggggaagagctaaaaaacccaccaggctttttgttaacaatccctcctctctttttccggggagggccaattttntttttttgcaaaacccaaaagttccctttagggttattaaaaaaacaatcttttttttttgggaaggggggagctttttttttttcgaacattttaatgttctcccttgtgtttcaaacgcgggggggggaaaacccctcttttgtttgcaagaacaaactcaacggacttgtgtctattaaaaaatccatcaactttttctcttctataaggttttgaagggggttttccaaattcctcatattttccccatttgtgatcccccccaacatgaaggcgccttttttttgggcccctggaggggggaaaggaggccccccctgtatttgttaatatgagggcgccgtggcgccttccaaaaccgcgggggataaaaaagcggggtgtttacaatacaaaaagctttcgcggggcccctttttttc

SEQ ID NO: 120486 - DNA, 774 bp, Arabidopsis thaliana columbia
  unsure (1)..(774): unsure at all n locations
ctctttttttttttttnttttataaacttaatattcatagaagcaaccccaaccaaaactatcacccactaaggccttgtttgaaaaaaaaccaactaataggggcaagggggaaggccccggtttttttccggtggaggtggaccaaaaaggactttaataaaaaaaaaaatatgggggggaaagggggctttaaccccctaacctttcctccagaggtggggggcccccggcggggtaaacaccaaaagggtctttaaaaaaacctcttttttgaactaaacccccaaggggaatttcccctggggaagccccctttccctttaacaactttttccaagggagtggggaaacgcaaaaaaaaccctcttttctttgaccccaacccccccaggggagcgggccctaaaatcttctttcaactttgaggaggggaaaacacctcgcggcggggggttttaggcaaaacaatccgcgcaaactctctcccctttttaagcggagaggtggcgaggaaaccccaaaatttctctttcatggaaaagacagagagggggcccgccaccgatggggcggcccttcacagtctgcggccctctcgcaccaacaagctcctcggaaatcctccctggcgtacaatcggaacacggccgaaggtgtcagctcccgtcccggatccctcaccggatgagcggccgcagcgtcggcccacgagggcggcggcacgctacgacagcaccttcgccccggattgtgaagaaggcagcaaggtca

SEQ ID NO: 120487 - DNA, 842 bp, Arabidopsis thaliana columbia
  unsure (1)..(842): unsure at all n locations
acttctctccnccctctttccccccccctctccttctccccccccccccccccaccccccccccccccacaaaaaaactaagaccccaccccctttttcttttttttttcccacaattttttctttctactatccccgggttgtcggccccctctcttgggcccccctaaaactctactctacccgataacgcgttttttccttttccccccccccctctttttgttaccgctctttcttcttttcaaccccgcctcccccttctcctctttcttaaaacaccatctccccctttcttttatcccaacaccccccttctccccttccctcccccacccccactttcttcccccccccttctcaaaactttcctcaccaaatttactcttctctctcgctcttttcccctccctttccaaccaccccccctccccctcctttttttccttttccaccatattctttctttttccccaacgccctgtattccctctcctcccccaccaccccccctactccccccccattccccctctttcccctctctccaaaatacatttccccccttaccccccatccgaccaccccatctctttctacaaatccctcactatctattccccccccccttcccccntcccctcacctctcgtccttcctctctcttttcctcccccaaccccaccccccctccatttccacccttccccctccctcccttcccccccctcccctcctttctccttattactctaattctccgagcctcacactctctctatgatttgtcactccccctctatctcctcttatatcttcttcaccccgtctccgccacccct

SEQ ID NO: 120488 - DNA, 668 bp, Arabidopsis thaliana columbia
aaaaagaatttttctttctctggcaaaccccaacgggggtgttcctcccccacaatttctaagcgcgtccttttttaaagaaaaacctcccttttttcccggtgttcttttttttgtggattaaaacacccacatgtgtccctccccttttggaaaaacataaaaacacattttttcttgcagagggaaaaattcatcttcaacgggtgtgtaaatctcttatatccctgggaccctctgtgcgggggggcccctctcttttcattttttaaaatgtgcctccctcccccccccctttttgttttttccattttgttcaccaaaaagaggcgtcacccttttaaaaacccccccccttctctttgttttacaaaaaaaccctctcgttcctttttttaacacacgttggtgtttttgggcaccatcttctttagaacccttctccctcttgttttttcttaaagggtatttctcttttttttgtttataactttccccccggttgcgcgatcatcaagttctctgatatgaacctcctctccccccgcccgggatacaagcaccctcatcaccccgcgcggcccctgttttctctctttgttcacccgacgtcccgacttctgccctttatgtgtttctctacccggcttttgtccgcttctttgtcc

SEQ ID NO: 120489 - DNA, 314 bp, Arabidopsis thaliana columbia
tttttttttttttttttatcaaacactttattaaaactctcaagcttaagaattaaacatcgatgaacttataggtaaaattgataacaaactaggggatgaatcaaacctttattgctggggggttatggtctttctctacaacccctttttcttttaaaccaccttagggggatagcttgaataacctcaccaaatgcaatctaatagagggaacttaaattttcctggaggttcgacttaaaaaccaaccttaacttcctccattatgcttttctcggactgaacaaaaaatgagttttcccgaaacctcc

SEQ ID NO: 120490 - DNA, 813 bp, Arabidopsis thaliana columbia
  unsure (1)..(813): unsure at all n locations
gtaagcttggatcctctagagcgggcgggcttgctttttttttttattgaaaactctctatttcaggctcttgccggaccaatgaaagcagttaacattttatcaaccaaaatttggtttaaaaataaataccagcccgggggttttcaccgggatgtgggcctnaacgaggggggctaataaaaaaaaaggcgtttggatttaattttcttacctcctcccttttggttccggaaaaggaggggcaggggggtagcggganccacttcgacacctttcctaaaaagtggagccccttctttattaaaaatcccctggaggggagaacgccgtccccgcgccccttgttaaagctaggggccctatcccaaaaacccgggcccggggatgggccctccgattcacaggggggggcccagatgggacaccctggccgggataacccgggtcccccgggggggtttgtaccgggcggcctttttgagagggcgcagggggttgacctttacaggggccccaacgcgggggggggggggggggcgcccttttttctccccggcggaaaaatagccgaggggcgttgaagccaacaaaaaatccgaaacccctttggaagggacccttcgaccctcccaaggggagttggccccaggggggggggaaacacgcggggggggcccgttggggtaaggttcccagagggccggggtgaccaaaagagaacccccggggggtcccgggccggccctcttttgggggagggccggctgatgagggcttctcccgggggggtttttacttttgggggggggt

SEQ ID NO: 120491 - DNA, 278 bp, Arabidopsis thaliana columbia
ccctatactagactatgacaccgcatgcacgcgtacgtaagcttggatcctttagagcgggcggcgcttgttttttttttttttttttttttttagaacaacacgatttgcttcatacaatattaaacaataatttttggagccaacaatacgtaggaacacattacacaacaatttttttaaagaccgagccgaaaaggggatttcggtcgagggaggggcacccttccaccagcaataaactgaacaaacccgtttttttttgagcttaagaagcg

SEQ ID NO: 120492 - DNA, 865 bp, Arabidopsis thaliana columbia
  unsure (1)..(865): unsure at all n locations
gcatgcacgcgtacgtaagcttggatcctttagagcgggcggccggcggtttttattaaattttttntttttttttgggtttttttttttnttttttttttgaacggaaacaacctttttttataaggaaaccaaaattccctaaatcccaacccccccatgatattaaaagaaaatctgttcggaaggtggggaaaatccggcggaattttttccaccaataacctttttggggaaaaaaaggacgcagaaaaatttttaattttaggtcacccgtaaatttaaatttaagggggggaaataaaaaaccacaaagggggggggggaaaaagccccttggaccctcggatggcccccagggaaaaaaaaaattatcttctttggccaaaatggtctggaggaagggccccctcttgggtttggggaacccgggcccaaacacttgtcccccccaaaaaaacgggtttgttaggggggggagtgttgttttctcccccccgggggggggaacaacccggggcatcggggggggggaaaccccaccggggggggccaccccccccctcacaaaaaaatctccccccaggccacacccctgggagggaaaaaaaaatacccctctttttttgggccctttccgggggggggggagaccctaaaacccggcccacccggggaatggggccccaagcaaaggggggccccccccaaaaagaaacaagtgcccctccccccccatcctaaaagaaggggccggtaacaacccgggcgggggggagcgcggggcgaccccgaaatcccgaccggccccgggggccccactttcctaaagggggtataaaagcggcgaacagagaacaccccc

SEQ ID NO: 120493 - DNA, 509 bp, Arabidopsis thaliana columbia
  unsure (1)..(509): unsure at all n locations
ccccctcctaaacttgaatctctaaagcggcggcctcttttttttttttaaagaaacaaaataattggcttttataaaaacttctaggaaaataaacatgtccttgctaaaaccaccctttctattaccaagatgnccaccattttttaaccccaancacttttttttttcccnaaaaaggggggggaanaattttcccaccaaatcccaaaaaaaaaaaactcccccctcccgtttctttccaatctcccccagggggtttttcctctcaaaccgcgcttttgggggaaccctaaaacctttggcccaaggtctcaataaaaaaaagaacctttgtcaccacccccttgaaacaccccctagaaaaaaaaaagcttttcttttttacccccccccccccttttnttggtttgggacaccaaaagaaagtaaacaaccttcttaaaggtcctctaaacggctaacaatttcctttcccctttctttttcagccccccccccaatctttt

SEQ ID NO: 120494 - DNA, 256 bp, Arabidopsis thaliana columbia
  unsure (1)..(256): unsure at all n locations
ttttaattaaaattttnnnnnnttattttccacaataaacatcactgtgattcccatgggancaacaatgtccacaaataatgacaacattttttgtaaaaaaaaccaccttctctttattaataaaaagaatatttaatttcggggggggagggaaacccaaaaaggccctattaaaaaaaaccaaattttttgggaaatatttttttaaccccccctcttttaaaccccctttttattgcccttaaaacccccc

SEQ ID NO: 120495 - DNA, 617 bp, Arabidopsis thaliana columbia
ctccttttttttttttttttataaacaaagtgaatagaaaagagtttatcccctttatatccacaatgcattttttacccccccactaatgacaaataaccctttttcctccgaggcaaggggatcttaaaaaaaaaacttttcaccctcctaccctcacgacagttccttgcaaaatttgagggcaaaccataaaaaacccggtttttaaaaaaaaaaaaaaacccttttcaaaaggtcttaatttcccacaaacctccggtttaaatacattgttccccccaacttaggggtttaacccaaaaaactttttagggcccaacaaaaattttcccaaaaacaaacaatcctccctcaaatttctgcaaaccttacccggaggaaacccctccttaaaccttttataccggccggaatttatttctctatgccccccaccttttttaaaaaaaccgcgggaaaaccaatggagggtttcaaaaaccaaaaaccccctaaaggctaccccccccctccttatgaaaaaataaaaaaccccccgctcccaaattccaccccccgcccccttccttagggtataagcgcaaccgctacttcctaaatcccccccccccccc

SEQ ID NO: 120496 - DNA, 833 bp, Arabidopsis thaliana columbia
ctatgacctcgcatgcacgcgtacgtaagcttggatcctctagagcgggcgccctttttttttttttttttttttagacatcaaataattggataaaaaccttaagtcattagatggaaaacaagattcttggtcggaaactacaaaaagggatcgagcgaacaaacatattataaagatatgtaaaattcaaagggcggggggggttttggatgggggctccctcttttaatatctaaaaaaaaggcagcggggggtgggggttttctttttaagcaggagtttaaaatgtcttctccaacagggtttggggacatcggcataaatccttttcttgggatgggggctgaggggcgaattacccttccccaaaaccctgtttttggaacctggcctgctacctttttaagggtgcccatggtggccggcccaaggtggcttataactgaagaagggatttcttgcaatttttgggccgggggaaaccgctaacaccccttggtttccaaaaattgaagcttaaccctttagggggaaaaactgaaaaccacctccttctttaaggggttactttttaatggggggagggggagtacctcccttctttaaagagggcttagaaccctctttgaaaagtgattggggtttgggcacaccttttttttttttaaaggcctttcccgggggggggggtttagcctttttaaaaactcccctataatttggaaaaggggtttcggccgggggcccccgagattccggccggcccggggggcccatttccttaggggtttaaaggtgggaaatagactaactttcctggaaaattttcc

SEQ ID NO: 120497 - DNA, 341 bp, Arabidopsis thaliana columbia
  unsure (1)..(341): unsure at all n locations
gttcgtaagcttggatcctttagagcggggggccctgttttttttttttttttatatagaaagggagtttaatctttttactctggtgtcttcttgggtggccaactccttacaacgagctaaaggttggtaattcttttttttcataaaccggacaaagcaaaacatgtttttaaacccggaggacggacttttgcttgggccnggaagaaaaaatacaattttaggctggtgggaagggtccccccttcctgggttccaaaccccagggggacccatttttgtacgggatattaaaatcaaaacttaattcccaaacctcccccggaacttttttcttt

SEQ ID NO: 120498 - DNA, 420 bp, Arabidopsis thaliana columbia
  unsure (1)..(420): unsure at all n locations
gttttttttttttatgaaaattttcaatataagccgtaattaattagtgaaaaaaattattaaccaaaccccttttgttctaagtttagttcctttaacaatgaataaaccttaaataaaacttaaggggtgattttttttgtggtgaggggnaaccttcacgggggggaattaaaatttaataaatacttcgtggacccccccccccgttaaaaccgctttttaaaaaaaatccccaaggtgggttttncgcctccccttctttaataaccggaagggggccttttctttgtttcttttccacaaagagggtgtttggcggggttctccccctttaaaaaccctttcccacctaaaagagggggttttctttataaaaaaaaaaaggtggtccggtgttaaaccaaaacaaaacgcggt

SEQ ID NO: 120499 - DNA, 717 bp, Arabidopsis thaliana columbia
  unsure (1)..(717): unsure at all n locations
aactttgaaaccgcatgcacgcgtacgtaagcttggatcctctagagcggcggcgctgttttttttttttttataaattagggagggatgtgtaatacatacaggacattgataaaccatacacatagtcttaccataaaccattagggaaatgcagtccaaaaacaaggtttaaataacaaagccctttttatgcccagtggggggaanaacctcatgccaaanaccataaatatggacagcttaaccaagcttaacaacggtgggagctacaagcaggaacagtcccattcccttccaagaactctggtttaaagtggtgtttttcccaaccccatacccataaaagaatgtaagcttactttttccaaaccaatttctttttaacatttttggaagcaatcctacactcttttttggttcaataagacaaaccttttattactggggtgaataatccggttttaccaacttggtggtttccaccatttctttgaactaaccaagaaaaacccttttttacaaggggccaccaaaaaaaaatcttttttactaaaaccctcctgccatggtaaaaatcggggctgtggcctcctaataaaacataaagagtgggcgggttaggagtcctttatagggacggaggggccaacaagaggggggagagcacctttttttgaaaatgggggccccggctatcttctttttgggaataag

SEQ ID NO: 120500 - DNA, 258 bp, Arabidopsis thaliana columbia
tgccccgctagctgtcttaaggggcgcgggttttttatttttttttttttttttttttacaaacgggcaacttgttggttagacctccgaccacttacttttttaacttccggttaaaaagggggggggcccggggatccaaaaaaaactggccctcaagcctccttttcaaaaggccgttcttttaacctaaaatttgaccaccccttcggggggagaacaaccccaaaaaaacaattttctttttttctttttaaa

SEQ ID NO: 120501 - DNA, 332 bp, Arabidopsis thaliana columbia
  unsure (1)..(332): unsure at all n locations
ttacacccatcaccctcttagcttgatccttaagcgccgcctttttttttttattgaaaagcgtaggctaccctattttttacagaagattaatgtgtttgtacccatcacatcaccatcaccctcaattataaaataacattttattttgtcccttcccttaaaatcttctcctccgcagtnggcgatagagaaaagatatctcatacaaaaaaatttttttctcataaccacacttcttgcaaatggcaatggcttcttttttttacctaaattatttattaaaacacttccgtctcgagctgncatgggatttccttatttgccgtttc

SEQ ID NO: 120502 - DNA, 638 bp, Arabidopsis thaliana columbia
  unsure (1)..(638): unsure at all n locations
ctatgacgccgcatgcacgcgtacgtaagcttggatcctctagagcggccggccttgctttttttttttatttttttttattnttttttttnntttttttttttnttttttnttttttttnnaaaaccaaaaacacagcccgcttaatattatttaatggcccacaagcccccacacaaatttgggtggggtggaatccttccaccagaaggtgcgtgggnacanctcctncctcctcctgggataaaaatttaaaagggggggttttttaaaaaaccttttttaaaaacaaacaaagggggagggaacctatatccaccctctttttttttttatgagccggaagagccctcttttttttgtcccaggagaatggggatgcccccctctttttttttgttgcctccaatgcccaagggagatatttttttttaaacagggctttttttggaattttttccctccgggnggagtctaaaaaaaaaccccctcatagaagtttgttagaccccccctctttttattgggtttcccccccgtttcttttaattaaaaagggttttgtgagggttgtgttaaaacacaaagggggtgttttttatttggtggaggggggctctttccttctcttttttttt

SEQ ID NO: 120503 - DNA, 227 bp, Arabidopsis thaliana columbia
  unsure (1)..(227): unsure at all n locations
cttgatccttaacgcccccttttttttttttttttttctaatattctattaattaaactttaacgtttttgcattcccatcttaattcacctatacctacacttttctttaagtgtaacnaacaataaattttaacaaacccaccttttctttttcattttacctatctattccacactccccccataactttggaacacataatttttgcggttaaactaactaaa

SEQ ID NO: 120504 - DNA, 608 bp, Arabidopsis thaliana columbia
  unsure (1)..(608): unsure at all n locations
ggggaccccacggaagaccccatacagatggctagcacaaaatgtctcaccctctcacctaagtcgaaaccaagcacagacaacattcctccttnccccggggggtggggacacacccccgtggggccgcaaaatataagatgcgcacaagccccttccctcggccgcccgtcgtcacaacgcgggctgcgctccggagcgcccagcggcagcgtctggccccacgtggaagggcagagcaagaggatgttcgggagcgtgtgaccatacgcactcatccgcggcgaagggtcatagtagcaggcgcgggagagtcgttgagaggcgggtcggtagagtgcgagcgacgtgggaacaggagagaggacaagggcgagacgggaccgaagcacccgcgggcgggcgcgtctggcagcgcgcgcgcgagggtcagcgagcagacgggggccagggcagtcgcggtcgaacgaaggccgtgggggctgaggcgaggattaaaggggacgtagtgatatcgcgccacgcctgaatccgcgggccagactgctatatgtaagtgtagtggtgaggactcaacgccccggtcccgcggttcgggcgcgggatac

SEQ ID NO: 120505 - DNA, 379 bp, Arabidopsis thaliana columbia
  unsure (1)..(379): unsure at all n locations
ctatgacgccgcatgcacgcgtacgtaagcttggatcctctagagcgggcgcgctttttttttttttttttaatatccaaaaacaatatctattgaactcttataaaacataaacgtattaaacctatgatattagtatcttctcttttttattcaagagaggggaaacaaaaacacatggttataattaaagtctaaaagggggagtaaggaaggaagatcaaccccaggagtttaagggaacttaacatacacagaaaaaaaaccttattctcttgtgaaaaatcatcatcattatcatctcttaaacaaagggagctcntcttccttatcatcttcttggtaaatcttattaaacggggtaggaccagctggctca

SEQ ID NO: 120506 - DNA, 648 bp, Arabidopsis thaliana columbia
gccgccttcttttttttttttttttttttttttaggggtaaaaatcaatttcttcttttcataaaagagtatgaagcattacaaccttcgaggaggtcaaatcgacctcttaatccgtaaattcaataaattttaactttaagttgcctctgactacgaagggtaaataattccggtaaacaaggacccatcagatcattactttttcagaccacactcttggtaaaaattaacatccaattcttatttttaggttttaaaaacccaaaaaagatatggtaaatctttaccaaacttttttatttttgaccacccctatccctctttttaatttaatgtcccttttccactctggaagtttgcccctaaaacttttctattaaaaattttttaattccccctccatatattttaagagggtcccacaaaaatttttctttgatttaccacaccaaagcatttcaaaccttaaaaagggttccccctcctccctcttggttggagaacccccctataggccggcctcgcttttttcaaaatagcccctttttttttctataatattataaaagaaaaatttttttactccctcttcaagagcgtttgttattcttcccctacctttaacctctgaaaaaaaaaaatttc

SEQ ID NO: 120507 - DNA, 894 bp, Arabidopsis thaliana columbia
  unsure (1)..(894): unsure at all n locations
aaaaaaaaagnggggggcctattgtnacgcccttcctanagcttgacctngcatgcacgcgtacgtaagcttggatcctctagagcggccgccctggcgtttttttttttatttttttttttttttttttttttttttttttnggcaaaataatgcctcctaatctctcaataaagttttagcttgataaattcaaatggatgcgaaaactttcatgaatagagagatttagatcccttgtgtgggtttatttaagaatggatgaaaacaaacaaggtttttcaccatttccaaaaaacattggaaccccacttgtacttggccttgccttcgaattccaaaacattttcttttgagataaatggaactttttttttgttggcaaaattttggcaccccttgaatttctcagggaactttccacttcccaatttgacaatgaatgctctccaaaattttgctccccttgttgccaatctttttttttattaagtttttggtgggtttcctccctcgagggttttcgcaatgacccccgctttatcaaaaccaaaaccccaccagggaaaaaatttttctcttaaaaaacctggcttgacgttttctttaatcctcaactttttcccaaaacgcgttgacttttatcccaggttattattttttcttcttcccaaccccctttttatttcccaaccactttcttgtttcctttcccagcccaaccaaaattggttacttaaatggaaaccttatttatgcccccttaaaaattgttttttttttttttaaaattaaaacggccccgtgtcacccgaattccggccggcctcggggaccatttccctttggggctttaaacttggaaatgggatactttccttgaattgtccccac

SEQ ID NO: 120508 - DNA, 907 bp, Arabidopsis thaliana columbia
tgccccgtagtaagcttggatcctctagaggggcgggcttcttttttttttttataagcataaacttaagcaagattttattcctccgggaaaatattacatttttggaattttatttttctctagtattaaaaaagggaacaactaattatacggaaattccttaagggattaattttctataaagggggtagaggttaatcaagttggggggaaacctataaaaaaaaaatggccttcggggtgggccgccccaccacataaggcaaaaaatccctttccgccccccctttttaaagccctgccccttctcgcctgggatggatggggagaacaaaacccggaataatcgggagggtgccttcccaataaaaaaaaaaccggccccgaaaaaaagaaagccccgtggagaaaaaaatagggggcaaaaattaaaattaaaacggggggggaaacccgggaaaaattaacccaccaaaagccttccgggaagggaagagataaaaaaaaggccaacacgcatttggcaatttgaactttcaaaagcttttcccgggaacttctttttcatataccggccggggcgggtgggtccccccggtatttccggacccggtcccgggagggtaccaatctttcctttaggggggcgctttataagcctggcggaataatttggaatagcttttctctggggagaaattgtttccccccccaattccacacacatatacaaaccggaaatttaaagtgaaagccgcggggcgcccctataggggccctacctcccttttttcgcgtccccctcctcccccttctcaatgggaaaacttgggtcgcctctttttattaattccccacccgcggcgaggggttgttcttttggccgccctgtgttttttttttc

SEQ ID NO: 120509 - DNA, 481 bp, Arabidopsis thaliana columbia
ctataacacagcatgcacgcgtacgtaagcttggatcctctagagcggcgggcctgggtttttttttttgaccaaaagttcatccatgtgggggtcacataaacaagaaaacaattcaaatctatcaggtcgaaaccctaaaggttgaaacacatatcgggtgggcacacaggaaacgatcttacattcccgaatagctaaatggtgcaggtcaatgagattacccccagagaaaaaagaacgggcttggggcaccatcactttcttggcttctggttttctcgggttaacaccaggaagcctcttggagaaattttttattagggataatcacagggcattgttctccaggttcacaaaacattgtgtttggctaaagaaactggccctttataaagaatcattttttttaattcaactgggcccgagggtggcacttgcataaaaggcttccttcaaccccataaacaaaagtggacag

SEQ ID NO: 120510 - DNA, 347 bp, Arabidopsis thaliana columbia
aaattttttttaaacgggaaatttatattcccgggcaaccgcccccttgttcaaccctgaaattccgacccgttctttgaggcgtacattttttccttaagtgaatgcttttaaacctggcgaaacattggcataagcttctcctttaaaaaatttttccccttcacaattccacacaatacaaccgagaacttaaaggtaaagcctggggccccaaaggggacctacctcactttatggcctgccctccctccccttttcaagagaggacccttccccccctctcttaaaaaatccccccccccgggaaagcgcttttccttttgccccccgtttttttttttttc

SEQ ID NO: 120511 - DNA, 521 bp, Arabidopsis thaliana columbia
ctatgacgtcgcatgcacgcgtacgtaagcttggatcctctagagcgggcgccctttttttttttttttttttttttttaggatcaaagtctgttttgaataataaattttagtagttgtcaaacaagagtcataaagcatctcatactcatagagaaagagggatgaaatatccaaacacacgataagtcttagaagggggcatgatattcttcattaatttagggcataaagatagatagagggggaatcaactcagcagtagaacatgacacgcttcacattctctttcagagctgggaggggcctcactgcagcattgacattaggcccgcgtgtgcttctaccagccattccacctccacgtgccatgctcccactagccattgagccactgtctgatgtctctggctccatgtagaatcgagccctaaaagctgctagatgtgcataatatgcagggggaacaattgaaactgagcgtgggcatcttgcttacgggtaacataagttattgggca

SEQ ID NO: 120512 - DNA, 869 bp, Arabidopsis thaliana columbia
gcacgcgtacgtaagccttggatcctctagagcgggcggccttgtttttttttttttttaatgggaaatattattaatatcaatatgcaaataatgggacaaaaaacatttatttatttgcaatgggactgcaacagaaaataaattttatctttttaccaaacaaaattaatagttttttacaatgagggggggcatttaggagggccccggaaacaaaacttggaattcttccaatggatgggccttgggttccgggacgagcatccaaataaaagggaagagcttccctccgacaggcggaaatatgtaaaatgtgccttgggccctcccttaaacataaggggaaagcggtactcaccaacccccccactagccatggatggaatggtacaatggggcctggctgaaacttttatatttattcggaaagatctcagactatatgagcccaaggggggcccttcttctaccgaaggggaaatacttccgaaaggaaacccaaaaggttaaccaaaaacaaaattgggatcacattcaggaagcaccttcttttggctgggagcgggaagctaacctccaaaagggggggggccgggggcacttccaccagcagaaccataggaggggggctgtttccccattattcccaaaaaaaaaccacccaggtttggggtcccaacccccacatatattgtcccaggtttcttaaagcaccttttaaaaatgggtttgaaaaaggggaacccggtgcccaaaaagggtgataaacttaacccttccccccaagggggcgtgctttttctaaacagaagaacaaaatttatttttaacattttagaacccgaataaagggtaccgaaaaaaaa

SEQ ID NO: 120513 - DNA, 368 bp, Arabidopsis thaliana columbia
  unsure (1)..(368): unsure at all n locations
taagcttggatcctctagagcggcgcgcccttcctttttntttttattnttnttttttttttttttttttgaaactttctgcaacattaccctaaagcagcaaaactttggaaactgacaaaaattggaaatgattcacctttatattgtttcatttctaaaacaaaaaaaaagggtgagaatgttcaaaaaaagataactccaaagattttttcaaactaggaacaaaaaccttttcttataaaaatcatgtcggttgcttctacataaaaaggttaagttttaaccccttatatgtaaccttaaccttcccgcttgggggcctccccttcccaaaaacaaaaagaaaccttattcttccaattttg

SEQ ID NO: 120514 - DNA, 545 bp, Arabidopsis thaliana columbia
  unsure (1)..(545): unsure at all n locations
nnnnnnnnnnnnnnnnnnnnnnnnnnnnnnnnnnnnnnnnnnnnnnnnnnnnnnnnnnnnnnnnnnctttttttttttttttggtgagtataattttttgatggtgttgtgaaaacagtgagatcagtggcaaagctgatactatggttatacacacacactcaacaaaccagacaacccatatttgtaaattctcaatgcagttcaccgacaggagcttcgttgagccagaggaagtggatgaagtcatacaacttggcgctgacactaaccttataaggagtagggtttaatcttctcatatgatcgggtcgcatattttcgagctgtttgatgcaacgatttcttagctctttcaatggctctagctcttccctagcttcatctgcattgccacgccaataacatttcagaagctcttcaacgcgttgtggaaccacataagccctttttgattcattgaatggatgaagggaaagtaacctttcaccgacctttggagggggttcgttctctccagtcattatatcaacaagagggtaacc

SEQ ID NO: 120515 - DNA, 528 bp, Arabidopsis thaliana columbia
cgtagcttggatcctctagagcggccgccctttttttttttttttatttgctccccattacgagccaaaatcttgcccatctccagatcaccaacacactcacagaaagcctgaaatgaagttagaagtactcgtaatgggtcttgctgaccagaacttgcaagtccatgacaggggcgcaattgaagagtaagtgccccaacgacagaagagtagcttttctcaacagctttctttccaatttttccgccaccccgaaaaaaagcagtgagagcaaaaatggcagcttgaagaatatcatcttctacatgtgtttcaaaagaagagctagtattctctcccttatgtgaatcacttttaactaaagactacgattgagaatggtattaaagggtccatgaccaaactgaaagctccgtatgttgagagaaacataaaatgcatcttgcattggccatccccacccattctatttttgtcctttggcacgatgtcttttccagcagtggccaacactttattaaacac

SEQ ID NO: 120516 - DNA, 875 bp, Arabidopsis thaliana columbia
  unsure (1)..(875): unsure at all n locations
gactatgacctcgcatgcacgcgtacgtaagcttggatcctctagagcggcggcgctgtgtttttttttttttgggctttaaactctagttacatcttataaataaaaatgacaaatttgggagcagaaaaattcatcatttacgagttgaaaccatttatttgcataccctctcatttgctttctcccttcattccaaagaagccgatatgggactacgtcntccttctaataaaggttttaagccacctccttatttttctacatctgaacctacatgtgggttgtccgatccgggtcaaccccacatggtttgccggcggaaaccacgatcttatgggccaatttctatttgcttttgcaagcattttggagggaatatatactattactactgggctacttgcaattnggaattccacaaaatgtgtcatttttttttggccggaaaaagaaacccttttaaccccttccaacctttcacttttatttccttaaacctgaccttgatttttataaacctagccaccgctcgaattggttttattcctttaaattgggatttgacgataaccccaaaaccattttcttgttttataacaggataacatgcttaaatatttaactggcccctgatttcaaacaccatttacttaataggggaaggctaatctagttttaaccaaccttggaaaaacatatttgtttttaaggccggaaaccatacgggtcacaagaaaaaaccaattggtacaagtttaaccggaggcggttttttttgccggaaatgggtaaaccaccatttttttttgggagatcaaaagaacttttgtttccccgaaacaatgttctttcatttgcgcaaaaaaaaaaaa

SEQ ID NO: 120517 - DNA, 604 bp, Arabidopsis thaliana columbia
  unsure (1)..(604): unsure at all n locations
ctatattaagactatgacctcgcatgcacgcgtacgtaagcttggatcctctagagcggcgcgcccttcgtttttttttttttttttttttttttttttttttttttttttttttggggaaccaaaaatttttcattgaaagggccaaaaaaccaagaaaatttcagttttctatctatgaacaaagaaaaattgtaattttccaaaagggggggggtaactttttctgaactcatttctatgaatctcatgaaccgggtttttttttgttttggccgcgtttcattttccgtacgggtaaggaaaccggtttctccaagaaagaaacattgacgctgttccaaaaattggggttttggtggaaaaccgggaatttgttccacaaaacccattgtttttgggaaaaataagcccaataccgggaaaaaatggttccattccgggggggtttggtacactggggaaaaaatttggacccgagccaaccccccgcccgggcccggtttaaanttggcagggctcggttggaaacggggagaaaagtttccctcggccggaatattccttgaaacatagggatgggggaccaagggagcatttttaa

SEQ ID NO: 120518 - DNA, 528 bp, Arabidopsis thaliana columbia
  unsure (1)..(528): unsure at all n locations
ctatgacaccccatgcacgcgtacgtaagcttggatcctctagagcgggcggcctttttttttttttttttaataggagaaaaagcaatgaaagaagagcaaacacataagcattctttctcttgaccaaagttaaaaacacacaacantttgaaacatggacaaactagaatgtacttgaaagagcaaatgggaggatctaacggcggggagacagcgacttggagattcttggcaggaatcaacattgggaaggagggtcaaaggcgaggaaagaagcttataagagggagattagagagagaaccatgtaaaaacaaaccacaaagaatgtggttattacaggaagcaggggctctatgacagaaaccgcgctaggaactacatgcatcggtcccaggaatgggtgagtctccattggaagccaagtataaaacctcagctgaaccagccccacagcaaaaaccagtggggaagaagctggccagaacaaagagaggccaacccgaggcatttgcaaaaaagaac

SEQ ID NO: 120519 - DNA, 479 bp, Arabidopsis thaliana columbia
  unsure (1)..(479): unsure at all n locations
taagcttggatcctctagagcggccgccctttttttttttttttgttagaaaaggattatgataaataaatagtaacggtaaacattaacaagtgtatagagagtagtagtgtcataaatcaaagagttggtgaagcagaagagatcatctcaaaaatctgattatgtaaacttcgcgtggcttactacaacaccgcccgccggaaaaatgaccctcctttctgattgatcttcctccaaatttatttcatctccttcccaatctgttacctttcctccagcttcatgtacacatatgatcccaacagcatgatcccaccnactttattgttctctgagttttgcctcggagaaaaaaaactgatgctctgcccgaagctaccttcaaatacttgcccaaaccttccacaacatgtgggccaaaagaagaatctctttattttttaagtcccctgaaacattacttgcgtccaaaaaac

SEQ ID NO: 120520 - DNA, 549 bp, Arabidopsis thaliana columbia
  unsure (1)..(549): unsure at all n locations
ctatgacctcgcatgcacgcgtacgtaagcttggatcctctagagcggccgccctggggtttttttttttntttttttttttttttnttttttttttttttttttctgaacggaaacaacttttttttttaatgaaaccaaaattccttaaatctcaacccctccctgatttttaaaaaagaaagggtttctggaaagggggggaaatctccccaaaaatattttccaccaataaacttttttcggggaaaaaaggatgtaagtaaaantctttaattttagttttaccgtttaattttaattttaagggggggatttaaaaaatttacaaggggggggggggaaaaagccccttggatccttggatttaccccggggaaaagaaacagtttcttttttttgccccaattttttggggaaatggcccttttttggcttttggggacccctggccctaacccttcggggcgccgggggccaccccgggaattccgggaccggtccctggagggctcccaatttttccctataggggagccttttaaagct

SEQ ID NO: 120521 - DNA, 703 bp, Arabidopsis thaliana columbia
gctatgacctcgcatgcacgcgtacgtaagcttggatcctctagagcggccgccctttttttttttttttatgtttttacatttttgtgatagcaagtttgagaatgaacatcataaagatacaaagttacagatttttgttgtggaagcaaatactaaaaattacaaaggtacaggggtggctaaagatacacagacgcgggctgctctgacttctctgactagttaacaacatatctcttcagcgaggctggtggatgtttctcggagcagcaacaaccctctggttttcccatttcgctggctttttccgatacttagctggttccacaatcgatctcgggctcctgtttcacttgatttcttaaccatctcacccttctttccaaagccaaattcggagggggcttggaatacattctttcatacaatccttgatcaaactcacaacatcagtggcaaaaaaatcttccttttatcaaatcaaatgattcggaagaagatcagctacatgatttgacctccaacctttttatttgttccggggaaaaaaaacattcccgccctgcttcttgtgactgacccaatattaggggaccaagtcgaaattgtaacaattgccaccactccgggaaaaatcttccccttgccgacagttgcggaataaaaaagggccgcggggttaaaaaaaaacgttttctaa

SEQ ID NO: 120522 - DNA, 739 bp, Arabidopsis thaliana columbia
gctatgacgcccgcatgcacgcgtacgtaagcttggatcctctagagcgccggggccttgtgttttttttttttaaaactggaacattgaattaaactcaacaaattgggatgatttacataaagggtgtaaaaattgatacaaaatccaaagaatttgataatacatgaaaaattgggagtttctgggatacaaacgaccagagagggatgtaaataagaatccaattaacaaaaaagagccaattgatgaatgtttttttgtgcggatcaaaaaaagctcgaagcttttgaaagccttttctctggcttttcttggaggggttactcgggcctggggtaaagggagatgctcgttttgactcctatccactcacaagaggtgttggttggggtttttgaaaaatgagggtcggacccccgcacccgtttgaggttcgcgggttgaggccccgcttttccttttgttcacttgaagaggttggtcttacttcttggggtactcgcttttctcaaaacactggggagtgtggaagggtttcttctttctttaaattccttttctccgcgggttttcttgagagggtttccacaagaattccaatgctggattgggtttgaaggggagttgggtcttaaaacttccttttagagaatgttcacccgggcggagaagttatggggtgtggtcctaagtgattctcttagggttttgagagaggggccgcaccttttctggt

SEQ ID NO: 120523 - DNA, 329 bp, Arabidopsis thaliana columbia
ctatgaccccccatgcacgcgtacgtaagctttggatcctctagagcggccggccttttttttttttttttagcatattaatattctttttttcttcctcaactaaaataaagaatcagattctaatgcttaaagagatgtttaaatctcccacatgaaaaagatgctttcccaaaccaatcttcctctttccaatctatggggcgcactcagaactttacatatctctaaacataaacccaaccaccggttcttccctcttccccaatcgaaatcttgctgaaatcctaccaaatgctttcctcggcaatccgtgaattcgcccgcgg

SEQ ID NO: 120524 - DNA, 876 bp, Arabidopsis thaliana columbia
  unsure (1)..(876): unsure at all n locations
ctatgacaccccatgcacgcgtacgtaagcttggatcctctagagcggcgcgccttgcgtnttttttttttttttttttttntttttttttttttgcggcttctacaggtcttgtaggggcaaatctctattacacaaaaatgtcaaacgatgtggataggtcccgtaatctcaaatgactttggactcagttttttttatccggggggggaaaaccccaataatcccgtggaaaaaaccaattctcccaagggtgaattgggcccttcaccatttttcgacccaacagaattctggtttaaattaactacagcctctgctccaagtactcttctgaacctcatccgggatggggggtgtcccagacttgagcttatcacattccgttggagaggcctctgaactcatttctcagggcttgattctcggtcaaaaaactttttacttttttgggaggtggtccatttcggccgcttcccgcatcttaaacccctaacgggttcaccggtaaattggttccctttctggcccgtgagccccgttcatccctcactgggccccaggttgggaaaccctaagcccctcccgattttaaaataaccccgcgggctccccgtttttggggcaccaaccctgggttccaccagcgaccttgaaaatctggggaacaaactatggccaaggtcgggttataaataaccccgggagtgggcttctctattttataaaaaaacccccgggacatttttcctttaagaagcccccttcccctaacaaaaggcgttataccccttaccttttttggagccccttactttgccaaacgtgccctcaggccttggggggccaaaaaaggggggcccggagaaaaaaccc

SEQ ID NO: 120525 - DNA, 785 bp, Arabidopsis thaliana columbia
ctatgacgccgcatgcacgcgtacgtaagcttggatcctctagagcggccgcccttggtttttttttttttttttttttttttttttttttttttttttttttttttgggggaaaagggtctttcatttggggggataaaaagcatgaacccttccaaataaaactttacattggcggggaactcaaacaatttggttcaagggggcgggtttttcgggggggtactttgtaatgtatattaaaccccgacgatccgttttaaacgtaaaacaagcccgcatggtctgacaaatttgtttatcaaaaatagattcttaggcttagcgattaaaaaattttaaaccccccgaaaaacccaaataaatatgggcctttttaaataaaatgaaccggtttaggggaactctcccgggaaaaaaaactcatttttcccctggggggtcaagcttcccaaagaggttttcaaaaagggttaggccattttttgttgaatcggcgggttttaaagcctaatggccccacttagttcccaccaaaaaactctttcggggatttgcttttaaaaagctcttaaccccggagttttggcggcccaccctcccgggaggcggggtcccccgggatttcggccgggtcctgggggtaccagtttcccttaggggagtataaaaggtggggaaacagggacaaggggtccctgggaaattgttccccccaatcccccaaatagagcggagtaaagggaaccggggggccaaggggaccaccacatattgggggcccc

SEQ ID NO: 120526 - DNA, 478 bp, Arabidopsis thaliana columbia
cactatatatgagctatgacgccgcatgcacgcgtacgtaagcttggatcctctagagcggccgccctttgttttttttttttttttttttttttttttttttttgggaacccaaaagtcaaattcaataagctccaatgcattttgagcataaaataactctcatgaactacaaagaagggcgggagccaattgctaactccagtacatgatgggggagtaaactgtaggagggccaaaatgacaaaaacttaaaatctcaaagcaactaaggcaatagaacatatgaaacgtaaaaggaagggagacatctaatcgaacaggccgaaaccaagatctccatcactttcttctggggggttcgccttcttctcctccttagaagggggcagaggaggagcttctccaacaaaagaaggtgcggaaacaaacactggggcaccgcctccaccaccaccaggaccaacttttatgataa

SEQ ID NO: 120527 - DNA, 739 bp, Arabidopsis thaliana columbia
tctcgtaagactatgacctcgcatgcacgcgtacgtaagcttggatcctctagagcggccgcccttcgtttttttttttttttttttttttttttttttgtttttttattcttttttttttttttttttttttttttttttgggggcggggggggggggggaagagtccttttccaaaaagaaacaaaaaacccctcttttgaaggggggcgggtttaaaccgcccgcgtttttttaaaccaaaaccaacccccccccttttattacccccccgggagaacccccccccaaaaaacccccccctcataaacaaagtctccccccccccccggggggcgctccccctttaaaggggggggaacccagggggggggcccccccccccccccccccccgaaggggacccccctttaaaaataaatttgcgggggggcccccctctccctttcttcccacccttcaggagaaccccccccctccaacaatgaccccttttttacaacctgggggggccccctaggaaaaatttgggcggagaaaacccccccttatcttccccccccctcctttgcccccccctcccccccccggggggcccccccacaagttcccccctacctctttttaaacaacccccctccccgccggggggataatttttcttcctctcttttcccccccccgaaacaaaacacctcctcctccaaaagagccgcccacaaacccccacccccccccc

SEQ ID NO: 120528 - DNA, 562 bp, Arabidopsis thaliana columbia
  unsure (1)..(562): unsure at all n locations
gccctatattatgactatgacgccgcatgcacgcgtacgtaagcttggatcctctagagcgggcgcccttgttttttttttttgggggatactaaaagatagaaacgagaatatgaatatatgatggtaactaataaaagcatgaaagtttctgtgaagaatctctacgacctactcaaaacacaaagtctaagaaaacttatcgagggcggaaggcggtattttnntttcttcaaaccaaaaaaaaatattgggcggggggagttactaagagggcttcttttacggaatgcctaatggatgacccccactggccaccatcaaataatacaaacccccgtttaccaacacaaacaacaatggccgccaccccaaaatatacttcgacgtttttcaccctttttgtgtgaacccgggttagcctttgcccttgagtcaaaagaacctgacacttaacaccttggaaaccaaacccaaaggaacacttttgaagggggtgatttttttcttcctttaaaatcatatttgtgtggttgtttggcctccttgaatcgggaaggga

SEQ ID NO: 120529 - DNA, 595 bp, Arabidopsis thaliana columbia
  unsure (1)..(595): unsure at all n locations
gacctcgcatgcacgcgtacgtaagcttggatcctctagagcgggcgggcggggtttttttttttatttttnttttttttaaaagaacaaagctttgttttccaaaatgttttgcgttaagtgcaaaaaagattagacaacaatttacacggtggcgccggtgaatacaattttaatctaaattttttttacggggggggaaagatctggcgattcagtcttgacaaatttggagggagagagatcattcgattcccccttccttgagaaaggacttcttccttttcgagagggaacacagtcctaactttttcaccgcagagatttcattttttcaaactcattttccatcccatttacccaaagctcaatagcttgcttccttggcactaaccggaaagccaaagacctggattcngtgtttttctctttgggatccctaacccttaacaatggacttggattcaggttcttccatttggggaaacatcctggaattcccagggtaacgggggtgatactgccaacgggggttttttgttcctttttttttgcaagcaatctggtatgattaaagcgatgtgccgtttttttt

SEQ ID NO: 120530 - DNA, 844 bp, Arabidopsis thaliana columbia
  unsure (1)..(844): unsure at all n locations
gcacgcgtacgtaagcttggatcctctagagcggcggcgcttgtttttttttttagggntttttttttttttttttttgaaacgggatcacaaaatagtttttaaggatattaggtacccgtgtcgacattaagaacaaaatagaataacacttacaattacgtcccataatgatgacaggagctcaagggggggcaccatgaaaatcgtttatgaaccaaccttacttggaataaggaatggcagtttaaaagataaaaattactttttgggggggtgaagactccactttggcgggattacctccaagcaaaaagatatttttccttggggaggtaagggcggggcattcaaagcccaaaaccggggccgataacctttgtggggcgtaatttagccaccttttatgaggagtgttcgccacccaccggtgacaggcattttttaggggaacgaaccaagaagaggggggttaatagggtgggccctggggttaaaaaaaaaaaaaggagggggcccaaatttacaccctacgggggccggggaattcctgggtacggtatggtcgggcaaacgggggtttactttggaatgagggctaatttcaaggattcttttttttaacgggggggcttcgggaatataacaaggggcttttttgagaggttttttaatggggcacaatcggggggccgggccggggggggggcacaccgggatgggaaaagttagggagaagcaaaaacctgggggaccaacatttttcttcaagcaatacaccgtgggggatcacgggggcgggggaagggataagtggccaagatctggggggggggggcgaacc

SEQ ID NO: 120531 - DNA, 353 bp, Arabidopsis thaliana columbia
ctatgacgccgcatgcacgcgtacgtaagcttggatcctctagagcgggcgccctttctttttttttttttttatttatctttttgtgatgtgtaaaatagaaaaaaagaggtaaaaattgtatacagacactcccaaagggaaagttttaaaattaaaatataagctaccacagacaaattttttaatatttactctaatgaagagtaggaaacccggggatgactttacaaaaaaaaatattgtggcttaaatggccaaaacgtcatcgagacatctaaccttcatatggggagataaaggtttaccataagtctttgtcccggggcggagggcctttaaccaaaaactcc

SEQ ID NO: 120532 - DNA, 654 bp, Arabidopsis thaliana columbia
cgctttttttttttttttatctcattataagtctaatttccacctcaagattcaaattaagttgtcattcaatcacaaccggtcccaacttttacaatgagtgcttccgggacagttggacaaagcccctgcttgtttgactggtcaccaggggccggaggtttcacggtcctttcggggcatggctgacaaaatcacataggacatgccactttcgtttagctcttaccttaactccaaaacctcgggtaatacgaggccaggggcaactccccctgggaaagaagtctttttttccatggccatttcgggactcttagccctaacagtcccatggggaacttgggagccaaagggtaaatgctttgggtggacaagctgggtgcccatagaccattcctccggttaagattggaccagccttaccaaccggtctccccccccgtccccccggtgggggcggtggggccccggattacgcgcggcctggggcacccctttctttggggggattaggtggggacctggaatgcggtcctggaattgttccccccctcccactcccccggagcaagggggggcggggccagggaggaccctatagggccccccgcctttagggaacccgccccccttataatcgccgcggggggc

SEQ ID NO: 120533 - DNA, 637 bp, Arabidopsis thaliana columbia
  unsure (1)..(637): unsure at all n locations
cttgacgccgcatgcacgcgtacgtaagcttggatcctctagagcgggcgccctttttttttttttttttttttaagaagctatgaatatattaacacggggtcaccatcagaagcagcttgcaactgagaagcatactgtaaattccacaagatatcttcgaaggacggtcggcttaaagattcaggtgaaacacattgggggatcagagttatcactcttatcagtgatccgtttcgacaagtggcttgtactgtcggattcaccattcttctcctcccttcttcgctctccaacgatgccagttcgtctcgtagaaatgcttcttctcttgcggattcagatgggccaacgattgattgtagaagaatcaatccaaagctgntaacatcggcttctagccttgacatttgccatgattttgcgatttctgggttatggctgggtgcttcagagacaatggacaaaccttattcactcagcttcgcaaaccgatggtgggtaagcaaaacgtgggttagtcttgagtctattgctgaagaatccaggaatacctccgtgggaagaaaatgaacagcttttgcaacacctgggaaaacttatgcctctctggccaattatacccttacctgaactt

SEQ ID NO: 120534 - DNA, 767 bp, Arabidopsis thaliana columbia
ctatagttgagctatgacgccgcatgcacgcgtacgtaagcttggatcctctagagcgggcgccctttttttttttttttgattaaagaactctttttttagcataacatatctaaaaaacttatcttgagaatacagaacttctgaagcgagaattacaggtttgtccagctatactttgctacagaaatgtgaaaggctctttgatcaggggacttaatcgatccattgctctggcttcatgaactgcttgttgaaatcaaaccagccaatgccgtattttgcagccaatgagaccataatgtgatcaattcctttctccattaccttgaggccacacatgtaaacaagaggagtggctttcttgaacaactgccataactcgagctgcgattgcgccatacgaggccacatatacattgaccgctctttatcgggcgctgagcctctgcttatcgagtaatgcaccctgaagttccaggggcctctgctttatcttaaaaactcctttaggaaaaccaaaagctaggggttgggccaccagaaaacccaagctagccatgggcgtggaggactatggtgtcaaagacatcctccttagaagacctgatgggacattcctgcccttgggaagccgggggttttgaaaaaaggaggttctatgggtaagggcgtttaaaacaaacctacaaggtcgggaatcccggccgaattattgttaggggaaacctctagcgggggaggcccctgcccaaatttcttgcccg

SEQ ID NO: 120535 - DNA, 853 bp, Arabidopsis thaliana columbia
  unsure (1)..(853): unsure at all n locations
gcacgcgtacgtaagcttggatcctctagagcggccgcgctgcggtttttttttttttttttttttttttttttttttttttntttttttttttttttatattttttttttttttttttttntttttnaatnaaaataattcttcctccccgggaagggaaattttttaccccctttcataaacggaggagggcccccccgggcgcttttattaacacacccctttttttttttatgaaaaaaaccccattttttttcccccagggaaaatcccagaaaagggttttcaaaatcccaagggggggccttttccccaacccccccgccccgggaaaagatgggacccccccggcgccccaaaaaaaaacccgcncgcggcccccctttgtcccccaccccccccccccccggggcccccccccccccccccccttttcccccttttccaaaagaaggtcccccccgcgcgtggggcgccctgacacaaccccccccccaaggggaaaaaataggggaaaaaaacgccttnaataaaaacccgggttttatttccccctccccccccctcctccgggcgccccccacaaaaaagaaaaagaaccctcctctccgcgngagaaaccggggggagaagagaaatttggtggaaacacccccncccccccgcataatcacccccccagaaaccgtggggnaccacccaggcgtcctttccccggttaacccctcttagagtggtggggacccccccccctcaacncccgggctactcttcccccctctcaacgggcccccgccaaaaataaccccccgcggtgaatccctcccccccgggagcgcaccccccgcgacc

SEQ ID NO: 120536 - DNA, 445 bp, Arabidopsis thaliana columbia
cctatattaaactatgacgccgcatgcacgcgtacgtaagcttggatcctctagagcggccgccctttttttttttttttaagaaacataaaactctatcacccataagttttttcactacaatgaaccctgttttactacaatccattatcatcaacaagatgtaccagaaaagaaaaaaaacaagcttaccatgacttcatatgaacctgggcgtgaaagcgagcctcctaaactctgagaccaaaagcgggtcagagaactagactacacctactaagacaagtacattttgacatatacatcatagagctgctgcagatatccatcactgacgcctgtgcatacaagagacttacattatttcaaagtgaaactcgtatgccttcaacttttgcatcaccagttagttaaccacctgcctattatcagtggtgtctcggct

SEQ ID NO: 120537 - DNA, 244 bp, Arabidopsis thaliana columbia
  unsure (1)..(244): unsure at all n locations
ctatgacactccatgcacgcgtacgtaagcttggatcctctagagcggccggccttccttttttttatatttnttttttttttttaacaaagattttttcattcacaccttttttcgaaacagatgaaagggaacaacactgtttgccatttcctttctttnccgtggggaaggagctgaaaatacaaaatttatttccgcctttggtgggtgtcctaaaagagaagagggtctccactaaaaa

SEQ ID NO: 120538 - DNA, 861 bp, Arabidopsis thaliana columbia
  unsure (1)..(861): unsure at all n locations
ctatcttaaactatgacctcgcatgcacgcgtacgtaagcttggatcctctagagcgggcgccctttttttttttttttgaagatacataagtagaaattcatagaaatccgtaatgtgaacgacaatgtgaatttacaacagaccgaccaaataaccaacaaccccacacagggcttttactctaatttttctctttagttttttttgggggggggngacataacacagaaagaggcgtctttaaggcctccttttnggcatatataacttttcttatttattgataatcggaaaactctttttctttatcaataataaccttcttcctatgctccacactttttgagacttctgactctgtatatatatattatcagaatttcacaatggacaacatcttcctctctttttgccaacaagatgctggcactcacttattagcttgaaccaaaaccagtcgcacatggtttttaacacctctttattcacagaatgttcatacccgttgctgtnttttgggcctattgtttgttaagggaggggattttaaaaacatttgaacaatggcggggcgggccactgtttctctcgttctaaacgtccatatgggggacaaggggggattccggactgacctttctttaacccaaaccaaaatcgcctgggcggtgtggaaaaaaaacttttttcagcgcttggttttttaaaacaactttggtttcgggaaaccgttaatcgaacttaggattccaatgacggaggtttaggcccctttttttttacttggaaatatgtaaaagcccctgttaaaaaagctaggaaaacctggggataaaaattggggcggtcttatgaaaac

SEQ ID NO: 120539 - DNA, 848 bp, Arabidopsis thaliana columbia
  unsure (1)..(848): unsure at all n locations
cactatataanactatgacgtcgcatgcacgcgtacgtaagcttggatcctctagagcgggcgcccttcgtttttttttttttttttttttttttttttttttttttttttttttttttttttgggggggaatctttgaaagttttattgaaaaatattaaaccctggaaacatatataaccgggaaagaaccaagatttaattttggccaggggggctgccgtcaaattgggaatataattcccaaattcataaattttgggtgcggcccacccggagagggaacttttgttcaccacgcaagcataaatttctaaaaatctcttaaaaacagaacatggggacacatctaaattacatttattacataatgggcgagggatttaacccggaagtttaaattattggaaatatgacccaaacacctgcatatgggttttatggcataggcttgaaggaaaaaccggtaaaaggggccccggctgcaacgcaaaggggccgacccgtaatttaaaaagctggagggaagacaaaggaaatgccacgaggcggggagaatttttttgggttttccaacaccccccttggggggggaacccaccggtttttttttaactttttatagaaaaaaatccgttcttaaggggggggggaataccaggacaaaaaggttccccctttgtggcgctcgcccttccaagcttatttttaaccggcgaatcgggttctttggggcccctagaggagccaattgactgcccatttcccggaaggtttggcacttggccttggccaaaggtttaaaaggggggaagcggaaaaggaacccctcaatttccccctaaaaa

SEQ ID NO: 120540 - DNA, 430 bp, Arabidopsis thaliana columbia
cctccctcgcctcagaccccaacgccatgagatccattcacggcggacagttactataaatcgcatcctaacaacttattatattatcccccctaccaccccaccgaccctcttcttctcttcgggtgtggggcccccgccctccgctgtcccccaaaaaaaaaaacccaaaatcccgcgcccctcttctgctttttcaattcatgatacaacacctcagctgactatgcgacttaatacggattgccacatcgactaagtacccccccatgtctatctgcacaccactgatataaccctaaccagcgaccttcatgaattctaatgtcccgactaattgaaagcattgttatagactatccttactattactatctcactcgcaccgatctcgcaatcgtcccctagacaaacacctaattctctattt

SEQ ID NO: 120541 - DNA, 506 bp, Arabidopsis thaliana columbia
gtaccgtaagcttgggatcctctagagcggggggccttttttttttttttttcgtgaagatttatatcgcttatttagtagggaattccaaaacatattctcttaaggaatgtgcaataaaatatagggagaacagataaggtccctctccccgatataggatttttatttttcatattacgtggagagaaaatcaatgagttagatcacacaagaacggcatggattttcttctttctctggtgggggggagtaaaaaggctcaccttaatacaagtttttccaacgggatggatcacagttccacgggctggtttggattaaacttgaagatgaagcgcattgaaccacttgttctggttggaccggtgcaaatcccaagcttgtaataaaggaagttgggcaacccttttttagggcctaattttctatccaaatgtatcctccatttagcccgacaaccgttaaagagagcaggcccaggtccccaccggaaggggtccttt

SEQ ID NO: 120542 - DNA, 469 bp, Arabidopsis thaliana columbia
  unsure (1)..(469): unsure at all n locations
ctatgacctcgcatgcacgcgtacgtaagcttggatcctctagagcggccgcccttttttttttttttttttttaatccgcaacggtctcattacaaacataacagaagggtgaaaacggaacaacgcttttgatgatgatgtgtggtttttgtttcgagaagacatgccacaaggaacanaaccactgtgtctctctggtgggctgacaaacaatataagaagatcccggctctatgaagagaccggtgaaaaggggaagaaagaatcatgcggacttcaagaaccgcactcttttttcattcggctctggactgaccagctcgggaggacaaaatgatccccacgatgagaccgtatagagcaagagcttcagcgaaaatgagggataagattcttaccaacgaaaagctttggcctgtgagcattggccctgacaccagcatcgccaacgatacctattggccttt

SEQ ID NO: 120543 - DNA, 898 bp, Arabidopsis thaliana columbia
  unsure (1)..(898): unsure at all n locations
ccccctacctaagcttggatcctctagagcggggggcctctttttttttttttaaaaaaaaaactaatctttaattcatcttacaaaagagcgggaagcccacaaaaaaatgggcggggtttagggcccttttgtttttaagaggggtacctggaaacagcaaaaaaaaacttttttattttccctnaaagggctgtgcgaaaacactaaaaaatgttcttcgttaaataaaaaaggggcccctcaaactttaccaagacttggaagatgaaaaatccttcctcttcgctcttgggaaatttggaaaaacctttcccatctttcaaacacacccactttttccaaaggggtcccctcagggggataaaaaaatacctctcttttctttcctccctgggaaaaaaccctcaccttttttatttttgggctttaagccgcctagaaacgggtggccatatctttttttgtctttgtgtcttgacacacccccgagggcctccaaaacccttcctctggatttaaaaaacatttttcttctttcacccttagtttttttttaccctcccccaggaacctttaagaatccattttaaccttctctggggagagtttttgcctaaaaaaaaaaaatgacgagttttttatattcttttttagaaaactttcttggaggttggactatattcttaatttgaacaaatattttgggcatggggcccccatttttggggccactttttcttttttccactcttttaacacaaatatccctttgggagtgggcccgagggggccttacccccccgccttcactaaaaagggtgagtctttttcacccggaactcccctcggggggggttttttacccgtttttccaccacttatgggggagcggagg

SEQ ID NO: 120544 - DNA, 687 bp, Arabidopsis thaliana columbia
  unsure (1)..(687): unsure at all n locations
catgcacgcgtacgtaagcttggatcctctagagcgggcggcctccttttttttttttgaaaaaaacaaccactccttaattcctctacaaaagagcgcaaagcccacaaaaaaattggcggggtttaggggcctttttgtttttaggagggcacccggagacaaaaaaaaagactttgtattttctctcaaaagggcgttggagaacacaacaagggcgctcggaaaaataataaaccgccctaacgataacccagcttaacaagaagcataccttcttcccgtttagaaaaacgtgaaaaccttttccacttcgaggaacacccccctttccaatgggcccccccagggaaggaaaatatcctcgtttcttgccccccggagaaaaacccctacctctttaagtctggggcttttccgcgccggaacggtacacacttcttgtggtttcttgttctcccccaccggagggggcgcaaaacctcggcgttgcttcaaaagcttgtgtctctcccccccctcacttattntcactctcccgaaccataagaaacaattcgaccgctcggcggcagaagtctcccccacaacaaaaccccccccttacacctcccttttagagaattctgcgcacggcgctatcccgcgagtgacacacgctttgcgggaggacccacatacggagcg

SEQ ID NO: 120545 - DNA, 397 bp, Arabidopsis thaliana columbia
ggggaaaacaccccccgcgagagaagaaggaccgccccggaaaatacgggggggggggagagccgacaacaacaaaccgcagggcacggacaacgaagcgcaaaaaaggcacgaacaggagaaagaggaaacgaggcaggagggaggaagaggggaagggagaacgacgagacgccaccacagacgagcgcacaccgaggaaaggcagggaggacgacgagagagtttttttagcgggggggggggggacaagcgcggcggacgaacgaccaacagaaacacgacgccgcgggaagaagacggaggaagagcgcaaccacggacgagcgaaacagagggaagagaagagagaaacagcgacgaggcgcgaacggcaaccgaggcagagcgcggaaag

SEQ ID NO: 120546 - DNA, 516 bp, Arabidopsis thaliana columbia
  unsure (1)..(516): unsure at all n locations
aggaaccagccccgccgccgccccgcccccccccagagacacacacgcaggaaacaacagacccacccgacgagaagagaaaaaaacccctccaaacaangccgttgggacgaaaagaacaggggcgccagaaaaaaaaaaaaccccccgagcacagggaggcagacaccccccccacaaagaccgacaaagagaaaacgcgcaccgcaagcagaacaaagccaccgccgccaacacccacaccacgacgcacgcaacgagagcccgcgacaacagacacccaaccaccaaccgcaagaacacacaccacacaccaccaagcacacacaacagagaacaaaacacacagcaccacgcggcaccaccaacaacacacagcagaagcacgagccaaccaacaaacacaacagaacaagcaagcgcagaccaaggcaaaacgaacacaccacgagccgaacaccaagccgcgagcaaaaccacacaagaacaacacaaacagcaaccagaccaacaaga

SEQ ID NO: 120547 - DNA, 511 bp, Arabidopsis thaliana columbia
gcgccgaggacgggaggacagaacacgcgccgcggaaggagggaggcgcgcgcggaaagggacacggaagggcgagggagagaggagcaccgcgccgggggagcgcagacgcgcacgagggaacacgaggacaggaaggaacaggagggcgaccgcctttttttatcgagggggaggaggcggcgccggggcgaagacgggacggagggcacgctaggggggcaagggagcgcccggcgagagacgggcgcaggggccagacagcgacgaggggaggaagggaaagacgggaagacgcgcgcacaacccagaggcggcggggcaccacgcgacggcccggcgcgcactcagccacgcgagagcgggacgaggcccggacgggtgagaggcagttaaagaggaagaaagaaggacaaacaagacactcacaccggccggcgacacggcgcgcagaacccccacccgccaacaggacgcccgcccgagagcgaaggcgggagaaccaaacgaa

SEQ ID NO: 120548 - DNA, 446 bp, Arabidopsis thaliana columbia
  unsure (1)..(446): unsure at all n locations
cgggcgcctgaggaccggccgcctcccaggcggcatccgccgccaccgncgccaagggggggagagacaaggnggagaangaaaaaccgaccggttggaggacaacgccggaccccgaaaacaggggggaaaaaaactctctcctccaggggagcgaaaaaagggggggcaaaaaacccccaaaccggggggggggccccccaacgaatcccaggggggagacgccccgaacacccgnggctaggccccccaccccccgaaaaccaaacagggggggggggccccccaaaaaaaaaaaggggcggggggaaccacccacacaaaatcccccccaacaggaaagaaaaaaaaaaaatacccccaacccctccccgccggcccggggccccccccccccccccaccgaggggcccccggaccccccccaacgaaagacacgaaacccc

SEQ ID NO: 120549 - DNA, 540 bp, Arabidopsis thaliana columbia
  unsure (1)..(540): unsure at all n locations
ggggggggggggngccctggngngggggggggatccccccccannaaagnnnnggggnnaaagagggagaaaaaaaccagagaagcgaagccaccgggcccgcgacccctccaaggcgcgggcgagcaaagcacagcagaaggggggagggagaagggcccccccccccctaggcgttgggaaaacaacaaggggcgcagggaaaaaaaaaccccccgagggggagggggggccccccccacaaaagggcaccagggggcaggagaggagaacgacgacgcagacgaccacgcagcgaacgcaacaaagcaaaaaggaagagggggagacaacgaacgcaaagaccaagcgggagaaaaggagcacaacaagccgacgcgagggcacggagagcaaacccgacgagagaagaagggaagagaggagccacacgccgagggaagcgagcacaaaaacgagaggcgcagacaaagcaagagcgagaagcagaaacggaaaggaagcaagcgacggacgagcccgcagaagagcaaagaggaa

SEQ ID NO: 120550 - DNA, 435 bp, Arabidopsis thaliana columbia
actcgggcggggccggagactccggggggggaagcccggagggaaaccgccacaggggggggaaaagggggggcccaaagggaaacccccaaggaaaaaaaatgagccggcacccacccaacccaacaagggagggaacgaacaggccgcccctctcttgagaagacgggaccccccccgcgggcaaaagcgaaaaagcccccgcacgggcggggggggggccaaaagccaaagaggaaaccccaacaccaggaacggaacccccgccccacgcccaagccagagcgcccccgcagggcgcccgccagcccccaacggaaaggccaggggcacccccccaaagcacggaggggcgaccccggagccccacgagggcaaacaaccccaccccccaaaccgaagcagcaggcgaggcgaaccggacgccgcccaaga

SEQ ID NO: 120551 - DNA, 573 bp, Arabidopsis thaliana columbia
  unsure (1)..(573): unsure at all n locations
gggcgccggcgggggccgggccgcctcnncgggggggggcatcccgcccgaaaaaaaaaggggccggccaaggggccccacacccaccccaccaagggggagggagccccacaccccttaaaaaaagaaaaaaaggaaagggggcccccgggggaggggacaaaagaaccctcctaactgggatgttgggggaaaagggggcgcatggcccgcaaaaaaaaccccccaccccggggggggggagcccccccccgcaacaaggccccgcgacaggggggagaacacacagcgcggaaccaaagaagaagcgagacaacgcgggagcagccccccccgcagcaaccggacggagcagcgaaaaagcaaccacgaaaacaggagacggaaccgcgcaccgagaaggggacgaacgcgcggagcccgcgcgcgcccgaggcgaaggaggcgcaacacccacggcgccgggacacaacgcgagggcacgccagcacgggggggagacagcagcggagcacgggagcggagaccggcagggcggaggcagcagcggaagggggagggaggacgggggaa

SEQ ID NO: 120552 - DNA, 505 bp, Arabidopsis thaliana columbia
  unsure (1)..(505): unsure at all n locations
ggcgccngcagggaccgggccggtgnancgagggggacatcagggccgaantggnnnncaacnncggggggggnngacagggaagacaaaaaaggggggaaagagggggcggcgccctctccaaaaacgggaaaaaaagcccccacccggcgggggaggaaaaaagaaaaaaaaaaactcctctaactttgggactgcagagaaaaaaaaaggggggggggaaggagaaaaaacccccccccaggggggggggggggccccccccacaaggggggggcccccccccccgggaggggagaaaacccaccccgagggggcccccaccccccgcggacccccccccccaagccaaagaaaggaaaacagccgagacagggcaacccgccccctccgcgcgggaggcaacccaacctacaaaagcggcgcagaggagagagggggacaagaaagaacacccccgagagcgcccacgggccggggagggaacaccgacggcgcccggggg

SEQ ID NO: 120553 - DNA, 472 bp, Arabidopsis thaliana columbia
  unsure (1)..(472): unsure at all n locations
ggaaccaaaaaagggnagggggnggcggaggggncaaaaaaaaaacagggggattatcacaccccgaagaacccaaccagggaaagaaccccagaaaagaaccggcctcctcctacttgggatgtngggnnnncggggggggaggaaaaaaaaaaaacccccccnnaaaaaggaaagaccccccngaaaaaacaaacccccccaaaaaaagggggggggggaaaaaaaccgccacaccnccccgggggaaaaaaaaaaaagagaaaacggggcgcccgagggccaacaaacaccgcccccacaaaaacaacggagcgagacgagaaaaccaaacgccacaccaccgggcgcagaaaagagcaaccgccccccacgaacaaagggggacggggggcaaagccggaaagcccaagaggcaaacacagcccgggaaaagccccaaaggaagaccacacgaggagagcggcgaggc

SEQ ID NO: 120554 - DNA, 494 bp, Arabidopsis thaliana columbia
  unsure (1)..(494): unsure at all n locations
ccgcggacggagcngggacccctaagcttccggggggggggaaggccgggcgcaggaacacaaaacagaagagggggcgcggatcttgcattccaaaccatcaaatacagaggcagtggcgggtgcttttaaaaccacagccaaggccatatacataatggggcgcagggggagagaagccttttatattttggggtgggggggagcgcccccgggacggaaaaagaaacccccgggacagcaggggcccgacacagacaagaacgcacggcgaggaccagaagggggggggggggacggcaggggacgcccccgaaacggccccggaacgccaggagaggaaagcgggggggggaaaggaagaggcagaaacaagcggaagggggggggggcgcacacggggaaaaaacaagcgggggggggggggagacaaagggggcgcccaccggagacggggaggacaggaccccgagggaggcgcgggggggaccccc

SEQ ID NO: 120555 - DNA, 360 bp, Arabidopsis thaliana columbia
  unsure (1)..(360): unsure at all n locations
tgggacgcctgcaggtaccggtccggacttcccgggtcgacccaaccgtccgcaactctacacgcaattcatccaaggatcttgctggcgccattcgccaatatccatccccatcttcttcgatttctgagattcggncgaaaatcatcagatggggttacagaacgaagccagccctccctcttataccgcggaaaaaccnccaccggccagagaggactcccctcccccgggagggggccccccccccccaccagaaaaagaccctcgccaacgtcttcatcgttggcggcggcccgggggtctggggcctccccacgccctcaagcgaacccggaggcctcagggggggcccccccc

SEQ ID NO: 120556 - DNA, 546 bp, Arabidopsis thaliana columbia
  unsure (1)..(546): unsure at all n locations
gccccgggagggagaaaagnancaagggagcaaggagacccaacaagagacccgtgaaaacaccccccgcggcagaaaaaacaccggggggagagcagaaaagaaagcccctccaaaaaaaggagagggganaaagnggggggagacaccggggaaaaaaaaacccacaaccgaggggggggggganaacccccccggaaaacaaaggcgcacggagggggggagaaaaaaaaccgacaaagaggggggacgccccgcgagaggggggaaagggggaccgaaagcgaaaaagcgcgaagcgccggccgagaaaaaaacaaccccaaaaaggccgggagaagagaacaaccggggcgcggggggggagnaggggagaaccgcggggaaggaggaagggcggagaaaaagaccganaaaaacgaccaacaacagagagagagaggggcaacagcgaaaagaaaaagagcgggacagggggcggagcaggaagacaacggaggggcgggcgaaggagagacagggaaaaagaggggacagggcggagcg

SEQ ID NO: 120557 - DNA, 474 bp, Arabidopsis thaliana columbia
  unsure (1)..(474): unsure at all n locations
aaggaggaaagcggacaaacaacgcccacccccggagcaagaaaacaaaggaagggggaagtttagaacccccacaccctcaggggaagaacaaggaaaaaaggtngagggagcactcctcttttttgaggctggggaacaaaanaccggaccacaccccagaaaacccccccccaaggagggagggggggcccccccctcaagaaaacccaggagggagggccccccccacaaaggggggggaggaaggaggccgggggggggagatccccgcagccccaaaaaaccggagggcccacaaaaaagaaaacagcgagggggcgggccgaacccccgccgccggacgaaaaccagacgccatccacacagccccaccgcgggcgcgggggaaaacaacagggcgcgaccccaagaccacgcgggggccagagcggcccgcagagagggaaacaagcgccccaccccaacacaaga

SEQ ID NO: 120558 - DNA, 465 bp, Arabidopsis thaliana columbia
cggacgacgcggggggggcttttgaggggggggggaaaccgagaaagggaggagggaggaaagagagggaggaagaagaggaggtgcggaaggaatggagagagagagtgcggaggcagaggagagagggggggaggggaacctcacaagacaacggcggagagaggaggggcgggtttttttggagggggggcgggccggaagaggggaagagaggggagaggaggggcgggacgagcagaacgcgcgagacacgaggggcgggacgggaggagctagtaagagcgggacgcgcgcgcggagagagaaaagaacccgggggccacacatccacgagaacgaaaggaagaaagaaggaagagaagaggaaggggaaagagcacagaggccggggccaatacacaaggcagcacaagaaatgaggcacaactgcaaataaaggcacaaaagagaatcaaaaaacga

SEQ ID NO: 120559 - DNA, 455 bp, Arabidopsis thaliana columbia
  unsure (1)..(455): unsure at all n locations
gggggggggggggggggggcctccnggnnagagnngggggagccggccccaaaaaaaaangagcgcccggacacggggggaanagnaagcagcagcgccccgccgcgggccgcacagggggcgaccccttccagagaggaaacgcacgcgacgacggcgacacgcggagggggagacagagaaaaaaaccctcccccttttgggattgctgggagaacaacggaggggcggcagggggaaaaaaaacccccccagcatacgaggggggggggggcacccccccaagaacgaggcagcacggcggaggcagaggaggcacaagaagaggggcgggccgcccagcccagacgggcgcacgccagggccgcccgggcccaggggaagccacggcgggcgagcgggcgggccgccgacagacgcggcacaccgcggaggcaagccggccgcaacggcac

SEQ ID NO: 120560 - DNA, 487 bp, Arabidopsis thaliana columbia
  unsure (1)..(487): unsure at all n locations
ggagggggngggggggcccccgnnagagggggaccaccggaggagggggggggggggggggggnanngnnngggngaangagggcggaggacaggagcccccccaaagaggggcgggcgccgcacacgcgagagaaaggagcggaanccccctacaaaagggcgcgggnaagagagcagcggagaggcaaaaaaaccccccgccggggggggggggcccccccatgaaaaagaggccgaagcgacgaccccgaacggccaaccgggacgcggaccacccgcgggcggccccaacgacaaaccgcgcgcaccacgagaacagcgcacagacggccaacggccgaccacccgccggcgcacggcagacggcagaggcgagcggagcagcaggccgagaaaagcacgccgccacgacacggcacaaccggccaaccggccccgcacccgggcgaaaaccgagaccccaggcaaaaaccaacggcaaaagc

SEQ ID NO: 120561 - DNA, 464 bp, Arabidopsis thaliana columbia
  unsure (1)..(464): unsure at all n locations
ggggggaagaggggggagaaagaaaaacaaaagacgaaaacgacaagaagaagagaccccggagagagaaggcaacggacaccgacaagggagaaggagaggggggaagggggccccctcaaaaaaagggcggtgggagnagaaaaagacgcgaacacagagaagaaacccccacggcagggggggggggggacgccccccacaaaccagaggcgggaggagagaggggagagcgaagcgggggggcgaaagacagggagggcgaggcagaccgagggcaaaaagcccgggggggaggagggggggagggagggggaggggggcggagagaggaaggggagagggagaaagagcgagaggagaccgaggggacagagggcggcgaggggacgcgcggcggcgacgaaagcagacgcgcggagccgacgccagagggaggagacgaggagcccgacaagcgaccg

SEQ ID NO: 120562 - DNA, 338 bp, Arabidopsis thaliana columbia
ctaatctatcctaatacaacaataggacgctgtctccacacgcccagttgcggaccgcccggcccggcgccaccccgcgaagggtcttttttgtcaaggccatacgtcgaccaacccgccagatagtcgacgttttggcgctggcagcccccgaactacattcaaaaagacgacctcagggaccagaaacaggccagcccagggttaccgccacggctcaacagagcgagcggggccacgttccccggtagagcgtaggaatgaacacgttacctaggctgacgacacgcgccatcactcgaggcgaggcggcctgccctggcccccagaacccaaag

SEQ ID NO: 120563 - DNA, 483 bp, Arabidopsis thaliana columbia
  unsure (1)..(483): unsure at all n locations
cgaagaaacacggggannccaaccaggaaaacncagggggncacaacgnaccaagaccagcagaccaccgtctccanncagggcnnngaaggagaaagaagacncaccaaggacggcaggccccctcctaaattcggcggcggggagncccccccgccccaagaagaacaccccccaccgggggcgggaggggggcccccaccccaacgcgnaccccaaagaggaaaagacaaggacaggggggaggggaaaaaacaaaaaaacacccacccccaccgagaggggcgccggggaccccaaaaaaaaacccccccgggggggaagggggccncagacgcccgcagagaaaaacaaaggcggggagggaaaacaccccccccgaggaggcccggagacaaccaccggcacaagagaaaaacccagggggcgggcgggggcccgcggnaaaccaacgggggggggagcagggggggaagaccgccc

SEQ ID NO: 120564 - DNA, 631 bp, Arabidopsis thaliana columbia
  unsure (1)..(631): unsure at all n locations
ggggnggggggggggggggcgcccccgnaaaggaggggatccancccaaanaangggggnggaagagagggggganaaaaaaaaaagaaggagggaggggggggggagggaagccccccaaagaaaagaaacgacgcgcaggcggacaccagcaggggggaagggaaggcctccctccccctcgggggccgtggggaannaaaaaaggggcgccggcgacgaaaaaaaccccccccaacgcgggggggggggggggccccccccccgagaaaaacgcgcgcgcagcgagaccgagcaaccggcacggcgcggcgcccgccgaaacggggcgcgagggggcgccgcggcgcccgggccgcacggcgccggaccaagccgcacgcgcggcggcgcgcgcccgcgcgccgcgcggagagagaaagggcgcgcgcgaacgctgcgcgccccacacggcgcggccgccgccagcgacggccacgacagcggcgcgagccgccatcgcggggaagcacgccggcgcggcaggcgccgagcggcggcgcgccgaccaccacgcggcgcgcgcgccggccgcgcgggacgagacgcgccgcaggccgcgccccaggcgcacccagcggcgcgcgaaccg

SEQ ID NO: 120565 - DNA, 585 bp, Arabidopsis thaliana columbia
  unsure (1)..(585): unsure at all n locations
aaagggggggggggggggggcctttatgtaaccgcggcggggcttgtggggggaaacgcacgccggcgggggggnggaggcnnnagagcgttcggggggggggaaaagccnnngaaaanaaaaagngggggggaaaggggagaaaaggnnaaaaaagagggggaagggggggccaacggcngggggaaggaagctgttaacggggggcaaagnaccaaaggggaccccgaaacagagagcggggggcaaaagaattcctcctttggggggggggcaaggggaacaggggagaaccaaaagcgaagaacaccccccccaagagggggggcggggggaaacaccaaaagagggggggccccacccggagaacgggggggggaaaacggccgcccggcggacgacacgggangcgggaaagggaagacgggggcgcgccggggacgagggcaaaagacaaacaacccccgaaaaaacgaagaggcggcgcgggaaaaccgcgggggaccaaccccggaagaggcgcgacgcgccagcccacgcgcggggcacagcgggggaagcggacgggcgacgcaggcgaaaccg

SEQ ID NO: 120566 - DNA, 455 bp, Arabidopsis thaliana columbia
  unsure (1)..(455): unsure at all n locations
cgggacgcctgcggggaccgggccgccttccaggggggagcatccgcgcgggggttnggagaggngggaggggggacagacagaacaaacaaaccccggggaggaaaaacggaactcaccccgagaaccaaaacccaccccaaggggcaacaaacagagggggggaaaaaaatccctccttggtcgggcagtcggggaaacnagagggggggagggaggggaaaaaaaaacccccacaccgcgggggggcgggggggcccccccaaaagaaaaaaaacccacaaaaaaaagcgggcgccagcccccgccgaaggaacggaaaaaacccgcgcacgagaagggggggaggagggaaggaaacgaccacgactccagcgggggaccacccggcacccatcggcgagaaaagaaggagcggcccgagcagcagcgaaccccgccgcgagacccggggc

SEQ ID NO: 120567 - DNA, 510 bp, Arabidopsis thaliana columbia
  unsure (1)..(510): unsure at all n locations
cgcggcggagcgggaccacagagcgttgcccggggggaaagcccccnagnaaaaaaagaccgacaggggcaaagaccaccaaaaaacaacaagagaagacccgngaaaaccacccagccggcatcaaagaaggcggggcgcgcgaagaccccaccnncaaaggaagcaaaacaaaccgccccctcttgtgggcgcgggaangcnaggnaaagaaaacaagaggaaaacagcgccccccagggggggggcgggggccccccccccaagcaagngggccacaccccaaaaaagaggaagcgggggcgagcggcgcccccccgccaagaaaaaccaagggggggcgagaaagacaacacgaaagggggggaaccccacacaccggcgggggagaggggccccccccccccgaaaggagagagaaaaccccccgaaagaaccgcccggaacaaccacaacccgcccccgggaaaaccgggggagagggaaggggggggagcccacacccacccc

SEQ ID NO: 120568 - DNA, 634 bp, Arabidopsis thaliana columbia
  unsure (1)..(634): unsure at all n locations
gccgggcgccngcgggaccgggccccgaaacgggggggggaccagcggcagccaagagannggggacgcgggggcggagaaaaaacccccccccccccacccccggggggaggacctctttgtaggacccccaccccgggccccaggcggagggaggaaaaaaaagaaaaaaaaaatctcctccaaaaaaaggggctcgtagggacaaaaaacccggggggggggggggagggaaagaaaaacccccaccccgtgggggggggggggggggcccccccctgagggagaaaaagggcggtgggggagggagaaagaaaccaacgaccacgcccgcgccacaggcacggaggacgcgagcccgacaacggcccggcgagcccgccgggaggacaacggcggcgggagagccgccccccgcgcaccgcccgcgagagcagccacaaagggcgggcgcggagggcgggaggccgccgcgggcaggagcagagcgccgacgggcgaagcgcgggaggagcggagagacgacgcaggccccggcccgaggggccgcggccgcgcgcgcgtcgcgnacgagcgccaggcgggggcggcgacaggggcggcgcgccgggagaggaggggggggggacgggca

SEQ ID NO: 120569 - DNA, 467 bp, Arabidopsis thaliana columbia
ccccccccgagaggagggcaaccgcaacgatatacggggggggggggaaagccggcgagacacgacccaagaaccgaaaccgggcagcaaacgagagaaccacccacccacaacagaccgaccacgcagaaggccgaaagagagacctccacgcaagagagaacgaggaagaaacgaacacagcaagagcaggcagcaccccacgcgcaattttatttaggggggggggagaggccaaccgcggcgcacaagcaggaacaagacaaccccacagcaagagagaaccgagagccaacaaggcaaaggccaggaccaagagagaagccggaaacgaaggagacgcgaagcgaaaacaaaagcaaaaccaagacaaaaacaagaggaacacaaaggacgaggaacgaaagaaggagaagggcgaggcggaaaacaacgcgaagacaccgaccgggacggaacgcaaacga

SEQ ID NO: 120570 - DNA, 255 bp, Arabidopsis thaliana columbia
  unsure (1)..(255): unsure at all n locations
ggagaaaaacaacccccccgccaacaaccaaaagaccgcgaggcgggaggcgaccccctctagagggagaaccccccgcggaaggccacaccccgagaaccggggcgaaagccaacccgcccctcttttctttggggggggggggcccancccaacgcccggggcgcgggaacacgaaaaaaaccccacccccccgaggaggggagggggagagacccccccaagcggcccgcacacagcggagagagcgagcac

SEQ ID NO: 120571 - DNA, 482 bp, Arabidopsis thaliana columbia
  unsure (1)..(482): unsure at all n locations
gagcgttcgcccggggggggaaaaccccgaaaaaaagggcacngaaaanaccgagaaagacaaacacaaagaagggcaagagagaagcgaaccacccccaaaccccaatcttgcgggggacaaaaaaccaccacacacaagaacacaaagccgggagggcagcattttctttgggagaggcgaaggccaacccagaccaaccggaaagagggggcccacccccgggggaggggggggggggacaacaccccgacccaggcagaccaaagccggggaggaaaacacaccacccccaaaagggggcccccgaaaggggggcgaagggggggcacccncccccagggccacgcaagaggggaaaagagaagggggaaaccccccaaaccgngcgggggggggccggcgcacggccccccaccccaaaaaaaaacaacngaaaagaagggacgcaagacanaaagaacgccggggaaaccccgcac

SEQ ID NO: 120572 - DNA, 508 bp, Arabidopsis thaliana columbia
  unsure (1)..(508): unsure at all n locations
ccggacgcctgcgggaccgggccgcctacccagtggaccaccagcccgcgcgaaaaagaagaacaccggcggcggcaaattcccccaccccccgtgagcccaatagagagagaagaagagatgccgcccggagagagaggaggatgggagaggacccggnccaaactcctcccctgtggaggcagaggncnaccacgaggggccccaaccaaaaaaaaccccccacncccgggggggggggggccccccgagccggcgccccgggggggaccccaccaaaaggcccccaccgggggggaaaggaacgggagacaaccccggggcgccccccaggcggggggccagaacagaaccgcgggcccccacagagggggagcagccaggggggaggagaaaaaacagggccggggaggggcgccgggaacccagagaagggggccccccgggggggcaaacaaaaccacacgggaagaaaaggaaaagggcgggcccccccccacgcggcgaa

SEQ ID NO: 120573 - DNA, 429 bp, Arabidopsis thaliana columbia
agggggaaacgagagaatttacgcgcgggggggaaagccgaagaaaaagaaaaacacgccggcccagcggaaaaagaaccgcgcgcggcggaagggccgccgccaagaagagcaccaaaaagttcgataggacagaggaccacaccagaccgagaaaaaaggaaagcacggcgcgcggatttataattagggtgtgggagcggcgccgacgagaacagcaccaaaaaaaggggccccagaacgagggaggggcgggcaaaaacacaacagaaaccgagccaaacagaaaacccagaagaaccggacgagagggaaaagcaagaagaagacgagaacgaggaggaacgcggacgggcgaaaccgacgaaaagaagagggcgcgagcgaacgcagaaaggcaaaagaccgcagcacacacccacaccaaaa

SEQ ID NO: 120574 - DNA, 499 bp, Arabidopsis thaliana columbia
  unsure (1)..(499): unsure at all n locations
ccgggacgccngcagggaccggnccgcctttcccggggggaccagcgggnccgcnngaagaagnngaaanaacnaacagagangggggngcccgccccgccgngaaaccccaaaaagaacaagaaacgggaaangaagccgagaaaagggggggaaaacccaccccaagggatccctcctaaagagggccgacggcnaaaaaaaaaacccccaagggggagaacaaaacccccccagggggggagggggggaacgcccccctttacaccagggcccccaaaagaaaaaaaagccaaacaccagggggacccccccgcaccgaagaagccacagaaggagggagaaancggggggtgaaccccgcgcccaccgccaaccgggggagggggggcggcggcccaaccccaaacggcgcggcgaagaggggaaaagcggcaagaccccccagaacgggccagaagaaaggcggaacacccccaaggcggccccaaaaaaaaaa

SEQ ID NO: 120575 - DNA, 545 bp, Arabidopsis thaliana columbia
  unsure (1)..(545): unsure at all n locations
cgcctgcagggaccggnccggccttcccnggtncgacccatccgnccggaaaaacacacaccaaacaaaacagaacaaaaaacagagagagggaaaacggaaaccccnccagcgacaacaaatcttcacataaaccgacccgatgcaaagcgggggttaataggaaggccgcctcctccgtggggggggaagaaaacaggggggcgcccccgcaaacatcccagggtcggagggaaaacaccccccccgggtaagggacaagggacctcacttgggggaaaccccaagggcccccaggccggctcccagagggaactaaggccacaaggaaaaaggcggaagggaaagggggtggaaaaaaagagaagggaggggggaaaaggaaacccccccccaccaacgtgcaagccagaggggggagaggggtgggaaacgaaaacaaaaaaagggacgtagggggacaaatcccctgagggggccccccggggagccaaaaaacagaaaaccccagggaaacccccgcccagaggggggaaaccccgcgg

SEQ ID NO: 120576 - DNA, 208 bp, Arabidopsis thaliana columbia
gggcagggcgcgagggagggcagaggagcatgtttggggaaaacaaccccacgactagcgcaaacagaagggccgggcgcgcaagaggagcggtttatctttctgggagttgggggcaaaaccgccagggtaccggtgagaaagaaaaagcccccacgagggggcagggggccgcgcgcgcccgactagggcgggcggcgccgggggg

SEQ ID NO: 120577 - DNA, 531 bp, Arabidopsis thaliana columbia
  unsure (1)..(531): unsure at all n locations
gggggggggggggggggggnggagatttttgcgggggggggaaaagcccgtagaaaacaaaacaaggagagcgcgagggggcggcccgaggggagggggagggagaggagagggccgcggccggccggcgggacggggcgttcgagagggcgcgggagagacccggcggcggagacggagagagggggagcgcgagagcgggtctcataactttgggtgatggggccgaccaccgcggggcgcgcatatacaaaaaaaaaaacgccgcgcggagggggaggggcgggtggagaccccccaaaaaaaatcatagccaacgggatgacaggccagcgtgagacagaaagcggggcgcggcgtggagggcgtgagcgggacgcgggcgccaacggatgcagccggacaggcgggagggatgggaagagggacgggaggacgagagagcaaggacgcgacaagcaagaagagaccgagaagggcaagaatagcacggagggcaggcggagaggcggagaggggggcggcagcgcg

SEQ ID NO: 120578 - DNA, 535 bp, Arabidopsis thaliana columbia
  unsure (1)..(535): unsure at all n locations
ggacgcctgcagggaccgggccggcccaacccggggcgcccatccgtccgaaccaaaaggacaaccccagnacccacagcagcaaaagagacccgggcagcagcagcagcaaaagaaaccctgggcagcagcacccaaggccagattaaaacaggcacccccccccaaaacccctctctctatgccaggaagaggaaaaaggaccagaagaaccccccccccacacacccccgccggggaagaggggggcgcnccccccccaaaagaaaacccccacccccccgcggggggaaaaccccccgccccccaaccaaaaagagaaacgagggggnacaaagaagaaaaaaaaaagacagaaacgaagaaaacaaaaaaacccaacggagggggccgccgagaaaagaccaaaacccccccgccgcggcggagagcgaaaaaccccacgagaaccacaccaaaagacaaccggcggccggaagacaacacagggcgaagggagaacaccgaggcaacaacagagaagcccggggccaaa

SEQ ID NO: 120579 - DNA, 358 bp, Arabidopsis thaliana columbia
aagaagggaggaagggacaacggcggaaaaaaaaaccccccccgggggggggggggggccccccccacgaaacgaggcagcacgcaaggagaacaacagagaagcgcaggcccgaagacaacacaaacgcccacgggccccgcccaccgccacacccgcccaacaccagcacaaagagcaaacgggaccgccgaaaccacacccgcgaccgcccgccacaagcgacggacaaccgaaagaccaacaccaaccgccacccgccgcggagaaagacgacgcggccacacagcgaaaggacacgcaaccccaacaccagcgaaccggcagacccacagcccaaccgaccgaccacccaaaa

SEQ ID NO: 120580 - DNA, 556 bp, Arabidopsis thaliana columbia
  unsure (1)..(556): unsure at all n locations
ggggggggggggggttcctttccggggggggaaaaggccccggagnnnannnggnggggaggnngggggggggnggnggggaaagcagaaggagacgcgagggagggaggcaccgagagagagcactcttagggaagaagcagacacaaacgggagaacaagcgaaaagggggaccagaccacgtttctttttcagggggggggggaagaagaaaaaacgccaacggacggaaaaaaaaaacccccccacagaaagagggggggggccgcacccccccagcaagaacgcacgcaacaagaggaggaggaggaaaagaacgcgacccggaacacaggacgccgaaacgagagggaaacaggcggcgaggcaaggagagcggcaggacaaaaaaagaacgcagacgccggcaggccgagcgagaagagaacggacgcgaacgcagagcgagacggaaacgcagcagacgaccgaacgaaaaagaggagagcgacgacgcgcgccaagagaagggggaaagagaagaacgcgcgacaacgcaaaaccgcagcgcgacac

SEQ ID NO: 120581 - DNA, 444 bp, Arabidopsis thaliana columbia
  unsure (1)..(444): unsure at all n locations
ggggggggnnccccttaccggagggggggggaggcggcgcccaaaaaaaannnnaagaaaagagagggggggcagaacaacacaaccaaccagcaaggcgccacccgaggcaagacactcctaccgcggaaaggcaccagagacaaacgacgacacgaacaccaagacagcaaagaaacatccctccaaatctaggaatgaaagggaaaancacagaaggcggcgaagagaaaaaaaaaacccccccaggcggggggggggggggccccccccaaagaagaggcacccccccaaggagagaaaaggaaggaaacggacagacaacagaacgaaacacaacacagagagggaccaacgagacaaacccgcagacacagcgacggggcgcgcacagacacagcagcacacaccaagacacacgcagaaacagaaaagcacccacag

SEQ ID NO: 120582 - DNA, 470 bp, Arabidopsis thaliana columbia
  unsure (1)..(470): unsure at all n locations
cgggcgcctgcagaccggccggctcccaagggccagcccccccaccggcggaaaagggaaacnctcaaaacccccccaaaccaccacgccccactacaaaaccaagcgcccccaacgaacggcggcccccccagcctcctccccaaaagcgtgaaccaaaagcaagccgccgaaaaaacccccagagaggagggggagcccccccnngcngggacaaacnnnggggagccgccaagcaagggccagaaaaaccaacacaaaaacagggaccacacgccccgccgaccagaaaccgacaccaaaacaaaaagaagcgcaaaaacccccccaccccaaccaaaaaaacaggcaaacccgaaacacaacaccacacggacacaaaccccccgcagcgcgcagacacccccaaagaccacacagcgaacagcagcaggcagacggacagaaccaaacaaaacaaacaaaacgaa

SEQ ID NO: 120583 - DNA, 552 bp, Arabidopsis thaliana columbia
  unsure (1)..(552): unsure at all n locations
cgcctgcagggaccgggccgctanaccggggncgccatccccgccggggaaaaagagaacagcngaggggggcnccncagagaggggaccagaaggccacggnnngagaaacgaaaaacaggcaggaggagggaaagccggcccgggacaagaaaaaacgagaaaacccctccccgagggacagatgggaanccagggagagggggtccagggaaaagccccccactgaggggggggggagcccccccccggggggaacaagagggggggaggggagcggaaagggaaaagaaaagaaaagaaacatctcaccccccaaagaaaaggggggggcggggagaaaacaaagaaacgggcggaagaaagggaaacagcgggagacaccggaggggggcgaccccccaggcacggcgcagagcggagaaacggaagagagcaaccggggacgcccctccccgcaaaacacgacaacgggcaggagagacacaaaagatcccaacacccaaaaacaacaacccccgcgcaagcacaggccgggggggggagacgcac

SEQ ID NO: 120584 - DNA, 244 bp, Arabidopsis thaliana columbia
  unsure (1)..(244): unsure at all n locations
aaagaacaacacggcgggagacaccccccaacaagagagacaacggaagggcagagacagacacaaggaaggagagaaaaagncaccctcaaaaaacaggaccgccngggaaanacacaaaagcccgagcaaaaaaaaaaaacccccccgngccggggggggggggggggcccccccccccgaacggcgccgccgacagggacgaacggcaacgacccagcccaacaagcacaccgccccaaag

SEQ ID NO: 120585 - DNA, 460 bp, Arabidopsis thaliana columbia
  unsure (1)..(460): unsure at all n locations
acgcgcagcgacgaggcgcccaccaggtgaacgcggcggaccaaggcagccgcgaaaacacaccccagacaagaaagccgaagactatttttttaccaagagggggggggacccccccgaaagcgcgagacagcaggaaaaaaaagcccccggggggtggaggaaaggaaagacccccccgcgcgctgacgagaggagcggaagcctcccccccgaaaaagggacacgcaacggaagnaacgaaacgaccgcatcgcccccgccgcggcacgaagacgccagcggccacccacacccccggcggcccccccgaccggcaccgccccgggcgcccgcccatcccccggacggcgagaccaacccaacacagcgccgcgagactaccgcacaccaacaccccgcaacacaccacaccgacccgcgaacgcgcgctatacacccgacgaggacgaggacacag

SEQ ID NO: 120586 - DNA, 385 bp, Arabidopsis thaliana columbia
ggagaaaaaaagaagaggggggaaagagggagggaagaggaaagagggggggggagggaggaggggttttagggagaaagaaaggagagaggagaggggggagagagaggaacttttttttttggggtgggaaagaaaaagatagatagtaaaaaaagatttggagagagagaggaggataggaggatgtagatagaaagaaataataaagagatagtttaggtgtagatttgtgtagataagagagagggtagaatagaatgggtgggtatggattgggatatggggaaagaatagtagttatatagtgaaatagggaaagagaattttaatgtgaaggagtaggttggagagtggtgtgggataagtgggtttatttggaaat

SEQ ID NO: 120587 - DNA, 375 bp, Arabidopsis thaliana columbia
  unsure (1)..(375): unsure at all n locations
gagaaaaaagaaggcaccagcgcgcgaacacacaggggggagggaaagagggggaaggacgcccgctacacaaaaaggggcgccgggggaaanaaaacggggggccnccagcgagaaaaaacccccccggggggggggggggggggcccaccccaggaaagggggcccccgggagaggggggagagagaggggcagcgggcgacgcgaccgggacagcggaccgggcagccgcggggccgggcgcgcaggccggcgcgccaggagaggcgagcgcaccgcgggcgcaggccggggagggcggcgggcgcacgggggaccgacaacgacaggaccgcggacgagcgaaacgcgaaggcgccaggcagcgagcgcca

SEQ ID NO: 120588 - DNA, 473 bp, Arabidopsis thaliana columbia
  unsure (1)..(473): unsure at all n locations
ccgggacgcctgcagggaccgggccggcttacccggggggacccatccggccgagcccaaccgancnnnagagggggggggaaaaagccaaaagagggcgccacgaccccgcccaaagaagattaacaaaaacgcggggccaagccggggcaaaacccaggcgagaaaaaccctaccctcgcggtccgggggcggggaaaaaanggcggggggagaaacaaacaaaaagccccccgacccaaggggggggggggccctccaaagaaaaaccccccccccacacccccaataaaggaaaggggggcccccacaccccccccccggaaaaagaggggggcgcggccccaaccgcggggcgggaaaaaaagaaacacccaccccccgccccccccccgcagaaaaagggagaagggggggccccctccccgccggggcaaagaaagagggccaccccggccgtaaaaaaacgggga

SEQ ID NO: 120589 - DNA, 530 bp, Arabidopsis thaliana columbia
  unsure (1)..(530): unsure at all n locations
cgggacgcctgcagggaccgggccgctantccgaggggggcatcacgtccgctttcatccataaacatctatggggctcaacggaaactggaacccggcgaaccctaaatcgccatctttatcatgggcaaaacgaatctccgataatataacaaatagcgtacacaaaacctcctcctcccaggggccgtggggcgggaggacaaaaaggaacgaacaaaaccccccccggcggggagggggggggccccccagccaggcgggaccctcagggggggagcccgcgggggcgggaaacagaagctgaaaccccaaaaaaggggggggaaaccccgagaaaaaaaaaccgaaaaagacgcccggaaaaccgccaaacccggggggcgggggagaaaaggcggggcaaaagggccccggcaccaacagagggggggggggaaaggggggggaaaaaaaccgaccacccccggggagcgccggggggggggcccagcaggggaacacaacacaagaaaacgggggaggaggca

SEQ ID NO: 120590 - DNA, 450 bp, Arabidopsis thaliana columbia
  unsure (1)..(450): unsure at all n locations
ccggcccgcccgcagggaccgggcccgcctaacccagggggggccagcgngnncnacagaannaaaaacccacaaagggggggcaacaccccacaaccaaaacggaaaagagagggcggaaagcacaaaacaagaccccacggccggggaaagnagnaatcccccaaaaaccgaagccgcccccccccctcgatcccggggaagctcggcaaaaanncacccagaaacacccgggaaaaaagaaccccccccttgggggggggggcggggcacccccacaaaaaaacgggaggggccacgccgaggagaaaaggggcgccccgggcgcacaaaaaaaacaaccggcgccgcaaaaagggggccacccggacgagagccaacgccacaataaaccacgccccaaccaacagggcgggggcggccacaccaccgacgcccgaaaacacgcac

SEQ ID NO: 120591 - DNA, 329 bp, Arabidopsis thaliana columbia
  unsure (1)..(329): unsure at all n locations
ccgggacgccngcaggnaccgggcccctaacccggggggcacgcgccccgaagggcaaacacnnnggggagagaacaaaaangggagcaaggcaaagaagccaaaacccccccccgagnganggagcnnaaacacaaagagagaaaaaaccccccgncctctcnttntgaggaggcggnngacccnggggaaacccgcaaacaacaaccccaaaagaggggaggaggaacccccacnaaccccaaggagggggaaagaaccacacccacccagggacaaggaaaaaaaaaaaaaggaaaagccccgcaaaacaaaccccccacccccaa

SEQ ID NO: 120592 - DNA, 504 bp, Arabidopsis thaliana columbia
  unsure (1)..(504): unsure at all n locations
gccgggcgccgcggaccggcccctanccggggggcatcccgccgggctnnaggaccancaaggggcacgaancggggagccacaaggggcgcgnaacaagtttctacnaaagaaagagacgggggagcccccaccggacgggaacctctcctctcctctaagggtggnaaagaactngggctataacgggaaaaacaccccccaaaaggggggggggagaccccaccaaaaaggaggccgcaagggaaacggcctgaaagggaaggctctataaaaaggccaagggccagcagcagcaggaaacatggcgcgggggaagaaaaaacggaaggggggcgggtttccacccgggaacaaaaagggagagcaaaaaaagaaaggggggggaggcaccgggagggggatgagaaaagaaaccacgcggaggggaacaaaaacaggaaaaaagagaagaagctcgggggggaaccaaaaacaacaccggaaggggggggaaaaaaaaaa

SEQ ID NO: 120593 - DNA, 425 bp, Arabidopsis thaliana columbia
  unsure (1)..(425): unsure at all n locations
cgaaaaaaaaaaaaaaaaaagaggggggncaaacgggcnncgncncggcgnnggagaaagacccaacacttttttggggagaaggncgcganacaanncaaccggggcgccgggcaaaaannctctctcgtcccttgggncgtagannnngacgggggaanaaagaaggagaaaacgcccangacggggggggggggggacccccacccagaagcggccgcagaagggggggaacacaaaaagggccgaaaaaacacgcgcgaacgacccggggggagaaagggccaaaaccgggaaagaaagggggggcaaaaacacccccgggggaggggccaaaggggggaaaaacacaggggagaaagagagggcgcccgccccagaaaaagggggaacacaaaacagaaaagaggggccaggggggggaa

SEQ ID NO: 120594 - DNA, 490 bp, Arabidopsis thaliana columbia
  unsure (1)..(490): unsure at all n locations
aaaaaanannaannaaaaaaaagggggacaaacaaacaaaggcgcacgagccgcgccgcgcgcccgagcacgctccttcaaaagaaccgggccacaaagaaagccgaagagcgncgcggcgcagaccgaggaaaaaaaaccctccctcacgcgggaaatgaaagggcaancaaaaaggggggggncggcaaaaaaaaaaaccccccccgggcggggggggggggggcgcccccccaccccgcgtcgggcgcgcgggggagacaaagagcaccaccccccggcggggggaggcgagcgggccggcggcgcgcgccgacggggccccgcggaagggccgggggcagcccccagaggggaccgagaagacaaggacgccgcacgacgcagcggacggcgggcaggccagacgccgacagacggaggacgcgcggcgagcacggggcggccgggagcggagcgggcgggccgcgcagggggaggcgcagagagg

SEQ ID NO: 120595 - DNA, 524 bp, Arabidopsis thaliana columbia
  unsure (1)..(524): unsure at all n locations
gctgggacgcctgcaggtaccggtccgctattcccgggtgcgcaccagcgtccgactgagctctgtttttgtttttaccgcagatcgtttcgagtctctttaatctttggcgggttccgttaaaaaaaaaatggcctcttctagattccaatctgggggngggcccancnctttcctcnccctcttgggggggngccaccgaaaggattaaagacgcctgtcttccccccccctcccggtgtgtagggccacctctctggggggtcttgactttcttcttcccttaaggggcccattggttggaccccttactggacctttgatggcccaaaaacccaagggggttttatccggggggcggggggggaccccttggggagctgttttctttaaaaaagcttggaccctctctggtttttagaaaaaaaaaggaccccgggggggtccccccctccttgagggggcccttgaaccccaaaaaggggaaccctgggccgggaacaaatggccccccttttttaggg

SEQ ID NO: 120596 - DNA, 552 bp, Arabidopsis thaliana columbia
  unsure (1)..(552): unsure at all n locations
cggggcgccngcagggaccgggcccctancgcgggggggaaccgcggccgaaaaaaaaaaaccagcgcacaggaaggaaagcaaagnngggaagaaaaaggggaggggccccaaagagccgcgggggaggcaaaaaacaacaagaagagggcaggagcccgccggggaacacaccctccaaaaacgagagcggaanaaangggggacggacccagcggcaaccaacncccccgggcggggggggggggcaaggcccccnaaagaaaggcgcccaccacaaaaaangcccacccgcgcgccaaaagaagggcgccgggaaaaccagaagaaaagggggaaagaagaagagaggggggggcgaagaaaaaaaaaaagaggggggaaaaggaaaaaccccgggagggggaagaggcccccaaaacccaaagagagggggggccgcgccccaccaaagagaggggccccccccggacccgccagggggggggggagggggcaaagaaaagaaaaaaaaggaaggggagaacgccaccaacacccggagagagaggg

SEQ ID NO: 120597 - DNA, 506 bp, Arabidopsis thaliana columbia
  unsure (1)..(506): unsure at all n locations
ggggggggggaaagccgggnnaaaaaaaanaaaaaaacgaaagggggggggagggaggaggagaacgggggcgggggggagggggagggggcgggaggggccgtttgtggggcgcggacgcagagcgagcggcgaggagagggcggggcgggaaacaggagggattaaataatcgggcacgttggggccccacaagggggggggagccggaagaaaaagaaaccccccccggggagggagggggggggcccacccacccggcaaagcacccggagcggcgggaaaggaggcaaggggcgcggcgggcgccccggccgagcgagggcgcgcgagggagagggcgggaggggcgcgccccgacgacacgagtcgggagaacgagaaaggcgcggaggcgagccggacggagcgagacggcggggcggaccgggagaggaggagggcgacgaagcgccgcggacccacgcgcagcgggccgaagagcggcggagcagaagcgcgccgag

SEQ ID NO: 120598 - DNA, 455 bp, Arabidopsis thaliana columbia
  unsure (1)..(455): unsure at all n locations
aaaccgaacagaacagggccnnnnaaaaagggggcgggcggcccacgcaaaaacaacagaaagcgaggaccatcaaaaggggatccaaaagccactacagaaacaaaggaacgggggagcaggaaaaactcttcttaagcagatgggcccccaacagaggaagtaggaaacgggagcccgccccccctcaacgggggggggggaccccccaaatgggaaaccccccaggggcctcgtaaagggcgaagggaaggggggacaggaccaaaaaacccccgaagaccaccgggcggagaggggcccacggaaaaaaagcaccccaaaaaccaccccgggggggggggagcccaggggcccgccaaaggcccacacaaacccaaaaacccaacgaaccccgcaaaccgcccgaccccaaaccaaaaaaaaaccccccgaagggccgccccgccaaagga

SEQ ID NO: 120599 - DNA, 525 bp, Arabidopsis thaliana columbia
  unsure (1)..(525): unsure at all n locations
ggcgcctgcagggaccggnccgcttttcccggggcgccatcccgnccgggcttctgctaaaancgcgaaagaganatccnacgaancnccacaagngcgaannncgaacggagcttctattccatggcgaccaacggagagaaggtcacggctacgggggggaaaggctcgttgtctntcggggggggaaaacccnaagaaaaggggggaccacaacaccaccgagggagagcgggcggacaaccccccgaaggagaagccaaggganncncagacncgggggaaaaaaaagaaaaaaaccgccccaaagggaacgggaccgacggccgggggaagaccccggggggaaaccccgccgggcgaggaaagccaaaaaaaagacccccccccgccaaaaggcgcggggccccggggaaaccgacccgaagagagaaaacccaacccccgggccgaaaagggggggaccggacccagaacaggggggaaagggccaaaggcgaacaaaaaaagcagaggaagggggcg

SEQ ID NO: 120600 - DNA, 448 bp, Arabidopsis thaliana columbia
  unsure (1)..(448): unsure at all n locations
cggggacgcctgcagggaccggnccgcttttcccggnnggacatcacggccggattttcctccgctctctcacagggatcaccaacaagaatcatgacgagctctgttagagagaagattttaagaccaacgggatttggttaaacgttgctgagaaaggagacaaagaagtgctcccgtttcggggggggcanggnnnccccgagacangggacacaagagcccaccagagcggggggggggggacccagggaaaccacgnggccggcccagagcacagaggcggcggggaccccgaanccccaccgagccacgaggggaacacggggaggcaccgaggcggggaggggaggggggaacccgaacacaacggcaccacacaaggcnnngggggcggggcaggacgggggagaaacaaagggggggggccaggggggggaaaacaaac

SEQ ID NO: 120601 - DNA, 371 bp, Arabidopsis thaliana columbia
agggccggccggctcccgggcggcaacccgcaaaaaaagaaggaaacagggagacaaaaaaaagaaaaagaaccccccggcaaaaaccaagggcggcacggggaaaaactcctctgggggggggacaggaagaaaaaaaacccagccggcggggaaccaaaagcagggaaaaagaaggggcgccaccccaaaaacccggacgcccaaagggaaccccggggaacgaagaggccaccaaccacaaagggcggccaaaggcccagaacaccggacgcaaggaaaaaaaggggccccccacaaaagggaaaggcaggggggggacaaaaaaaagaaccgcggaggggaaaccgcacacaagagaggaaaccccc

SEQ ID NO: 120602 - DNA, 359 bp, Arabidopsis thaliana columbia
caaaaaaaaaaaaagaaaaaggcgaaaaggagaccgaacgggacggagacacggccgcccccgttcaggagcaggcgaaggagcgcagagaaagaacaaaccgaagtatttttggccgcggaagaaacggggacccaaaaaaaaaaacccagagcgaaggggaggacccgccacagaaagcaagggaacacagagagagagaaccgcccccaccacccaggaaacagcaacaccacgcaaagcggaagcaggaagccgaagcgagaaggcggggcgaggaaaagacacgcaccagcaccagcacaaaacggagaagcccagcgcagaacggggcaacaagaaaaaaaagagaaaaacag

SEQ ID NO: 120603 - DNA, 249 bp, Arabidopsis thaliana columbia
  unsure (1)..(249): unsure at all n locations
aaaaaaaacaccccggggcggggggggcggcccgcgcaaggcgggcgaagagcgcggccacacccccacacagaggcgccttaagaacgcggggcgaaaacaccgcagagaggagggcggcccgcccgaaagagagattatatagggcacgttgggnggcaaccgggcggggccgcacaaaaaaaaagccccccccccggcgggggggggcgggccacccaccaacgccggcggcgggagacgcgagac

SEQ ID NO: 120604 - DNA, 515 bp, Arabidopsis thaliana columbia
  unsure (1)..(515): unsure at all n locations
cgggacgcctgcagggaccgggccggcctccccggggggacccatccgcccgactgagtgggcaaaagagaccggggangcaaccnngggagccgaagaaaaccaacaaggaaaggagcatctccgcccccgacaagaaaacagcaggaggacaagacacaagggaagaggaagctcctcctaccacagggggggggcagnncccaccccacccaaaaggaaaaagcccccaggggaagaaaacgacaccacccccgganaagcggaagaaagaagcgggcccagagggaaagaccaggggggggaaaaaagaaaggcggcggccccggggggaggaccacccagagaagggggggaaaacggccccaccccgcaggggggcccgcggacaaaagggccccccaaaaaaaagggcgcacgcccaccccgggccccgaagacaaaagggggaagaacccccccgggcggagaggagaaaaaccggggagaagaaaacccccggggggaaggagggg

SEQ ID NO: 120605 - DNA, 579 bp, Arabidopsis thaliana columbia
  unsure (1)..(579): unsure at all n locations
cgcctgcagggacccgggccggcctcaaccggggggggagccagccggccgaaaaaaactcangaggaaaaaaagccgaccaaggggagaacccacccgccggccccccccggggagggagggcccaaaaaagggggggagagccccagggtcgacccaaaagcccgacaaaggaaaacacccctcctntgagaggttgtnngggacnnnaggaccaaacccccccaaccaaaaaacccccccccgcctagaaaaaggggggcgtcccccccacccagggggagagggagagaagaaaacgcccccccgcccccgcaaggaaaaaaaacacccaacaaccaggaccgccaaagggccccccaaaagaaaaacagggccgcacccgcgcaaacaccacgcgacccgcggccccgccacccaaaaagccccccacgaaaaaacccacccccccccgagaaacggcaaccccaacaccccagcgagaagcaacccacccgcgcagaggataaaagaggaaacaagaagaccggcaacaccaaacaccagaaaggaggagaagacacccgcacccccccacaa

SEQ ID NO: 120606 - DNA, 502 bp, Arabidopsis thaliana columbia
gggggggggggggggggctggggagggggggagccggggaggaaaagggagaagaaggggaaaaagaccacggcgacacaagcagggcgacaacccctccaggacggagccaccagcgcagcggagaacaggggaggagccccctccaaaatggggggagggcgggcgccagaccgccacgcaaaaaaaacccccgcggggggggggggggccccccccggggagaccggggaggccggcccccgccacgaagacacacaaccgaggcgagaaaccaccgcgcgacggcgcacgccagcccaacccgacgccggcacacccacgaaaccgggggaacgacgcccccgcaaagcaccaagcccacagaccacagcacccgcagcgcgacccggaagcgccgacgacacaggaccacgcacaaacagagaaggcgaacccaaaccgaacccgcgcagcgcgaccgacgcaaccaccgcaccgcgccggcggcgaccgcgcgcgc

SEQ ID NO: 120607 - DNA, 435 bp, Arabidopsis thaliana columbia
  unsure (1)..(435): unsure at all n locations
ggggggcggcaaacgggaacaaanaagcaggaacagaaaaaccaccccgaaaaccaaaagaagggaggggggaagaggacccacaccccgggggggaaccggggaaggcaaaaaactcctcctttggaaagcagggggggagaccaagccccacaggcggggggagaaggaccccccccgggggggacgaaacggccacccgcccgggtgtaaaagccccccccccaccaaaggggagggccaacggggggggggcccccccaaaaaaagcgccgcggcggagaacacaccgcagggagggcgggggcccccgagggcaccacacccaggggaagaaggcgggacgaaaaaaaaaacaaacggcggcgccggcggggggccccccaagaaaccccagcccgaaaccccggggggaagccccacgccccccaagag

SEQ ID NO: 120608 - DNA, 529 bp, Arabidopsis thaliana columbia
  unsure (1)..(529): unsure at all n locations
ccgggacgcctgcagggaccggnccgctanacccggggggccatcgcggccgcgattgatgactccgcaacagaggatcaagaggatgnagcaaaggggaacaaagacccagagggaaaatatcaggcggccgattctggggcagaccccacaacctcaaccccagggggccgcctccaaaccaaaggggtgggggagagatagggacaccaagaagaacaacgctcagggagggggggggggacaacccccgaaaaacagcagaacctttggagcccacaaagggacaagaggggagggggaacccaccacacaacggaccccaggggaaaaaagggggggaccccccccaaaaaaaaaacaaaaagagaaataaccgcacgcgggggggagagggggccgacaaagaaaaaaaaccaaaaaagggggcggccccccaaaaagaaaacaacacaaaccgacgcgggggcgggaaaagaaaaaggctctgagaagggggcccccaaaaaaaaagagccacgggggcggg

SEQ ID NO: 120609 - DNA, 511 bp, Arabidopsis thaliana columbia
  unsure (1)..(511): unsure at all n locations
ggggggggggggngnaaatacgggggnggggggaaggcgggaaaaaaaaaaaaaaaaaccgaggggggggggaggggaacggcgcccgcgaagaaaagagagcgaggacgcggcgcgaccccgctataaaggaccgaagcgacccgggaggggcgagcaggcggagagcagggagcgggaggtttatttatttggcctgcaaggaacccaaccaagaggcagccaaaaaaaaaaaaaagcccccgaccccgaaacaacggccgcccccaacaccaccacaaggcgggggcgaacggggagggagagggggcgagggggggcacgaaacagcaaagcgccagaggccggcgcggggaggggcaaggagacacgccacgagcggccgagggagggacggaagaggaccgagccgagcgaggagagagcgagaaggacgcgaaaacgggggggggggcgggagcggggggagaaaaaggggacgggagccacaagcagcacacgcgacggcaca

SEQ ID NO: 120610 - DNA, 537 bp, Arabidopsis thaliana columbia
  unsure (1)..(537): unsure at all n locations
ccgggacgcctgcaggtaccgggccggctatcccagggcgacatcgngtccgctcgtgtcttactcgtgccagccactcgcatttctccagatattattatccttcctcgaaacaagagcttagctaagatgacgaagaaccacccaaccgggagcgaagataacaaaaaggcccctccgtaagtgcggggggaagcccagaggggggaccgccagaaaaaaaccgcccccccatggggggccgactcccacggcactcgggggaaccttgaaaggaaaaaaagggacgggggggccatcaggaaaaaggggggggggcggcgaaccacacccaggggaccccacggggggccccccaagggggcgggggggggggggcccccaagagggaggcacccccccccccggttggggggaggacccacaaaggggggagggggcggggcagaagaagagaagggggggccccaaaattccccccccgccggggagaagggggccactcccaccccccccgcgggggggcggagccgcgag

SEQ ID NO: 120611 - DNA, 438 bp, Arabidopsis thaliana columbia
  unsure (1)..(438): unsure at all n locations
cccgcgaagcgggaccacagagcctcgcggggggtagccccgaaacaaggnngggggggggggggggaccaaccaccgcaggagaaacaggcaaaccaaggggggcaaccaaaaagggagggggaccccacacacccaaggcaaagggccccccgaattttttcgggaagaagggnaaaacaccccaggccccaagaaaaaaggccccccccgggggcgaagggggccccaaaaaaaacccgggggagggtaaggcaaacccagggggggcccggggaacccccccgagagcccagggggccccaaaagggcccaaaaaacaacccccgggggggggaggccccccgggaggcacaaaagagcgggaaaaaacccccccccggggaaaaagggggcccaagaccaaaacaccgggggggccccaaaaaaccgcccccc

SEQ ID NO: 120612 - DNA, 515 bp, Arabidopsis thaliana columbia
  unsure (1)..(515): unsure at all n locations
cgcctgcagggaccgggccgctanacccgggngggcatcgcggccgcagaaataaaaacatagcnctggggggaacgcaaagggcaaacccgccagacacagagccggnccaatcagggagacgctccgcatcttctataaggagaaacgggggggggcaaaaaatcctcctccttcggactgctnggaaanncggcggggaaaaaaaaaaaaaaagccccccccggggagagggggggaccccccaattacaaaaaaaagggacaggaaaaaccggggggagaggggaggcgacccaaaaaaaggcccggaacggtgagaaggcgccgagtcgccgaaaaaggccaaaaaagacgaagggaagaagaaaacccccgggaacccccctcgcgcggggaaaaaaaaagcaccaccgtaactacccggaagagagacgaaagaacaaaagcgggagaccaagaggagaacccgagacccaccccgcgggaaaaaaagaggcgcgcccaaaaaaaaaa

SEQ ID NO: 120613 - DNA, 486 bp, Arabidopsis thaliana columbia
  unsure (1)..(486): unsure at all n locations
ccgggacgccngcagggaccgggccgctaaccgggggggcagcgggcccaaancaccccaaaaaaaaaagagaaaacccaccagaaaaaaaaaaaaaaagaaagggggcccccgccagggggggaaacccccccccccaagcggaaaaaacgccccgggcccctcaaacccgcgggtggccccccccgggggggggggggaaacaacccacaccccggcgggggggggccccccccggtgtcgtgaacaaacaggggggccccccaccggagaaacccaaacggggaaaaggggacagaaaccaaaaagaaaggggggaaacccccgggggggggggccccccgcccgggggggggggaagaaaagggcccggcccaaaacccacaaccccgccgggaaaaaaacaggggcgggaaagcgggcgcccccgccaaagagggcaaaacccgggagcggggggaaaaaaacaagagggcggaaaaaaaa

SEQ ID NO: 120614 - DNA, 606 bp, Arabidopsis thaliana columbia
  unsure (1)..(606): unsure at all n locations
ccccccgggggggggggggggggncccctcngggnnggaacggagccngggggggggagaaagaggaaagaaaggggggaaggaggaagagagaaaaaaagaagggccccgaggggaggaacagaactcttcagaaaaaacagcggggacgaagcgagggagcccgaaggaccgggaagaagagaggaggggccccctccacacaaaggggccgaanggaaannaacaaggagacgcccgggcgaaaaaaaaaccccccacagcggggggggggagggagcccccccaccagagagaggggcgcgacgaggagagagacggaacacccaaagacaaagaaggaaacaaaagacacgacgaggcacacaaaagagaaacagacaggaaaggcgcgaccccagagcaaccgacccgaacggccacgaggccccgcgggacacaacgcagacacgccggacgacgcggcacagagggcgagcaccgccgcgagaggcgcgagcggcaggcggcggggacacgacgaggggcgccagccgcgatggccacggcccgggaagcagaaagacagaccgggcaacgacgccaaccggaacccagaccgaacaa

SEQ ID NO: 120615 - DNA, 411 bp, Arabidopsis thaliana columbia
  unsure (1)..(411): unsure at all n locations
cgggggggtttaggcccgaggagaaagggggaagcnnnaaaaaggggaaagngggggcannnannncccaaggaaacacaaacaagcccaacaacaaactttttaaaactgggaacacaggaaacaacaacaaaagggcgcaaacaaggagacatcttttttggggaagaggggaacccaaccgaggggggggccagaaaacaaaaacccccccccaggggggggggagggcccccccgccccccagaaacggagaagggaacgggccccccacgccccccggaaagaaggaaggaaagaagaaccgccaaaccaggggcgcccggccccggaaagagacgccggggggggagaagccccccgcgcccgccacgacgccaggagaggaaacccgcgacaaacgcgaggggg

SEQ ID NO: 120616 - DNA, 464 bp, Arabidopsis thaliana columbia
  unsure (1)..(464): unsure at all n locations
cagggacgcctgcagggaccggncccctatacgcggggggcatcagcgtccgcaaagataaggaaaccangngggggncagcgaaccnngggaccggaaacgncaccgcggcggctttttcggttctccgccaatttcaagttccaaaattgggtaatggaggaggaacatcgctcgtgatttnagngggggnngaggccacagaagaaaacgacggaacaacacaggaagacgaggggggagaacacccacccgggggacaaaaaaaaaaagccnacggggnaccccccccccccnccccngggggagaaagggagcccgcacacccccccanaagaaaaaggggggggccaccacgggggggggagaaaagggaccaggcgcccgccaaangggaaagagcaacccggggagggggcggaaaacaagggaaaaaaccggggggggggggaacgggggagaaa

SEQ ID NO: 120617 - DNA, 375 bp, Arabidopsis thaliana columbia
  unsure (1)..(375): unsure at all n locations
aaaaggggggggaacaccaaggaaaaagcaagaggagcgggacagaggcagcccccctaagcaggaaggacgaaagagccgaaaaagcagccagagggaagaaggggccccgctacaaaaatgggccgtcngggngggagcaacgcacacaggcaaaaaaaaaaacccccccgcgggggagggcggggggcccccccaccccgagaggaggggagacgccaacgcagacagaaagacaaaagacaacagggcaaccgaacagcaccaacccacacagagccagcccagaacggcaaaccacaagcgagagcgagagccgacggacgcgcagcaccaccagcccagaacacacaacccacagacgaccgacgacaa

SEQ ID NO: 120618 - DNA, 440 bp, Arabidopsis thaliana columbia
  unsure (1)..(440): unsure at all n locations
gggggggggggggnccccccnngggggggggggagcggccccaaaaaaaannnnnnnnnnnnagggggagacacaacanacgaacaaacgaccccgccggacgaggcagcccttcaacgacagcgggagagaaacgacaaagaccggagcggcacaccaaggggccccctcccaaaaagggctgtcgggagaganacagggnccaacgaaaaaaaccccccccgcgggaaggggggggcccccccacaggagcaaggacaaagaaagagagccccacacgcacagccaaaaaacgaggcgaaaaaacacagggcacgaagcggaaacaggagcaaacacagcaccgacccgcgacggagcaaccgacccggcccagaaagccagaaagcacggaagagaccacacacccgacaaggaaaacccacccaacaaaacagaga

SEQ ID NO: 120619 - DNA, 508 bp, Arabidopsis thaliana columbia
  unsure (1)..(508): unsure at all n locations
ccgcctgcgggccgggcgcgctcncggnggaagggagccggcgacaaaaggggggacaaaagggggcccccgccacacgcgccggagaaaaaancaccccaaaaggccgcgcaggaaagagaacaaggaggggaaaaacaaaaaacccggccccctcaaaaagggagtaggaaaaaccngggggccacaaaaaaaaaacccccagagaagggaggggcccccccccgcaaaaaacacgagaaaggaggcgcaaagaaaggaggggcagccacaaaaggcagaacaaaaggcggccgggggcgcggggccccccccgggagagcgaacacacaagcgcacccgcaccaccaggccggacgaggggggacggggagaaagacgaggagggcaagaaagcccgagcaaaaaagaggaggcgagaacgaggccgccgggaagcgcggcgaagaggcagcagaacagccgcggcgagaagaccgcagagagcgaacgggcgagaggaaagaaa

SEQ ID NO: 120620 - DNA, 521 bp, Arabidopsis thaliana columbia
  unsure (1)..(521): unsure at all n locations
aaaaacnacaaannagcggggaaaagccgcgcggcgcgcaccaggcgagacgcacgcgncaaaggccctctccggcgagacgcgacgcgccagacagaagaacgcagccagcgcgacacaagcagagggccccctccaaaaaaggcccgcaaagggnnaaacgggggggcggccccagaagaaaaaaaccccccaacgcggggggggggggggggccccccccgcgggcggggccgcgcggcgggcgagagagcgccccccggcggggggaggcaaggagcagacggacgaggcggacgacgcgaacgagcgcggcgggagaggcggcagggccgggcaggggccgcgacgggcgagcgagacggccgcggggcgcgcggggcccgggcgcgggcacgccgcaggcggggcggcgcccggggccggcgcggggcgggggcacgcgggcagagcgagccagaggcgaaaggcgcggagagcccgcgacggagcacgcggggggagaacgcggaggaggcggg

SEQ ID NO: 120621 - DNA, 559 bp, Arabidopsis thaliana columbia
  unsure (1)..(559): unsure at all n locations
gggccgggccgcttanngaggggggggagcacgcccaaaaaaagggggaaaaagaaagggggggggncaagagnccaancaccagggagacccaaaaaaaaccgcgccctacagagcgccccccggagaagaaaagaagggaagaagaaagnagaagaggggagcccgccaaaaaacaagggntcgtaggggaaanntnnggggcgggacgccggaaaaaaaccccccccggggggggaggggggggccccccccaaaagagaggagacgnaggaggacagancaccaaaagcgaaggggagaggagcagacgggacggacggctgcgagcaaggagaagaagagccgagcgggggaggagcggccgggacggcggggcgaggagcggcggcgggcggcgggacggcggccgacggggcgggaagaggccggaccgcggggaagagggcggggaggggcgagaggaaggccaggcgagggggcaggaaacggggggggagcggaaaggaggcgagggggcgggacgccggggcgaggacggaggcgggaggcgggcggg

SEQ ID NO: 120622 - DNA, 485 bp, Arabidopsis thaliana columbia
  unsure (1)..(485): unsure at all n locations
ctgggacgcctgcaggtaccggtccgctatcccgggtcgacatccgcgcccgggccaactgattctggtttcggtggatgaacaatgaacagaacgagagagatcctgataacatcaacaacaagaagaagaaaaaggaatctccattggggatttactccgcctcgaaagctctaatcgaatcggggcggagnacagaaggagacccttatcgccgaatacgcccccttcttgtggggggaggaaaagagtctgcttttgtggaaaagaacccgaccctgaagatgacaactttaagctgagggtgctgccacaaaccaaagatttcttctccaaggattctaatccacatctcgggggggaaggccagattatatatatacatacacacaggagaggggagtgttcattgagaacaccacccaaggcgggaaaggagcttctttaaaaccgaaacaaaaaaaaagggggggacaaaaagggca

SEQ ID NO: 120623 - DNA, 465 bp, Arabidopsis thaliana columbia
  unsure (1)..(465): unsure at all n locations
tgganncnntagagcgtttttcccaggcgggcgaatccttttttaaaaaaaagccccctctctttagaggggcagatagacccctaatttgcttatgagggaaatccaccataacagaggtttattagggagcagagaacacgatggatcttaagacaaggttggaaaaagccccgaaaccaacaacattccgtcggcttttttggggggggggagggaacgacagagcccggactcgactcataaaaaaaagtcccccgcccattctacggggtggggcagggaccccaccctccttttataggggcgcgtcgcccaacgttgcgactgtgagctcattacatgccacgtgggtttaccccaaaacaggcttctcatatcccgtgggatggtccccagcccccgctatcctggaaacgagagacttgcacacctttgtaccgacgcggtgttagtcgagcagcc

SEQ ID NO: 120624 - DNA, 469 bp, Arabidopsis thaliana columbia
  unsure (1)..(469): unsure at all n locations
ccggnccggaanncccggttcgacgcggggcgaggacccatncngngaaccngganccaccaccccccgggggggcaaggcaccaggggagacaacaaaggcaaggccacccgacnnccgctcttggccccggaccaaanagcgaagcgcaagcagcgcacggcccacaccccngcngagttggtcttggttttggccgatggacacaccaacggggcgagttagatgaaaaaaatgccccccaactcgaggacgggggggagcccccaagcatgtatgcgggtatcagcaggggaaaacaggaacagggaaaaagatgttcccagggccccgaaccagccagggagggagccaagggcccggccaacaggggaaaaaggcacacaccatggcccaactggcggaaccacgcaaaaaacccgcaacaataacagcaggaaagaccaaacgggccgacaagaggggggag

SEQ ID NO: 120625 - DNA, 340 bp, Arabidopsis thaliana columbia
  unsure (1)..(340): unsure at all n locations
ccggcaggnaccggnccggaancccggttgaccccgcgagcanccccnnaaaaaaaacncnccacanaccnannaccggcgacgccaacccagagagggagannanngccccccaagcgcagggaggaagcaaagacagagggacccgcacnggagaaggcaaggccacncannacaanggnagngnngcacctcctcgttattttgagngaagagncncncaaaggcggnncnaaacaaaggcaggagcccccacgnccngnngggggaccgccacgccggagcaaccancggnanggcccccggcgcccccnanngcgacaagaaggngagaccgaag

SEQ ID NO: 120626 - DNA, 509 bp, Arabidopsis thaliana columbia
  unsure (1)..(509): unsure at all n locations
cgtacggaagctgggatcctctagagcggccttactacgcgggcgataatcctgattgatctcagcataaaatgagaagtagggaacaccgttttgacaagataaaacaggtttacattacttacacactcctttagttggttcttcttcttgaacatcccactaactgtcaggcttcaagagncgaancttcctcgcaatggcgggaggagcncacagaaacgccttngccaaaaccaccacaccccccactctggggagccgggcctnccccagctttcatcaggcatcctactctctggattatctctataaacatggaccgcctgtcaccaagtggattagtgaagatttgaagcaacgcccctggatcatctgggtctacaagaaaccctaattccccacactccttggacctgatccatcctgagcacgtcgccaaccccgttactagagaatctgggaagaaagtacgcggaggagaaggcatgaaggccaaaccccccaaa

SEQ ID NO: 120627 - DNA, 331 bp, Arabidopsis thaliana columbia
  unsure (1)..(331): unsure at all n locations
cgccggcaggtaccgggccggaanncccgggtttacccaggcgggcgagccgagnnnnagannnagcagagccggggaaancagggggccaccaaaacgccgccgnnncagagaancaaaaccaggaggacggttttgcgnncgcgccgggaaacaagctcgncggatnntccaagntcgtaagaaagaatttcctgcctttcttgaggacgaanggaagcgcccccaccacaccgagggcaggagcggcgacgcaaccaacggggcggcgggccnccccaggggacaggggangagancccccgccaaanccgaanccggcaccggaaac

SEQ ID NO: 120628 - DNA, 499 bp, Arabidopsis thaliana columbia
  unsure (1)..(499): unsure at all n locations
gagcggcctccccaggggagcgaaaacctacaaaaacaacgaaaaacacccaaggggggggaanggcnccaagncaaaaaagncaacggaaagaacaaagaaacaaagcttgtttgccacacaaagggagaaaggaacccgacacacgggagaaaaaaaacacacggaccttcggtgggntttaggaagataggaaaacccaaacaagggcgtcggaacaaaaaaaaagcccccccaggggggggggggggggggaagccccacataaaaaaacagggggcgaagggaaagaaaacgagcggggagccgagccaaacagagtaacaacgacagcagtgcgcaaaggcgcgggagggggcgccgcgacaaagaccaaacagccaaaaggcgaggggcaaggccagaagaacaacagaggacggcgaaaaacgacacgacagagaagacgaagagaacaaggcagcgaggacacaaaaaacgaacaagcgaagaaccagaa

SEQ ID NO: 120629 - DNA, 510 bp, Arabidopsis thaliana columbia
  unsure (1)..(510): unsure at all n locations
agcnnggacccactagagcggcctgcccacgcgggagaaagccacngaaaaganacnnacccccccngaaagggggagangaggacgcggaagccgcgggaggaaaaaacagggacaccccaaaatcagggccaaaaaaaaccaaagaggggccccaaagagaggggggcaccccccaaccaccggtggcttttcggaggaggcacccccaaagacaaacnccccccgggaaaaaccccccccgggggggggggggggggagcccccacaaaaacaaaccccaaagcccggggaagcccacgggagggggggggcccccccaagcaaaaaccaggggcggggccccaagccccaaaaaaaaagagggggggaaagcccccacacccgggggcgggaaacccccgccgcccaaagggggggcggagggggacccccccccgaacaacccgaggggaaggagaaacgggggaaagagaacccgccgggcgaagggagggggagagggagggg

SEQ ID NO: 120630 - DNA, 486 bp, Arabidopsis thaliana columbia
  unsure (1)..(486): unsure at all n locations
gcccgcaggnaccggnccggaanncccgggctgacccgggcggggcgaggcgnacnngaangnnacnnacgcccccggaaagagcaagaagaggacgnggaagncgngggaggaagagacaaagacaccagagtttcagnannccaacgaccccgagaggggcaggncngcgagggacacaccnnnngggcttcttcttctttgggncgttggcaagacaagaggcacactatggattgaaagatccccccacaggtggggggagggggccccccccgattactaaccctaagacagggtgacacatggccgcaggggcgccgggaaacgaaacaagacgcgacccccccaaagtaaatacaagagaccataagagaaagacccccaaacccggcgcgcaacaccagccccggccacacaggaaaggccgctgagccaacaccccccgagcccaaaacaatagggggaacgcgcgctgaccgccgg

SEQ ID NO: 120631 - DNA, 467 bp, Arabidopsis thaliana columbia
  unsure (1)..(467): unsure at all n locations
gcccgcaggnaccggnccggaatncccgggttgacccaggcgggcgacactcgnccgcggacgcgngggggcggaggagagaaaaacnnnnnccnggccacaananangcanggagcgganggccaccctcttatgnacnanggnacaggccacncnaccgagccangaggacngacagngcnnngaagtttgtggtgttttcggcgcggacnnganncacaggggcnncngcancgaagaagccaccgcccccccaaggcgggggcagggaaaaacaanaacgggggggcccgcagcaanagagggcagcgcagacaggggaaaagccgggaccnccaaccngagcggagncgggcccnccggcggggagncaccgcggaagccagggggcccgcaaaaacagcacccccaccnaaggggaaacaagggaaaaggagacaaagaggaagacgaggggaaccccccc

SEQ ID NO: 120632 - DNA, 501 bp, Arabidopsis thaliana columbia
  unsure (1)..(501): unsure at all n locations
cgtacgtaagcttggatcctctagagcggcctccctatgcgtgcgttgattctttctttacttatgaatcatctgaactttggactctctattataaagctttcactgaacataattactaccctttgtaatagaacttgatccttacataattggatcattttgttgagtgattacaaaatctgacgaataacataantttaccagagtcaaccggctctccaagaatctctcacagagtaataagctctgtcattaccaaacccaagacgctcttttaaccgaaagcatagcagcaaccatgtacagtggatagacaagacctgttgctttcatttgaagaagttccatgacatcatctttgacattaactaacctncttttctcagaaccttccaggagcatcaatcttcttaatgctaatcaaacttgaacttcatgctttgggaataccctgtcttaaatcctttggttggaattcctaaaatatcccttggtaaa

SEQ ID NO: 120633 - DNA, 166 bp, Arabidopsis thaliana columbia
  unsure (1)..(166): unsure at all n locations
agcngggatcctctagagcggccttcctangcgtgcgtaaatcanataactgacgaggaaaactcgaaactggagaaagagtgataattcttgcaccttgccatcaacgatacaaggaaagagacagagagaggacaacacaaaactacgagtaatacttcaagag

SEQ ID NO: 120634 - DNA, 409 bp, Arabidopsis thaliana columbia
  unsure (1)..(409): unsure at all n locations
gcctgcaggnaccggnccggaatncccgggttgacccacgcgtggcgaggccaaggctggctagggcacgggggccacaggaagagangacgggacatgctccatccgnngagccagacggancaaaggaggatttgctgtggtagcacattatgagtaccataagcatcctattacgtcaatngaatggagtgctcntgatttggcagcaggggcagncacngccgggganaaccaganaacgagacgcgaccnaggcggagagaaggaggaagaagaaaaggcagagnncaaggcacagaccaaggaacnagacaacacaccncaagaccggcccccncagcnncncggggaccaccaaggacaaaaagaccngaaggaacnncacgggcacaaccagannccgggg

SEQ ID NO: 120635 - DNA, 356 bp, Arabidopsis thaliana columbia
  unsure (1)..(356): unsure at all n locations
cgggggggaacacccaccccaacaaaaaacccacccggcccacccccgcgacagcgcgagggtgtgcaaccagccccgcgggggagaggccgagagggcgaagagnggagggaaaagaggagaggaggcggggcaacccctccaaaaatgaggaagttagggcacccaacaanaggagggggacaaagaaaaaaaaaaaaccccccccctgggggggggggggggggagggggcccccccaaaaaaaacacaacaccccacgngagaaagagagaaaaccagccaacagaggggagggacacgcccccccgcgcaaaccaaacacaaggcacagaagcagcgcaccgcccagcacc

SEQ ID NO: 120636 - DNA, 371 bp, Arabidopsis thaliana columbia
  unsure (1)..(371): unsure at all n locations
agcngggacccactagagcggccgaccnacgcgggcgaaaacccnaatcaacnnnangaacccaacaaacaaaggggcgcaacagaagaaaggacaaacacagagcagggagctgatcaaaacctacctccgtcaaacacgaagggggaagaactccaggacaaggagcagaaggacnccaccgcccgtgaaccggagggggggacaaaaccacaggacaaaaaggggggggaaaaaggccacccaccncggggcgggaggaaaaccaccccgaaaacaaagccccaaagaacccaaccccgaggaaagagaggcggcggacgccccgccgggaaacacaccccaccacaaacgcgggggacggcggcaca

SEQ ID NO: 120637 - DNA, 453 bp, Arabidopsis thaliana columbia
  unsure (1)..(453): unsure at all n locations
gcccgcaggnaccggnccggaancccgggtttaccaggcggcgaagcccgaagaacaaancaaaccacaaaggcgaagaagcncngnncanagnangcaacaanacgncnccnaannnncgaccctgcgggagcncaggaggaancnccnncaccngcngcngacncgccaggacgagaaccttcttttgatcttgcgagnngaccgncnncancaccggaagaagaaacaaacaagccaccggcnncagcaccggaagaagaaccnccccacccaccagcgncancaccggaagaagaaacnccccgggcaccggccccaacaccggaagnagaacccccgcgggcaccgccgnccgcaccagaaggagacgccccgcagccaccggccncnacaccagaagcagagaccccccagccacccgcccccgncaccagaaaccaaaacccccca

SEQ ID NO: 120638 - DNA, 342 bp, Arabidopsis thaliana columbia
  unsure (1)..(342): unsure at all n locations
gggaaaannaannnnnaagcaggggaaagagcnncntttgtttttgagggtgnngntnttattgtntttnaacaagtatctgaggcncancgnccgttcccttccattttgnaagnancgggaaaaggacgngcgggaagccaaggacaagaccccccaagacgggggagagagggaaacgcccaacaggaacccggaaagcgaggggagnnggcnaaccaaaggggagaggangcnnacncagcgcgaacgggcgnacaaaaaagggagaaagcgggagcagggcgggaaaaaacccaagaagagcaacaggaggagcaagcgggcnccggaggaaaggag

SEQ ID NO: 120639 - DNA, 163 bp, Arabidopsis thaliana columbia
  unsure (1)..(163): unsure at all n locations
gagcggcctacccacgcgggcgcaaacccgangacggaaaccaaggcccccacanagccgaanagccacaccggagaccatccggngaagnacagaaggcagagaagaagtacttcacataaccgatacttccccatgtttactatagacaaaagngaaaaaa

SEQ ID NO: 120640 - DNA, 462 bp, Arabidopsis thaliana columbia
  unsure (1)..(462): unsure at all n locations
ccgcggnaccggnccggaancccgggttacccaggcgggcgacccgcnnncaaagaaacacnanccccagncncgggggcanggcncancncgcncncnccccnccggggcagacggcagcaacaaccggccgcccccccccggngacaccggcccaaanaacnncnggaacaaagagggaccagttgtgnttnttttagaagttgcagacgcancnncaggaaatccaagataacataaggcccacacgcaaggggagaggggtccccccagaggaagtgaggaggctacctgtgcaacaaccgatcaagagggtgaaagccatcaatggaggacggggagctcgaggctaccgaaaagcctgagaacacatcctctattccctccctccctaaagtgacacccaagactttgaaacaactcctattcgaccggcggggcatggtatccgggaataaccct

SEQ ID NO: 120641 - DNA, 339 bp, Arabidopsis thaliana columbia
  unsure (1)..(339): unsure at all n locations
gaccanagagcggcctgccacgggggggaaaccanacaaacacgaaaaagagaagaccggggcaagaccgacaagaacaggaaccaggcgcaacgacaagaagcagatatcccaaagcacaaagaactgatatgcacactgccaattggctcacaacagaaaccagtcgtggcgacaaggagtgggcacnaannnnaaaggacataaaaccagcgaaacgcaccccaaaggcgagggggagggggaggcgcaccaaacaacggccaaagctgaggcccggggaccttgagccagccgcggggaaccagttgcaggaaaagccgtgaaagagggcgcggc

SEQ ID NO: 120642 - DNA, 487 bp, Arabidopsis thaliana columbia
  unsure (1)..(487): unsure at all n locations
ccggnccggaanncccgggttgaccggggcgggggaaaccgagccaaaaccngnnnngaagccncangcgggggcnaaccacaacaaaagagggggaccaagacccggccggagagcgccacttttgaccccaccagggagagggcagaggaagaggaagagaacgagcggcaccaaagacctctctncttttaggagagggccaaggcacacaaggacccgggcgacaaaacgaccccccgncagagggggggggaggccgccccaaagaggaagaaacagaggagccggagcaaggccagacgcgggcggggcaaaagcaacagacgaaaaggcccagccacagagcaaaggcaggcggagcaacaggagaagggggacaccgagccccagcccagaggcgacagcagacagaaggccnggaacaagccaacagcgcggggaagcacacacaagcgcgggggcagnagagaaagaaggcgcggag

SEQ ID NO: 120643 - DNA, 455 bp, Arabidopsis thaliana columbia
  unsure (1)..(455): unsure at all n locations
ccctgagcggctcccccggcggggaaatcccattgaagacaanaaacccccaagagggggacacccaaaaatacaaaggagcaaaacaaaaaataacatcactcatattttgtnctgaagaaaaaataaactcacagaacaacaatagaaacctatagaggaaaatagctaaaattagcagttggcccccccagaggcgaccaggagaaaaaaaaagccccccanaggagggggggggaggagcccccatacattaaacccgcccgcagggcaaacacaactgcgggggacctgaagatatctgagggggaagaacaaggagcagcaaggggccggccaggcaaaaacaaaggggatgcagaggggagcgcacggaactgcgggggaacaaaatccaggaaccggactggggggcctgaacaaggagggcaagaaaaagccccaggggagagcgg

SEQ ID NO: 120644 - DNA, 466 bp, Arabidopsis thaliana columbia
  unsure (1)..(466): unsure at all n locations
acggggggggacnacgggaacggaaccaagggcacacgaaccacagcacgccagggtgtttaaaggagcgagaaagcgcacgggcaggagcacagaagagagagaagcggggaaaagacctcctgcgtgatctgggaaggagaggaccgccaaaaacgaagagnacccaggaaaaaagaacccccccccaggggggaggggggggaggggcccccccaaaaaaacgaacccgcggccggaggaggaaagcccgacagggagagggnacaaaaaggacgcacccagagggagcaagaggcaaggacgacagaaaaagacagggggcggggggaaaaaaccaacagaggcgggggcgaaaaggacgcgacagacgaaaccgcgggggaccacacagagagggaacgcgcgaagaaggaacggaacgagagcagcggaaacacagagagaagngcgcgagcggaggaag

SEQ ID NO: 120645 - DNA, 472 bp, Arabidopsis thaliana columbia
  unsure (1)..(472): unsure at all n locations
aaaaaacaccgccccacccncgggggagcangaaaccaaaaaacgaacgaagacgaccaagcaggaaaccaaaagtttttagcaggagggaccaaacgcgaaagaagaagaagacgagcggacncccggcaaaaagcgtgggacttggcgaggagggacacccacccgagggggcccaanaagaaaaaaaagccgcgcccagggggggggcccgggggaagccccccacgaggacccgangccccgcgggggggggaaaaaagcgggggggcgggggcacggggagggaggccagggccaaaccgcggggcggggggaggggggagacaggcaaaccgagagaggagcccgggggggggggggggagcggcgggagggacggcacagaggggaggaggcagagaagggaggccgcgaaggggcgcgggggaggagaagcaaaggcggcaggaaaaggcagcgggagaggggg

SEQ ID NO: 120646 - DNA, 465 bp, Arabidopsis thaliana columbia
gcgtacgtaagcttggatcctctagagcggcctccctacgcgtgcgagagcactattacaagtctgaccttgacattgtttggagcgagaacaggacgaactcacccacacacaaactttggccggtgtaagcttacgcctttgacatgggaacgagaaggccaacgacacgagaactgtaaccccatactctggcttcccatgacaggggctcaacaaactggccggatcaaggcaaacacaggcttggcatagaaaatgcttgacctggtggcaccaacaaaggcggtaacacaacatcatcctcagtgtatcccaaaatgcccttcattgtgcctccagattcctcccggagggccttattgatttcgccgaatgttggacttttctaaagtttaacgggggaaacaacaactgagacatcacgggttggaacacggaaagacatttccggcaatttttcca

SEQ ID NO: 120647 - DNA, 351 bp, Arabidopsis thaliana columbia
  unsure (1)..(351): unsure at all n locations
agaacgaagggacaaggggacggngcnaccccaaccagacgaganaacaanaggacaaagttgaagaatgaccatcaatttcctaatttattgatgcctttatacaacaaaacgacgaacggtgactttcggagaaggaaacccanaggnggagagaccagaaaacaaacacgccaccngaacaggggggggggaggcaccggcaggagcaaagncacaagcccaaccgcggcgaagcacgagaaaccagacggcgccggcaacggcgcaaanaagaggacgcngagaagaggaggcaccacaacgaccacagccgcagacacagacagacaccaaaacggggggagaacg

SEQ ID NO: 120648 - DNA, 402 bp, Arabidopsis thaliana columbia
  unsure (1)..(402): unsure at all n locations
caggtaccggnccggaanncccgggttgacccaggcgggggaagtctcgngggcggacgcgngggccagcanacccagggcagncnccagggggcnaagggaaccaaccagananagnaagggacagttttgcngnncangggcncggacnngncaanccgaagaaagggggcaacgncaacaacggcctgcncttttcgaagcaggacgcggnanagagggagncaaaggagaagaccaccacaccaggggggggggggggcggcccccggcgggagagacncccncacncgnaggcaccagcaagcgggagaagcagcaanggcccggaaccgcacagaaaaggggggcacaacnggcaggaggcacaacacagacgggacggacagggcagaacaaacc

SEQ ID NO: 120649 - DNA, 256 bp, Arabidopsis thaliana columbia
ggaagaccggagcgggaatctatgagaaagacaccccccagcgagcgggggggggggggccccctaaatacagacattgccatgggcaggggaaatgggaacaggggagagagaacagcgtgaagaagttaagcgtgaccggggaaaaaagaagaagtgggagggcggggaggggaccagggggacgctaatgagaccagacgggcacccgaattcttactggggaaataaaagggtgaagggggggaaggacggg

SEQ ID NO: 120650 - DNA, 166 bp, Arabidopsis thaliana columbia
  unsure (1)..(166): unsure at all n locations
ggacccacnagagcggcctgcccaggcgggggaaagtcccnnnaagaannaaaacacccccgggagaaggggggggaacanacacaaagcacacgggcaaaaacnanggggncgaacaacaccttttcccggacactgaccatgcctctttcggtcaacaaaacac

SEQ ID NO: 120651 - DNA, 471 bp, Arabidopsis thaliana columbia
  unsure (1)..(471): unsure at all n locations
cccgcaggtaccggnccggaatncccgggtttgacccaggcgaggcaaacgaancnggaagnangaaaacanccccnggngaagaagcaagaagaagcaagaagcnncccnccaacacgggggggcnncnncttagtaccnccggcgctggcactggctctttcgtttatggctgcgctatgacagaaactatgtcttttctttggcggtgagggaagaaccgggactttccgttgcagaaaattcccccttcacatgggggatgacatggggaggaatgattacggccgcgtttagtggaaaaattgctgcagttattggtcgccaacagacaatgtggatcgcggatgttatctgcatctttgggtggctcgctgtagcctttgcacaagataaaatgctggtaaatatgggtcgaggctccttgggggaggggggggggcacattaagtatgggggacccgtatatat

SEQ ID NO: 120652 - DNA, 234 bp, Arabidopsis thaliana columbia
agcttggacccactagagcggccgtcccacgcgggcggaaatcctaatgaacgaaaaggtcccccccggaaggggagaggggagcccaccccccaaaaaacaagaaaaaagccccccacgacgacctttgtcgaagcgaccggccgactgatctcgcagggaaaaggaccaaaaaggcaaaaactccgtggaaattaagaggcggaggacaaggacggggagacaacagagcaa

SEQ ID NO: 120653 - DNA, 504 bp, Arabidopsis thaliana columbia
  unsure (1)..(504): unsure at all n locations
ctgcagtaccggnccggaattcccgggttgacccacgcgggcgagccgcgaacgagcgaaaagcgcgcccacagnggagagaagcggaagccctcacacaaaacgcagcacacggacaaccaagcctttttctgttgaagcggaggccaacaccgaccacattgtcccaaagaagccatctacaaagttttttatttttttgagggggggcagncaaagaaagtgcgtggaaaaagaagaagacgcccccgactagggcgcgggacagacccacaatgacgaagggcccattgcgcggtgggaggaagagaaacaacaagctgcgctgcgatagacggagaatgaaaccccacaacggggttactacaaacagcttaggagggaactcgaaaacggtcgaaaaagcgagtccgggcaagaacgccccctcacggtcagaagaaagtgacaaagcccgacaagctagcaagcacaaacaaccgcaggaaagaaccgcgcggggcc

SEQ ID NO: 120654 - DNA, 456 bp, Arabidopsis thaliana columbia
  unsure (1)..(456): unsure at all n locations
cgggggggaaaatctttnttttaaaaaaaattgagacaagtacgagggcaataatgattaaacgatagggcataacaaaacacggaagaaaatgagtttttattaggaacgaaaaaaaatcaggaaaatctaacgaccaccgacannccccaccccgggtgggagtttagangtctggcccnacaacaagggcgcgcgcgagcaaaaaaacccccccanagggggggggggggaggagcacacaaaaccaaccnggcgccaacaancaacccgaagaagaggggcgcgcaaacaaaccgggagaaaccganggacccacaaggggggaacccgacacaggaacaagagccagggagcaggaaggcggcgcggcagcgngcagaaaaagagaggggaagacggccgagagaggggaccgggacgaagagcaaagggggagagagggaggggaggagc

SEQ ID NO: 120655 - DNA, 499 bp, Arabidopsis thaliana columbia
gcgtgcggaagctgggatcctctagagcggttgacctttgtgtgtgttttcaaaaagaaaaggatcagatataagatccataagtccaaaggtacataacaacagcaaaacaggatcacaaagctacattctcttaccacgtcattgtacgaatataaaaaccaaagggggaaagaagagcatcaacaaaacagctggctgacttcggggtgcgaaaggtagacactcaagttttattcaaagctacaacagcagcaaagcagagagggagagagagatcattacttgacatgcttagtgagattaggttgtaaggattggaggcaggtagcctgatttggtgccgaggatacgggcctttgtgtccgggaagaattcaaatcctggaagctcagtgatgccgccttcgctggctacaccgatcgggtagcggagcaagtgaccaggaacgtcatgttcgagtgactcacttgagaaaaagcccaatacttgtcagaaa

SEQ ID NO: 120656 - DNA, 268 bp, Arabidopsis thaliana columbia
  unsure (1)..(268): unsure at all n locations
agcttggatcctctagagcggccgtcctacgcgggcgtctattctttctgaaaattgcaggtacttcatcttaggaaggaagacaaaaatatctgttccttggaacacattttatattcatgcactagtccccccaacacaggatgctaaactataaatcgcaatcaaaagttaacacanacagtcggtcgtcattgaggggaacccacannnccacctgataaacaaanncnggaatgccaaggcgactcagagagaagaaaacgag

SEQ ID NO: 120657 - DNA, 577 bp, Arabidopsis thaliana columbia
  unsure (1)..(577): unsure at all n locations
ccgggggggggaggaaacccccnnnnaaaaaannnaanccccccgcccacaggggggggncccaccccacccgcaaaaggcgcgcggggaccacccacacgcacgagccagagatttggaagaaaccaaaccgcgcccacccgcgaccagagagagcaacaagacaaacnagaacagcacganccgcaacgcgtcaaaaaattcgggacagaaggggacacacaaaaagaggggggacaaagcaccaaaaaaaaaaaaaccccccccacaagagagggggggagggggggagggcccccccccaaaaaacgacagcacaccaccaaagagcacacacaaaaaacgagggaagcgagggaggagagagagacaaacaacaagcgcccaacagacaacaaacaaaccgacaaacacgccagaaccccaaagagcagacaaagagaccaagcacacacacaagagaggaagaagaccacgcacaaagagaacagagaaccgagaacaccaacccaaagccggcgagacaagacgaccacagcaacgccgccgagaccgaacaagaacgagaaccaaaaac

SEQ ID NO: 120658 - DNA, 468 bp, Arabidopsis thaliana columbia
  unsure (1)..(468): unsure at all n locations
ccggnccggaancccgggtgnacgggcgagcgaccctanannaaacangaaaacgcgcccggggggggganagaccccangaacaaacaggccagaagacggagagggacaagnnttcgcggacagaaggcgagnacaaggcaagcagccaaaaaccaaacccgcngagcccgcctctggtgttttggaaggaaggcgcaaggagcacagaggggaacccaaaaaagcaccccccaccggggggggggggaggccccgacgaaaaaaagcncgcaggagaaagaaaggggacgcagaagggaggaagacgaccaaagaaacaagaagccgaggcaaaccnggggaaagggcagaacaacgccgggaccccgccagaaccagaaaaagacccgacgcgccgcaaaacaagagggggcacggacgagggaagaacaggagaggaggaagaagaaacccgaccagggaagg

SEQ ID NO: 120659 - DNA, 476 bp, Arabidopsis thaliana columbia
  unsure (1)..(476): unsure at all n locations
ggancctctagagcggccttcccaggggggggaaaatccttttcgagagtaacatagcccagggagggggccaaagcctgcggacgcaatacaaagtttgcagacaccgagtaacacactgttacaattctgaagagtcgctctcttaccaagaacgtattaaaagagaaaccnnaacagctggaactttgaaagaaggnncganccaaacgggaaccaaaccgaaaaaggcaccccccgggnccacgagcggaggaggggcccccaggtgcagaaggacgcagacccaagagacgggcacccgcgggggagaccagagcaacaaggggaccagaaaaggacgagagaacacggaaaaggacgagccaaacccaagcagaagccacgacaacgagagccgaccaggaaaacagcacaggggacgggaggcaagggaaaaaaagcacaaccggccaccacnccaaggaaggaacagg

SEQ ID NO: 120660 - DNA, 495 bp, Arabidopsis thaliana columbia
  unsure (1)..(495): unsure at all n locations
cggnccggaanncccgggtcgacgggggcgggggaagctncnnnaaaaaagcnanccccccccngnggggggganngcacaagccaacaaaggggnccgaccagacgggaacggccgcatcttaccacgccaggaggcagaccaagcggcagcaccagaacaaggccncaggcaaaatacctacaatttgggcaggccggcaaaacccggcggggnnganngggagaaagaaaaaccccccccggggggggggagggggggagaccccccacaaaagaaaaccaaaggacaccgacggaagacaaaagcggacggaccggggcaaacagcaacccacccccgcaacggcgcgacaccgaacaaagaaaagaaacccaggaagaaagcccgaacgaagcaacaccagcgacacaagggaccagcacgcacccaacagggcggcgaacgccaagagaaggaacagcgaaagacagggcagacgccgcacccgaagga

SEQ ID NO: 120661 - DNA, 463 bp, Arabidopsis thaliana columbia
  unsure (1)..(463): unsure at all n locations
aaaaaaannnnccacccccaaaggggggggccccgcagagacaaagaggcgccacggccccgcgcacccgaggggcggagacatttaaaccacggacagccacacgcgccggaagaaaaaaagacggaaagaagagagagggggcgttccctcgtcctttgggggagaggaggaacaaaacagcggaggccgcaccgaaaaaaaaaaacacccccccggcaagggggagggggggagaggacgcccacccaaaaaaaaaaaaaagaaagcggaacaggacgagggcgcacggcggggagacggggaaaagccgccccaccgaacgcaggcgcaagaggaggaaacagagcgacagcacgaccgcgaagaagagggccgagngacgcccagaaccgagcccacgaaagagcagacgacacacgcgcacgcggcgcacagcgccgcgaccgaccaccggcacgaa

SEQ ID NO: 120662 - DNA, 364 bp, Arabidopsis thaliana columbia
agctgggacccactagagcggcctccccatcgcgggggaactccctttgtaactgtcccgccgaccccccaggaaagaggacgcccacgggccacacacaacacgaatgaccgggacttctgacaggctcccctccccagagacaaaacaaaaaagggaaaaaaaaaacaaaactctcctgggttctgggagcgtacaaccaccccagaggttaacaaaacagaaagcgccccccccgacaaagagcgcggggaggccaccaacagcctcgccccccgggagaaaaaaaccgagccgggccaggaaaacagccaacgcccccacaaaaggggcccttcggaagggccaaaaaaccccccggacg

SEQ ID NO: 120663 - DNA, 465 bp, Arabidopsis thaliana columbia
  unsure (1)..(465): unsure at all n locations
cctgcaggtaccggnccggaattcccgggttgacccagcgcggcagaacttctctgtctctgtcccgcggagtccccgagagattgatcaccatcacttttgtaccttccttgtactacctatggcgtctgctatcttcgttaagcctaacaccctctcttctccatggatcggacaacgcgccnnagctttctcctcgtttgcggggggaccgccaccacgagactccttcgcgatccaagccggcgcttactccgacgagctggagaaaaccgccaaaagcattgcatcccctgggagaggtatcttgggcgaacgatgagtccaatgcaacctgagggaagaggcttgcttctatcggcttggataacaccgaggacaaccggcaggcctacaggcaacttctagctaccactcctgggctcggcaatgacatctctggttccattctcctcgaagagaacc

SEQ ID NO: 120664 - DNA, 502 bp, Arabidopsis thaliana columbia
  unsure (1)..(502): unsure at all n locations
gcgtcgaagcttggacctctagagcggctgcctcgcgggcgaattctcttaagatctttttggtgttgatttatgggggcactcaaaacccagatgtcgcacagcgcccacgaatagcagatgcagaggttctaagagaaaggttgtctaacgcaacgggaggcgatgagcaaaatggggaagatggggtggacttttggggggggcagaaacgcaccgnaccccacgcgggaaaagggacgaccgccctgcgccagcagagatgagccattaattggagggcctaccctcaaccgcatcacagagggaggactaccactgcaggatattcgaacatcgcagagtttgatagcaggtccccgaagactgaaagaaaattgccgcagccggcatccaggcgaagacgacaaacattgggaaccgcagcctgaaaaagactcctagcgtgcacgcagagagaaaatttaggaaaggggcccaaggtctgacgactgaggatgta

SEQ ID NO: 120665 - DNA, 180 bp, Arabidopsis thaliana columbia
  unsure (1)..(180): unsure at all n locations
ggacccacaagagcggtctgtcccangcgggggaaattctgctatagacgacggggcgtcgacaagagagtataatacctattatggtccaaaacaaagagttatttacagaaccagttactcactttttatacgatcatacaacatacattttcttgctgcaccacnngcangaccctt

SEQ ID NO: 120666 - DNA, 149 bp, Arabidopsis thaliana columbia
  unsure (1)..(149): unsure at all n locations
cactagagcggcctctcgggggggcgagagtccacttaaggggaccaggagccgcncaccggggaanaccaagagaaaagagagaccnctcaccaaaccaaaaaccgataatcttcatacttaaaaanagaggacggcgcgaaaagaga

SEQ ID NO: 120667 - DNA, 444 bp, Arabidopsis thaliana columbia
  unsure (1)..(444): unsure at all n locations
ccggnncggaannnccggggtgacccgggcgggggaaacacnacngaagggggncgcccccggnccgggggggncaccacacacnaagaggccccaaccaccgagaacccnaaccccncctttctatgatctacacatggggcgccatggagaaggaccctcaaaagcccccaaacatggggtgaccttttggaagtagaacaaccaaccccagggtccactccaaaaaaaaccccccacaggggggggggggggaacccccaaagaacaggcccacggggaccgggaagaggacaaaggcgcgagcagcaagccccctcacccgggacggcgagggggagggccaccagacaggcaaggacaggccggcaaacggacaagagcgcggggcggccaaaacggcaaaaaccgcgggggccgtcgcaggaagggggggagcagccg

SEQ ID NO: 120668 - DNA, 293 bp, Arabidopsis thaliana columbia
  unsure (1)..(293): unsure at all n locations
ggaagcnggganccactagagcggccttcccacgcgggcgaaattccgnnagacgacagcnggaccccagaggacagcggcnaaccaaggacgggccngcgacgaaagcaaagaaggagncaggggctttctgaaaagcccaaagtgtgctaagacatatataggaagtggaaaaaacaaaggaactggctcgcaaattgagaggtggggaaaaagaaancgaancagnaccgacgagagaacccccaggggnnagaagcgcccacgaaccggcaagagccaccgagcccaac

SEQ ID NO: 120669 - DNA, 440 bp, Arabidopsis thaliana columbia
  unsure (1)..(440): unsure at all n locations
cctgcggnaccggnccggaatncccgggttgcccaggcgggggaaccgctgcgagacgacagaagggnacggctgcgagaagacgacagaaggggacggctgcgagaagacgacagaagggnacggctgttataagacgacagaaggggcgagaagaaatcggcggtgtctgatgtcggtgcaggggctcctcctgttttcaggggggngggaancancagggcgaanaaacagcncaagacccccccnggnngcggggggggcggggcgacaacganaacgggannncacnnngcanncacggcncnggggggganggngacaaacgcaaagncaacgccacacggcaaacacagnaggaccgaagaggagannaagcnacncaaagaaggagnngagcanancgacnngaaagacgnngaacncggngacacnaaacc

SEQ ID NO: 120670 - DNA, 430 bp, Arabidopsis thaliana columbia
  unsure (1)..(430): unsure at all n locations
ctgcaggtaccggnccggaatncccgggttgacccacgcgggcgaaccgctgcgataagacgacagaagggggagaagagagcgagagaagaatagnnggancatcttgtgagaaaaataatggctgcttctttgatgctatcttcggtgacattgaaaccagctggtttcacggtggagaagacggcttggtgatgatttcgggggctcacaagagcncgnccctccttcaaaaaagaaaccagcccccgncgagaagagcaagaccgacacgccctgcggaannaacggcagcagggaccagagggacggcgncgacgcccccggcagaaagggcaaggganacggagnncacaaggacgnccacaagcaaggagcaaacggcgaggganacaggcccaancacaacgagaacgagcggccagcgagc

SEQ ID NO: 120671 - DNA, 492 bp, Arabidopsis thaliana columbia
  unsure (1)..(492): unsure at all n locations
gganccacnagagcggcctacccaggcggggggaaagccacnacgaaagaaagccgaccacgacancgggggggacngccacaaaaaccaanncgnnggaggggcaagggaaacaagcggaggaatcccgctatacaaacacacgcacaccgcgaccaacacggcacacnaaagaacccccggcgtgcgactgggngcgacggaccaaaccaacacgccgagancccaaaaaaacaccccccgaaccgggggcggggggggagcgcccaaccaaagggcaaaccgggaaacgaaggacccacacaagcggcgcgacaacgccgaccacgagcgcgccgaggaccagcagcggcacagccaccggggcccggaacggacgaacgccgcggacgggccccacccgacacccaagggacccgaagaggaggagcgcgggcgaagaacaacgccgagagagagccggcggaaccggggcccgcggacaggcgcggg

SEQ ID NO: 120672 - DNA, 487 bp, Arabidopsis thaliana columbia
  unsure (1)..(487): unsure at all n locations
gtaccgggccggaanncccgggttgaccggggcgggcgaaccacaanacnacanangggggacccccaaagcgggggcnccgcaaacnaaaaaaaaccccccgacccacgacggagaagaaacgaagggcgccccaacccgcagaacaccgcacacaccaaacgaaaaaaacagacaggcgcccaaggcgcgactccttttcgtcgacctgggacgatgcggcacaaccgcaccaggggcagaagaaacaaaaaaaaaacaccccccgccgaaggagggagggagggaggcccccccccaaacgaacctccgccaaaccccagagaacccgaaaacccgccagacggacgagcaggaagacaggcccaaccggcggcagggaaggaggggcccagcccatgagaaggccgacacagagaacacgggcagggacccagaaagggcgccggagacccacgcccaaaaggaccaccaccaaacgagccaa

SEQ ID NO: 120673 - DNA, 459 bp, Arabidopsis thaliana columbia
  unsure (1)..(459): unsure at all n locations
cgtacgtaagctgggatcctctagagcggcctttccatgcgtgggttaaccttttttttgcgagaagcaaaaaaactctttattcttggtatgcttcaaattcaaacatctccgttttttaatacagagttcatatatggatttgttcgcaggggacaaccaatggaaccaacaggataacgcaaannaagattcctataattccgggggtagggaancaactaacaaactggtgacagacaagggccaaactgttaagtcaaaagagcaacaaactcatcaatcttcttgtccgaactacctcctttagagatagcttcgcgagccagcaccttaagcttctcaactttctgcttaactctttccctcttttttctttcatgacctcaacaagcatattgcaatctttttctttactgaaaagcccttttcatggggcttactcttaaccccaatttt

SEQ ID NO: 120674 - DNA, 179 bp, Arabidopsis thaliana columbia
gcgacgtaagcttggacctctagagcggcgttcacgcgggggacacccttttttacaacgcaagactcttggaggggggacccttagtacaagaagggccgaaaacactagagaaaagcgtaattcaaatccaccctaaatcattattcccgcccagactgaaccctgccttaaaagcc

SEQ ID NO: 120675 - DNA, 482 bp, Arabidopsis thaliana columbia
  unsure (1)..(482): unsure at all n locations
ccgggttgaccggggcgggggaaaccgcnnncaaacagnngcgacaccaccaccgagggggaccgccgcgagaagacgacagaagggcaccgcgccgagaagacaactgaatggccacaaaaaaaaaccaacaccaggaagccccaaaggccgccccaacaaagcctctggtgggtcttggggacgaagggaaaagccaacaaacgggaccccggaaaaaaaaaacccccccaggaaagggggcgggggaggaccccaaaaacaaacaacaccccaaagggcacaacaagcaccccggggggcggacccaaccgagccaagcgccagggggacaagcagagcgggaagcaacaccagcaacccagccaccgagagaacccacgaaaaccaccgaagcaggccacaacccgaggacaccagcaagaaccccagagaaagacaccaacgagaacgaaaaagccaagaagagccaccccaagccg

SEQ ID NO: 120676 - DNA, 467 bp, Arabidopsis thaliana columbia
  unsure (1)..(467): unsure at all n locations
aaaaaanacagaccccccnancggaggggggcccccccccccaaaccacacncagagcccccagagagagaagggcttttaaaagccgccgccacccggggaaaccagcaaagccaccaggacgagaaaccagctcccctcctcctttggactgctgggcacacaggaggggggggtgccccaaaaaaaaaaccccccccttggcggggggagggggagggccccccaacaaaacagcaacgacgggacgagaaaaaaacgaaaggccgggggggcaaaagaaagcaacacccgcaaccagcgacacgaagcaaagcacgccccgccaacacgcaccggcccccgacaccagaaacacccgacgcaaagcaacgcgccacccacagcgcgaggcgcgagaacccgcccgaaaacgacagaacagcgcacaacgaacaaacggccaaccgcgaaacagcaacaaaaag

SEQ ID NO: 120677 - DNA, 178 bp, Arabidopsis thaliana columbia
  unsure (1)..(178): unsure at all n locations
cgtgcgcaagcngggatccactagagcggccgtctccacgcggggaacaggccgctataatacaacacaccggctgtcgccggggagaagccgtacggacgcgagggccgacccgggaattcaggaccggcacctgcaggcgcaccaacataccatatagggagtagaataacagcta

SEQ ID NO: 120678 - DNA, 166 bp, Arabidopsis thaliana columbia
  unsure (1)..(166): unsure at all n locations
ggatcctctagagcggcctctccacngcgggcgaatatctttttttactgctgctagaacactacaaaggagattccgcatgagcatagataggactcgaatctttctttaccacaagagggttttacaaagatacaatgatcatgtcctataagagaaggatcaa

SEQ ID NO: 120679 - DNA, 415 bp, Arabidopsis thaliana columbia
  unsure (1)..(415): unsure at all n locations
ctgcaggnaccggnccggaatncccgggttgacccacgcgtgcgcacactcgtccgtacggctgcgagaagacgacagaaggggagagnnagagggtntagncacactctcattctcgtttgtgtttttgattgtgcggagaattggtgatagataagcttcttcttccctcttctcaacttggngganctgngtgctattttcggggggaggcncaacggggccagnaccttccccaaaggaanacgcccccanggggccgaggggcaggccagaccgannccncggccgaccccacccncagnnacccgaaccnccacaccnagacncncggnggcnaccagangcagcagcagcagcggggcgncnncccggccancggcgcaacccaggggcanncagcacaagaaggagg

SEQ ID NO: 120680 - DNA, 239 bp, Arabidopsis thaliana columbia
  unsure (1)..(239): unsure at all n locations
cgaaagccagacgacagnagggaancacaaanaagagaagccagagacaggcaggcaagacaaccaaaccttatagacattgagggctaaaccagagtacaagcaacatagacaancaggaaagaggtgccgtggaatttggacngnngacnannaaacaccggacacccagaggaaagaaacaccccgcccaggggcggaaggggagaacaccccgcaaaggcnccaccagcaccagg

SEQ ID NO: 120681 - DNA, 463 bp, Arabidopsis thaliana columbia
  unsure (1)..(463): unsure at all n locations
ccggnccggaanncccgggttgacccaggcgggcgaatcgnngcnagaacgacagaaggggcagaagggggagggagagccccccaacanacgcannngacancacgccncgaccaagacgagtatctcancnccccggccnccgagggngaaaccaccgncaacaccaacaagaagaaaggtggctcctacttgnggngangcgngacccaaaccagggaacgagaggaaagaagcccccccccagncggggaggggcgaggagacccccacnacggcngcngaggcaaagcgcccaccaacacacccaagcagagagggcccggcccccaacagccccgccgcccacaacgacagcacgaacgcacccgaaagggcacggcaccccggcaaagccgccgcccgacgaaaccagcccagagccggccacccggaacgagggagccaaccaagacggcccccc

SEQ ID NO: 120682 - DNA, 504 bp, Arabidopsis thaliana columbia
  unsure (1)..(504): unsure at all n locations
agctgggatcctctagagcggcctttccangcggtgttaagtctactatataatgggcctctaaagacattttaaggaactgacattaaaaccaattattagatagtatataaatactgtctggaaaattcctctatacaaacacacgcacaccgaattcaactttgctcataacagaacacactgtgctaacatggggggnggacgagacagatatcccgcaatcccaaaactacaggcgcacaaccttgacaggtgtatgaccggatatacactgtgcttagggggcaatgaaagacttattcatcagctgaacagcggtgtccatgaccttgcaagcatgttaaggctcctttccactgggttccagaatttaagatcaactttaacaggccacacctaaacaccaaggaacccaagagggggtacctgggccagaaacaacgcattcaagtcctggggattcaaggacaacgttccatcgcaaacccaacctcccaaagg

SEQ ID NO: 120683 - DNA, 373 bp, Arabidopsis thaliana columbia
  unsure (1)..(373): unsure at all n locations
ctgcggtccggnccggaatncccgggtgacccgcgcggggaacaaganacagaagggggacccaaagnnnncgactnngcaannnagaaaaancnnnctatccactcggagaataaannaagggctctcaannncgaagnctgcttctccaacgaaaaaaacgaaatctttaatggcgaattttttgtatcttcgggggcggaggacgcaccanggcgagnnncgncaggaagaccaccgccnaagagcaggcgcgcggcggccccaacnatcccccaaaacccagaaaccgagnacgccannnccggcaagaagcagccgaaacccgggggaggggggnnngcgaaggaagccggacccgaacccgcaggac

SEQ ID NO: 120684 - DNA, 328 bp, Arabidopsis thaliana columbia
  unsure (1)..(328): unsure at all n locations
agcnnggatcctctagagcggtctcccccngcgggcgaaattcctttttttacgagactaagctattacttatcggtggaatagactcttcttctattgagatgtgaatataaactaaaacacattctattttactgagctctcaacattcagaatgcaaacggactaaccgcagngacacgatagtcggttttagggggcgggcncnnngccncgggcgcaaagggcaaccttagccggccccngcgcgggcgacgcggagaacngcaaagccccacaggcagacncnagcnaccacaacgaaagaaaccagccggaaaaaccaaca

SEQ ID NO: 120685 - DNA, 482 bp, Arabidopsis thaliana columbia
  unsure (1)..(482): unsure at all n locations
gcctgcggtccggnccggaattcccgggttttcccggcgggcgacctgcgagaagacgacagaaggggatagaaatccagagaacgncncttcttcttcttcacttgccggagaagatggatttgttgttctgtttccgaccgaatcagacttgtcggggaatttcagttttgcctgcnnnnagcacctcctatctttccagcgggancgnnnnccggcgacgacgagncaacaaaaaggcaccccggcgacgccggggcggcggacaccaaactnaaccnncaaaacncacgcgaagaggaagaanaaaacgaggacccccgaaccgaaaccgaaaaaaggcgaagaggggaccanggaagaagaagaagaagaggaganggcnccncccgaagagacccaagagaancaagacgagcngccaccggaagangaagacgacgaagacgacgacgaggaccgngggnccgacgagagcgagg

SEQ ID NO: 120686 - DNA, 441 bp, Arabidopsis thaliana columbia
  unsure (1)..(441): unsure at all n locations
cgtcgtaagcttggacctctagagcggcctctcacgcgtgggttattcctttttttgtctacgagcaaaacattcaccatcgataaaatcaaaatataaaatctctctttaggtcagtctgaaaggactctgcactataacagttctctacactaaccaacatttgcataaaccaatggcagaacgcttgggtaacttgttggacgctgannncnnccaaggctatcctggaatattttttaactgcgacaagtgaaaacccctgagtcttggactgttggttaacgcttagcggctagcgggtaacaagctagtgagtgaaggccctccttggcttctcatctgctcttgcgcgctcttcattacctcgggatctatgttttccatcaacttagggcttaaaaacacgacaccgaccatgaatcccaccataagacccca

SEQ ID NO: 120687 - DNA, 490 bp, Arabidopsis thaliana columbia
  unsure (1)..(490): unsure at all n locations
cctgcaggtaccggtccggaattcccgggttgacccacgcgtgcgataccgctgcgagagacgacagaagggggaaatcgaacgatttataaaatcgtcgtctggctttcgacggtctgctgacgaagaccatggcgccgattttcagatccacttcccttatcgctttttctctcttcttcttcttctttgctcccctcttccgagctcatctgggtctgaggatagtaacacgatcacgggtagagtgagggttccagcaagcaccgtgattggtcatgcagctaaattctcaaatatcaaagttatactcaacggtggacagcatgttactttcctcaggccggatggatactttaccttccacaaagtgccagcggggactcatctgattgaagtttatgcactgggctacttcttctccccagggcgagttgatgttagtgctcggcatcgnggcaaggttcaagcaacacttacagaaaccaga

SEQ ID NO: 120688 - DNA, 284 bp, Arabidopsis thaliana columbia
  unsure (1)..(284): unsure at all n locations
gaccacagagcggcgcncagcggggaagccactaaaggacgccgccacaccacccaggaaaagggaaaaaggacaacgagggaaaaagcaaacagacaaagaagagagaacttaacgagcaacaaaaaacagtggggagacgacctacgtgagaaatagggggaaanacnacccaacgcacgacccagagaaccaccccgaaccggagggcgagccaaagcccacaaccgcgggaggccaggaaanaagccccacaaccgagcagcaaacaacgaggacaaccc

SEQ ID NO: 120689 - DNA, 474 bp, Arabidopsis thaliana columbia
  unsure (1)..(474): unsure at all n locations
cctgcggtaccggnccggatncccgggttacccaggcggcgaagcgacagaagggnacgactgcgagaagacgacagaaggggacggctgcgagaagacgacagaagggatctcaaaccaannggatttataaaacaaaacaaaaaaaacttcacaaaaaaaaaaaaaagatccaaattacaaccatgcctctgttgttaacgcgggaagaacgancggaacnaaaaaacncaanagacgagccccacacanaccaacgcgagccaggaagcngnncatcacnccacgcgcaacgaanccacgcgccnccggaacgcgncgggncaancgnacgacgaaacgacaaaccacaaacanacaaacacnncancaaanccggcnccgncgaacaaaacnncgagaagcgcgncggangcacgcgcgacgngaacgncancaggggaaaaccggcgaacacancaacggaaaggcccg

SEQ ID NO: 120690 - DNA, 459 bp, Arabidopsis thaliana columbia
  unsure (1)..(459): unsure at all n locations
aaaaaagagcccccccggnacaggggcgcaccacaaaaacaacaaaaaggccacggnaaaagaggcgacacgcccctttaacaacgggaaaagaaggaaagagcacagcacgccacccaaggcccgggccaaacaccgctggccctcggggagaggggaccnaaccgcggagggaaaaaagggcaaacaaaaccccccccgggcggggggggggggagagccccccacaaaaaaagagagccgcggggaggggggggaggggcaggcggggagagcagaggagaaagagggagccggagaggaggaggagacggggcgcagagcggcccgaggcgcccccagaaagaaagcgccgcgggggcaggcgaaagcgagagagcagccaaaagaaaacagcgagggggccagaaggaaccggcacccgccccaaccggaagcagaggcaacgacacgcacaac

SEQ ID NO: 120691 - DNA, 428 bp, Arabidopsis thaliana columbia
  unsure (1)..(428): unsure at all n locations
aaaaacnacanacggcgcnnncaaggggggaacacaaaccgncaaaaagccaccgccgcaancacgccccacggggcttttacaaaggcggcggccgacgaagcacccgcccggaaaccccgaagacggcgacaaaaccgtccaatctgggaagaccgggccccacaccggggggaaaggggccaaaaaaacccccccccccgggggcggggggggggccccccaaaaaaaaagaacacccccaggagaggaaacgcggcgggggggagaacgacgcgcgaaaacgcgagagaaaacccgccacgacacggggcgaacccgaaaaagccagcgcggcaacagaaaggggccgccggccaagaaacaaccgcgaaacgcgggaccgcgccacgaaaacggaggagagcgcaggcgcaaacaacgcgggc

SEQ ID NO: 120692 - DNA, 280 bp, Arabidopsis thaliana columbia
  unsure (1)..(280): unsure at all n locations
agctgggatccactagagcggccgccnccacgcgggggaaaggctgttatatgacggaagcatcggcgaataaaaaggcaagaagaagtgtggaacaaagggatgaaacggatgaacagaaatagaagcagggcgtttagcattaaggggcctagtccataagtcgcataggagaaagnacgctggcgtggcttgtcggcggggggcaaccanncaccaccagacctcccagcaagaaaggagccnnccccagagggaacaggaggcccagcccacacac

SEQ ID NO: 120693 - DNA, 442 bp, Arabidopsis thaliana columbia
  unsure (1)..(442): unsure at all n locations
ggggaagcaaaaccaaacaaaacaggagagggacccggggagcggagccagcagtttcaaagaccgcagggggacacccggaaagcggagaccgaggagaaaacccggaaacacaactgcgccctggaaagccggacacaagacaggaagggacaaaaagaaaaaaaaaccccccccacgggggggcggggggggaaaccccccccaaagacaacggggagcgggaggggcgagggaggacgagcgcgcagaggaaggaggggggagggcgacacaggagaagacagccccgcgcacggagccaaagaacacggggggcaacgaaaacagcgccacggaacncacgaggacagacaggccccaacggcaagaaacggccacgagaaacgggagacacgaaaaggcccgccaggacaccgaaagcagccgaacagaaaggaaa

SEQ ID NO: 120694 - DNA, 430 bp, Arabidopsis thaliana columbia
  unsure (1)..(430): unsure at all n locations
ccgaggggganccaaaacggcggaaagaggaggagacagccgcgcaccaccgcggcgggttgaccggggngaccgccgggcggggagccagcggcggacccagaggcaccccaaaacaagggtggngtttgggnaggccggcccaccacacgggggggcggcgccgagaaaaaaacccccccgcngggggggggggggggggggccccccagaagaaaccaancgccccgccggggcngagagcagagccggccgggagngcacgcccaagcagcgggcgccccaaaccaaggaaagcgcgccgcgggggggagccaacgggggaacgacgaggcggcggagcaaccggccccagggcaaaaacccagcgcncagcngggaaagagcacaggaagcgaaaggccgagcagcgaggggaggggcggggaaa

SEQ ID NO: 120695 - DNA, 410 bp, Arabidopsis thaliana columbia
  unsure (1)..(410): unsure at all n locations
gccacgaggggacaaacttttaggaggcgcggcggcggaaggaaaaaacgccccccaaaaaagacagcgcgcgcccaaaacctcaaaatttggaacgaaagggccccccaaccagggggggagcncacgaaaaaaaaaacccgcgccccnggggggggggggggggagacccccccccacaaaaacacaaaacnccgcggggggaagagaaagaacgcaggggggggggggcacgcacgaccaggcgcagccgggacagaagccacaagaccacgcgagaagacgccgaaaccggcaggcgccggacccgcgagacaccgacgagggaaagcggggagcgcaagcgccccccaagcgacaacgagccgagcgagaggacgcgacgacagggaggggcgaaggacaagaag

SEQ ID NO: 120696 - DNA, 453 bp, Arabidopsis thaliana columbia
  unsure (1)..(453): unsure at all n locations
ggaccacnagagcggcctgccccaggcgggggaaaacccgnncgaccacggcaacagcaccgangcacggggacacaaaagagcacancaaaggagaaaagacccgggcgaacaaaggattttttaaaacaccaagcacattttagcaaaataggtaagagagaaaagcaaancaagccgccgtcgcatttgggagnggccccacgagaccggcaaagagancgncaaaaacagcaccaaccacaggcgccgggagcgcccccccaaagaagaagaaaaacgcnggcaaggccagaaccacaaacgccgcagcaacagggaggaanacggcaacaacgaccacgaagaagacnacggcgaggagcnacagggcaaagccagcaaagacgggagcaaagaaacggcaaggagggcaccagggggcagggaagccaaacacaaacagagggccgg

SEQ ID NO: 120697 - DNA, 481 bp, Arabidopsis thaliana columbia
  unsure (1)..(481): unsure at all n locations
gcccgccggnaccggnccggaanncccgggttgacccaggcgggcgcacccccgccgaccacgcgnccgcacggcngcgaggggacgacagaaggggaancacncgaaaacccaccaaaccaaaaaccaaacacagagaagagaaaagggccgcagaaggagaagnnancgcnngccacaccgnngaagaatgctccgagaagcggagggcgccaacgaanccaagaaactgattgagaaagacctcaccgcaacagggggcccagcgggccgccccaaagcacccgacgccgctgacttagccaagaagcaccgcggacgaggcctctccaaggccgatgtcgacgaaaagaacactggtgctgaggagataaaaggccaggcaaggccaacgggtaacgccacgaaagaaggagagagcaaggagacggcggggggtgccggcaaagaagaaaacaccgccaaccccgagaagcacaag

SEQ ID NO: 120698 - DNA, 548 bp, Arabidopsis thaliana columbia
  unsure (1)..(548): unsure at all n locations
gggaaaccaccccccccaatcaggaaaccanaagagcggcctgaacaagggggagaggaaatcccccntaaaaaaaaacacaccgccccccccaaggggcaaccaaaaccacgcacaaagagaaaaggaaaaggacagaaaccaacagaaaattttccgaccacgaacaacagaccgaaggcacaacacaacaaccaccgaaagagaagacccacaacttccctcaaattttcgaagaagaagaccgaccccaaaaccagttctccagaaaaaaaaaaagcccccccaaagacggggggggggggaaaaacccccaaaaaaacaccgaaagccgaagaaactcgaaaggacacaaccaagccagacacagcacacagaacaacggagaaaacgagaaaaaacccaaccaacaaaacaaaaaaaccacggaaaaaaagaacgaaacaaaccaaaccagcagaacgagaagaaaaacaaacccacacagccaacaaaacaaccacgaccaacccacacacaaaaaccgaaacaaccaccaacaccccacg

SEQ ID NO: 120699 - DNA, 423 bp, Arabidopsis thaliana columbia
  unsure (1)..(423): unsure at all n locations
cggnccggaanncccggttgaccggggcgggcaacctcngcnanaagacgacagacgggggcnnagggggggacacgaaaacangnnccannncaagcaaaagaggngagagccacnatttcagcgcgcccgggagggcgaagncagagccagccgaagggcnccgccccccaattggtggtcttttaagangaaggagangacnaggaaacgaagcaaagacacaaaaggcccccacngggggggagggggcggcgccaccaaagacaacggagncgaaaagagaccaacagacgcccaagcggagaaccgcaacggaccccgccgcacgccacaagaaagcgcgagncacggccaaagccagcagacaaaaaaacccagaccggcacacaaaccgaaccagccgaagagacccaaggaaga

SEQ ID NO: 120700 - DNA, 271 bp, Arabidopsis thaliana columbia
  unsure (1)..(271): unsure at all n locations
aaaaaanacncccccccccnnagaggggagaaaacacccaaanggaacagcaccgggaccgcaacagcaagggcaccttttcaaacgcgacagaagaggcgccgagcgagacaaaagnagcgacaaagagagcacgagaaaaaatccctcccttttggggcaagacgggacccaccaccaggggggcgggnggaaaaaaaaagaccccccccaggggggggggggggggggccccccacagaaaaaagagcccccaacacggaggaaagaa

SEQ ID NO: 120701 - DNA, 466 bp, Arabidopsis thaliana columbia
  unsure (1)..(466): unsure at all n locations
cgtacgtaagctnggatcctctagagcggcctctccatgcggggtgaaatccttttttttttttaatatggaagaagcttgataatataaccaagtttggttgatatataggtccggagttcaatttattgtctgctaaatggatgagataataaaatatacaaaccaacacccaaccgaacacagaagagtgtggtccatatgggggggacnnggcgcgancaaagaaaagaccagaagggcctccattagggaccaaagccagnggcactggactcgatgcaccttcttcaacgctcaagatcccagagnggaaattgatttctgagttacaaaaccaggacatacactggtgatgatgaacgatttggggccgcttacccaatactcggtgtcaatgagatcatggcagctttcggttgtatggatccaaaacatactggtggcccaccctttgacttgaaag

SEQ ID NO: 120702 - DNA, 428 bp, Arabidopsis thaliana columbia
  unsure (1)..(428): unsure at all n locations
gcgtcgagcttggacctctagagcggttgccttgtgtggtttttcatcaatacccaaaaaatcctcttaattaccatccccaggcctttttcattgtaagcccacaattaggcccacgtatgtaatttgaagatagaacacatcgtttttcattcattgtgatcgatcaagncgaagagctcagcgtcgattccgaaggggagcanccngaccatggcgctcgncttcaacctgagctttgggacgccgtgccgtttcagccacggataaaccacaaacactttgttcattacgaaaagctccaacgcctgcggattgaaaacgacacccattctcaagctcatctggtgcggcactaacatgggctgcgtatcgagcaagttctccagctcgccagtccagcagcagaggcagccaagggtacatcg

SEQ ID NO: 120703 - DNA, 484 bp, Arabidopsis thaliana columbia
  unsure (1)..(484): unsure at all n locations
ccgccggnaccggnccggaanncccgggtttgacccgaggcgggcgcactctcgncncgaggacgcgngggaccaacagcagggggcggcnaagnnancananagncaanccgcnaanacaagggcancanngatttcaccngcnncaanngaacccgnacangagnggggngggaacgggaggacaanggctggtgggcntttagnggatgagagccagannncaggaggacgccaaaacaggaacacaccgacnccggaagagacaaagcccccgacggggngacacaggncgaaacaacncggaaggggccaagggcgcgggaaagccgccnngggacgggcaaaaggaagaacacngnagggaagggcnccccancccgaccacccaaagaggcaaaacggggcaacgagaagcaancccaccaggacgacaaccaaaagagacggggggaaagaggcgcggaacccccagcngaggaag

SEQ ID NO: 120704 - DNA, 390 bp, Arabidopsis thaliana columbia
  unsure (1)..(390): unsure at all n locations
cgtacgtaagcttggatcctctagagcggcctttccttgcggtggataattcatttttttttttgtggatgattgtaaaagagcgaggggagtagattttatttataaaaacttttcccggactttcagggaaatttttctttgcgaaaactatcttatacgatatctaaaaaaaaaaaaacccnncaaaccgggtgcggattacaggggggacaacncnancgacacaaattgaagagcaaagaacaccaccccttacagagccgaaggaaaacaccccaaanccccgggcgcccnnggcggagcaaggaccatngcgggggccggaaccccgggcagccacnagaaccagacccaaaacggggacccgaagcgcccaaaccaaaaaaa

SEQ ID NO: 120705 - DNA, 437 bp, Arabidopsis thaliana columbia
  unsure (1)..(437): unsure at all n locations
cggcggagctgggaccatagacggttcnccggcggcgaaaaccccnacagnaaaannncnncggaagggggaaaacaaaaaaagggggagcgggaaccgaaacccgagccccattaaagaggacaagaaacacagccgaagagaccgagggagaagaagaaccacactttgctcacattactnggacgaaccaccagagcggacctgaccgaaccaaagacgcccgcctgaggggggggggggagcccaccgaaaccggaccttcgacccaaaagagggcctgacccgacgaggcgcaacccgcaagaaaaaccgcacaggaacaggtcaagaccccgagagggccttaacccggaccacaaaaggagggtctcacacggtacgcgccctaacgtgaagaaacatcgggaagacaaggggcccgtccccgaaggcaa

SEQ ID NO: 120706 - DNA, 431 bp, Arabidopsis thaliana columbia
  unsure (1)..(431): unsure at all n locations
acagcaaaaagnnncccgagaaaaggggaagaagacaaaaaaaangggcggancagcnaaccgangaccagagcncctttttcaaggaagcttttagcctattcgacaaagacggagatggnngnatncaccacatggctcncgttttggnnggtnagancacnngggcagaacccgacagaaaaacaacncccccacangagcgggggggaggangccgacgggaacgggacaanagannncccagagggccggaaccgaagggcacgnaagaagaaagacaccganccagaggaagagccnaaggaagccnncagggggnnggacaaggaccagaacgggggcancccggcggcagagcagcggcacgggaagacaaaacggggggagaaggngacggaggagggaagccgagagacgacccgagaggc

SEQ ID NO: 120707 - DNA, 240 bp, Arabidopsis thaliana columbia
  unsure (1)..(240): unsure at all n locations
caccaaaananaaagaagcagggaacccnacgncctataanacaaaaaaccanaggacacgaaacgcaaccaagaagaagnncaacccaaaggacctgnttgttgagaaganacacgacacgancaacgacnnnggcaaaaaagggagacccaaggccagcgccagagagagacacgcancgagacaagcgngccaaannaagcacaagggccaaaaaagcangaaggagaaccgaagag

SEQ ID NO: 120708 - DNA, 488 bp, Arabidopsis thaliana columbia
  unsure (1)..(488): unsure at all n locations
cccgcaggnaccggnccggaatncccgggttgacccacgcgggcgaagcctncaanaaggccacnctccngcaaannaggggaggggngannnanagnaangcccnnaggaagacgccccgacgnccgcagttttctacatgcatcatagggaccgaaaccacaccatgtaataagnctcccacagnncatttgtgtctttttgggagttggccnccncgnngggaccatcaccatctacatatcggcccaaaataaaggggcgagagagaacaggccactagagagagattcgttgaaggaaaaagggagaaagatgctcaatgatgagcaaaagacttatcttgaccaattggagttcattgacgatctacaaaaactcggggtttcttatcatcttgaagcggaaatcgacaacatttaacagcttcgtataaaaaagagagaacaaacatgcaggagagggacctacatgcccccgcactcgag

SEQ ID NO: 120709 - DNA, 407 bp, Arabidopsis thaliana columbia
  unsure (1)..(407): unsure at all n locations
caacnaaaangannagaagacagaccaaagcagcccattaacaggggnggncaaaaaagagggcgcccaatcgagaacctttggancgaaaaaatcgtctcgtttgangctggcgacancganaccattattcgcaatccaactagagccgaatcatcaaagcggcgcatatacataatacggttaattagattagggggggtcataatctcagaccatgtcagaccacacaagcatttaagagaccaaaatagaactggaaaaaggtactgacatttccataaaaaaagaggtagggctgatagagaatcacgggcccgaatataaaattaattttcttatggaatactgaaatacctttcaaacacttgcaaaggatatggttacccattcagggcctggaaaga

SEQ ID NO: 120710 - DNA, 262 bp, Arabidopsis thaliana columbia
  unsure (1)..(262): unsure at all n locations
cccgcggaccggnccggaancccgggttacncagcgggcgagtctncggcangncaangggaccgangccgggagaannggagaaanacgancnggancaagggccgcncaagccggnttttaagaagagattatttaccatgtgggttcttcacttagaaatccgatgaaaaagtccttgtctcntttggancgcggcggnannncncaagcaaaccgnggaccaacaaagaccggaaggncggggggggcggggccaccg

SEQ ID NO: 120711 - DNA, 481 bp, Arabidopsis thaliana columbia
  unsure (1)..(481): unsure at all n locations
cggaccggnccggaancccgggttgacgaggcgggcaagcctngcgacaacnnanacccgccaangcgaaggaacacaggcgcaaaacgacgcagagcggggaaaaaacagacgactgttcgggcacaggccacgacgaggaaaaggaagaccaaccgcgcagaggaaacagaggcggtcgtctattagaagctcgacanacgaaagagaaggcgttaaagaaaaacaagcccacgagagggggggggggggagaccccccatggaaagaatgggaaaaccgaattgacagcgaaaagagcccgtcaccaaacgaagcccagcaaaagaaccgagacgggaacctgggaaggcggacaagaaactaacccaagcctaaaagcggggggcaacagaggggaagaactcggaaaggcctgcaggacgagaaccagagacggggcagtgaaggcagagagggacaaagaagagcccgcgagaag

SEQ ID NO: 120712 - DNA, 503 bp, Arabidopsis thaliana columbia
  unsure (1)..(503): unsure at all n locations
ccccgccggnnccggnccggaanncccgggttgaccgaggcgggcgaggctncnnccaaacanncnnccccccccggaggaggggcacccaaaagcagcaaaagaaaccggaaggcgcaacagacacaagattggtaaaacccgcgagaaaccaaacgaagcaccgcacgcaacccaaggaacaaaccgccctcgtccaaaaaagggaagaaagaaccccaccacccgggacgcagaaaaaagaagaaccacccccccngagaggggggggggggaggggcccacccacagaaacaacagccccccccgcacgggacaaaaaaagaaagcgagcgggaacacgcaaacgcccagccggaagcaaccaagaaaagacgcaaggccgcccgcaacggcaaagacaccaaccagcgcaacaccgagcacgccaacgcccgccccgagagacagacaggccaccaccagccagaacacccggcggggcccccaaaggggggcgcgaa

SEQ ID NO: 120713 - DNA, 336 bp, Arabidopsis thaliana columbia
  unsure (1)..(336): unsure at all n locations
ccaaggggacaagagagannnaacanggacagacaccacgcncaaaaaggcacaaatttcaaggaggacgaaacccaagcccngaggaaangggannnggaagcaacggaactctcggtggcctttagaaganacccaaaagccacagcggccaaaaccaacaaagcaagcccagagacacggagagacagaaccncgccgcnagaaggagcgagccgnccanccacgagaaacccgaaagccggacggccaaagagcgccagagncngcnncncaancagagcggacgcgngggccgacccgggaanaccggaccaggaccggcaggcggaccag

SEQ ID NO: 120714 - DNA, 473 bp, Arabidopsis thaliana columbia
  unsure (1)..(473): unsure at all n locations
ccggnccggaancccgggttacccacggcggcgaaccgangagaagcagacccaggcgcccnnnggacgaccggananaagganacccgagganggaaagcccganaccccnaacgacgatggnncngncncngagngncncnggacccgcgaagnnggnnnnggaagccgnggcnctttcttttttcttagnngngttcagagagntacgttgaatccaaataccatatcctcaccgcttgagtttaggcctccgtgacatccgtacctttttgagagtagtgaatgtaaatgttaaatctctcatgtgaaattggtagcaactcctattcgtaaaaaaaaaaaaaaaaaaaaaaaaaaagnnnnnnnnnnnnnnnnnnnnnnnnnnnnnnnnnnnnnnnnnnnnnnnnnnnnnnnnnnnnnnnnnnnnnnnnnnnnnnnnnnnnnnnnnnnnnnccacaccggcgagactg

SEQ ID NO: 120715 - DNA, 317 bp, Arabidopsis thaliana columbia
  unsure (1)..(317): unsure at all n locations
cggaagctgggatcctctagagcggctgccctggcngngggaantccccnnagnnnnaangangaaanccaaaactgaagagngaagacggaaacgnnncaagaacgggagagagagacaccaggccgattgcccgaagaancgctaggacccgagcataaggaggactcagaanccngaccacgcttttttttnttttaggggggacccacccgnagacaccaggaaccaccncggggacaacaacncncagacccgaaaccacnacgagcgcccaggaagggccaagcaaagngcacagcacaagggccacgagg

SEQ ID NO: 120716 - DNA, 469 bp, Arabidopsis thaliana columbia
  unsure (1)..(469): unsure at all n locations
gccgccgtcgaagcngggaccactagagcgttgcccgggcggttaaccctgnnnaagaagggngcccnacaacaggaggggagacatcgccacgcgcagcacgagggggaaaagcgggcaccaaaaccatctgggcggaagcacaaagaaccaacaggcggcagccaccccccggacaaaaaaaggtgtttttttctttgggggggggaaacaccccgaggaaaacaacccgggagaaaaagcccccgcgcccgcggggggaagaaagacccccaaaaggacggggggccaagcnacaaaccagaaacggaggccgaaaaagccggacccaaaccaaaacaggggaggggaaaaaaagcaaaaaaaaaaccccgaaagccaaggcccccaccngacaaccaaaaaacccccaaagaaccccccggggaggagggggagggcaaaaaacccccccacaacgagaaagggc

SEQ ID NO: 120717 - DNA, 521 bp, Arabidopsis thaliana columbia
  unsure (1)..(521): unsure at all n locations
aaggacgggccggaancccgctcgacgacgggaaacccccagagaagaaggagagcccaaaaaagganaacaaacaacgccacgcgcggcgcgggcgagaaaggacaagcacaaaaccggaacccacgggaagaagagagaaccgcggggagggcggcaacaacaaaaaaaaaaaaacggctgccgcgagggcgggaaaanaacacgacgagaccccaaacaaaaaaacccccccaaccgggagggggagggcaggacaacccaaaagagcggaagaacgccccggcncggggaaccgcacagagcgcggggggagaacaccaagaggccgcgccagagaggagcaagaaaaaaggcgagcgagcagcgggcaggaggcaggagaaacaaaccccggcggaggagaacccgaccagaaagacgcacagagacgacgcccagaaaaagagagggggcagagaagaacacaaaggcggcaacgaaaccgaaaaacaaaaaccgggagaggaacaaagcgcaag

SEQ ID NO: 120718 - DNA, 506 bp, Arabidopsis thaliana columbia
  unsure (1)..(506): unsure at all n locations
cggcgnaagctgggacccactagagcgttcgaccgaggcgggggatacttccnnaananaanggcaaacagccggagaggggggcccaacagcgcccgggaggggaaacccaacagccaacagggccactattatgaagagagacccaaatggcccaaaaaacacaagagattcgcggacaaaacccctttctccttttttggnagaaggaccccgaggagggagaaccgcngaaaaaaaaggccccccacgaacagggggagaaaacaacccccaacanagaggccgcagggaggacgacaaaacacagaacgnggccggcaccagacccaacgagcaacccggagcccgggacaagcagagggacacaaggaaacagggccgcgcgacaaacagaaggaaaacgcgccaaacaccagaagagaaagggaaccgccagacaggggggggcggcccaaacgcgacggacccaaaggcacaaacaacagcggaagaccggaaccccg

SEQ ID NO: 120719 - DNA, 490 bp, Arabidopsis thaliana columbia
  unsure (1)..(490): unsure at all n locations
gcgtacgtaagcttggatcctctagagcggttgcncctggtgtgttatcccttttttgtttttctttttttattcagaaaaaagggaactttgctgaaagacgagatgatggctaacacagaataatggtgtctcttccccaaatgattgagttattgagacaaacttccaaaaagaaaagaaaatcgcactttgctccttaataggggaggtccacgagncaaggagcgggcatgaaaagatagagacgattgatatttcatcttggagatggaaccactttcgttcgagagggggcttactaaaaagtccaagcaacttctatgacccaattcaactattgtaccttccaaataaaggtgaattgaccaggaggaacattggggcttccgaactggaaaccaaattgtggagcggacgcgtgggtcgacccgggaattccggaccggtacctgcaggcggaccagctttccctatagggagtcgaata

SEQ ID NO: 120720 - DNA, 509 bp, Arabidopsis thaliana columbia
cgcctgcaggtaccggtccggaattcccggtgtcgacccacgcgtccagctccacaatctggtttccagttcggaagcaccaatgttcctcctggtcaattcaactttatttgaaaggtaaaatagttgaattgggtcatagaagttgcttggacttttaagtaagccacatatcgaacgaaagggggaactccctcccttatgagatatcaaacttctctatctcttcatgcccactccttaactcgtggacatgaactatgaagaaacatcagtacgattttctttttctttttgagaagttttgtctcaataacctaaatcattgtggggaagagaaacaatttttcttggggtagccatcatcttgggctttcaacaaaggcgccttttttttgaaaaagctaagcaccactggcggcgcggaaaggtcagcggcggcgcatctacagggcccaatgtttctgtgcgcgggcttgcggtatgccttgttgtttttcaggggcgcc

SEQ ID NO: 120721 - DNA, 491 bp, Arabidopsis thaliana columbia
  unsure (1)..(491): unsure at all n locations
gcgtacgtaagcttggatcctctagagcggttgcccttggtttttttattcttatggtaacaactttcttgtgtatagattgccacgtagattgtattaacagagtactcaagcatcagtttacaaaccaatctcggtgtactaaaactgttacaatttaaccgattcttcttttatgttacaatnggatttttgttattatgtatctaatctgctcttctgcactcaacaagacattctttacgatccaaccttgttcttgcatttgtttgttcagtgcgatattatcatctcgagcagctcgcttactctctctagtgagcaaggtccaatcttgtagcgtcaagtctgaaaacgataaatagcttctcttggttctattggctccaagggatttacgtatgtaacatgtctgtaacaaactcgtgataacgtctacactgttggctccttcgcgcagacaaataacgatgcccgattttggtattctt

SEQ ID NO: 120722 - DNA, 165 bp, Arabidopsis thaliana columbia
  unsure (1)..(165): unsure at all n locations
gggaagaaacaaaaccaggcgcacaggagaacacagaacagancgagacaccttggagaagagcagaagaacccaaacgaccagaancaagcncaagggcccgaggcacggttttcttatcaggggggggaacagcccagaagggggagccnnnnacaaacaaac

SEQ ID NO: 120723 - DNA, 404 bp, Arabidopsis thaliana columbia
  unsure (1)..(404): unsure at all n locations
cgtacgtaagctgggatcctctagagcggttgccctgggtgggttattcttaactaaaccgtgggtcttattaaggctgtgacataaaaatacacaactcaagaaaccagtacataggagtaacatgcagagcgttaccataagatattgcagatcgccacaaagattatataaaacgctaaaacccattcttgtcnttaggacgnggggaaaagcaacnacaaaaaccagcaaagncgaagacagaccgacacgacggccgggggcagccgggaacncgcaggaggcaaccacccgggagcgcaaagnaggaaaagnnccggcccgggaacagngncaccgcgacgggacggccaacaccaaaggcnacccgaggggccgccgggcagaggangcncagcaaa

SEQ ID NO: 120724 - DNA, 433 bp, Arabidopsis thaliana columbia
  unsure (1)..(433): unsure at all n locations
cggcgnaagctgggatcctctagagcggctgcccgagcngggtttattctgnnaagcaagcnngannggnnggngggggggggcaaactaaaactcatgtataaataaaaacaccaaagcctgaagatgaaattcagaggacaagaagacagagcggagggggcctgaccgtggcataaggacaaagnnatgtgttatancttcagggggggggacganggcagaggggccccgaaaacaagccacacccacgaagaggcggcggcaaagggcggaaaaanaaagcagcaaacccacagacgcagagannagaagnccgggacaaaaacacaacacggnccggggaagnaccgaagccaggaacggagcaggaaacnngggaccaaccgaacaagcnngccggacaggaaacggacgcggggggcgacccggg

SEQ ID NO: 120725 - DNA, 491 bp, Arabidopsis thaliana columbia
  unsure (1)..(491): unsure at all n locations
gccgggaggtgccgggccggaatngcnggttttacccaagcggaaaattcctgttaagcaagctagatcggtaggggcagagattcctgcaacggacctggcttgagaactacaacggagcagggcggggtgatgtgcaaaataggtaagttgtggggctaagggactactgcttcaaaaaacaaaactttttcttttaagggggggnggaggggcgagggacagagaacacgacagaaccaaccaagggcgggggggggggacccgaaccgcggccgcaagggaggacagggacacaaggggggggggaggcggacacggggcgaaacgggcgagacgcggggggcgggggagacaggaagggagcggcgggaaagccaacggcaggagggcaggcacgaagacagagcgagaaaggggcggcgggggagaaaggacacaggcgaaagacggacgggagggggagagaaagccaaaaacagggggaggga

SEQ ID NO: 120726 - DNA, 410 bp, Arabidopsis thaliana columbia
  unsure (1)..(410): unsure at all n locations
gcgggggggttggggggggcacttcttgaggggggaaaacccttaaggaaaggccagactagcggggaaataaatccacaacttacaaagaacccacaccacaacacaactgagtacggccgcagctcagaccgccctgcccaaccacgcaaccgccccctctccaagggaaggcgngtctttttttttttttcctcacgaagagagggggagtccttagaccgcgcgccacgcgtccgtcgcccaggtcgcccagacattcacggacaccgaacggggagcgtagtgcacttacctccccgggcgaaaagagctagtaaacgagagtacacatacgcagaaacccgcccccactcaccctcccccctctgcgacggaccgccgcgcgccacgccacgcccgccacccgg

SEQ ID NO: 120727 - DNA, 481 bp, Arabidopsis thaliana columbia
gcgtacgaagcttggatcctctagagcggtctgcctggctggatacctttttttttggatgttatgctatataaaatcctcatcaatgacgctaccaatcgctaaaatgcctttttggccactttcaatgttccgaattgatacaaatagtctcgattaagttatcaagcgaaacagagctgatggtccttgttgggggagacgagaacaaggattagacaaccaaatgagtaagaatgtcaattacaaacattgaggcttaaacttcatattgtaatccttaaattgcacgaggaggtttctcaagcaatgcagagagataaacctcatccttggatttaggtgaaatagcccacttgtgtttcttgtacctaaactgcaggaacatgtacatgtaatcatcaagatccttctttttacagaagaatctatcaatccacagtaaccctcccggtctcagcactcggtcccaatcatataa

SEQ ID NO: 120728 - DNA, 503 bp, Arabidopsis thaliana columbia
  unsure (1)..(503): unsure at all n locations
cgcctgcatgtaccggtccggaattcccggtctgttaatgggagcgtaaattcatattttcctctgttttttttccatattggctgaagcatgacaaaagattcacactttcctctgttttcttatgtcaaaatttgaaccaataactgaaagatttggtcaagaagaggaaatgggaagaacacgcnccgctgctacgctgagggggggagaccaaaggcaggattacaagtcatcttaggattactggggatcactgggagcctctcatgtctctaccgattccattccgggggttactttcttagaaaacgaagacactagctacaatatgctacacaatcaaagaagtcacgagtgaaagattcgacctaaaggccgtggacgaacgtgtgggtgaaggtctaataaagatggacagcttgttcgaaaagctttagaaagaccgtcatggatttgggggaaagagccaaagacggcagcattaatggagtagaagaatt

SEQ ID NO: 120729 - DNA, 482 bp, Arabidopsis thaliana columbia
acgcctgcaggtaccggtccggaattcccggttcgacccacgcgtccgcattaaccagtagtggacagcaaatttatgttcctaaagctgtctcacgagggagaggacccaggaaatccgacactcccctgaggaatgaaaatcaagcacattctgagcaaagcaaacagttacgaaattctaatgggtctcctactctcgtgagaaaatgccacacctcgattcacggcgttcaccaactgcccctgctaaaactgagaatcaaggtgcccatgccaaaaagaatgtagctgtgtcaagtttgagttccgcttctcctccattttatccttcagcgccgtccagtaatgtggtacatggtatacaagttagtatggaaagactccacacaaatgaaagtgtcacgccttctgggaagaagtataggaatacaaaatccggttattcaccagtttggactgccaagactcttcagtccacta

SEQ ID NO: 120730 - DNA, 476 bp, Arabidopsis thaliana columbia
  unsure (1)..(476): unsure at all n locations
cgcgtgcgtatgctgggatcctctagagcggtcgcccggggcggttaagcctagctanaaaacaggnngcgaacgataaggagggatggtggccgcgaaacaaacaagtggtctgtaaccagcaaacctcaagttctgttggtattcatgcatcctcatcgacatataaccaaccaaacagataaaaagaaattgttcttactttcggggggcaaaagccaaagggcagaaaacgggcggaaacaaaccccganancaagagagcgggcggaaacagangcaaaaaccganaagcgncgaacgaaggcaaagccacgaagagggncngccnacgggcangcgcngggacaagccgnggcacgaaaacaggagggaagccaganagcnccggcggnnnnaaagggaaaaggggaggaagcggacggccanggggaagacgagcgngagggccccccagcncaccaaanaacggaagg

SEQ ID NO: 120731 - DNA, 487 bp, Arabidopsis thaliana columbia
  unsure (1)..(487): unsure at all n locations
cgcctgcttgtaccgggccggaattcccggctgcgacccacgcggtaaatctcaatcaagacagacagncagctacatatcagaacatgtaggaggnactggttcctttggcatggttttccaagctaaatgtatgttaactggggaggttgttgccatcaagaaggttctacaagacaaacgctacaatatgctggtctagggatgaagcanaagcnagaccaccccaaagccgaagcttcaaagcagagctggggcgcaagaacagacaacgaagagaggcacggagaaaccggcccagaacgggcgcccgagacccgcaagcgagcggcaagaaggnaaaggaggacaaaccaaccgaagcccagggaaaaaagaaaaccccacacccaccagaagagcagggcgcgcgccaacacccaaaaagcccaagggcncgggcaccggggaacaaagccccaaaaccgggcgggggaacccacacacg

SEQ ID NO: 120732 - DNA, 469 bp, Arabidopsis thaliana columbia
cgcgtcgtaagcttggtcctctagagcggttgcctggtgggttaacctttttttttttttttttttttttttttttttggaagaatatttagatttttatttattaattattgaattagatttttatttgaagacaaaccctatacatttttagcaaaaaaaaatggaaattccccaacacatgttttcgtttcggggaaccaaccatcaccagggataaactctgttgccgggaagttaaaggcatcttcgaaacccataatgggaaaacccgggcggttaacccgtttaaccgtttcagaaccgggaccggtgttgttatactcgccataggagagggaattaggtgctttcccaccgtgccatttgctccaacccgaaccggttataaactcgtaaatataagattccattacaactgttgttgaaaattctctccagggacgtcccaaggagctattgactttat

SEQ ID NO: 120733 - DNA, 495 bp, Arabidopsis thaliana columbia
gcgtacgtaagcttggatcctctagagcggccgccctttgtgtgggttttctttttttttttttttttttttttctttttctttgttttttttgatcgatctttttttttttagtcttttttgtgttcaaaccaaccggaaaaaaaaaacggggaaaaacgtccttttttggcctaaaaaaaaagaaccacacttccctaatatttaagaggggggggcggaaaaacaaaaacgttcggggggaggtttttacaatttggcccttggaaaaaataggggacctttgggcacagacccattttacgttttttggaaaaaaaacaccggggagagggaaaaaccctttaaaaaaaaaaaagccccggggccaaaaaaacatatagacccccgcggggagagagaaaaggccttgggccaaaccatagggacctttaggtgcgggggctccgaaaactgtggagggacagacgaggggggagtttacaatacccccga

SEQ ID NO: 120734 - DNA, 476 bp, Arabidopsis thaliana columbia
cgcctgcaggtaccggtccggaattcccgggttgacccacgcgtccgaccttactctcctttggttttgctgaagatgttgctcggaaggcactaaaagcctcgggaggagacattgagaaagcaacagactgggtattcaacaaccctaatgcatctgtttcagacatggatgtatcctctagcaattctccctcctctccggctcaaagtggattaccagatggaggagggaaatacaagctgtttggaatagtaagtcacatgggaacatcagtgcactgtggtcattacgtggctcacatattgaaagaaggccgctgggtaattttcaatgacgacaaagttggtatctcgactgaccctcctaaagacatggggtatggtcacttctttcagcggcttgattgatttcgatggagccccgtacagaaacaaaatcttattctttttttttaaaatagaaaccttttaagg

SEQ ID NO: 120735 - DNA, 490 bp, Arabidopsis thaliana columbia
  unsure (1)..(490): unsure at all n locations
gcgtacgaagcttggatcctctagagcggctgcnccttgtttttttattctgtcaacttcaactatttattccttatcaaatatattatgtttccaaagatttttgcctcactttgaaagtcttattagttatctttgtcaatttctaatagaatttgaatgtcttttggaagtattatatcctaaagacaatagtgntatttgctactcctaacgcccccatctgtgttccggaaaacgttaagatctccaaacaatttgtatggaggaacatatggcctctacggctgcctgtccactgtagccgcagtagcagcaccggatgtgcccgtggctctagcaggaaatgagtttgagacttgcaagtttctctcaaagaccatattctcattgcctccttggctccagaatgttgagtcattactggttacttggccaccgctccattgtggctgaggataaccgtatgaatacggttgttgctgctgca

SEQ ID NO: 120736 - DNA, 489 bp, Arabidopsis thaliana columbia
acgcctgcaggtaccggtccggaattcccgggttgacccacgcgtccgaggcacgcgtgggcggacgcgtgggcggacgcgtgggttcacactcgtgtattcatgatcagattatagagcagaggaagagaccgggtcggaaagagtattcggttactcctcaggtttatcatgagccaaggagaggggaccccctccttcagggggagggaagggccttggttagcgtctttgatgaggagaaggatgtgaaacaacctattaggatccatttgaattatggtgccggggggcattcgcttggccgggaattggaacgagttggcaatattgggaaggtgggggagcctccttcagtacttttcctgctgctcccgctgggaagcctaaaacaataccttcggttctaggcgatggtgggatactggactgaagagacatgtctgggggggccaaaaggcttgtcctccgcgaggtttaaaacctact

SEQ ID NO: 120737 - DNA, 482 bp, Arabidopsis thaliana columbia
  unsure (1)..(482): unsure at all n locations
cgcgtcggaagctggatcctctgagcggttcgccggttttttactctcgctagtaggaaaaagaattgtatcgataaatcgaactttgaagaagagattgcgaaatgctgaaataacaaaatctttgcatagagttttactcccaaacagaatcaaaagctctctatccgacaaaaaagaaggaaactngtanttatttgtgggggcnaccangacggggcactcgaaaactacatctttccctgtaagtttcctggacacacccaccattgtctccagcttgtactcagagtcgttctttagcttactatccaaaaataccttcatgatcttggtgccatcaagacggtatctggttctctttcctacaatctcagcagggtaagcgacatcctcgagcatggcttcatggacagaagtaagagttctgttgcgtggtctctgaacagctgagcctttctttggtgggcgcatgattcttc

SEQ ID NO: 120738 - DNA, 480 bp, Arabidopsis thaliana columbia
  unsure (1)..(480): unsure at all n locations
gcgtacgtaagcttggatcctctagagcggctgcnccttgttttttatatctttttttatttttttattcttttcttttttggtagaggaaggcaaagtcattgttccattgcaactgggtatataacatcaagtgtatatgtgttaataatgcaacttaatcagctatatatttctttggagaaactttaaattgtattttatatgcacaattggccaaagtttaatccaatattcacaaaaacgcatcccggactattctcgccatgacccttgacccaagccgactcaaaatctcaggcagtactgtggcaaagattccaggcaacactggaagcagttcccgaacaacttgagatacatctactacctgatcaggattattcgacatggagcttcttgcggtaaggaactcgattactttctgaacattgttcaagatgaccttgtcttcttccgtcacggatggaaaaagtgctg

SEQ ID NO: 120739 - DNA, 455 bp, Arabidopsis thaliana columbia
  unsure (1)..(455): unsure at all n locations
ggaccacgagagcgttgcccgggggggggacactaaangacgcanagcgacccccaaaagcggggacgcaccaccggcaagaaaacgaaacacaggcaggggaccatttttaaatagaagccgcacaagcgatgggagtaataaagcaaaggaacagcaaagaaattccctcctcctttgagaagttggagaaaccaccaaagagannaaaagaaaaaaaacccccccacncgggggggggggagggaaaacccccacaaggagggcgggccccgccgccgacagaccacaacacaagaaccagagaaggagaaggggagaaggaggcggcaccaaccgccccaagggccaaacccccgacccaaggccggacaacaagggagaaccaaaaccgaaaacacccaggggagcgaggagccgcgacaagacaacgcggagggacaagacccgccagg

SEQ ID NO: 120740 - DNA, 457 bp, Arabidopsis thaliana columbia
  unsure (1)..(457): unsure at all n locations
ggaccacgagagcggttgaccggaggggggagaagcgncanaaaaaaaaaaaaaccgacccnggaaggggagacggaccgacaaaggaaccaaaaagcgcacaacggcacaaaccaaaggaagccaaaccaccaagagaaacggaaaaaaagaacagaccagggaaaaaaaaatacctaaaactttgnagccgaaacacccccagaaacgccanagacaaaaaaaggccccggaaagacgggggggggagaacccccagacggagggaggcacacgagcccagacgagccgccgcaggcaacgccgcacggcccagcaaagccgccacgaacggccaaaacccaaagaaaaaacccgacagacggcgcacacaccgcgggcaaccccgggaagcaaaggaaccgaaggggacgcggaccacccggcgaaaagcgacagcgggcggccggggaaaacg

SEQ ID NO: 120741 - DNA, 416 bp, Arabidopsis thaliana columbia
  unsure (1)..(416): unsure at all n locations
aaaaaagannnccgcccgaaaggggggggagncccccngacacaaggaaaggaccccacaaaacagcggaggggatgccgagacgggcagggggcacagagacaaagcagggaggagggggggcggggaaaaaaacctccttttttggnaagggccgcgcccccccaaggaggcannnaaaaaaaaaaaaacccccccnnnggggggggggggggggccccccacaaaagaccggagccccacgggacaagaggaaacaaagcggggagggggcgaagagcgggagaacaggaagaaggaggacgaccgacgggagcggagagacaaagaacagcgccgggacgaccgcaccgcgaaccgcgcccccagcgcgggcggagagaggggggagcgggaggcgggggcgcgacgggaag

SEQ ID NO: 120742 - DNA, 477 bp, Arabidopsis thaliana columbia
cgcgtacgtaagcttggatcctctagagcggtcgccctgtgttttttattctttttttttaagaacaagaaaatatactatagccccaaaatatgtttgcattattataacgggcctattataacacatcaatttagccccaaaaaagaatttcgatgaagaagaacaagtcttgagttaagaaaatacatatcctacttttaagaaatgagatggtgcccacccaacaaatttcaagcgttattacctccaaactctctgttcaagtaatccacaaaacgtctctttgcactgtctgcatcagttggtaacggaggaccgcttagactcgattgacccatcaatttaacaaacgttcttcgaagcctccttagctccggtagcccaatcggtctgcagatttcaatcggaggtagttcattgccaagagtaactctgcttatagccgcgcccagtgattgttgttccacaatcgcg

SEQ ID NO: 120743 - DNA, 490 bp, Arabidopsis thaliana columbia
gcgtacgtaagcttggacctctagagcggtctgccctttgtttgttatctctgacattatcaaaatctaaactcagaaaggagaagataaacccaaagctaaatgactctcaaactgtcacctcttacaactatttaagactgactcttcaaacatatattaaaaagtgagaaataccagacgcccgaaatgcgtggttttaccagggtaacggcccaaagtgaaactggctcaaaccgttcaatctcaaaatctttacggcccagttttgctccactcaaaaacaaagcttgcgaatagtcaataccatcgaacccgttgaagctacaagcctacccattcaccgaggtcccatatcattatctgcattctgattgaacggatccaccaacgcagattttggacctgagctgagcaccaagatgataattgtatccatcaagcagcgggaaaaaagacaaccttctgcaggagctacgttggttgactt

SEQ ID NO: 120744 - DNA, 497 bp, Arabidopsis thaliana columbia
  unsure (1)..(497): unsure at all n locations
cgcctgcaggtaccgggccggaattcccgggttgacccacgcgtgcgaccacgcgtnncgnaggagaatggagagaacgggggaccactccgctagcgaatcagtagaatccgaccaagggtccagacgttgaggagtttgatccacagagggaatgcaaaacaaatgtggggcgagaacgaaaagaagaaaaccctttctttgagggggggangaaacccgagaaagaaaaaacggggaaaaacgggcccccacacgaggggacgggggggccacaggggaaggcaagcgaaagaggagggaacggccacgcgggggaagggcaaggcgccggccccccgcgggagaaaggaagaaacaaccacaggcgcagggcgaaacagagggagcgagcagggggcgacacggcccccaagcggccacagaagagcgaaaagcacaaagaggggggaggaaagggggaaggaagcgaaaaagaggcgagacagacaaggaag

SEQ ID NO: 120745 - DNA, 493 bp, Arabidopsis thaliana columbia
cgcgtacgtaagcttggatcctctagagcggtcgccctttttttttttttctttttttttttttttttttttttttttttttttttttttttgggtttttttttttttttttttttttttttttttttttccctttaaaggataccgggggcacaaaaacaaaacccttttaataaagggtgataaaaaaaaatagtccctttttttgaacaaaacccgccttaaaaaataagacactccccatgggggccactttaaagttgtttaacacccaaaacgtttaaaccggtgaacttggggggaaaggaaaacctaaagccttttaaggggggccagtggttctccaacccttggaaaaacacggtttattgcgaccagggaaaaaagaaatttccttgcctcttgggccccccaggaaaaccgaaagggggacccaactctcctttggaacccagaaccatttagcgccggttttgtttccccccgggggacc

SEQ ID NO: 120746 - DNA, 504 bp, Arabidopsis thaliana columbia
  unsure (1)..(504): unsure at all n locations
acgcctgcaggtaccggtccggaattcccgggttgtcccacgcgtccgcccacgcgtccggtctccctctcttaaactctctctttctctttctcttttggtttctgggttatttcaaagaaaagaatcaagaaacccctctttctctcttacaagaatcccatcatggggtttggaaaagggtcaaaccttccctccctttggggggttgnacaacaacctgtagtgccaccccaatctctatccaaggcgggagattaggagtttgaatacggaatcgggatcccatgggaagagacaaaaggtttgagtttttaagaatgagtgatctatgggattggtatgatgaaaggagtgcttatggagctggtggtccaattcgtgctctttaaaggagaatctcctggcacacaataagggcccttacctctttgttttataaattttcgcccttttggttctgccctgacccgcttaaagggatgtatctgatgaaggggaaag

SEQ ID NO: 120747 - DNA, 456 bp, Arabidopsis thaliana columbia
  unsure (1)..(456): unsure at all n locations
gcgtacgtaagcttggatcctctagagcggttgccctgtgttttttaatctttttttttttttgttttttttttttttttttgttttttttttgtttgatatttttttttntgagaaaaaaagatatagggcccttacaaaaaggggggactaaaaaattcccctttaatacctgcaaagcctttccaaaattttcctagtccctaaggggggaacccggggaaatttggaaaattggcctcaaaaaataccccaaaaaccgggttatttggaccaaggcttttatttacccccaattccccttaaggaaccctccccttatggggggggggctttgggaaaaaaagggggaaaaaaaaacctttttttgggtaaaaaaaaaacccgtttttttttcctttaaaaaaaaaaaaaaacaaatgggggggggtgtaaaaaaaagggggcggggggggg

SEQ ID NO: 120748 - DNA, 512 bp, Arabidopsis thaliana columbia
  unsure (1)..(512): unsure at all n locations
ccccccccccccggggggggagcaccaaaccaccccccacgccgccagaggccccaagaaaaagaggcgccgcccttttgaaaaaaaagagagcgcgcggagagcgcggccaagaagaaaagacaagaagggcnnnccgaaaaaaaataccctcaaaaaaaggggaagtttgggccccaccccacacaacggcactctggcagaaaaaaaaaaatccccccccccaggggtggggggggcgggggagacccccccccataaaaaaaacaaaagggggcagcgggggcgagccgcggagcaccaccacgcaaggccgcaagacagccaaaacaacgcgcagggagaagcgcccgcgcgccagaaaggacacgaggcacacgaaaaaccaccagcaagaaagaaaccagaaaccacaaacaaggagagagacaaaggcggaagcccgaggacgagagccaggaggcagagacacagcgcgcgcaggacgcccaagcaacgcgcaccgaaacgca

SEQ ID NO: 120749 - DNA, 473 bp, Arabidopsis thaliana columbia
  unsure (1)..(473): unsure at all n locations
cgtacgtaagcttggatcctctagagcggctgcccttttattggagaggctttttttactatcttgttgattaatttcttttggtcggacaaattgccaaaagctttaacaagagttgggagagttacaacatattacccacataaaaccgagtattcgtggtttttttttttaccatacgccagggaacccatgcatttgtgggggggcgaaaaccaaaacacaacacccgcgnaaatgctcgccccgctgggggggggaggattgaaaacctgcaattcaaaaacacccttccgcggggtgctggaggcacaagaaaacttggcctttcaccaaattgtccggttaaaaatttgttcttagaagaaaaaaaaacagccataatcacaacatggagtcgcctctaaactccgggggaagatcatgtttttgccgaagaatcacggagctggaagtcgaggaggcccatatta

SEQ ID NO: 120750 - DNA, 489 bp, Arabidopsis thaliana columbia
  unsure (1)..(489): unsure at all n locations
gcgtacgtaagcttggatcctctagagcggctgcncctggttttttaaatctcattaagaaaatatgattacatgatcgcatccgagacagtacaatagaccaagacaggacagctaactgttgcgcaaccaaactgcacactcacaagaaatttaataatacattcaggaaaataaacctcagaagcagagtttctagatacttggggattcgangatgatccagaaacaagtagaaactttgtcgacagcactcaatcagatccccgtgaaaacgttttacattaagaagagagctggaaacggccactagttttttttcttctccatccaaaggcaatgtaatataggaaagtcagtccagccaggataacaaacccgatttggaacacattgtacttgtaaaggtacttaattcctctaagggactgcaatgtgtggccaaatatctcctgtgcagcagtggcttgagcgtaatatccaaatgca

SEQ ID NO: 120751 - DNA, 492 bp, Arabidopsis thaliana columbia
  unsure (1)..(492): unsure at all n locations
gcgtacgtaagcttggatcctctagagcggttgccctgggtgttttaaacctttttttataagaaaaagaaacacacaaaaaaagtttaaagcacacaacctcacactaaaaaatacaaaatgtccatcaaatctctagagacggccacagtcgtacctagtatgacgaatttgatcacgaccaaacaaaagtttctactaagctatagagattagcctcagaacctttgatgacgtttgtagcgaacgtccggtcaaataagtctgcaccgaaagcccgagtaatctcatcctacgttcatccacatactcatcaatagcttcttcaatgtttttcatcgaacaatcctttaacaagtctccgtggtccggaccaactttcctagctagacacctagctaaaacaaccgcatcctctagcgccgctgagccgccctgtgccaagaacgggcccatcacgtgcatcgcatcgncggctacagtcactgtccc

SEQ ID NO: 120752 - DNA, 465 bp, Arabidopsis thaliana columbia
cgtgacgtaagcttggatcctctagagcggtcgccctgggcgtgttaatcgtgatagtttaagtgttccttctatggctataggcccgtgttagtgtgtacttgtctccgatcgagggaaaaacagagaatttttttttttttggggaagaaaaaaaaaccaaaaaaagacggtgcgggccccgggcccaacttcgtgatttggagggggggagaggaacccgaaggaacaatccccccccgatcagacaccaccctgggggggggcgggctccctcaccgggggggcgccacgcgggggggcccccctttttgaggggaagaaaggtaccggggagcccccccacctttggtgattgaacacgggggggaaaaaaacacggccgattccctgaaaaaaggggccccccacccgccccccccgggcgcgaaaaaaaaaacctcgggcccccagcccccaagaacc

SEQ ID NO: 120753 - DNA, 488 bp, Arabidopsis thaliana columbia
cgtacgtaagcttggatcctctagagcggtttgcccacgcgggcgaactctttttgagtgcaatccggcttcaatcaactttaaagagggttaaacgccaaaacctcacaaacagtttcactgtttcaggttcctaatttttctaaaattccaaaaagcctaccaactaaactaaccattgaccagagactcaactctcccttagaaggctaccccagcacttgtgttctatgaaaatgtcaagctctctttcctttagtcttgctcctgttcttggtacaacgcttctaaaacgattcaaaccgcttctcacataagagaaccctgtaacttgagtgaggtccttcagcagtttcacgtaagctcgtgtgccacctcattgcgtttacaatctcttgaagctcactcgttacattgattgagtcccgaatgtatacacgtcctccaggtcttaaaatccgggccatctttaacatcattgatgtcat

SEQ ID NO: 120754 - DNA, 483 bp, Arabidopsis thaliana columbia
gcgtgcgtaagcttggatcctctagagcggttgcccggggcggtttattcttttttttatctttttttcgagccaaaatataaagagggttttgactttgctaatacacaaaaggatcatccaaaagactacagtatttcgaaacaactacaaaatagttgtataatgcttcctaaaaccgctgtcgggctatttgtttattttatgagggtggaaaccaccaaaaccaaacggaaaaagaaaactacttactttggctcaaactatataaatggtcctcacatattattattggtacactgacacctagaaaaatacgaaacacgttttaagatgagactcaagagaaaatacataaactaaacacattggcaaaacaaaacaagaaaaaccttctaaaagaagaagacacataaaaggggtagaatctgtttcagggccaagctaatacaaaggccatcaaagccggtcttatactctcct

SEQ ID NO: 120755 - DNA, 198 bp, Arabidopsis thaliana columbia
  unsure (1)..(198): unsure at all n locations
cgcctgcatgtaccgggccggaattccccgcttcgacccgcgcggacaatccgcttttagaagctntgccgcgcaaaagaagagacgagaggggagacgnanaaacaaaaagagcgagcaaaaacccggaaggccaagcgtctgcancaaacactgtccttggaaagctcgaactcgaattgcctctacacacaaccc

SEQ ID NO: 120756 - DNA, 251 bp, Arabidopsis thaliana columbia
  unsure (1)..(251): unsure at all n locations
gcgtacgtaagcttggatcctctagagcggttgctcgaggnggtttaaccctnanannacnaggaccgggaaaggcaaactttattgatggcaaatccaaaagttcgaaaggggcttttaaaattcaggggtgtgataagaagaaacaacagatgtttttggcttatagaaaacatgagcatcacggggcacagtttttatgttttgggggaggagcggagaccnccaagnnggaagagagcggaccaacg

SEQ ID NO: 120757 - DNA, 467 bp, Arabidopsis thaliana columbia
cgcctgcaggtaccggtccggaattcccgggttgacccacgcgtgcgtaccgcgagaagacgacagaagggggtttttcagaagtctcttgctgcatacattaaaaatcacgtttattcaaacgcgaagacagaatatttatggacctgagccaagagaaaacacgaatcttaggttctttagcaaaaagtcctccttgaggggggacaagaaggccttaacttcttattggcagaagaggcccctattcaagatgccctttatggactttcctgggaaagttggaaacgacgtgatttacctctggaaagggcttccaaaaaaagtgggaatttttgagaaacccctggggggtgcgggttttataaacacgcctggtaagcgcagtttgatcgccccttgctgcgtttggaaatgccataaagggggggatgtttttcaataagatcgaacggtgtgctaggaaa

SEQ ID NO: 120758 - DNA, 495 bp, Arabidopsis thaliana columbia
cgcgtacgtaagcttggatcctctagagcggttgctctttttttgttttttctttttttttttttttgcaactaaacataaacaaggattagcagaatagaaggaaccaaaatccaaaacacttattattgcttttttaataggaagctacctaaaaatatatctaaacattttgctgaacttaaaaggccatattggtgcatgacttagacttgggggaacttcactcttttccatcagccgcgcggagtgagcctagctgaaccggtgcttgagttccaaccacctttgatgacccgaaaagcgacacatcgcttccctttgctttctctttctcgatctgttcctttatccagaagtaggttattctaagcccctccttcaatctcatattaggagcccaaccaagcttttctttgatcagattgttgtctgagttacaaccacaaacaccttccgggccaggaatgtggtgaattggaagcttcttttcct

SEQ ID NO: 120759 - DNA, 502 bp, Arabidopsis thaliana columbia
  unsure (1)..(502): unsure at all n locations
cgcctgcaggtaccggtccggaattcccgggttgacccacgcgtccgggccgcgagaagacgacagaagggcatattccgaaaaaaaaaaaaaaaaaaaaaaaaaaaaaaaagaaatgannnnnnnnnnnnnnnnnnnnnnnnnnnnnnnnnnnnnnnnnnnnnnnnnnnnnnnnnnnnnnnnnnnnnnnnnnnnnnnnnnnnnnnnnnnnnnnnnnnnnnnnnnnnnnnnnnnnnnnnnnnnnnnnnnnnnnnnnnnnnnnnnnnnnnnnnnnnnnnnnnnnnnnnnnnnnnnnnnnnnnnnnnnnnnnnnnnnnnnnnnnnnnnnnnnnnnnnnnnnnnnnnnnnnnnnnnnnnnnnnnnnnnaggaacgccccctggtaaggagggattaaacggcgggggaggggggggagagaacgcctcagggagccccttacagtttgggagacgcctaaggacacggtactttgaggttggggaccatgcttagtgcgaccaga

SEQ ID NO: 120760 - DNA, 482 bp, Arabidopsis thaliana columbia
  unsure (1)..(482): unsure at all n locations
cgcctgcaggtaccggtccggaattcccgggctgacccacgcgggcgaccacgcgtccgtccacgcgtccgcccacgcgtgcgtacggctgcgagaagagacagaagggtgcggctgcgagaagacgacagaagggttggttgctcaagcaaatactcagctaaaaattctgtatatcggcanatggcggttcctcccttgagggctggcaaaagccagggacgactcttctgctaatagccctccgcaatggtttgggagagggaacccctttttattcgcacaaattaccctctgtcagcacaagagggccgggcggtgtagagagttcaagccttacgttcgcgtgtgttcgacagtctacatctttcttgacggcgcctcttattaaatttaccgggcgccttcgttccaacgtcgtgactgggcaaatccctggggtcaccagctttatcggctccgctgcgtctcgcgctttgtcc

SEQ ID NO: 120761 - DNA, 476 bp, Arabidopsis thaliana columbia
  unsure (1)..(476): unsure at all n locations
gcgtacgtaagcttggacctctagagcggtcgatcgggtttttaaccttctttttttttgtaaatcacgccaagccaaactgaattaaaccgggatgaataaaaacgaaacgacaacgttttaaggtttcttatgttgacggtcaacatatttatcataatggaactcaaaagcaattactcaactgatcgttatagaactaagagatgtgngaaaaaacacactagcgttagcgtagacttatcatttgggatttcatgcttcaaaatatatatatccatagatgattctccgtactctctcttctatccttgatggatcaatgccaatccgactaatgatggcctgggctatgattgtgtaagtggtcctatcattcaagttctgaagattagcactcattacttgagctccttcttcttcaaaaatactcacaagctcgtgtaacattactcttttgatgtttagatccatga

SEQ ID NO: 120762 - DNA, 476 bp, Arabidopsis thaliana columbia
cgcgtacgtaagcttggatcctctagagcggtcgctcttttttttttttctttttttttttttgccaaagaataataaatcttctgattttacttgtctgcattttacagtgcagataaataatcagaaagcattggtcatgttccaacaattcaacatttgctgttctaacacaagagttgggctcctccatcgtagtttgtttgggggcagtcctggaaagatgaagacttaagaaagagcagatgaaacttcatcccgtgaagtatccattggaagtatcgatacggatggtatgtccagaggttttgccctctttgttactgtcaatttcaatccttctgtggtgtgaattgaacctcctgtagtcattttcaccggaggagctcctggtgcaatctgaaagttaaatcttcgaataagcattgcgattgctaccacattctcaaaggaagcaaacatgtcgcctatacata

SEQ ID NO: 120763 - DNA, 489 bp, Arabidopsis thaliana columbia
gcgtacgtaagcttggatcctctagagcggctgctccgggttttttaaacttttttttattaaaaagggggcagttttttcaccatcgaacttacttagaaggtattacaaagccaatgccttcaaaactacaaaggccttttttcgttaggaaacaacttaaaaggaactgggccaccatttttactacgatcgtatgttttcaagtctagaaaacatacaaacaacacttgagacgcagattgttcatactaaaaccatacgcgacaccaacccgatcgtgtttaggctgcctctgcaaacccgacctgttcgttaccaaagtcaaatacggggtggtatttgcccatggacacatctcccaagatccagagaggtccacgaggtggagcaacgtcaagagcaataaaaccactgatgcactgggccacaggtccctcaccaactttcagaacatactcttgtggagcaagatcaaatactttgcct

SEQ ID NO: 120764 - DNA, 490 bp, Arabidopsis thaliana columbia
acgcctgcaggtaccggtccggaattcccgggttgacccacgcgtccgttccgctgtgaagacgacagaagggggatcaatacgggcagaccattttggatttacttttgtctgagacccaaccgaagaaaatctgttcgcagattgggctgtggacttttgatggtacccgtggagtcaaaatgggcattgttttttttgggggagcaagaaaaacgccaagtggctattggagttggaatcccgcgtgttctgcttgagacatggctgtgtagggatccgatccatttgagggataagatgactaggagcgcatttagactacgtgacagattttgggaacgcttctccgactcgtgggagattctgattggtctggcgccacctgttgacatcgccatctgtcttcttacctttgatgtggagatattgtattagctcaaagatatggcttgaaaggtggtgatggacctcgggccaaggcttatgg

SEQ ID NO: 120765 - DNA, 534 bp, Arabidopsis thaliana columbia
  unsure (1)..(534): unsure at all n locations
tcatacgactnacctagaggagagctaccacgcctgcaggtaccggtccggaattcccgggttgacccacgcgtccgctgcgagaagacgacagaagggggagacagggcagctaacaaagaagaagaagaagaagaagaagaagaagaagaagaggatgagttgctgttcaccagcactttctccttcactctttgctaatggagatctttcggcttctctcctcctttgcgggaccaacttgaacagttcggtaaaggttaaagattctggcgcttataaatggcgccttgggatagcctactaagggcacccgttttgcaggttggcagtatccaagagtcaccaccaactatccaatcaatgttagaaaaaagccctatttcagattcccggacctcggggagaaaagagccttaagttattgggagcgtgcgcgaccgatggagaagttcccccttggggggagcgtacttctttggggtctccttttcctacacctcgttgggtgaggtgaatcccttctttggacgg

SEQ ID NO: 120766 - DNA, 499 bp, Arabidopsis thaliana columbia
cgcctgcaggtaccggtccggaattcccgggttgacccacgcgtccgtaccgctgcgagaagacagaagggtacggctgcgagaaacgacagaagggtacggctgcgagaagacgacagaagggtacggctgcgataagacgacagaagggtacggctgcgagaagacgacagaagggacggacgattctctcctcctggggcggctggagctattgctcctgagattttaagaaaggctggtctgattccagcagagactgctcttccttggttccaaaccggtgtgattccaccagcagggacatacccttactgggcagacaattacacacttttttggtttagagatggctctgaagggatttccttgagcaccggaggttacaggactggtaccaccccagattctatggggaaacactactttttttggggttaaagaaggagtggggccggttatagtacccggttaaccccggggggaccttttttaaacc

SEQ ID NO: 120767 - DNA, 514 bp, Arabidopsis thaliana columbia
  unsure (1)..(514): unsure at all n locations
cgcctgcaggtaccgggccggaattcccgggttgacccacgcgtccgaaccgctgcgagaagacgacagaagggggagaagagatcgagagaagaatagctcgatcatcttgcgagaaaaataatggctggttcattgatgctatcttcggtgacattgataccagctggtttcacgggggagaagaccttcctgttttgagggccggngcgcacaagagcgcgncccccccacaaaaaagcccccaggggggggcgaggaagaccacgaccgccaagcccggcgggaagaacggcgaggcggaccagagaggcggcgaacgacgccgccgggagaaagggcaagggacaccggggccccaagggcggcgacacggaaaggggcaaagcggagagggagacagaggccagcggcacaagagaacggaagggccagccgcgcggcgggaccggccacggagaagagcggccggcggcggcgagacggggcggcaaacaccggccgagaacacccc

SEQ ID NO: 120768 - DNA, 525 bp, Arabidopsis thaliana columbia
  unsure (1)..(525): unsure at all n locations
cgcctgcaggtaccggtccggaattcccgggtcttacccacgcgtccgtaccgctggagaaganacagaagggatggggaaaggagatgggtgtgaaatatggttgcccggtagaggatgtaataacctggtttgactatccagtgtcggcggatggaaatcagcctacctgaacccggaaaagcaagctttccctccttggaggggccgaccanaagagcaccaaagagctaagagcaacaaaaggacaccgggccagagggaagaccgctcaaccacgacccttcgaaagaataaccccgttttcggatggcaaaaaggacagacccttttgagtacccaactccctggttaaccagtggcttattttctatatggcctccatataacactacctcggagaccatatcatcatctgttctgaactttctaatagagagtgtaaaaagcaatagccatctgtctcaaaaggcgcctgaccccggggtgtaatatcccttagaaaccgacacgcggagcacgctc

SEQ ID NO: 120769 - DNA, 483 bp, Arabidopsis thaliana columbia
  unsure (1)..(483): unsure at all n locations
acgcctgcagtgtccggtccggaattcccggcttgacccacgcgtccagctccgagaagacgacagaagggggagacagggcagcaaacaaagaagaagaagaagaagaagaagaagaagaagaagaggatgagttgcgttacaccagcacttcctccttcactctttgctaatgggtatcgtgacggctcctcggctgctttggggggaccaacnagaacaggncgggaaaggcaagagaaacccgccgctcataaatggcgcgcggggacagcctacgacggcacccgcgggggaggggggcgagaccaggaggcaccaccaactatccaattcaatggtaggaaaagccctaattccgatcacagagctcggtagaaaagagcttcagctcattggagctggcaggaccgatgcaggagttcccgcctggggtcaggagcccatcttggcactcctttagactttctagttgggatagct

SEQ ID NO: 120770 - DNA, 479 bp, Arabidopsis thaliana columbia
  unsure (1)..(479): unsure at all n locations
gcgtgcgtaagcttggatcctctagagcgggtcgccccgcgcggggggaacccccgnnagaagacgaaggacagcgangaaaagggacgaaaacacagagccaacggnggggaacaaaaacaaaaacacaacaaagcggaaaacacagnaagactagctttcactctgagaaggcatgagccggagacnatcctttgtatttgnttgggagggccaccaaaaaatctctcttcggctagcaaagactgtacgtcacctccgggggctaagctattgaactcaacggctttagaaggcatagttggataacgtctttgacagaaagtcatcagtcttttaactgactgaagatacttgcgagtggttccatggttcatgatgtgagcaacactgttggtgtaaatcttctctcgaactgaacgttcgtgaataccaaccatagtcactccaataggccatggcgcgttcccgatagctag

SEQ ID NO: 120771 - DNA, 490 bp, Arabidopsis thaliana columbia
  unsure (1)..(490): unsure at all n locations
acgcctgcatgtaccggtccggaattcccgctcagacccacgcgtacatcggctgtgagaaganacagacggggagacgacagaaccaaatccttggcggcgattgaagaaacctttccgatggatctgctcttgtaagagattctgaagaaacgtaagagtctagctgaggaatctggaggaaaacggctgccaagggaggtgagaacnagcagaagaaaatccagaagctacgacaggaagaacgacgcgggcacgagcccaaggctcagcggagagccgccgncccncccgggggagaaggaaaccacccggcgccggccccggaccccccaacccacccacggcagcggcgcccaaaccccagcaaaagacgccgcagcgaccgccaacaaaaagccccaacccacgaaaacccaccgcgccccacggaagaaaaggacccggcgcgggaaaacccgcaaccaagcgaaagaccccccccggagaa

SEQ ID NO: 120772 - DNA, 505 bp, Arabidopsis thaliana columbia
  unsure (1)..(505): unsure at all n locations
cgccgcggagcnggganccacnagagcggctgaccgagggggggtaggccccgnnaaaagaaggaaaagcaccccnggaaaagggagacaacacccaccgcgaagacagagacanaccagggaccgcaacggaaaacttaacgagcgaacggaaaacccggcaaccgcggaaacaagaagggcgaaagggggcaatttctttcttcttcgagggtggggaccccncaaggcccccccaaaaacaaaaagggccccgccnagggggggagggggagcacaccccacaggcaaaacaaccacccaggaaggggccaacaagggggcggcccccagacgccgcccgaggcggaaagggaccccgccgaaagaaccaaacaccacgagcaacaaacgccacaccagagggaaaggccaccaaacccgccaagacacccacgggaaggcccaaccccaaagagcccgcagggaagaaacccgacgcaaacgggaaagcaaagcccagaaa

SEQ ID NO: 120773 - DNA, 490 bp, Arabidopsis thaliana columbia
  unsure (1)..(490): unsure at all n locations
gcgtacgtaagcttggatcctctagagcggttgctcagcgtgggttaatcttttttttttggaactgatgaagtaaaaacgtacttgacttttcttatttttctggtctcattagtctattccttactattacaataagctcccatactcttaggaaacctttacgatacaagtcattaatctcataccgctttatcntttaagtggcgtgaagganattagttgaaattgacaacatacttaggctgtccatttggaagaaacagtccccaaaacttctcagtctcgggaccctgcttcgaattctcatcgaacatagcaaatatataagtctctgtagctcgcattatccacacccgtcgctgctcctcccgctgtcggccaaccactctcggacaccacgatctccaacgaaccacctccagctttctataatgatgcgtaaacagtgtctaagattgcgtggaataggtttcgatattggttttgc

SEQ ID NO: 120774 - DNA, 530 bp, Arabidopsis thaliana columbia
cgcctgcaggtaccggtccggaattcccgggttgacccacgcgtccgtacccgctgcgagaagacgacagaaggggatctgagacagaaagtaccggcggtcttggcggttgaggtagatccaacccggagggaccatagatttacaagtagagcgggcgatagaatgcttctacggcgcagagagagacaagagtggcgataaagatttccctccttttggagggagaagcaaagcggagggaagcctgccgcacaaaaattctcttctcttgggtataaggcacgttaagtggctcgcttatttataggaaagtcgccggatataaacgcccacgggcaaatcacagaggtcgtggaatctcactgggtcaagatcttctttcggagcgcgacctatttgtccccgagctctggtacgcgggtagaaatacgttgtctggagaaagtgttttgggagacattctggaggatcgctaaaaacttctaacacttctggttgcgtataatgtacttatataataaacttga

SEQ ID NO: 120775 - DNA, 394 bp, Arabidopsis thaliana columbia
  unsure (1)..(394): unsure at all n locations
cgtacggaagctgggatcctctagagcggttccccagcggngttaaaccnngcnanaagacncccaagggcacaganngaggggaaacaaagaacggaaaggaaacgccgcaccacaaacncaggccagagatctctctagggcagggaaagggngcaaacccaaacaacacaaacnnaagccgcgaaagttttttgatnacggcgtgggccgccgagccagaagaangaaccgancgcacaaggcgcgaacagaggaagaacgcggaagccgcctctngacaagaancgncgagaacccaaaaaggccgagaagcncagcaagagggccgnncncagccaccacaccancggaaanaaccgccacacagccggcaggcnagaccggcggaaac

SEQ ID NO: 120776 - DNA, 419 bp, Arabidopsis thaliana columbia
  unsure (1)..(419): unsure at all n locations
acgcctgcaggtaccggnccggaattcccgggctgacccacgcgggcgaaccgcngcgagaagacgacagaagggaagggggacaagacnccaagaaagacgaagagacgcagaagcgaggacgcaaacaagccgcaccgggcgagggggcccgcggaggacaaaacgcagcgggcacagcacgcagaaccagctgcttgaggggtggagcanacacaacaaaacatggggccaagaccgccccgagcagacagtggcgggaggcgccacagcctcacagggggcgcagggggagacgcggcaagcgaggggggacacaactggcaatagaaagctggcaggcgcctagaaacgaagtcttccacattttcggccgggctactaaccacgtaaacgtcacggggataaagggcccgtgc

SEQ ID NO: 120777 - DNA, 489 bp, Arabidopsis thaliana columbia
gcgtacgtaagcttggatcctctagagcggctgctccggcggtgttaacactctttcgtttaaggacagaaacccaaccttccaagaaagaaagaaataccgaataataatgtgtccccaaatgccaaaaatctattcaagaccaaaaaataaacttacattataatgattcttgcatcactctgacacctgtttcttcaatttccgagggtctaaaggaccgagaggccacgctttcacggttcgtatccgtactaaaaatcagaatcaaacgagcttttacccttttgttccacacaagatttcggttctggttgagctcatcttaggacacctgcgttatcttttaacagatgtgccgccccagccaaactccccacctgacaatgtcctccgcccggatcgacccgccgaagcgagcctggggaccaaaaacaggagttgtaccccgcctccgattcacggagtaagtaaaataacgtaaaaagt

SEQ ID NO: 120778 - DNA, 573 bp, Arabidopsis thaliana columbia
cgcctgcagtgtaccagagtccgagaattccctgggtctgacccacgcggtccagacccccgcgtccgtagaagacgacagaaggaggcgacgcttgcaagaaaagcggtcctacgcgtttgcagcctgcgttggagtcgcgtaagataacagccagcgtaaggcaaacaagaggacttgatgcaagtgctgctcgcagacaactccctcattaaggggagaaaagccctttgcttactgagacagataaacaagaccctcagcgcaagggcctgggcatctaatatgtgacgcccgatgaactggattaacggagattcccccctggcgccctgtcttactattccaagcgaaacgcacacgcccagggaaacgggcctttgggagaattaaacggcgggaaaaagaacactccctggatgagccgttgacttctagaatcaaactctttgtagaaatcagccttacacgagcggtgtaaggactcaagcgagcagacctttcggcgcaaaagtgaaaatactccctccctcttcaaaacggctcgttctatcttcacttgcgcgaaaacgc

SEQ ID NO: 120779 - DNA, 506 bp, Arabidopsis thaliana columbia
  unsure (1)..(506): unsure at all n locations
cgcctgcaggtaccggnccggaattcccggcctcgcccacgcggacaaacggctgcgagaagacgacagaaggggacgaagcaaaaacatccgaggaaaaaaccagaaaaggaaagagacgaaaaaggcggaccaacaagcaggaacaagcggcggaggagcgcgcgacacagaagcaaacgcaaaagaccgctccctggaggggggagcacgccgcgccagcaaggagcagaacaagaaccccaccccgacgcgggaggacaacacgccccccggggcgaaaacacagggggggggcaggaccaaggccccccccaaacgggcggaggggcgccgagggagacacccaaaaggcccgggaggccagcggccgcggaaaagccagggagaagccacagcgcggggagaagagacaccccaacgccgaacggggaagacaaggcccaaagncccccaggccgcccgaaagagcgccccgcggacgccccacacaccggaaaaaaaaa

SEQ ID NO: 120780 - DNA, 492 bp, Arabidopsis thaliana columbia
gcgtacgtaagcttggatcctctagagcggttgcttgtgttttttaaatccctttttttttgggatactaaagagataacatatttattgaagaacgaggatttattgtacaatccaataaaatacttgatgagttttcaaaggataagtgtattccaaaaaaggattctaaggggaagttttatctgggaatgctggtcccacacactcttggtgggagatcacggaactgctgcatgaggctttgagattttcttctttttggttttaagaggctttggaattttcttctttttggttttaggaggcctcggaatttgtctgcaagaattctctcctactgccgtaacttgactcccgatattagttccacatggtggagagggccatacgggcgagggtggtggtggatttaggatttgacttggcggctcagctagaagagggcgtatagcacgaatctgataggatagacatagaagtatttgaact

SEQ ID NO: 120781 - DNA, 487 bp, Arabidopsis thaliana columbia
cgtacgtaagcttggatcctctagagcggttgctctttttttttttattcttttttttttttttttttttgtttttttttttttttaaaacaaaccctagaagtcttataaattcaaaggatgtctgagttttacaaccttggagagaaagagaacacccccgaaccctttatagaaacatgattacccattgcgctacttttttagggtttactgggccaaagcacttgtgttgaacacaaaaaaagcacctccggaaaaaattccggggagagttaccgcccaaattgccaatccggggactcctcccttgtacacgtcaccactcgctgaccactcgttctcgttgtaaataggactgtatccatcgacgttagctccatacttggggacctacttgaaaacaccgtatcccttgccctttctgccggaggcgtcgaccccggccctaaagtccatgctgccgttaattccgaagggcttgtcg

SEQ ID NO: 120782 - DNA, 475 bp, Arabidopsis thaliana columbia
  unsure (1)..(475): unsure at all n locations
gcgtgcgtatgcttggatcctctagagcggttgccccaggcgggcgaaccttttttttttcttggacatcctaaactctttatggatgtattttaagagattcgatcacaaaacattgcatcatatccaatgattttcgaaagttattcggcaacattttttttttctcggacatccggccgtcctgggcganattccttttaccgggtggacgaagactcggacctggtcgacgatttaaacccctggtcgaccattcctggaacccgatagattttcatcgcccattcatcgccctggccgagggatccgccgtcctggtcaacgaattctcggtcccggacgacgatttcaactcctggtcgacaaatcctcgaccactcctcggcctggtcgacgaattctcggacccggtcgacgatttcaacttctggtcgaccattcctcgaacccaatagattttcatcgcccattc

SEQ ID NO: 120783 - DNA, 482 bp, Arabidopsis thaliana columbia
  unsure (1)..(482): unsure at all n locations
cgcctgcagtgtccggtccggaattcccggttcgacccacgcggacgcccggcngcgagaagacgacagaaggggcccggaaaaaannncacaanccaaagagagggccccggagagaaaagncncacccccccaacagaacngaagaggggcaanngaaagccgnnngcacgaaacanccgcgcagctttctcctttaagggagaaggngagaccaaagaggaaaaagggcgcatagggcccaacaggaggatgaggatgggcccaagaacgcgccgaccggggaccccggagccgggaaaacaaaacacccgcccagacccacaaggaaagagggccgggcgggaacccaagcccaccatcgggggggaaagcgccaccagaaccctccagggggaaggaaagaccgcnaaggccccaaagagggacaccgcagggcaagagccggaaagacccaccacaagggccgaagacagaggagc

SEQ ID NO: 120784 - DNA, 487 bp, Arabidopsis thaliana columbia
  unsure (1)..(487): unsure at all n locations
gcctgcatgtaccgggccggaattcccgctcgacccacgcgacaatcgattctctctatatcggagccgcatgagcatcgtcggagctcgatcgtactattgatcctctcaattttatctcccgtgactctctctatacgatacgagctactttctgggcacacgaaatgcatctcaaaataccgtgccttggcgcggggaccancggaaaagacagcattagaaacccncaccaggagcaggcggtggcggcggcccacaaaggcaccgggcaggggcacacgcgccacaagggacaggctgaacacgaaacgggacggaggaaaancgggacaacccgcgccgggaggcgggggaaacagggggacacacaaggcggcgccccggccgccaaccaaaaccagaacgacgccggacaccgaccacggaagggaggacagggacccaaaccaagaaggggggaaaggggcaaaaaagagacaaggca

SEQ ID NO: 120785 - DNA, 495 bp, Arabidopsis thaliana columbia
  unsure (1)..(495): unsure at all n locations
acgcctgcaggtaccggtccggaattcccggcttgacccacgcgtccagaccagaggagtttgaggttgagtctgatgattacatcacatcaattgaagtttctgtcgacaatgtctttggttttaagagtgaaatctttacttctcttgtcttcaagacctttaagggaataacctcacaacctccgaaatccctccttgagaggaaanngaaacttaaagacggcaatggaagaaaactcgcccgaacccatgggaaagctagtcaacgcttttttgctcttgacgcctaaacagctccaacaaccgactcaactacggccagcgactctcctttgacaactaatataactacacagccctaaagtcggatatggatggacccccatctccgcaagcccgctgcttcgtcgtcggccgctcacaaaccatcctccgtctcgccagtggatccagataggtgtcatcttccctctcccttactgacaccaccaa

SEQ ID NO: 120786 - DNA, 546 bp, Arabidopsis thaliana columbia
  unsure (1)..(546): unsure at all n locations
cgcctgcaggtaccggtccggaattcccgggctgacccacgcgtgcagattccaggtgctgctattaatcaagcagtttcttcacgatattttgctcgattttttggcactgaacgggcttcttcaaggatgaaattctctcagtcgactggtaaatcaaattctgttgaaaaggagattgaagaagngacttcctccccaaagggggaaaaacggccgagcgatatgaaactctgcttaaggaccctagctgaggataatgtaccctctaatttcttaattttagctggctagtgaggagcctagaaccttgacggcatgcgctcatccacaatttatgatacccaaagggtggccccaacctctccacaacccggagaatgccattcttgtcggctacattcaggttcccactcgaaaaagggtagccttctcaacagcgccgaaaggtttatgccctgaaacatagacctagatccccttgcgaggaatcaaccccatcgctgggcttagacaagcgcaccttcagggattccaaagtcatct

SEQ ID NO: 120787 - DNA, 481 bp, Arabidopsis thaliana columbia
  unsure (1)..(481): unsure at all n locations
gcggacgaagcnnggaccactagagcggtctcccggggggggttaacccaaagaaangagggcnaatagacaaggggacgagagcaaaagatccatcccgaggaaagtggagcccaccgcctcataaacaaaacctgcatcgagcggaggcaagcgaaactaggaaaacaagaaaaggggagcgagtctttttttaaatacggggcagcaaccagagacaaaggccggnnnctaatggccaaaccgcggtaaaaggggcggagagcacccacaacctctgggcaaggccaagcttcaggaaaccaagtccaaagggaccaaaaaccccggcggcccccggtgcccaggccaagggaacctaaccggggactgaaccaaggcagaccgcgggcacaggacccgaaaccagaacccgcggcttgacaaaaaaaaaaagggcccggaggaaaggaggacccaaaaaaaaaaaggggccaccggc

SEQ ID NO: 120788 - DNA, 437 bp, Arabidopsis thaliana columbia
  unsure (1)..(437): unsure at all n locations
gcggcggtccggccggatnccggttgccccgcggcaatccttgtctaggatgcactattgccggagacagagatcacccttttagatgggcgcagaacttttgcccacattttttttcggaaatctggctgagatctctagaagagaaatgagccgactactttttttttgagagggaaaggngcagaaggaagaagaagaaaanacccacaaggggagggggcagatacaagggagccgcagaaaagaggacaccccccaaacccggggaggaaggacccaaagcccaaaaaggcgcacgagaccagaaaggaggaagcaaacagggaggaccgaagggcacaagaccgcagggacgggggccgggcaaggaacaaagaagaagaaaaggaggggagaggggaacgaaaaaagaggcaccgggaaaaaccaagaaa

SEQ ID NO: 120789 - DNA, 392 bp, Arabidopsis thaliana columbia
cgtacgtaagcttggatcctctagagcggttgccctatgcgtgtgaattctttttttattggaccattgaatacttttttttactggaccaacaaaagatttactttgataattggtattcttgtatggatgtcaagtaattacaactgaaccaagcttctaaaagcagaaacaagatcaagtccccctaatcaatccttgaagtgagggtgcagcagcaccggtattctcatcactcccacttcctctccctccattatcttcttcaccttcaatctcaatctcaatctcatcggttaaaggcggtatcgaaccgatgttattgtatgtttcagacagatattctttcaccctcgacgtgtatccatcttgaggactgctggatgaagctg

SEQ ID NO: 120790 - DNA, 499 bp, Arabidopsis thaliana columbia
  unsure (1)..(499): unsure at all n locations
cgcctgcaggtaccgggccggaattcccggcttgacccacgcgaccagacccgttctccatttttctcgggagaaaaggggctcgccggagatggagcatatgatgaaagaaggaaggtctcttgcagagacgccttcttactctggtgcttcggatgtcactgagtcgggctatggaagcccacaccttttttttttagggggggangggaaagaggggaaagaagaccagaagaaccccccccggacgggaggagagaaaaccaacgaggaccggaggccgcggggacccaaagcacggggggcgcacaaagcagcagacggaagcaaagaacgcggcggaaccacgccccccggacgagagaggccccccgcggccgcgagaagggcgacggccaccacgaaaacgggcacgggggaccacagcccgccggcaaacccagaggcgccgacggcaaggggcggacagcggaacgccccgcccaagggaggggaaggc

SEQ ID NO: 120791 - DNA, 493 bp, Arabidopsis thaliana columbia
cgcctgcaggtaccggtccggaattaattccttgccgacgagctcactctcggaggccgcccttgttttttttttttggagttagaatgctatgaattccaaaccagagaagattcaattaaaacagagactatttaggctggtccaacagtaatatttcttgcacatgaacacgaaaccagaacgattccctcctataaagggacgggcaggactccgggcgttgagggcacctacggacgcgccgtcatctacaggagggcagacgttccaaggcttaatgaaaaaacataatcagtacaagcaagcgagttttacaccatacaccggagcactttaacaagggcgggattgattccaccccggagggagaatgattagtagaaagcacagcgaccctgcgcaaagaagcaggggtaccaataaagggggccctctgatggctctccctaacagagaaatctcttaaaaggaaaggccctcccaaaagagg

SEQ ID NO: 120792 - DNA, 495 bp, Arabidopsis thaliana columbia
  unsure (1)..(495): unsure at all n locations
gcgtacgtaagcttggatcctctagagcggctgccctgggggtgtttattctttttttttttttttttttttttttttgtggcaaaagacaatttctgttggaatcaaacgtcttctgctgaaaacaacacaacttggggtataagtcaacgaacagaagaagaaaaccccctttggaaaaaatctacgggggatattttttcgaagaacagacacccaaggaaggggggttagagncatattcttcattagaatcttcttctttatccgaaaaagactccgcagttttctcaaattccaccattttctcaagggcctctatgtctccagcttaagcaagagcgtgtatccgcagcttttctgcgtcttcatctgaaacgccgaatatttccttgacaattaaggagttgttttttgagcaaaagccaggaagctcagaaagatagaaaatctttccaaaaagcgcttgcacggcgagttttcttttgaatcctt

SEQ ID NO: 120793 - DNA, 491 bp, Arabidopsis thaliana columbia
  unsure (1)..(491): unsure at all n locations
ccccccccccggggggggaggagacagacgaccgacgagggggggggggacacccacaacaaaggccggcggcccgagagggagagaagaagaggccgcggggcgccgcgccgggagaaaaaaagggaagacgcggaaaggaggaaccgcctccaaacaaaaggaaggattggagaccccccccagagaaagcnccccacaacaaaaaaaaaacccccccgggaggggggggggggggagggcccccccaaaaaaaaaaacgcgcgcgcggagacgagaggagagaagacagaccgacaaaacccacccgaaagagacgcagcggcgccgaaccggcgagagacggacgagccacaaaacgcgcgccacgccagcaacaaaccacagccccaacacaccccccagcaaaaaagacagagacacacaggcgggaaacgaaacagacgaagacggccgacgcgccagacacgaacagagagaccaacagaaaa

SEQ ID NO: 120794 - DNA, 486 bp, Arabidopsis thaliana columbia
  unsure (1)..(486): unsure at all n locations
cgtacgtaagcttggatcctctagagcggtttcgcctggttttttaacccttttttttttatttttttttttcgacgaatagactcatcaacaatgaaacactttaaaggagtgatttatatgacccaacatgtttgtttcatatacaatacataaacccagcttgacaccatcatatattcactaaaaggttctgtttaaatcgcgctttgttcaaactaaactcatagcttcaaaacaggcaatcctaaggcctttgagttgacgatgcttggactggcattgggcggtgaagcgttttcgttcaaaaatggatcgactcggttcgggtcatgccaaatcgggtaccctttgactcttccgaggacgttaagagctgcaagcgtanccattccttaacgagtccacttgaaagcaaaagcaatgggaggaacaacaatagcgtttttcgtatcaacaagccctgggtaaatgaatggctcttcc

SEQ ID NO: 120795 - DNA, 458 bp, Arabidopsis thaliana columbia
  unsure (1)..(458): unsure at all n locations
acgcctgcaggtaccggnccggaattcccgggctgacccacgcgtcaaaccccgcgtccggggagagagttaagctgcctgtaaactatgagaaggctcttgaaatgattgacaaacacttcgttgtactaggcccaagttagttgcagcataaggttaaacaaagactgactaaaatgactcagaagcgaaaatggctcctgaaggggggnnagaaacaagggaggcagtaaccacaacacccccgaagaaaggaagagggagccccaaagaaaagaaaaggctacaacacgcgcncaagagaaaaaagcgacagaaaccaaggggagggaacgcgggaacaaaagcagcgaccccacggaaaaaacaacgcaagccgccgggcggccaacaaaacgcggagaagaaaaacacaaaccccggacaagccgaaaaacacaagggcaccagggaggaca

SEQ ID NO: 120796 - DNA, 500 bp, Arabidopsis thaliana columbia
  unsure (1)..(500): unsure at all n locations
acgcctgcaggtaccggtccggaattcccgggttgacccacgcgtccgactcagcgtccggcggttctatttatgaggcgccttatttccatggagctacacatttgcttgaaagaatggctttcaagagcacgttgttcagaactcattttcgtcttgtgagggaaattgaggctattggaggcaacacatggctccttgcnggtggagagcaaangagttacactattgatgctcttaagacctatgtccctgaaatggctgaagttcttattgacagtgttagaaaccctgctttcttggactgggaagtgaatgaagagctacggatgatgaaggtttagatagcggaacttgcaaagaaccctatggggtttctctaggaggccttcattctgctggttactctggcccattggcaagtcctctgtacgcaccggagtctgctttaaatagattgaatggcgagctcttggaagaatttttgactgggaatttta

SEQ ID NO: 120797 - DNA, 494 bp, Arabidopsis thaliana columbia
  unsure (1)..(494): unsure at all n locations
cgtacgtaagcttggatcctctagagcggctgcccttttttttttttttccaggtaaattaaagttacattcttttctcaaacaaatggatttttgaatatcaattctatttgtgttcatagatctctagaagagaagctagtacatttagagagatagaagaagttgaaaattcagagggtataanattaatactagcctaattggagtgttcagncagggactaacatcatatctctttgtcaccaaaggaatggtatatatactttttccttacaaaccagaccgatagagatcataaagagctccagttcgatcaaagacgaaagggacaccatcttcaggagcagctcgaacaaagacaaccggaggtttatcatagtcatcataaggcatgggagagggtggtttcacttcaacatcatccatctcttcgtccttaggcttgaccctgaagatgggaatttcaaactgtttttcgcgacgccaaagtt

SEQ ID NO: 120798 - DNA, 490 bp, Arabidopsis thaliana columbia
gcgtacgtaagcttggatcctctagagcggttgccctttgtttttgtaatctttttttttttttttgttttttgttttttttggttttttttgtttttgggaacacaaaaaaaaaacctttttttttcaataatggtaaaaaagatcaacatgttcattcttaagcgggaatttgccgtcttaaggaaaaatcgggtccatttaatggggcgccaaaagggccccgggggaattttttggtggcagccacccagagttttgggggagtccgatcccccacaaggggtccccagacggaaatcaaaatctaggccccacccttttttttctttttgggggggaaacgacttttgggggggggaaattagggaagcgtgttccttggaaaaagatgaacgccgtatgggtctatcttgggagaccactactgtggattgggctgaaattttaaaaggggcgggagaccaattgccctagggacaaaattgaa

SEQ ID NO: 120799 - DNA, 462 bp, Arabidopsis thaliana columbia
  unsure (1)..(462): unsure at all n locations
gcgtgcnaagctgggacctctagagcggtgccctagcnggtttaacctnccnnnggaccnggagaacaaanactccatccttatttacatatataatccgacttagaagtgcaacaatgagtttagaaatgacatcgatgataattcttttgcgtgctttttttttgttttggttcgagaaacaaaatttctatttgtgngggggggtacgaacacgcaacaacgagaagttgaagagtaaatcgggctcttttgttcagaagtcttgccacccaaggaatcgctaggcacttttttgacgccggttttgagagttatcaaatatgtataaaaacatacaaaaacgctactactcgggaatcttctgcaatgctatttcttggcctttttaagatacttcttgagaagtttcattgcaccagtacaggcttttttagcatccaagttaccgggtatgtcgtt

SEQ ID NO: 120800 - DNA, 482 bp, Arabidopsis thaliana columbia
cgcgtacgtaagcttggatcctctagagcggtttgcctggttttttattcttttttttatttttattttttttttttttttttgttttttttaaaagctttcccacaagctgggatcagggatctaactaaatggtttccccaaaaattttactggaaaaaaacttaccctttaaatttctggaaaacgggttctttttgtacctggcacataacaaagcgaagggtttctaagagaaaaaccttacccccttctcaggacaagggacccacggtttttttttacagaaaagggatccaacaagggatcaatcaacatagggttaaaagctccaaagccctttactttttaattacaacctaaaagatgggtccctttttaggcccttggatcttatctccgcccattttccatggtggaaaaaaacaagcctttcaccctttgtgggggacctggccatccttggagatgtcttttttggg

SEQ ID NO: 120801 - DNA, 468 bp, Arabidopsis thaliana columbia
  unsure (1)..(468): unsure at all n locations
cggaanccccgctcgacgaggggggaggcctntctagaacgaagcggccgacgagggggaacccacacgggcgaccaccgggcggccacgcggccgaaaaaagaaaggccgcgggagcacaaaacccccaaaagcgaacgaaacaaccgcacgggaacaaagaaacgggctgccagaagaagganaaannnacaaccgcggagaaaaagagaaaagcccccccgaggggggggggggagaaacacccaacaggaacccacggaagaaagaggggggcccaaaggccaccgacaaacaaaggagagcgcgcgaccagggaagagaggcccccgaccacccgggaagaacacggaacgcaacggggcaacgcgcgccaccgccggaaaggcgaaagcaccgaaaggggcgcggcggccgaggcccaaaacgcgcaaacgcggagcccaaccggggagaaacgagcggcaa

SEQ ID NO: 120802 - DNA, 419 bp, Arabidopsis thaliana columbia
  unsure (1)..(419): unsure at all n locations
acgcctgcatgtaccggtcccgaattcccggcttgacccacgcgtgcacccacgcgtacgcttgagaatggcgaagacgggctactatttgttggcgaatcactagactctgatattctgcagaaactttttgctgtttcttcagctgctgaaattcctaaccaggctgagctgcagcaggaagaaaaacacgctggctgagggagggaangangcggcgaacgaaataaggaggcaaagaccgcccgacctaaggaggagggggcgccccacgggagaaccaccagcgacccgggccgcgcccgtccaccggggcaagccaggaccaccaggcgcgccgccccatgggggaggttcccctggcagggccgcgcccaacgccccctaaagccgagccggccctccggcctcctaggggc

SEQ ID NO: 120803 - DNA, 504 bp, Arabidopsis thaliana columbia
  unsure (1)..(504): unsure at all n locations
cgccggcaggtaccgggccggaatttccttgttgacccaggggggcgagccgctttctgccacgcgtncgggaaaaaaaggaaaacccaaaccactattttattgtgtgggtagctagagagagaatgggtgtgttgaaagactgtatgtgattgtggggaaaagattgcaagggtgtggacgggaaaatttctcctttggggggggagannnannnnnggagaaaagaaaaaaaaaaagggggcccgccctgagggaacgaaggttacagaacggggcgcggggaagggacaggcgcggatatggggggacgggaaaggaaagggaggggcggcggaggaaaaaaaggggggagggggaggaaccccgggggggcgcaacagaaagcgaggcggggaggaagagccggagtgtcgagtagtgggggatggacaagagggagcgggacggagtggtggtcagcgacaaagagaggagagtggggtcggaaaaggggcgccgggc

SEQ ID NO: 120804 - DNA, 456 bp, Arabidopsis thaliana columbia
  unsure (1)..(456): unsure at all n locations
acgcggcgtaagcgggggacctntagagcggtcgcccggagggttaaaacccatnaatataaggggtggggaaaagaagggggttttttttatgttgaatacaaggcgtatcatcccccactgaacgaagcagagtcaaaatggggccggttgctggtataagaaaaccagagaggggcccattttaaaaattttttttttgggggggtgggggaaaaccccccggggcctcattaacccttgaaattggaccccaagaagggggcggaaaacgcaatggagaaaaggagacggcccgcgggcgaggaatggggtacacacgagcgagcatggccaacagagaaaataagtaaaaagatctgagggggggaggaaacagagagatatttctaaagcggtctagggggtgggggaagttatcgcttaaagatcggacagagaagctgggtggaaaaa

SEQ ID NO: 120805 - DNA, 488 bp, Arabidopsis thaliana columbia
  unsure (1)..(488): unsure at all n locations
cgccagcaggttccggnccggaattcccgggttgacccacgcggccgagtcaagctgatttagccatggctatggcgggggctattatccaatcttctccgctctccttcaatagcaacaacgcaaagccacggattcatagttcaggatcgctcggcggaatcaaaagccaaaatagaggctctgcattgtttttttggggggggaagcccaggccgaggaaggagaaggaaagccctttcgatatggcactcagccagtaacgcgaaatgcagtgaaggacaaacacagaccggtactcgggagtcaccgactttaacacagggctgctggtccctctaaggaaaaatcaccaagcctagacaaaggaggagacggtttcccaccgggagaagatggacatggggggggaggagaagggggtgacctacttgagtcaagatagcagtttcgaggacgcagtgagagaagtcgaaagagcgagaagt

SEQ ID NO: 120806 - DNA, 482 bp, Arabidopsis thaliana columbia
  unsure (1)..(482): unsure at all n locations
acgcgtgcgtaagctaggatcctctagagcgctcgacctgggggtttattctttttttaatccataaccataaatcattttatacaataaacacgttctgataagaagacaaacaaggcggacaaacacccttagaagatggattgaagcaaatatagatcaagtctatattgggcctacaaaatgagaattcctcctttggagggtgaccaagnatcggagccgtaggctaaaaaaaccaaccccttttattgtttgcggggtggcctgatgtatagtatggaccctaaaagggcctaccgcttaactagaagatccagccaaacctttttttgatgcatttgaagccgggacttgacccaattggtctgacttttgagagtctccggcacttttttctctctcactgggggcgaaagcctaaccccacgcctgtcacccctgcgggggcgtatggacttgggcggaggatcattcatggc

SEQ ID NO: 120807 - DNA, 414 bp, Arabidopsis thaliana columbia
gatgtaaaacgacccgcgcggggggcgcgccgggcgctcacccaaaacgtggagcgaactcaccgcgaaggtttttccaagacccccgcacctcagaggccaacgcggcccccggaggaaaattcctccttgggggggggagcagcaacagggacaatcttaaaacaaaccccacaaccccagggacgggggcacgccccctttagcggggggaattctcgagcgcaataccgggttgtcaggtactaggcgcggcctaccaccccctcgcttcactcagccgcggcagcccgatggactcgcgggcaggcgaacgcgcgatcgaagtccgcccgccgtcagccttccacctacaaccagggagctcggatcctgcgactaccacgcgagcggccccgcgactcgccccgatcc

SEQ ID NO: 120808 - DNA, 523 bp, Arabidopsis thaliana columbia
  unsure (1)..(523): unsure at all n locations
cacgcgtgacgtaaagcttgggatcccatctagagccctttcgacgcgtggcgggtaaaattccanttttttatgtttttattgttttctcgagcgaaatgggggtgccctcgaaagaaatagactttcaataatggcaagccactacatttattggagcagaggagtgatattaattttcctgcgttgcgtggggaagaaaaagtgtaaacaccacaaatagagatgctcgtggttagactctcttcnctaagaaggcgagaggcggngnnnagaaaaagagnngnnaaccacaccaaaaaacaaccccgcaaatnagagaatataagaaggacgagagcacgacaagaacccttggcggacggggtttaccaccctggtaaaaaaattggcgagaaaaaaaaaactccgggggaggtttaaagggtaaccccaagcattggattgaaagccttgcccttggggaaaaccttcttcctaaggggtctctgaaacgtgaacctggaaaagagcttttaatttt

SEQ ID NO: 120809 - DNA, 486 bp, Arabidopsis thaliana columbia
  unsure (1)..(486): unsure at all n locations
cgcggcgtgagctgggacctntagaccctcnggggggggttaaacctttaataaaaaatttatgtattgaggggggaatttaaaggatggggattaggttgatagattggaaaggttaaggtgttagtgaaaaagaaatttttttaaaaaaaaaagaattatgataaaaaaaatgggnaaagttttttttttggggggggaaagagnaaaaannnagagggnaancgaaagggagcccaaggaaaggcgagagagggcaccggggggaaacccggggaggaaacaaagcgggcacggagaacacaaaagcgcgtgaagagagagaaacgccgcgagggggggcgaggggagcgggaacggccccaaacccgcgcggaggaggggaagcaaggacaggagcgggggccggggcgggggggaggagaccgaaaagcggggaggggcggggagggggggggggcccagcgcgcggggaaaaacccgggg

SEQ ID NO: 120810 - DNA, 485 bp, Arabidopsis thaliana columbia
  unsure (1)..(485): unsure at all n locations
acgcgtacgtaagctgggatcctatagagcggcttcccgggggtgtaaaatcagacaaactaacaaatattataattttgaagatggaagatatatattttacagtacaacaaatggggaggagaacaggaagaacattgaatgatcgtgtgttagtaggaaaatagcctaaacaaaaacttaggccctcaacgttttttttcggggggaggagcnnngggggaggggagcaggggacaaaggggggcacgcgggggggggagcgaggaagaaggaacagaagggggacngcccgggggaagagccggaggaaacgccgccaaaaaaaagggcagcgggagagggggaaagaagcgggggggagcgaaagaaaaagggggcacggcgcgggtgggcggggaaagggggaaacagaagaggacaggggccgagaagagaaaagaaaaaagggccggggaggggaagcggagaaaacacgaaaggaa

SEQ ID NO: 120811 - DNA, 539 bp, Arabidopsis thaliana columbia
  unsure (1)..(539): unsure at all n locations
gcgggcgtaagcggggatcccctagagcggcttgaccggggggggaaaacccccatnnaannggaaaggatagagaccaggcacccgacagngggagggggaagagggccctagacaccagggccccacggagacggattttaaccgagcaaacgccgggggaagcaaaaggaacggacccggacgggccagcgcgcgtttttttttgggggggggagacccacgnnccacagagagcaaacgtcgaccccgcgcccgccaagcggaacaccgggngggggccaccccacaacggacccccaaacgaacaccggaggacaacccgggccagcggacggcgcggccaagcggacgaaaggcgaaacgaaaggcgcggggcggcgaaaccgaggagaggagagcgccccggggacccgcgccggggacgcggaaaacgggggaggggaacgacgacgggaagcacggcgggaggaggcccgccaaggggcggcaggccccgccccggaggcggagacacagccgcccgcagcgcgagggcg

SEQ ID NO: 120812 - DNA, 511 bp, Arabidopsis thaliana columbia
  unsure (1)..(511): unsure at all n locations
cgcctgcaggtaccggnccggaattcccgggttgacccacgcgtccgaggccgcgtgggcttaaaccctatgatcgagcgtgctggaatattccacaaccggggcttctccgtcacgatactccacacttctttcatcttgcccggatccttctcgccatccacagggaacttttcggactatcattcactttcttcttagagagggagaccccgngccgcaagcagaaaccgcgggagggaacgagcccggggggcggaaaaggcagccgaaacaagaccaaaccgaggcccgggccagcaaaggaaggaggcaaaggacggaccgcggcgccggccggacccacacgccccacgggggggagaacacgggcaaggggcgcgacaagagaagagcgaggggcccacggggacagcggcccgggggggcgcaacgaggggagacgaaaccgggagcgagcgaccaaaagaaagggggcgcggccgcgggcccggggccgaagagaagagga

SEQ ID NO: 120813 - DNA, 506 bp, Arabidopsis thaliana columbia
  unsure (1)..(506): unsure at all n locations
ccgcgtgcgtaagctaggatcctctagagcggtcgacctgtggtttaaatcttaaacaaatatgtatattgtattcatagggaattgaaataatatcagcgttatatgtttatgcaatcatatccttttgagtgtttccaaaaggaaacaaagagttaaaagacacattcacacatctacatggtagggttttttttttgagaggggtggagacatnggcaaccatgngtttccaaacttggaggaattcagagcagagagaaggttgaataccttccagattgttcccttgtgaagccaaggaggaagactgggaaacgaaaaacacactcgaagaagaagaaaattcagtaggcaaaacaactggctttaatggaaaacccagagatttcgggaggggcggtgtgtgcttattccgaagggtaaaactcttttgacccgggtgaaacaaacagtagaagggtgctgggtgggcattagaaaaaccaggtggggaaaagaactgg

SEQ ID NO: 120814 - DNA, 503 bp, Arabidopsis thaliana columbia
cgcctgcatgtaccggtccggaattcccgggtctgacccacgcgtccggttcgggaccataccgtaaaggagaagctggtggaacgtgggatctctgtgcaaagctacaatggagatctattgtatgaaccgtgggagatatactgcgaaaagggcaaaccttttacgagtttcaattcttactggaagacccctgcttagaggggggagagaatccggtatgcttcctcctccttggcggttgatgccaataactgcagcggctgaagcgatttgtgcgtgttcgattgaagaactagggctggagaatgaggccgataaaccgagcaatgcgttgtttaactagagcttggtctccaggatggagcaatgctgataaggtactaaatgagtttatcgagaaacagtcgatatattatgcaaagaacagaaagaaaggtgttggggatttctacttcactacttttttccgttcttctttttggggaaataagcggcagaca

SEQ ID NO: 120815 - DNA, 552 bp, Arabidopsis thaliana columbia
acgcgtgcgtaagctgggatcctctagagcggtcgaccggggggttaaatccttaaaacaagaaaaaaattacttaagggagggacatacatacatcttcaatttgatggtatatacggaataaaccatatactttgtaaaaatcaattgttataaaatgtgaaaacaggttgaaaaagaaaagacccaaaaaaccagatttttttttgcggggggggaaacagagaagcaaagggccggtcaagcgaggggaaccaacaggaagaaggcaagacgatcgccggggcagaaaaaagagaagggggggggaaaaaggaagaccaggggcccaggcggaggaggggggggacaggggggaccccgccaacaagagccaaaagggggggggcgggggaacagggcaggggggaagacgaccggcacgagggagagccggcggggggaaaaagacaccgcgggggaaagggcggggggacgaaaagaagcgggcgccggggaggcggagaaaaaaaaagaagggccagagaggcagagggggtgggaagggagaac

SEQ ID NO: 120816 - DNA, 504 bp, Arabidopsis thaliana columbia
acgcgtacgtaagcttggatcctctagagcgttcgccctttgggttatatcttaacaaaatcgaagtacccgtatcaaataaaaaaaatgagatgagtgcttctcaacaaagaacacagaaggatctgataatccaaaggcaggtatatctatatattgcatattgacctctgcgtatctatattctcattccctcttaaaaggatacaatttcatccgcgactcaagggattatgcttaatgaccctctcctacaaaatggattcaacagagatggcgaaaacatgtttcctcctacccacttacattaatatcattcgcttcactggcatcgctttgggaaggaaacttggataacccggcgggcatccaattccggtaatagtattttcgagctgatggaacattttttgcaccctttgtttaattggaaacacgtgcaaaggacatttttttctgcagaaagtcttactggtgggtttacccatccgtaaaaaagtaaag

SEQ ID NO: 120817 - DNA, 440 bp, Arabidopsis thaliana columbia
cgcgtacgtgagcttggatcctctagagcgtttcgccgcgcggtaattcctttttttttattttttttttcttttccggggtttcttttattctttttcttttttttgccaaggaaaggggacactcaaaatttaaaggggcttgctcgggggacccaaaaaaaaaatgcccccgccaaaaaaagggtttccctccttagggggggaaaaacaaatcttttgattttcctcccccgaggtgtgttttattttggggaaggggtttaatccaaactattccttttggcgactcacatggggcgggggaagggggctaaacccctatgcccaaaaataggatgggggcgtccgggcacatgctaacccaccccactatcttggatttcaaccccggcccggggggggttttttgggggggaggagaattcaggacccccttt

SEQ ID NO: 120818 - DNA, 494 bp, Arabidopsis thaliana columbia
cacgcgtgcgtgagcttggatcctctagagcgttcgcccgttgggttaaccctttttttttttttttttttttttttttttgttttttttttttttttataaaaaaaacattcgggtgggtattatcgggtctaaggggataccccctgggggaaaaagaattgcccctgttttttgtttttttccccaaaaacactcctcctttgggggggaaaaaagggaaaggggaaaacctggtgtattgggggccattttggggggaattccccccccaatggtgaaaaaacccggtggctaaaaaaaaaccgggcccaaccttttggggttgggtataaaacatagggggggtgggggttcccttaaaagctcacaacaaaacttttcttaaaaacttgggggttagtttcttttgggaaatcttgtttggtccctaaaaaggggcgggggaaaaaattctcgggtgggggtctcacaccccaattttgattcttcct

SEQ ID NO: 120819 - DNA, 484 bp, Arabidopsis thaliana columbia
  unsure (1)..(484): unsure at all n locations
cacgcgtgcgtaagctgggatcctctagagcctccgaccttggggttanccccttttttttttttttttttttttggagtgaggcttgttttttctcgccaccggaaaatgacgttgtaataccgaaaaagagacgtcttagaagagcgaactcaccgtttatccagggcgaaatcaaaaaaaaggggggaagttccttctttgggggggagggggacagggacccaatctgagccaagggggccccccgagggcgaaggggggggnccacccggcggcacggacggggggaaagaacagaagacccccaaagcggccaaaggcgcccagggtccggggcggaacccaacgtgaagagcgaacggggggaaacagagaaaagccccaggacgaggagcagggccgccccccattctcaagtgcgtttgggggggggttccgcgcagcggaacgaggaagagcacgctgcccccccctctgcgat

SEQ ID NO: 120820 - DNA, 494 bp, Arabidopsis thaliana columbia
  unsure (1)..(494): unsure at all n locations
acgcctgcaggtaccggtccggaattcccgggttgacccacgcgtccgatcaaatagagacaaggaacaactctgcaacgtggtcggactatcaaagactctctatagacgcttgcagctcatgcttcccataacgataggttaccgcttatagctgttctccaagaactcttctttgaacaaaagcatggcatgcctcgctctgggaggaggannaaatgatgcggacactctaacagctgatgcactgacgattcctggtgggagaacacgacaggagcatactcatagagatggtcgggtgactgttgcgcgcacaaacacgtttttgaaatggatctgcagaaaatgaaggcaagggccggagaactactagatgagtgtccaagctcaaacaggaatgaagaaagacgtaccaaggcctttatctttttgagcttgcctgggccggaaaaacctccggtggaaagtctatttttgaaaaagctttaggt

SEQ ID NO: 120821 - DNA, 477 bp, Arabidopsis thaliana columbia
  unsure (1)..(477): unsure at all n locations
cgcctgcaggtaccggtccggaattcccgggttgaccacgcggacaaacgatggtttttgccattgcttctgctctgaggttcacactcacattatgcacgagcagagtgcaaaatcctacccagagaagaccacttggtagcgtccacatcatccaccgggtggaagattaactgagagagcgccggaagtccgctgctttgggggggaanaaaannaccagcgggcccggacccacaaacggcgccccggggtgttagtgggcgcgtggcacgccctcccggctgagtgggctcgatggcttgcttacgcgggggatggcgggcgacgatgcctattgggtggggggcggtggcccgcaccgctcccaggagggctgggccatggggaggctgttgcgttaggcgggcgggcagcggctggcggggacccgggtttgatgattctcggatgggtgccgggaagggttgcgttgaa

SEQ ID NO: 120822 - DNA, 524 bp, Arabidopsis thaliana columbia
  unsure (1)..(524): unsure at all n locations
gcctgnggtgccggngcggaatncttttttgaccacgggcgcaaggccgcnaaggcttcagcgcgggcggacgcggggggagcctacagcgagaagcgagaaagaggcaaaaagcgcaggggagcccgaaggcagccgggggaccggcggggagaggaacgagggtgagcgggaaaggacgcggaggaaattccctccttaaagggggggaaaaaaagacaagcgcgggcgacgacgcaaagaaagaacccgcggggagggggggggagggagaaacgccgggggtggggggggtgggaaaaaaacacagtgcagggggtgggcgtcaacgagagccggatgcggaggagccaggagggacaagggcgaggaaggccgtgagacggatgcgatgataggcaaagtagagcggggaggagaacgagcgtgcggtcggcgagggaggagaaaaggagaaagagagggggagaagacgaagagggcgggggcgagccgagggggggcgctggcgccaaagagaagga

SEQ ID NO: 120823 - DNA, 339 bp, Arabidopsis thaliana columbia
  unsure (1)..(339): unsure at all n locations
cgcgtacgaagctgggaccttagacggctcgccggggggnaaaccaaaagacnnccaaaaacaagaggggaagagaaacaaaagaagacnggggcnngaagaggacaccagcaacagaggaagggagaggcttttagacggatcatattggtaccacagaaacactcttccacggcgtggnggatttttttttggggggggaaacaacaaccgggaacttgggggccccgggagcccggaccanaggaaggggcggaacaaggcgcaacaaaaccgcaaagaggagcgaccgcgggggagggcaaaacccataggcggaaagagggggcgccctggcgg

SEQ ID NO: 120824 - DNA, 526 bp, Arabidopsis thaliana columbia
acgccggcgtgagctgggatcctctagagcggctcgcccgggcggttaaaccccttctttttggttgaatatgagattacttggagcgcgggcctcagcacgtcggctattacggtggcgccgttgcggcggcgcgggagaagagaaaaagaaaaaccgccgcgtcacatgcgttgtgacaacggggggggggggaaacggtgaaaaaccggccgataatccctccttggggggggggacacgcccaaaaaaaaaaaaaaaacgaaaggcccccgcgcgaggggcggggactcgccccccggggtgagggaaaaacaaacccgccccccgggaaaggggccggggcctgagggcccggacccccccggggggggagccctccgcccgagaggagaaaagccccgggggaacagacccgccccgcccccggctaaaaaaacccccccggggccgcccaaacggggggtgggggaccccccgcggcgccccccgcggggaggggggcggggccccggggcgctgggcc

SEQ ID NO: 120825 - DNA, 495 bp, Arabidopsis thaliana columbia
cgcctgcaggtaccggtccggaattcccgggttgacccacgcgtccgcccacgcgtccggcgaagagagattctcgggtgacgccttgcactctccatccgcttcccattcatgacatgccgaaagctgaagaaagtgctgacttgcagtgactttgagcatgaaatagcatcaaagcttgttctagaagcccttccctgcagggcagaagccccacacatacaacgtagcctagcctccgaagaatctgcatccctgaaccgccgcctgatagagagggcttacaaatacagacccgtcaaagtggtcgagtttgagcttcctagaccgcagtgtgtagtctacctagacttgaaaagagaagaatgtgggggactgttcccgtcgggtagagtgtattcgcaggccctttacttgggaaggtaagggttttttcctggcagctcactgcaacatggaccaacagagctcgttccactgtttcgggctggtcct

SEQ ID NO: 120826 - DNA, 495 bp, Arabidopsis thaliana columbia
ccgccggcgtgagctgggatcctctagagcgctccgccgcggggtaaatcctttgagggaaaaactgcacaataaaaggggggaatcgaggaaaaacaaaatcaattccggaccaacaacaatggtcgggtccgaaactcgagaaaagggtgcacttcaaatctgtgattgataaacaagaaagagagagagctcctcttcaggaggggggaagacgcaagagccttgggcataccacacagatccaagaagaggcggctggaacagacactggggtgggccaaacaaacctatcacgacggtgttgggggcggggggaaaaaaaccgcgtcttggccccgccggggggggaatagccgcgcccctttgggccctccttcccaatcctctaaaagggagccttggcgccctgaggacggcgggagccggttcttgcccctggggggagagacagcgggggggggggggccaccccaggggaagcccagacacaca

SEQ ID NO: 120827 - DNA, 494 bp, Arabidopsis thaliana columbia
  unsure (1)..(494): unsure at all n locations
acgcctgcaggtaccggtccggaatttccggttcgacccacgcgtacggctgaatgatgagctgaacagagaagccctggatatgcttgctgagattcagttgttgaatcgtgctgttaagaggaaaagcacaaaaatggtcgaactactcattcattacctggttaaccccttgacactcanggcctccacctccctcggggggttacctaanataactggacctggcgggatcacacctttacatctagctgcatgtacatctggctcatatgatatgattgatctactcaccaatgatccacaagagattggattatcgagctggaacactcttcgcgatgcaaccgggcaaactccatacagctacgctgcaataaggaacaaccataactataactcattggtgggtcgaaaacttgcagacaaaagaaacaagccggtctcactaaacatcgagcaccaggttgttgaccaaacccggtctgaacaat

SEQ ID NO: 120828 - DNA, 453 bp, Arabidopsis thaliana columbia
  unsure (1)..(453): unsure at all n locations
cgcctgcgtgtccggtccggaattcccggtctacccacgcgtaatccggctgtnagaagaaacagaagggacgagaagtgtggagtacatgccgttaaacttatccttgactctaaccataagtgcgggcatatgactcctttatggactagctcttaaagatatctatgttgccttcacaaacttccctcctttagggggtaaaaacaccacaaaagaaacctctatgaagataacacccactgccaaaccgccgacggatccactatataaagaacttcccgctccaagaatagatataaaaaagcctcaccctgcgagaagagaggaccctgacatcccgctagacaagaactagcaccgcgaatcaaacggagaacatacaaccgtggacccacaaaacgccagacatggaaaaagggcacggagtcgcgacaccacgcatgacaacct

SEQ ID NO: 120829 - DNA, 494 bp, Arabidopsis thaliana columbia
cacgcgtacgtaagctgggatcctctagagccgtcgcgggagggaaaatctttttttttttattaggaggggaaagattacgcgagttttattacttaaagaggagattttcagcaagatacaaccacaaagctcatttactggggaagacttgcaaacgagttttttgaaggcgctaatattgggcaccctcctcccaggaggggggagaaaatccaaagaggcgctgggaaaataattacccccaaacgggaagaagggggagtcccccaacggaccccggacacaaacttaggtgggacagccccgaaggcgccaaaacggaaaaaaccgggtcccccaggggaaaaccccggggagaggcacaagccccttacaagaaggggtggcgcacgggaaagcggtaacccacagcagaagagcccaaagacccgccttagggccccgaaaacaaagggcgcccaacccacccatgagggggagacaaagggacg

SEQ ID NO: 120830 - DNA, 501 bp, Arabidopsis thaliana columbia
  unsure (1)..(501): unsure at all n locations
cgcctgcaggtaccggtccggaattcccgggctgacccacgcgggcgaccacgctcagtacggntgcgagaagacaacagaaggggacccatttcttggcttacaacaacaaatcttaaacgttttactttgtgctgtactactcaacctgaatggccgcctaaacaatggctctctnctcccctgactttcgctcgtagggggggaaacanaaccccggggaatctgaagtccaagaaagcccccgtgtggcagtgagggagactgtcgcctagccaaagggcccatcagggagaccatggtccgggtcgggccgtggcaaggatctgggggccttctctggcaaataccgagctacctaccggagaattccccggaaactacggatgggacaccgcggactttacgggaccccggaactttcgtaaggacccggcaatcagagagctgccacaacatgggggccagggtatggaaccctaggcaggtgctgactgagcc

SEQ ID NO: 120831 - DNA, 456 bp, Arabidopsis thaliana columbia
  unsure (1)..(456): unsure at all n locations
cgcctgnaggtaccggnccggaattnccggttcgacccacgcgtccaggcggctgtgagaagacgacagaagggggcagggcaaatggatcgtcttaagctttatttctccggtttcgttttgtctttctttatcgtctcggtttcgtcgtctgatgtcaacgacggcgatgatctcgagatccgtcatttcttcttttggggccgagcctcaagnnnggaccgcagaggaacactatgctctcttcaagcgggagggggggaaggactacgcttccaacgaggagcatgactatagattctcggttgtcaaagcgaatctcaggcgagcgaggcgtcaccagaagttggatccgggcgggaatcatgggtggtgcgcagttctcagaactgactcgggcggagttccggaagaaaaacttgggggttagaggtgggtctaagctgctgaagaggc

SEQ ID NO: 120832 - DNA, 445 bp, Arabidopsis thaliana columbia
  unsure (1)..(445): unsure at all n locations
cgcggcgtagcngggancnnagagcggctgccggggggaaaaccccnnnngagggagaaaaacgggaggggcancaaaacaagaagagaaaaacgggggggaaaaaccaaagcacgacagtaaaccaaaaaaagcacggcggagacgagggcagaagcccacaaaagattttttttgggggggggaacaaagaagacacaaagcaaaggggcagccaccgccaggaaggggacacgcgggacagcacccaaagacacacaggggggggggggaagaaacagaggaaggggacagaaagacgggagggaccggacgaaccgcggcgggggaggaaaaacggggggaaaaaagcaccgngagaaagccggggggcaaacgcccagaaggcaacagaggagggggcaagccgaggggggaggggcggcaaaaaccggggaaggcggag

SEQ ID NO: 120833 - DNA, 477 bp, Arabidopsis thaliana columbia
  unsure (1)..(477): unsure at all n locations
gcggcgtaagctgggatcctntagagcggttgangggggggggaaatcccccntnnnttttttggaaacactaggaaggggtataaatacaaaggagtgtcggagttttacaacattaggagagaaagagaacaactgttgaaacatttttgagaaacatgggtacagatggcgcgaacaacatgaagatgaactttttttttgggggggggggggacaaaagaagagcagccccgggaaaaaagccggcgagagggggggcgcaagaggaaagggggggacagcgcgctggaaaggttaaaaggggggaggagcggggaatagggggaaaaagggggggggcaagagggagatggactaaagcgtgaagagcgaatgtgggaaatcgcggttccgtgtggttttttggcggggggggaagaagggagacgagaggggacagggagagaggatatgaagggggggggggggtgagaa

SEQ ID NO: 120834 - DNA, 379 bp, Arabidopsis thaliana columbia
cgcctgcaggtaccggtccggaattcccgggtttacccacgcgtgcgtgcacgcgttcgtgaagacgacagaagggtacggctgcgagaagactacagaagggtacgactgcgacaagacgacagaagggtacggttgggagaagacgaccgaagggggagaagagatcgacagaagaacagcttgatcatttctctttaagaggtgataggcggcttcaggggacgctttcttcggtgacatggaaaccaggtgggttcacggggggagaagacgggggctagaggaatacccgtctttccaagagcttgcacttcctttaaaattgtcgccagtggcgttaataaataaataccgcctggcccttcggtgataaacg

SEQ ID NO: 120835 - DNA, 512 bp, Arabidopsis thaliana columbia
cgcgtacgtaagctaggatcctctagagcggtcgccggggggtaaaacctttttttttataaaaaaggctacttctcaaggctaaacaatcataactcggactggacttgaacaaagaaaaaacgtggtcttgttggctttgaactactgagggaatagggtggaggaagaaggaccaaacataaacgcccccctcctaggagaggaaacaacaatccaaaacccaaaaagacaaaagcaaccgccgaagaagcgagcccctttccaacactttgggttttcctgaaagaggaacctcaaagaagaaaaaaaaacgggaaagacgaaaccaatcgcaagaaagaacaccacaaaagggcggatccaggggccccccggaccggacgcgcaatcgggtttccccggcactggggggcaaaaccctactcttccctccgcggaggcggaggaaaaaagaaaaaaccaaccggacggacccgcgccccgagaaacgctaactaaagaaaacaaag

SEQ ID NO: 120836 - DNA, 490 bp, Arabidopsis thaliana columbia
acgcgtacgtaagcttggatcctctagagcggtcgctcggtgggttaaatctctttttttttttttgggaaacactacaagggttttatatttaaagaatgtttgtgttttgcgacattcgacgataaagagaaccgcgcttatacctctatagtagcatgaggacacatgcgctaacaattaaaaaatccactcctcctttgaagtggaggggaacacaaaaacagcgcctcccaaaaaaagtccaccaagagggaccgcccaacttgccagagaggaaacttctcactttgtcaaaaaacactggttagacactgtgtcttattggtaatgggacggaatccttctgctttggcatcatactggaggggcccttgatagccccgcattctttgccctttttaccagaggtgtctaaggcgttttttaaattgatgccggggtttttccaaaggggggggccggctccatcttgtggagcccattgggg

SEQ ID NO: 120837 - DNA, 442 bp, Arabidopsis thaliana columbia
cgcctgcaggtaccggtccggaattcccgggtcgacccacgcgtccgcccacgcgtccgtgcagacgacagaaggcgacggatgggaaaagacaacagaagggcacgaccgcgagaagacgacaaaaggagccggctgacacaacacgacagacgggggagaagagaccgagaaaacaccagaagatcccctcccagaaggggaggggggcccaagagatgcttccgtccaaaacaaagaccccaactggggggccggtggagaacacgggcgctagaaaattaccagggatcacgacagctagaacctacgtaaaagatggcgcccccggcggcaagacgaccagaacccacacagcccgctcggaagtaacagcagcatggatcatgacggacctgagctacccctccggcggaaagggccaggcatcctgggagcacaa

SEQ ID NO: 120838 - DNA, 490 bp, Arabidopsis thaliana columbia
cgccggcgtaagctgggatcctctagagcctccgccgggggggtaaaatcacttttttttttttttttttgttttgtgtggggaaaacaaacactggaagtgttataaattcaaaggttgtctgagttttacaacttttgagagaaagagaacaccccagaaccctttttggaaacatgattacccaaacctttttctttggggggggaacggagccaaagcactcgggggggacaaaaaaacagcccctccgggaagagagccggccagagttaccgcccaaagggccaacccggggaccccccccttgtacacgtaaccactcggtgaccacttgttttggttgtaaaaaggacggtgtccatcgacgttagctccatcctgggggaacgacttgaaaacaccgattcccttgccctttttggcggaggggtaaacgccgtccctcaagaccctgcggccgtaaattccgaagggccgggcgggcttg

SEQ ID NO: 120839 - DNA, 418 bp, Arabidopsis thaliana columbia
  unsure (1)..(418): unsure at all n locations
agaagaaaggggagaggaggaggagagagtagagganaaaaagaggaggggnaggggggggggttttaaaagaagagatatttaatttggtgatgggttgagaaagttaaaaggaaaattccctcatttggggggggggggacanagaaagggggggggatggtaatattcctcacgagtttgttggggggggggggacctttctttttgggcctgggcattgcgtgtgaggcgagggttgggggaggggaccgatcctttgtcttggacaaatttggacatggggaactgtcggggagcccaaaggaaaatgggggtgtggaccgggctatcaaaaatcatgcggtgcgacggcgccttgggcttaaagggccattgttgggggggggggtggggtaattcgtgtgggagagggctg

SEQ ID NO: 120840 - DNA, 504 bp, Arabidopsis thaliana columbia
  unsure (1)..(504): unsure at all n locations
cgcctgctggtaccgggccggaattnctgtttcgacccacgcggaagcccacgcgtncgtacgggtgcgagaagacgacggaagggtacggctgcgagaagacgactgaagggggagaagaaaaaggggaaaattttcgcaatgcgatttacgcgaaaaatcaaaggtttttggatatgggggaaaagttttttcttttgggagggaaggancnccagaagggaccacccacaagaaaaaccgcaagggcgggggggggagacaggggaaactgggaggcaacgagaaggggggcctcagagaaaccggaggcaggagggggaggcacagggacgaagcaagaggccgggggaaaacccaggaaaggccgccgaaggggggggcaggagaaccaagggggggggcagccagccggggcgcgagggaaccggagcaaaacccggaaggaggccggagggggcccggagaagagggaagaggggcaaggacgggacaagaaacagg

SEQ ID NO: 120841 - DNA, 487 bp, Arabidopsis thaliana columbia
cgcgtacgtaagcttggatcctctagagcgcttcggcggggggttaattcttttttttttttataggcagatatgatgattctcttattaaccaaggtgttgacaaatacatggacaagggattgtttattaaggtaatacacaaaatctacatgaatgaataatattctcaaaacattcatagagcaaacttctgtttagagggggcgaacaacaaacaagggaaaataagaaaatgctcgagcgacttagacacgcacgcttctttaaaccaaactttccacttgggattctactgaaaaacccaggatcaagcttcttgtaaagactatgaaacttcatgaacatagaatccataaaaccctccactttcggtttgtattttttaaacaaaaccgggtttgggggggccccacaaacccgatatacaaaacaggggggaaattggaacagctcccgaccatggaagttccccttaatcccatta

SEQ ID NO: 120842 - DNA, 504 bp, Arabidopsis thaliana columbia
cacgcgtacgtaagcttaggatgcctactagagcgctcgcgcggggcggggtaaaatcgttttttttttttttgagggcacccatctagaagtgcaaacaatagaagggttgtaatagtgaaagcaagattggggtgaacaacatcatctcaaaaagcattcatcgaaacatgatttctcgggccctgactacccaaggacttccctccttaagggggtcggagccaaaacaataggagtgcccacaaaaagaaccccctgcgggaggaatcgccgaaaaagctactccccaaattgccaattcggggacttctcccttggagaggcaaccacttgttggagaaaatagggagggtttggaaatagggctggctccatcctcggaagcgtccttgttgacaccggactcgtgaacccctgttcccggggcgttagcggcggagggtaagtccccggcgccaaaagtcacgatgggcgtgatcgccgaggggttgtcggacccaa

SEQ ID NO: 120843 - DNA, 493 bp, Arabidopsis thaliana columbia
  unsure (1)..(493): unsure at all n locations
acgcctgcaggtaccggtccggaattcccggttcgacccacgcgtccgacggctgcgacaacacaacggggagaggagatgagaacaagaaaagattgatcctctcgtgagaaaaaaaaaggatgggctagtgaagcgatgctctgtgacatgacaaccaaaccatctgactgtagagaagacaagacttcgctgattagaggggcgnacaacacctgagccctcctttaaaataaaagccccgggcgtggcgaagagaaaaaccagcacgccctgccgttttaaatgaacggtggactggacggacgggcccgactcctcccctacaaaggacaggggatggggtgctgacattaccgcccctagtctggtgttgaccttactggatacgatcctatcctcaacacaaacaaaaggactggggaggggggagggtgcccccgggaagggaggccggaccggcttggcagggcgggaccgctcccctgaactt

SEQ ID NO: 120844 - DNA, 491 bp, Arabidopsis thaliana columbia
  unsure (1)..(491): unsure at all n locations
acgcgngcgtgaggggggatgctntagaggggttggngggggggggaaataccgcggtngnggggggaaaaaaggaagaaaagggggggtgcatttgaaacaaaatcgcatggggaggcgattgagaataagaagaaaccttttgttgaattgtgtagcaagggttgttaggttcatagggaagggaaagaaggtttttttttcggggggggagacnaaacgagaggggagaggaaagagagagaggagcgcgaaggaggagggcgcgacacgcgggcgggaaggaacagtgggggggaaagaggcggaacgagcggaggcgaaagggaggggccggaaccagcgggaagagagagccgcgcgggggccgggaaggggaggggggaggcccagggacgaaaggcgaaggagaacgggccccgggaagcgcgccgcgagccaggaggaagggggagggggggaggggcgcgcggggggagaggggggggagg

SEQ ID NO: 120845 - DNA, 484 bp, Arabidopsis thaliana columbia
  unsure (1)..(484): unsure at all n locations
cgcctgnaggtaccgggccggaattactgtgcttgaaccacggcgggcagagcacgcgtacagttcgggtgcaagacgacagaaggggaacaacgacaacaacaacggtcgagaggtcaaacactggataactaaacatgctttaaagccttttcaaaaactcaatcagtgacgagcaactgcgggaagctacgactattttttaaaggagggaaggcagaaaaaagggaaccacctacaccctaaaacacggcgcagactgaggggagcggcaaagcagggcaggagccgggaccgggggagcagaagagaacaaaccccagattggaggggcaggggcaaaggctcccttcaantatgagcaacgaggaattagcggaaacaaccaaaagaagatcgtttaaaagaagaaggagcgaggaataagcgggggaagggggcgcaacaacgaggagtcatggaatgtattaataacagcctcata

SEQ ID NO: 120846 - DNA, 530 bp, Arabidopsis thaliana columbia
  unsure (1)..(530): unsure at all n locations
cgcgtacgtgagctgggatcctctagagcgtttgcccgggggggaaaacccctcttttgggtgttacttaaaattaaatatgtctacaatagtttgtggggggcattatttggtggctaatggaccttttttaacaccttgcccaacaatcccgccttacacgggaggggaacctccgaatttacaccgggaaaacacctttttcttgtggagggggggccacgcgccacacccacgcggcgggggcaccaaccncttacggtattccggggggaacgtcgaaaccgccgattgaaggccgacggtcccagggaatacctcccgggggaccaggggccacgtagcggaggcttgataggcaaggggcggacgactggctgtttgtcacctccactcgcgggggggggaggccacacgcgggaaacatttgcttcagggcggggtttgcgccacccggcgcgcacagccggggaaccggtgacggagccagattgccgcggtgtgggcagattggaagcggccgcccgcga

SEQ ID NO: 120847 - DNA, 437 bp, Arabidopsis thaliana columbia
accctgcagtccggccggaattctggttgaccacgcgtcgccaccgtcgtcggtggaaagacaagaagggggtctaggggttcttaaaaaaaagaacgaaactgagaatatcttggcaggagataagctgctgctaatcttctccctagaaaaattttttaatgagggctcactgtgaagacaacgtttaaattttcttgtcgagaacgaatatgtacagagccagggaaaaacaattgttctttgacttgggggggggggaaactagcgtatcggaagatagagataaagtgtttgcattacaataagctcggttggaaatagccttagaagaaatgctgcggctagatacccaccgcgaagtggaggtaagaagaaaggtccacctgcttaataactcctagaagctttgtgttgggaaaatgttcagcatagta

SEQ ID NO: 120848 - DNA, 431 bp, Arabidopsis thaliana columbia
  unsure (1)..(431): unsure at all n locations
acgcgtacgtaagncggggaccnntagagcggttgagggggggggaaaaatccattttagngggggggggaggaagaagaaggtatatacaaacactgagaaggcttatgaattcaaagtatgtgtggagttttacaacatttagagagaaagagaacaacacagaaacatttatagaaacaagaaaacacacgctcttttttttgggggaagaacaganccaaaggaccggggggaggaaaaaagaaagacacccccgggaagaaaaccgaaaaagagaaccgaccaaaggggcgagggggggacgcgcgcccgggaaaacggaacaagaaggggaaaagggggaggggggaggaaaaaaggaagggacgccacaggaaggaagcgcgcaagcgggggcaggggaaggggagaaaaccgagagcccgggg

SEQ ID NO: 120849 - DNA, 396 bp, Arabidopsis thaliana columbia
  unsure (1)..(396): unsure at all n locations
cgcctgcaggtaccggnccggaatnnccgggttgacccacgcgggcgcgagaagacgacagaagggggagaagagagcgagagaagaacagccggagcatccagggagaaaaacaaaggcagccccagggaggctatcttcggggacattgaaaccagctgggttcacggtggagaagacgggggntactctttttttgggggtacaagagcncgagccgccgncaaaagggacgccaggggcgccaagaagagggaagaccggcccgccctccgggaagaaacggcagcacggacccgggggggcggcgggcgacgccccccgggaaaaaggggccacggggggacggggggcgacaaaggaccggcaagcaagggacggagcgcaaccggcgac

SEQ ID NO: 120850 - DNA, 509 bp, Arabidopsis thaliana columbia
acgcgtacgtaagctaggatcctctagagcgtttgctgggggggtaaatcctttttttttttttaaacagaaggatggattattcatcaatgaaaatacatttaggggaagatccgaaaggacacaactacaatgcattttttcacttatatggggttaaacacctgaaattttaaacaacggggctggggttttttttaggggggggagaaaaaaagcgggacgggagaagaaaaaaagggcaaggggaaagaaaccaaagcccgggcggaaaaagagagggacaagggaccggaaaaaaaaaagggctgtgagctggaaaaaaggcagtagatggcggttaaccgaggtggaggtatttttacgaaggggagcggaaaaaaaaagatggatgatttagaaaagttggtggttcgagaggaaagtgtgtataaacattagagggggttgtgtagggagtgaaataagtaatttacaaatgttactgacgggtaagaattattttgttg

SEQ ID NO: 120851 - DNA, 490 bp, Arabidopsis thaliana columbia
  unsure (1)..(490): unsure at all n locations
acgcgtgcgtaagctgggatcctctagagcgttcngcgggggggggaaccccgnngnnanannncaaaaaaaganagagggagaaggagccccagcacacggaacggaaaagaccgaggaacccagacggccgccattcattgggaaagtaagaagaaaaaacaaagaggggacaaagagggacgggaaatgcttttttagggggggggcacacaaggaaggaggagaaagaactccacagtttaaggggaaggtggaattactgtaaagtttatttgttggatctgggttccttcggggccggaaaattgaaacgatgggttggaaaaaaacttgggggtacctcccttaacaaaaggggggcgagggcaaattacgggctttgggggatttataaacctttttgtgtggttgggagttacaaaaagaagggggttcaacatgaggggaaacatgggctccaccagcattatcggggaaaggggggtca

SEQ ID NO: 120852 - DNA, 502 bp, Arabidopsis thaliana columbia
  unsure (1)..(502): unsure at all n locations
acgcctgcatgtaccggtccggaattcccggtgttgacccacgcgtccgttccgctgtgagaagaccagaaggggtgtttgagaagcgggattggtgatcggagctggaatttggttggtaatcggaggtcagagagtagtcaacggatatgccggaggaagaatcgatagatatcaaattcaggggagactccgttctcgagggggggccttnacgggattctgcggcttctactgttgactttttgaagcagaggggcgtctctgattcgcccaaaggcaaaacagttgttccaaaggggataaacgaagtgaagctgttaagctcgggtaagatcttggagaacaacaagactgttgggcagtggaagacaccttttggagatatttgctggtggagtcttggggatgcatgttggttgacaccccttctctaccaaatccaaaacagaaaataaagttggtatagcccccaaggctgctattttgtacatgcaccatt

SEQ ID NO: 120853 - DNA, 546 bp, Arabidopsis thaliana columbia
  unsure (1)..(546): unsure at all n locations
aatgtgagggggttgggggggggttcctttaggttacccgctggggggctgtgagcnagaaacgcacgcgngcgtgagcngggatcctntagagcgttcnggggggggggaaaaccccgntttgggangaggacaaaacgaaggggggggaaatgtatctaggggggggaaactttttttttaaagagtctaatacagaattttaaaaggggaaatacactgggtgtttgtttccttaagcgaggggggaacaaagctctctttggggggggggggaaangacagggacaaacagggaaaaaaaagcccagaagaaagggggggagggaaaaaacaaaaaggggacgcgggccaggggaaaaggggcgcccgggggaggcggaggaggggaggaagaaagggggggccccgacccacagccggagggggggggggccggcacgagcgggggggggggggggcaagaaggaggagcacgaggaccaaaagcgagggaaaggggagagagggcggaggacacgaaagaaagggaagggcggggggggg

SEQ ID NO: 120854 - DNA, 496 bp, Arabidopsis thaliana columbia
  unsure (1)..(496): unsure at all n locations
cacgcgtgcgtaagcttggatcctctagagccttcgcagggagggtaaatccctttttttttttttnccatgtgaaacatggtgggatctgtaataaacatgtgaaacatcataatttgcaaataatgctcctttggaacttcttccttgtttacaaatatggcattaagagggcacatatataaacacattttcctctttacggggggggggancaacaanagaacnatagaagcaacaaaggacaaggccagaaaccagaggactggaagcctagaatttacttaacccccgggactggaaggggagggttctgataacaaccccttggtaaagagcagcaagcgcatttccaatgaagggggcaatccaaaacacccagggttcatcccaagaatgggcttttcttacttgtagttaacccctttttttcaaagcgccaaactttggtccaggaagtataactggtgggggttttaacctgcaggggtatggt

SEQ ID NO: 120855 - DNA, 524 bp, Arabidopsis thaliana columbia
actctagaaggctataagatcgacagcacgcgtacgtaagcttggatcctctagagcggtcgcgcgttgggttaattccttttttttttttttttttgaagggaacataatcttattacaaattgaaataatacaataatgcgcgaatcggtttccaaatttgaaaaaaacaaattcaaaacaagaaaacttgcggggaaaaacaaatagaaccattaattctcctttgctgggactcacaacgacaacgtacgtttttgtttattattcgatccacatatatccgccaaagtaaatactaacaaaacgacttcgtcccattatgtggaggaattaagagctttggttctttttatgggcaccttggggggtccacgggggggggagaggctagcgtaacactggcacttgtgggattttccgcccgcccccggaggcgcccgggtggccctgaaaaaaaaacccccccttttggggggtttttgcgaacacaacggcgacggggggtgaccaggaaatccgga

SEQ ID NO: 120856 - DNA, 512 bp, Arabidopsis thaliana columbia
atacgactcaccttagagaaagacgtacgcctgcaggtaccggtccggaattcccggttcgacccacgcgtccgtacggctgcgagaagacgacagaaggggggacttgctgctacaggtgcaaccgtgcgcctccgggtacgtacggaaactacgacaagtgccagtgctacgctagcctcaccacccacggtggacgccgcaagggcccataagatgtacaaagctgcttaattgctgcagataatgggacgatgtcgttttgttagtatttactttggcgtatatatgtggatcgaataataaacgagaacgtacgttgtcgttgtgagtgtgagtactgtattattaatggttctatttgtttttacttgcaagttttcttgttttgaatttagttttttcatatttgtatatcgattcgtgcattattggattatttcaatttgaaataagattatgttacctaaaaaaaaacaaacgatgatagatatattataagcgggcgctct

SEQ ID NO: 120857 - DNA, 207 bp, Arabidopsis thaliana columbia
  unsure (1)..(207): unsure at all n locations
acgcgtcgtaagcnaggatcctctagagcgctttcgggggggggctaatcccctgnnananganaagggggaaggacaagaaatgagaacagggggaaaggaaggacanaggaatttaaaaataagaagcgccntaattatgaaatacccaaatagttttacagaatcactaggcttgggttgagaccagatttttttctaaagggg

SEQ ID NO: 120858 - DNA, 469 bp, Arabidopsis thaliana columbia
acgcctgcggtccggtccggattccttgttgcccagcgtccgaccgctgcgagaaaaacagaagggacgggtgcgagaagaaacagaagggtacggctgcgagcagaagacaaaagggtacggctggcgagaagacgacagaaggggttgtcaaagcgacacaaggacgaattcctgtcttttttttttggggggggggcgacagaggcactagatgacttcgaaagcacttagccctcgggagccctcgggggattttattaggaagaccaggtggtattcttattggggcagctgaagagagaggcctggaggttagaaaggggcttttaaatggctacgtagatggagttcagagcctgaccatggtacctggagcgagggggccgtctccctaaaaggaaagcggtcccgtaacccacatttagcaccggaagtgggacacttctatgttccctgcggaccaagg

SEQ ID NO: 120859 - DNA, 521 bp, Arabidopsis thaliana columbia
  unsure (1)..(521): unsure at all n locations
ccgcgnacgtaagcgaggaaccactagagcggtttcccgggggggaaaaacccctnnaanaagggaggaagggagaacaagggaacgacacgcggggaaacgggaacggaaaagaagggggacaaaaccaggaacggtttaactataaaaagaaaggaaaaggaaatctgaaccggggcggggcaatcactatttctttttaagggacaaaaacaaccccccggcggccaggagcaaaagcacccccaaacggcggccacacgtggggacaaaaaaagaggagaagccgcaaaaaaccgacgagccaccagggggccgcangcgagtagggggccgaaggaccccggaacgcgggacggaaacaccagcgcgaaaagagcaagaaccccaccgaggaaaacaaaggacccgaccacacaaaggcgcgcggggggcacncgcggaaaacaacgggggcgcccaccgtcgtagggcgaaaaaggacgcgggagaaacgcgggaggccgaaaaaagaccaggca

SEQ ID NO: 120860 - DNA, 456 bp, Arabidopsis thaliana columbia
cgcctgcaggtaccggtccggaattcccgggttgacccacgcgtgcgtaccgctagaagacgacagaaggggagagcgagcgacgaattccactggaaggaagaaagaagaaagctctcggcttgctctccttgttcttcttcctcgataacctctgagctttttggttccagagaaaacccttcctctccttttttttaggggggcgtcaggaccatacgtcccccttctttataaggggtttgggaaaagaaatctgggcgacaagagactgggactggggggtggtggaaccagaaaacctccaagactggggggaatgggggtaggaaccagggaacccctgggggacgtgtggggcagggttataggcgggatcagaggagtacaacccctgtcgttctggagatctttcttctatttacggggcctccgtggatggttatgtggcgagcc

SEQ ID NO: 120861 - DNA, 507 bp, Arabidopsis thaliana columbia
cgcgtacgtaagcttggatcctctagagcggctcgtcggggggtttaaacccctttttttattattatctattggggctggggtttgtgaaaaaaacaaaaattttctttccatcccgggttaaagaagattccaaaccctgactttcaaagggtaaaaaaaagaatacggcaccaaccggaaccaaaagggctcctcccttagggggggaaaaaaatgggtgtgggggtcaaaaaaagccggccacaaatttgggtgtccacgggaggcccttaaggtgaaacccccccccggggggggcaccccaaatgaactccccagaaaaaccaagaaacgaaccttttgccataaacccgcagcacaagcgggtcgaagcctgacggggggcggtataagggccctgggaatatacccgccgccagggggttgtggggcgaggcggacccataaacaccacagaaataaccacccgcccggggaacccacggggaggatggggggcccctt

SEQ ID NO: 120862 - DNA, 502 bp, Arabidopsis thaliana columbia
  unsure (1)..(502): unsure at all n locations
cacgcgtacgtaagctgggatccactagagcgctcgcaggagggggaaaaaccccnnagaagangggaaggacaccacaacaaagggcaggggggaagggaaagnaanagaaagcacaacagacgcaccggaggagaagcaccangaaacaagaagagagaggagagggaccaaaaaaagaacgagggaaaaaagagccacagaagggaggaggnaagaccccaccnggaggcacccaaaaccgccccgggcggaccgggggagaacccagccgcctggaggagaggccccaaacacggacacaaaagaaagggggggacacaggacgacacaacaacaggagaccgggggacaacacaagccgcaaaggcccggaggggngaaaccaggaaaagaaacgaagcgcgccgaggagcccaaggagaagcaacgaaaaaggagacgcacccccaaaggcagagaaaaacgacggcgaggggggaaaaacgacaacaaacggaga

SEQ ID NO: 120863 - DNA, 489 bp, Arabidopsis thaliana columbia
  unsure (1)..(489): unsure at all n locations
cgcgtgcgtaagctgggatcctctagagcgcctcgggggggggggaaaaaccccntttnagnngnnggcaaaaaaccatggggcaccaaaaatggggggattgcttccaaaaagggcaaagctacaaaacaattacgttttcacataaggtggggttaccatagggagcgcaccaggagtcatggaaagaactcgcttcgtgagggggcaaagaaaccaagggggggccctaacaacgaacccccgccgggggaggcgggggggcaaccccaccactggaggacaagcnccacaaaccccaagaccccggaccaccccgaacaccggggcaggaaccggaccgaccagccccaacgcaaccgaaggcggcggcgcggggaaaccccaggaccgcngagggggcgcccgcgacaacagcgaagaacacaaaggccgggcggaggaacaaaacgccaaagccgaacgggaggacccaaaccggggagccgg

SEQ ID NO: 120864 - DNA, 501 bp, Arabidopsis thaliana columbia
acgcgtacgtaagcttggatcctctagagcgttttgcgtggggtgtttaatttttttttttttttttggccgaccaaaatatgggtcatttattcaaactcattatggtacactgtgttttaaagataggatcacaagaatcgcttaaaactcgcccttcttgagattgacaaaatgttttttaacagatggtctcctgcttaaagaaaggaaagcctccgatctttttactccccaatacattcttcaccagaagggtggcgatgtagactcatcttttgttgctctgggtttccatcttctccttaagggttgggcatagaagggactcgcattgatcaaaacctgcgcaaacccgtgaatggcaggggagaggagttggcccattctcttggaaaaggacgcaacctctcgggaactctaaaactcaccagctgcaaaaagccggaacaagggattcctacccgttggaagcttctatagatacaaggcgcgtggggt

SEQ ID NO: 120865 - DNA, 480 bp, Arabidopsis thaliana columbia
  unsure (1)..(480): unsure at all n locations
acgcggcgtaagcngggacccactagagcgcctcgccgggggggaaaaccccntgaaagaagangacgggaaacccagagaaaacactggagaaaaccggaaaaagaaccaaccaacaccgacggacgggggccccccaccgggggcagaacccaaccacaagacagcgaacacgcggggggaaagaacctgctccaaaagggggggcaaacaaaacaccaggcgccaaaaaaaaacacccccaaccagggcccaaaaggggggccccacaccccgacaagaaacagggaaaccacggaaaacggcccgaaccgaaaaaaaaaacgcgcccaagcggggggacgcccccaacccccagaaaagcgcaaagaagaaggaaacaccccaccgcgacacccccagcgggaagagggagagaagggaaacaggacaagacacgcgaaaaagaaaaccggcagagaggaaaagagggccgcgccc

SEQ ID NO: 120866 - DNA, 492 bp, Arabidopsis thaliana columbia
  unsure (1)..(492): unsure at all n locations
cgcctgcatgtaccggtccggaattccctggttgacccacgcgtgcgtacggctgtgagaagacgacagaagggagagagtagtagcttatgggagttggagaaaagaacctattgtgcaagaaaacgagattcatctgtcagatgtcaaaaaccgattccttacactaacacttgcacctgaagaagacttctcggtaagggggggcnnccttggcaatgcatgagaattaatggcatcaacaagcctggggagataactttgttgggtataggcggtttgaagtgggttgcatatttactgtcaggaaatggaactgccgttgtgggaaatggttggaaaggtttttgtgaggcgaatggtgtgatggtaagagagactttggttttggaattcattcccaaagatggatcaaatcactgttttaagttccacgccgagtgggggggaccaaattcggaaattggagttagtcctttttcaagaattctc

SEQ ID NO: 120867 - DNA, 486 bp, Arabidopsis thaliana columbia
ctctagaagttcgttaaggtcgaacgcacgcgtacgtaagcttggatcctctagagcggtcgcccggtgtgttaatcctttttttttttttttttttgagcaaaaagggaaatcttttatcaggaacgacttcaaagttgattaacttataaaccattccaccttgaaaaaactaaacctcttcactcgtgtgagcttacaatctctgaaagaaaagaacctctttggggggggcaatctttcattattcatatgttattttggtttcggccaaaggggcgcaatccataaaacatatgtcacatgttataggcggcactggatgggctcattcctcaaatgagacggggtgagtccagctttatttcggtaagtcgaaccggcccaaggatatactggggcaaatgggtttccttctttccctcaaccaagagggggagaccaccaagggggggtggggattacccgaggaccagaccatttacg

SEQ ID NO: 120868 - DNA, 426 bp, Arabidopsis thaliana columbia
  unsure (1)..(426): unsure at all n locations
acgcgtgcgtgagntgggatgctntagagcggtttancggggggggtaaatcctttaaagataaaacatccaaaggatcggggtatttataaatgatgaaaagatccaaggacggttgcaaaagatttgaatcagactgtaaacagaggttaaaccgatcagcaaaggcataggagtcgaaacacgagggcgaaaaattttttttcttgaggggggagaganagnanaaacccgagtgaaggccggggaagcaaaaagaaccaagaaacgcgggggggcgggggggaaaaacgacacacgagggagggaaaacccacgagagacaggagaaacgggaggaacggagggggcaggggacacaagcggccggggagcgaggggggggcgcacccaggggagggaggggagcgcgaaccgaaaaggaag

SEQ ID NO: 120869 - DNA, 533 bp, Arabidopsis thaliana columbia
  unsure (1)..(533): unsure at all n locations
acgcctgcaggtaccagggcggaatgaccgggttgacccacgcgggcgaacctctccaaaatctccgagttctacaattagggggatcaatcaatcttgtgcgatttcaagcttgtcgatcaaaagaatcatcatgggaggaggaagagctatggcgacggcggcgaaggttgcctggaacaggaggtgggatcttttttttagagggggaggggaaacncccacggcggcctgaccagaaagaggggacacaccgggcggcgggtggggggggaggactaagccgggggggggggttgagattgcctcggtcgggtttttccttgttgggggagaaaagagggggtggatgtatcgtaggtcccgggtttggtatcgtatgggaacgtcggccgaaccaatatccggatccgctgagggttggtttgtagcaaaccctgctggcgctgggtgaaggctcggggtggtcgctgcgtgcacctttgtgcagccagtctgttgagcgtcgcaggggtcttcgtctattgcgggcg

SEQ ID NO: 120870 - DNA, 561 bp, Arabidopsis thaliana columbia
cgcgtgcgtaagctaggatcctctagagcggttgcccggggggtttaattcccagtttgaatagtttaagattatttatgacaaatgcatactacaattgtacagtctgcaccgatattttgagaaccatattgttttaaagagaaagagaaaaaaatggaaaagcatggaggaaggggggaagaaaacactttttttttggggggagcaaagacagccaaggcaacaactctgtggggagaaacgccgcggattgatggggcggagggatcaggtttaacgatgtgctggggccataaccagaagagaggggggggagcgaatgagggggggggaaagagctgggcacggtggaagtaaagcggggcactagggggggtggagcgcgaagcacgggagggagaccttgagaggtcttctggttgggagaatgggcaggaaaggacgggggaggactctccgcagggaaaagagggggttgtcttgaggacccgaggggaagggagtgacagagccgctgggtgaggtgtggagggggtgggagcccaaggagaaggggaa

SEQ ID NO: 120871 - DNA, 516 bp, Arabidopsis thaliana columbia
acgcctgcaggtaccggtccggaattcccgggtctgacccacgcgtccgctcggattctttctggtcaccatggcttcgggtactttctctgtccccaagggtttcactgaattctcaagattgcgaagctcctctgcttctcttcccttcggcaagaaactttcttccgatgagttcgtttccatcggctcccctccttttgggggaaagggaagcagagggggatacaggaaaggtgtgactgaggcccacctgtaggggggccttaatggattcgggaggatcgggaagaactccctgagaagttggcatggacgcaaggaccctccctctgatatcattggcctttaatgaccctgggggcggtcaagcaggcctttcattaacttaaatcccactctaccctcggaatctctcgagccggagggccaaccctccgggaaggcctgaagcctgcgtgagagagaaagaacatccaaggtgtctgctacccgaaccccgtctttttcacccag

SEQ ID NO: 120872 - DNA, 569 bp, Arabidopsis thaliana columbia
acgcgtgcgtaagcttggatcctctagagcggttgccctggggggtttattcccctttgaagaatgtgttctaggctagagaaagatgatattcaaaaaaaggacgttttttctaccgggggaagaggccggacaacccacatataggttcgggacaggagctttggtcgcagggaaggacggcctgaaaaacaaaacaaaatttttttttttagggggggggaaaccccaaccaaagaggaaaggcggcgacaaaagaacgctccaaacgagtggggagatgtgggcgccacccggtgctaggcgacaacagaagtggaaggtgaagcttttaggagggggggtatgatgccgttaagaagagagtctaggggcggaaataggggggagagtgtgctttgtgtcaaatgatgtggggggtcgcgcggagaagggtgtgtgggcgggtgcggtgtctaggctaacattgttacagaaggagggagtgcgaggggtgatctgaacgtggagagtggtgtctcttgtgtgcgagtgaagactgcacagatgttcgcttctatgtgagtggt

SEQ ID NO: 120873 - DNA, 472 bp, Arabidopsis thaliana columbia
cgcctgcaggtaccggtccggaattcccgggtttgacccacgcgtgcggacacaactaaaaaacacaaagtccgctttagtcttgtaaaccccacccaaaacgatgagtgtgcactttatagaatgaaattgagaaaaaatttatgtgaaggaacgatcttatacgaaaaaacataatggctggtggaggcgaggcaattttttttcagggagggggaaacggcggaaaaaggggacggggaagaaaaaaagaactctcactgcgttggagggtgggggagcttgggtgtacaagaagctccagaaggatagggaaggaagaggggctaggctaaggaaggagggccctgcgcgtaagggtggagaatttggctaaaaacccagggggaaagggggctgtgtggggcgaaggtatgtgcagctgtgggggggagaaggaggggcaatgagggaggggtaaggaattgggcgc

SEQ ID NO: 120874 - DNA, 434 bp, Arabidopsis thaliana columbia
  unsure (1)..(434): unsure at all n locations
acgcgtacgtaagcttggatcctctagagcggttgaccgggggggnaaaacccccagagaanaaaanaaaaggaangagagggggaaaccanaggacaccaacgcgaaagaaggaaaccaacccccccaaacaacgcacgggccaaaagagaaggccccaaaccccgcaaagaagcgagggaaaccaaaaaacatttttttaggagagaaaaaaaaaagcccgcgggggcccccccacacacggccaaagggaaaaacaccgcagcgagcccccgcgaaacaaaagaaaccgggggggccccaaacccggaaagcggccggcagaaaaaacccaaaaacacgccgcgcccgcgccgacgaggcccccgaagcgcaagaacccacaaaccgcagagaggcggggcggccaaggaacggagaacaccaccgccccc

SEQ ID NO: 120875 - DNA, 500 bp, Arabidopsis thaliana columbia
cacgcgtacgtaagcttggatcctctagagcgttcgcccttcgtgtttaatccttttttttttttttttttttgtaaagaagggtagtttatgacaaggcaattttaaattaccaatgggttgtccatcataaaaaaaaaaaaagggaacaaaagaggacaagatccattccacaattacacaaaggagaaaatcctccttaaagagacaatgggagaaaaacagcaaattattaagcaggataatattgctcaaaagttgtagacacaggttccattgttatttttagccggaggatcaaagttttaagccacaggatcaatacacccttaagaaactggcaggtttacttggtgggctcttttttcctttggtttacccaaaaaaggtccccggccaatggcttaagcgttttggtctccaaagcaacctggataagggaagggttacacaaggcaaactcttttgacatttttcttgttaaaaaaaagcggtgtgcc

SEQ ID NO: 120876 - DNA, 500 bp, Arabidopsis thaliana columbia
cacgcgtacgtaagcttggatcctctagagcggtcgccctgtggggttaatttttttttttttttttttttttatttttttttgttttttttttttttttttttttttgggcccccctttttgctttaaaaaaaggaaacacaaatttaatggtggccttcgcaaaaaattgaacaacaggaagctttttacctccctccccgaagggggaaaaaaaaaactgggtaaagcctgggttttttatcctggaaatggggggaaggcccttggggcgctttcaggaactttggatgaaaaaaaaacggggggagatttggctgccctgatccaaaaaaaggaccccggggggggatttttatcttttgttaaaagaaaaggtttctttttaaaattgggggggggggcgcccaaggggagaagagccccttttattttggccacacggggatttaaaaaatctgggcggaggctcaatgggggggaaacacagaaggggttag

SEQ ID NO: 120877 - DNA, 509 bp, Arabidopsis thaliana columbia
  unsure (1)..(509): unsure at all n locations
cacgcgtacgtaagctaggatcctctagagcgctcgcccgttgcgtaaaacctttttttttttttttttttttcttctaggggtctctaagaagcaaaaactctctgggttctcttgggtacaaaaaaacactttccccagttaaagaggaaaaaaaaaaacatcgcctaggattccggagggaaaaaaaaaaaacacacctcccacagggggactnanaacaaacccttcaaagttggaccggaccatcaccaccgacgggggccggggggaacaaccaaaagacctcctcacccggaaacttccccccaagatttggcaccaccgggacgaagcccaccccccaagaaaaaaccgtgccgggccttggaaaaaacccggaaggggccccaaaccccccccccaagaaaaagggctgtgatgtctaccggccctcaggggcaagaacccctgggaaaacctaggccccgtccccggggagaacccctggggcaacaacggccgcggga

SEQ ID NO: 120878 - DNA, 491 bp, Arabidopsis thaliana columbia
acgcgtacgtaagcttggatcctctagagcggtcgcccggtgggttaaatctttttttaggcaaatatatctgataaactgataagcaatagtagaacaaaggaacttgtagattcaacagcacaaaaacataatcaaattaggtcaatggcgataaatcgattacaagtgcaacgcaaaggtgaaaactcccctcccatgaggcgccggggagaacaacatcgaccatcaacggaacttaatgaatccgagtgcctggggggtggcacagaaacactggctggaggaagtgaaaccatacttccggattagcccacgggaggttccacacacccggcgtaagcgagaaccaggaccggacttcttaggaggagaaacccaaacggtgggggagacccaggaacgggacactggtctgtgcctaacagctccaagcggactagaacaagaagaccacacccacccgtcccggggaccggggggggcggccc

SEQ ID NO: 120879 - DNA, 500 bp, Arabidopsis thaliana columbia
cgcgtacgtaagcttggatcctctagagcggttgccctgggggtttaatttttttggggaataagttttttttatttatgtgggatattacacgccaacacaaactgtgaattacaagattggaatgagataatcgttttctttaatagtattacacacgagattcacatgtggtgcaaacatataaccagttttttttatggggggaggacaagggggaagaggcgcagaaagagggggctgggaataaaaggtgccaagcaaaggacttgggatcaaacgtcgacgaaccagggaacttggtggattggtgctttcttgaaagtgggagcttttggaattaaaacgagaagtttggcctggaaagaataggtaagggaggtaaggttaactagtcgagaaggtggtttgatttggcgggtaagagatgggagtatttggggaagcagaggggagaaatttggtggaaaaaggaaatagtaggaggggaagttggatga

SEQ ID NO: 120880 - DNA, 486 bp, Arabidopsis thaliana columbia
  unsure (1)..(486): unsure at all n locations
cgcctgcaggtaccggtccggaattcccggcttgacccacgcgtgcgcccacgcgtncgaaaatcaagtcttttgtttccttttatccaaaaaaaaaaaaaagtcttgtgtttctcttaggttggttgagaatcatttcatttcaatggaatccaattgggttcaatttctcggaaacaagaccattctcatcctcttatcgggtgggtttcttgccaaggctttggtagagaaaaaactaacgcgtgccccaagtgggaaaaagatctaccttctgttgagaactcccgacgaaaaattagccatgccacgcctacgtagtgaggttatggagatcgacctctttaaagtggtttgaggaccaccctaggagaacaccatttgattgccttgtcgcggaaaaaattgtgccgggttcacggggatatatcaccccactattctggattagaagaacacttatctttacaccctttggggagggaa

SEQ ID NO: 120881 - DNA, 423 bp, Arabidopsis thaliana columbia
  unsure (1)..(423): unsure at all n locations
acgcgtgcgtaagctgggatcctatagagcggttgccctggggggtttaacccttgactgtaagaaagtttcattaatggaatggagcaccttntattacctttactattcaataaatatgtagcaagaaaacaaatttgtatccaagttggtgggagaaacaactttcgggggaggctgtaagaagaaagacacttttttttttcggggggggaaaccccaaggagggagaggggaacaaaaaagaccaagccgcccgggacagggggggggaagagcccacggggaaaaaacgcccccggcagggggggcgccaaacgcgggaaggagggaggcaaaagagcgacgcgggcaagaggaaaaggggcccagaggagcaagaggaacagggcgaaggaaacgagaaagccgagaaaagggggg

SEQ ID NO: 120882 - DNA, 511 bp, Arabidopsis thaliana columbia
acgcgtacgtaagcttggatcctctagagcggctcgccttggggttttaatccctattcaaatttcttattcttcttctttggaaactgaaaacgtggggaaaaaaaaaggagatttacaagtagaaaacacaaatctaccaaatggtataatttgtttttggtcttgaaggaagaatgcaagcaaaactggttttttttataggggcgaagaagggggaaagacacacgaatcacacaaaccaaacaatagggaacgctctttgctttttggcttattcatctagcttttccacttttgggtttatccaagtgaagaaatgcttgtaaaaagttataagcccccgataacttgccttggtaaaaaccctatcacaggggacatccctgaagcttgagcttgggaaccaccaacaaatggcttgaaacccactgaccggaacaaaaccaaaagttaatcccctggacttcttttgcaccattgtaaaagggggttatggttagtaaaagaa

SEQ ID NO: 120883 - DNA, 537 bp, Arabidopsis thaliana columbia
atacgactcaccctaggggaagctacaacgcctgcaggtaccggtccggaattcccgggttgacccacgcgtccgcaacagtagttttgtaacagagagatagatagaaagctcttgaagatctaaccaaaatctacttttgttcttcttcttcttcttttcataaattttcggagtggtcctatttattgtttcttggatcattagagagacagctatctctgcatgaagatggaaacttgcagattagtaatagtaattacaatggagaagaagaaggagaagatccagagaacaacactttgaatcaaccactgcttaagagacatagaactctttcttcaactcctcttgctttggtcggtgccaaggtttcacacattcgagagtttagattatgaaataaacgagattgatctggtccaagcttgactggagaagcagatcaaaagcacaagtgtttcactacttttttttaaaatgggacataaccttgtcttggtgggccttttactgggtttatcgctactttaataa

SEQ ID NO: 120884 - DNA, 494 bp, Arabidopsis thaliana columbia
gggggggggagatgcgtgtttgagggagatgcagttgggggtaaggggaagattttttggaggttggagattagagtagcttatggggggagcttgagggcgggttgaggtggaacataggtgcgttgaggtgggaagggggctcggagaaaaaggaggggaggtttcctgcttggggggggggaaaaggaggaaagggccggggcgaaaaaaaaaggggggggcggggggggggggggggacacccacagcggcgacggggggggggagaacaagcggaccggctagaggggaggccgaaaggggggagagggagggggggtggagggggatagacggaggacgcggaaggcggggcggtggaggagaggagagaaggaggcggagggggggggtgagcgtggggtgggggtatacggtaggtggggtgacggggggtgagggggtgtgtcatggggcatgagattgtggagtagtggctgtcgtgtgtggga

SEQ ID NO: 120885 - DNA, 542 bp, Arabidopsis thaliana columbia
  unsure (1)..(542): unsure at all n locations
gcgcacgaagctaggatcctctagagcgctcgcccgggggggattaatcctttttttgttttatttccccctgatcaagggggaatttttatagaagaggctttttacgtctcccccgcatgatggccgtgagagacttttgagaaaaaagaaacagcgcgccttttctacgtgggcggccgggaaaaaaaaaaaaactcagcttcctggggggtgggggaaaaaaagaggggaggggnaggagaaaaaagaaaacccccgggagggggggggggggggggaccacacccccgcgaggacacccgggcggggaagaacaacggacggggggggccgagaacacccacaaaaaacaaagcgcgcgccgcgcgcagagaagcaggcgcgccgcgcagaagccgcgcacacaacccgcccccacgggccgggggcggggcgcgcggccaaccgcacaaaaaacacacgccccgacgagaccgcgggggaggccccccaaacggggacacaaaaaccgcccgcccccgcgagaggagacccacgca

SEQ ID NO: 120886 - DNA, 504 bp, Arabidopsis thaliana columbia
  unsure (1)..(504): unsure at all n locations
acgcgtgcgtaagcttggatcctctagagcgctcgcccggggtgttaatcccctttttttttttttttttttttttttttgggtttttttttcaaaaaaaaaaattttcttttccatggcaggggcaagaccacccgtaatttccttggtcaggacatatccccaacaaaacaatctggaaaaaccaagaaatcttctttgggggggggnannccaaccaaaggagaccggggtacacattaccccaaaccaacgggaaggtgaaacccccaaaaggttttggaacagagaatgcaaacccagcctcaaagggtttcttaaccctttaagaagggctcaggaacaaaaggggggggttggcggagaacaaaattaaacgccggcccaacaagcgggaaaaaaaccccaccctcaaaggcattggattttgccgccgaagccccattgggttagccaaaacaacaaaccttttttttccaaaaaaaaggcacaagggtctgttat

SEQ ID NO: 120887 - DNA, 501 bp, Arabidopsis thaliana columbia
  unsure (1)..(501): unsure at all n locations
acgcggcggaagctgggatccactagagcgcgtcgcgggagggaaaatccccncgaaggnggnagggcgncgnggaccgggggaaanaccgaaggcaggaaaaaaacagaggcccccccaaaccgaaaaaaaacagacatccacacaaaaaccgggggggcacaaagggccaaaacgaaaggggggggaaaccgcttccggagggaggaggggggaaggaaaaanccccacaaagaaaaaacgccaaaaaagggggagggaagggggcacaccggggaacgggaacaaggaaaaaagagcgcccacaacagaggggaaaagggagaaaggagacccccgcgacgagaaaaaaagggggcaccaggcccaaacccccccgaaaacagacggggggggagaccggggagaagaaacgggggggggagaaaaaagccgcgaagagggcaagaaagcagaaaacaaagggagaaggagaaagcaacacccggggaacaagaaccg

SEQ ID NO: 120888 - DNA, 497 bp, Arabidopsis thaliana columbia
cacgcgtacgtaagcttggatcctctagagcgtccgccctttgtgtaattcttttttttttgacctggatttcataggcccgagccttcttgaaaccattaaacccttgaaggggtggacataaacgaaaaaactccaccttctttaaaatattttcctgaaaacagagtgatttaaagaacagtgatttttcctcacctcggggggtgggaaaacaaaagccagggcctaccagtttgggttgcccaaagccggtcccattgcccacaaaaaaaatcgacctttgcctcgaaactgttttttttagccacattttaaaatccctgcttttagacaaaataggcttctaaacatctctacctcgggattctcggggaatgaaaaattttagcccgttccttgataatctctcgggaagttacctcgcggcatcactctttcaggaacacgcccaagaagaagattgggggggttcaaaaattcccacctgagttaat

SEQ ID NO: 120889 - DNA, 481 bp, Arabidopsis thaliana columbia
  unsure (1)..(481): unsure at all n locations
gcgtgcgtaagctcggaatgcggctcgcctggcggggctgtgtcacgcccccaatggctccgccggcgggaaaaccatggcgcactacggaagggcaggcccaccggatatcagcgacacctactcacttctcttccttaacatcaccttccgtacgactgctgatgatctctatcctctatacgcatcctcctttaaaggggnggangngnnnanncccagagancgaaggacaggcgacccgcgggggggggcgggagccccgcctaagcacaaagacgaagcgcacaaagcagnggaaaggccagacggaagagcagcagacggcagaaaaacaacagggcagggggcgaaacaggggccaaaagcggaaaaaacgcccaaaggaagagcagaggaaccaccgccgaaggcacgaagaacnagaagccggagccccaggcggaggcgcaagcccaggaggagccgaagcccaccaaaa

SEQ ID NO: 120890 - DNA, 463 bp, Arabidopsis thaliana columbia
gcacgcgtacgtaagcttggatcctctagagttgccgccctttgggttttcgtttttttttttttttttttattctttttcttgggtttttttctccaaaaagaaaaactctgggtttgtgaccctttccaaatccccaaaaactggagggcaaagacagaatctcttaccaaaaaacaaaagaaaccggtttgatggttatgggggggggaaaaaaaaggggaggggaatggaagggaaaacacactggcctgggaaaagggaggactcccatttttccccaaaaacacttttgactcccacttttccatgtgaggccgtatttcgctcgcatattggcttggaaatcccgtgggataacccacggttgaggaacccccttgttggttttcaccggatatcaaactttttttgggggttccgttctgggttgccacggccatcgaaagggggttggcctctt

SEQ ID NO: 120891 - DNA, 500 bp, Arabidopsis thaliana columbia
gaagtttatgagcgagactgcacgcgtacgtaagcttggatcctctagagcgtgccgccctttgggtttggtttttttttttttatttttttttttttttttgtgtttttttttttcacaaaacaaatattatatatatggaagctagagagtttttttaagggggcatgactgatataaaaaaatatataatgggtgtggaaagggggtttggatccataagggggggggccactaaaaaacaggtttttcaagctttcttaacccaccaaccttgggggaaatttcttccaaaagtttttcaccccctagctcccgtcttggtttctcttatatggcctgttggggttaaaagacccaaaatccagttccatcccctccatctccacgggccttctctgagtcggaaaagggatcttttggtgaaccggagtacaaacatccccaacaagggaacatgggggtaaaacatataaacacttcttggaacgtttatcact

SEQ ID NO: 120892 - DNA, 446 bp, Arabidopsis thaliana columbia
  unsure (1)..(446): unsure at all n locations
aagctgggatccactagagcgtccgccccgtcggaaggcggttacgaaaaaaaaaccataaaaaccaaggggggacacagaagccacacgcgccgactgggatataggggagggacaccacggagccgcacacaaaacgggcaaaaggcgcctatgagaggcagaaaaagaaggcggacaaacaccaaatccctcctcaacggggggggcaagacgagagcaagggaanccaagaaacacagcccaccaagggggggagggagcgacaccccggggggagcgccggacgaacccccccggcgggcgaagccgnggcgagggaagcaaagaaacgaccccggaccgaggcncgcgggaaaacaaccgggggcccccgcccgcgggggaaagggaaaccccagggcgggcncccccgcacccccagcgaccccaaggggcaaccccaa

SEQ ID NO: 120893 - DNA, 491 bp, Arabidopsis thaliana columbia
agaagattatgacgtcgactgcacgcgtacgtaagcttggatcctctagagcggccgccctttgggttttttttttttttttttttttttttttttttttttttttttttttttttttttttttggacaaaaaaagggcttcataaaattttattttgtaaaattccaaaaaccaaaaaagtcaaaacaaaggggggagcccccagccaaaaaaactttatttttgggggttatgcttaaacttaagctggtcctactaatacggaccacgtatttttaaccatttggggaccacacccaacctggttgccttggaagcttttcctaaggggggacccgtggggcccctttcctcctccctacaattttttttgggggggggtgaacccacttttgcctaaaatggaggcccactttttaacacgtgcacttttttatgggcacacgtgctttttttccaataactaaaaccccgccgtttcctttttttt

SEQ ID NO: 120894 - DNA, 481 bp, Arabidopsis thaliana columbia
gcacgcgtacgtaagcttggatcctctagagctttcgccctttgggttttttttttatgtatagatgtatgtaaaattatacgctcagcatcaagaaacgatcaaagagttagagtgtggctttacattacaaacacatacaggaaaaaacaaacaaaatttcgaaaaactggtcactctctacggctaatttttttgtgaagggggggcgaaacaaagagactgattcggcttcacaagatgacgatgatgatgaggcttacctttgaatctgagacgaggtctgagctaaaacgatgtcagaagtcgggagagttcctgattcatcgtaagcaagtggctcgaactaatacattatcccagaaatatctatctcatcaatcttacccatttttttcagtttatacacaataaactctggaggtgcaacaactccatcttcattgagaacagctgcgttcaagatcattgtttgtgattt

SEQ ID NO: 120895 - DNA, 479 bp, Arabidopsis thaliana columbia
tgcacgcgtacgtaagcttggatcctctagagcgtgccgccctttgggttttttttttttttttttttttttttttttttttttgaaggggggaaaaacaaaatcgagaaggatataatatgtaaaggttacttgtcaaaaaaatcaaaagaccttcattacacattgtttgggcccaaaagaaggctttgcatcaatgctaaacgggggggtaacgactcactcttttcgataccttatttgacgaagattctgcgaccttcatattgcgttccattgaatgaaaaagccccatcacgttcttcaccgtttgtaaaaaaaagaaaggcaaagactctgtttctcccggtcttacaatcatgtaacactctggggcttacgattgggccaaacttgctaaagtgggttctcaaaccatcacgctgggtgaaccaagggaaattcccgacataaaccttgggtgggctttcgcacataaa

SEQ ID NO: 120896 - DNA, 534 bp, Arabidopsis thaliana columbia
  unsure (1)..(534): unsure at all n locations
aaaaaaaaaaacgcccccccnanacagggggcggcnaggaagcgcgcgacacacaacaccgcgccacgagcggcgcccacgcacagaccaaaaaacagcctctcggagaaagggacaaaggagggagccccccaccccgcacccccagcgcaccagacacaccaccaacatttcnnttaaacaaggcaagttggggcgacccccccccggcgggggtccgcgccgaaaaaaaacgccccccccacaaaagggggcggggggggcccacccccccccacacaccaccgacagccgaggccggcgccccgccaccaccccagcaccgagacgggaaagaacagaccgccacagacccccagcacaaagccgccccggcagaccacaaacacaccacaacagcgagaccaccaacnacgcangacgacaagggaagggaaagacgccgcagcgacacacccacacagccacagccaccaaaacacgccacataaagaacacagaacaacacagacgaaacacgccccgagaacaaaa

SEQ ID NO: 120897 - DNA, 475 bp, Arabidopsis thaliana columbia
gcacgcgtacgtaagcttggatcctctagagttgccgccctttggttttttttttaaaatataactactcgtgatctattaaatttaagtctaataatagctagtggttacacatgtttagaataacacattaactttgtttcttgactaattttacctcaaaacaaaaaaggtaacaataatgctatcccatgataagagaagggggaatctctcccatggttttctcaggcgtgtctccgttgtcatctacgtgaactccggactctagaaccgccgcatcaagaactagtttccgcttcgctatctcgtagatgttctcatcaaccgtggatttcgtcaccagtctgaaaatagtgactggttttgtttgaccaatacgatggcaacgatcttcagcttgccgatcaatctgtggattaaaacccatatcgggaataatgactgtatccgctccggttaaattaagaccttg

SEQ ID NO: 120898 - DNA, 497 bp, Arabidopsis thaliana columbia
gaagtttatgagcgaaactgcacgcgtacgtaagcttggatcctctagagcggccgccctttggtgttgtttttttttttttttttttttttttttttaggaaactcaaaaaacacaattgcaaacgcaggcacatgtatacaaaaacgcataaccaggtgaatggcaaatcattaataagagagaaaactgagtttcaaggacaaggcattagtcgggaaggggggcaatcaagagaagaagtgaaacaaaacagaaatccactggcatccacgattgggaaaagcaaacaaaggacaagaattaaacgggcttaaaagcttcggggatggcaaaggaaagattaaaaaataaacaccaagcagaaacataattataattgcgtaacttaagaatactgaaaaaagaaaccacaaacttaaatctccttctgttcttcagcaagctttggggctggtggttctttaatctcctccggacttttgtcctggatggaa

SEQ ID NO: 120899 - DNA, 482 bp, Arabidopsis thaliana columbia
  unsure (1)..(482): unsure at all n locations
gcacgcgtacgtaagcttggatcctctagatctttcgccctttgggttttttttttgccaatgtatacatttgtacagatatataacaattgcatacgccaatacaatgtcttatgtctatgggcattgttgttcttccataatggaaccaattgatccaaatctaaggacatgacaatttattaacattttcaatcnttaataggaagggacctagngttcataacccgaatcaaacagccttctcagaccaagtatacagttctggttagggtggtggttatgatgacggttattattgacatccttagcccacagtggataaagtttgaacctttttactgataagtccacaaaagtcgttaccttaacgtaaatcaaaaatctcaaacctaaggttcgagttcttgtagacctttgagcaatgctcataaactggggttcccatcttctgggtctttggggcgggtggaatccaaact

SEQ ID NO: 120900 - DNA, 475 bp, Arabidopsis thaliana columbia
  unsure (1)..(475): unsure at all n locations
cgcggcgtaagcttggatctttagagcgttccccttggggtttttttttataaatatagtcgaatttgtttatttttggatgtacaagttaattgaatgtcatagaaatacacaatgaacatagttacagaatgaataaaataaattaaatttgatacatgatttaataccttttttcaaaacaaacngttctaacaggggggacagagnacagatagagagacctatattccatgaatgatcttcgagcattggatcttaatccatttgtaactctttctcaaagttatcttcatcttcccttcggctgaatagagtttgtatttcgccactcggctctttctctttatctccggatcggtccaccatcctttgaacaatgtcgaatgagaagaagatcttctcggtctaacgggcatgtctttgtaagacatcttgcgccatatatctgtttttatcggagatcgattgcgcc

SEQ ID NO: 120901 - DNA, 457 bp, Arabidopsis thaliana columbia
tgcacgcgtacgtaagcttggatcctctagagcggccgccctatgggtttgtcttttttttttattttttttttctttttttgttttggagactattagttgactctattttttgtgtcccaaatggtcatcagaagctcccggagcggggaattggtttaaagtaaccaaaacaaacgagccattcccccgttggtacttttgggtggaacaaccccccagaggagcctcataaaaacgataacccccctttttggagacggcgactgaaaaccaagtggagggtgaacaccaggaggaacacgagcccctccggcccccccggtttgtagacgaatccacttgggggacaacgttcccccgaattccacggtatttaccccggccacaatagtgccccaccgggcgctggtgtttcggcttgtcccggcaccaatattccggcaaaaagggttag

SEQ ID NO: 120902 - DNA, 480 bp, Arabidopsis thaliana columbia
gcacgcgtacgtaagcttggatcctctagagcgttcgcccttcgggttaagtcttttttaaattttaatctcacaattttcctaggagacctaacacaacaaacggcgaaggaagttggggtcgaaaactttggagatttttaacaagggaaaaaaaaaaccaaccaatgccaaccaaaagacaacaccgggtttagttgttaggcggagggggaagaaaagagggcgacgctcccgggcaataacccccaacaccagattactgagaccccctcaaccccgggggcgtccggtacctcccttgcccgcccgcggaggaagcagcttggaatcaagcacaagaacccccccacctctcgagaagtacaaagggaccaaaaagacccgaacaaacccatactgcacccgaagggacctgagactttcttcccccctttcgagggaacccaaacttcaacaaagtttttgctctaaaaaacc

SEQ ID NO: 120903 - DNA, 465 bp, Arabidopsis thaliana columbia
gtaagcttggatcctctagagctgccgcccttcggtgttgcttttttttctttttttttttctttttttttgggttttttttgcagccacattttttttctcttcacgggaatctcccgaacaacaaagtcttttacggggacccgccggtaggcccgggaaaaacaaacgccggggagggattgcgtcatttgggggggaagaacacaacccgggggggtttgccccaaaaaaaagcctccccagatggcgggcgcccccccccaaaaaaagtcttcccaaaaacggcggcttttcccaagcgcaaaagcggaaaaaaaacccggattccgtttcccttccttaccaacggggggttcctgggagaaaccccacctatacggcccctgggaggtttaatgaccaaggccctttaaacagccccacaaaattgggcctccgccacacaaaactccgcaaaccagg

SEQ ID NO: 120904 - DNA, 462 bp, Arabidopsis thaliana columbia
  unsure (1)..(462): unsure at all n locations
agcctaggatcctctagagttgccgccccgggggagaagcggttttttaccaaattttattctgatccaaggggcaaaaaatcaacgtgtttcgctttcctcaaaccgaataactcacgtctgtcggattcatagagaagactttgttcataaggcactgcaacccaagggcaaggngaattgttttactgggggggggccccaacggggcccaccgaaaaaagaaaagcccccgacttttgtataaacgggtcaaaccggaaccgccacatatctttataccctctgccctcaaagaaaatctccatggcatcaaaggaacggaatcgaactactgcggcatgggggaatcccttaccggggcccgaaaaagagggaacccggggcgggctggacaattaaggggggaagaaatgaaagaagctgaccacaaaaaaccccagcccctttagggggaatcga

SEQ ID NO: 120905 - DNA, 479 bp, Arabidopsis thaliana columbia
cacgcgtacgtaagcttggatcctctagagcggccgccctttgggtttttttttttttttttcacgctatcaatttccatgtccagcaaaaagcgcaaaggaggagccaaaaggtgggtaaagaggggaaaaatctaactggaccgaaacatttacctaatgggccaacaaaaacaaccgaaaccacgctattcgtcctttacggggatgcaccaacaataagaggcgacgaaggtacctaggcccctgccaattcttcagggatcaacttcttattcgaaggtttaggccaaacccaaaaccctatctggtgcccaaaccacttacttaccggatgaaccgaccttgggatgctcgattaggagagcaccaccccccttatgcaccatgaatgcctaagtaaaatcctcgtttgtctgtcccgggctaacatagaaacaaatctgggctgtaggaaaccgactttattgactcccgtg

SEQ ID NO: 120906 - DNA, 482 bp, Arabidopsis thaliana columbia
  unsure (1)..(482): unsure at all n locations
taagccgggtcctctanactttcgccctttggtttagctttttttttcaaattatttattgtngattaggggaccccgcncgcaccttcatttatcctttggagggaattaaattgtgtccaaatttaaaagaaacgaaacattattaattatacttaaacaccaaaacaacccaaaaaactcctcattatgggggtgggccgnacacagagcggactgcacggaaaatacccccaaaccgagggggagggggccggaggcacacatagggcgacagaaccaacacccaggagaacatttcttgtcggggggttgaatttacacacattaagcttcaaggggcggggacttgaaataaccctaaacattatgcacaacttcaccaacctggagcactcaaaaagagcctccttggccccaccaccggggtaatattcaaacacacgctataggggggcgcggaccctttcccaggcacaatt

SEQ ID NO: 120907 - DNA, 489 bp, Arabidopsis thaliana columbia
ctgcacgcgtacgtaagcttggatcctctagagcgttcgcccttttggtttttttttgaccattaattccctaatttattgatgcctttatactacaaaatgatgaatgacaaattggtgaaaaaaaataacttattggtggtctagaccagaatctcaacatgccatctgaacatttcctccctcgccaatgtcacgtttcaaaggggcagagcccaacctcggcgtcgtacgtgaaatcagtctctgtgctttcaacggcgcattttagaggacgctgagaagagtaagctccaaaacgaccacagcctctgacactgacagataccagagctgttggagaacggttatcgctgagcgcgggagaagccgaggagatctctccatcgaagaattcaggattcttgtcggtcacgtgattgatatcaatcgactcgattgctccacttgagttgaacatgtctacaagtcctattggtgcgaacgaaa

SEQ ID NO: 120908 - DNA, 482 bp, Arabidopsis thaliana columbia
aactgcacgcgtacgtaagcttggatcctctagagcggccgccctttgtgttttttttttttttttttttctcataaaactgaacgtgagctttttattatgctgactgattacattatatttataacaaaatgaggacgaatctttatttttctcatataattatcctctttgttttattaatcaagccaccacctcgtactttgaaggagctcctatggattacactagttttacccgctaataactatcctattaaaggatttttatttcttcaacctactcaaaatgaagagctacgagaattgcaacagctttgtcactgagaagatggtgaatctgaatgatccatcttttcagctgatgctgctgcatcagaagcagctttatctaatcccaatttctgtaactcgcttaagaatccgtccaggtcgcttgaggagatcttgtaagggctgtgagaaggacctggaaacaagtgt

SEQ ID NO: 120909 - DNA, 455 bp, Arabidopsis thaliana columbia
  unsure (1)..(455): unsure at all n locations
cgaagcagggaaccataattttcgccgggggggaggcgtntaaaaaacaccccgccacgggggggggggggacccacccagaaaacaaccgggcgagagaagagagcaaattgacgaggggagccgggccgaaggaacaaaggtcgcggacccagcgccccaaaattntttttagggagaggggaacgcccccggggggcccactaaagcaaaggcccccccgggggggggggggcgggccccagaaagaaaggaaggcgaccccgggacgcccccgggagaggggaggactcaaacgccagcggaggaaagggggccggcgggcggacacaaacccgacgaaaacaacgccgacgggcaacaaagaaaggggcccggaagaggccccccacgcccagggggacggcgaggaggaaaggagaaacgaggcggccgagagggcagcgcgagggcgc

SEQ ID NO: 120910 - DNA, 475 bp, Arabidopsis thaliana columbia
  unsure (1)..(475): unsure at all n locations
gtaagctgggatcctctanatcgttcgacctatgggtaattctttttacgttgaaaaggacacatatatcgcgcacaaactgataaggatttatacaaagttgtatcaaaagcagaggagacataggcttgatgtgatgatgagtacatgatcatatagttgaggaaataacgcancgggtctccttgtttaggggtgagggacacccccggaggaagccaacacctaactgaaccctcccggctgaggcagcgggggcccccaccaaaccaagcctttcgtatttcgttaaggggccaagctgatacactttctctgctcctggacggacaaggcgcacttttgttgcaaagaaagctaattctgcacctgggaagcaacaaaaagcattctacgacattcgcatcttcttttaacccgagaaggcaccatctgcaaacttggctgcagcatatgcccttgaaaagggtggaag

SEQ ID NO: 120911 - DNA, 477 bp, Arabidopsis thaliana columbia
cacgcgtacgtaagcttggatcctctagagcggccgcccttggggtttttctttttttttttttttttttttttttttttttgttttttttttttttttttggccaaaagggggtatcacttatcactggggaaataacatttccaggggcagttcacgatgggaaggggggccaagccaaaccggcctttgctcaattgcaggggtttaaacccacaaaaattctttactggcggactgcccccctttgggggggggaggaacaaaacgctgtttgaattccttttgctttcgggagcctagggaaagcacacatagcccccgattttgaccaaaagggaggccctcagggtcctgctatgattcggggtcacccccttgggcttaaggaagtatttttgaccaagggtctcataggtttaagcaggtgggcaaaacgtaggggaaccggggcccctaaaaagggcccattctttg

SEQ ID NO: 120912 - DNA, 492 bp, Arabidopsis thaliana columbia
  unsure (1)..(492): unsure at all n locations
cacgcccacggaagccgggaccctctaaagcggtcgccccggagtgaagcggttttaaaagcaaagcccaagcagacaaaaggggcaccaaaaacacacacacaaaagggaggggcaaagagccacccacaagaagcccttgggcccacacaaaagcagggagggcgaaggcgtctccaaaggggggcgatttctcatttagggggggggaagccccaaagggggggccgccggaacaaaaaaaccgacccaaaaaagggggggnccgacccccggacaaaaaccccnaaagaggggccaaggacgcccacccaganaccacgccaggcgggaccacacggggagcacaaaggcacaacggacaggcagggggcaaaagagaaacccccaagaaaaaaacgccgccacgaaaccccgccgcaggaaaacaggaggccgccgggggaggnggcacaaaaaagcgcccaggaaaaagggggcgggagaaaggca

SEQ ID NO: 120913 - DNA, 343 bp, Arabidopsis thaliana columbia
tttcccccgcggggtttttttttttaaaagaaaaaacaaaccaaacatggtcattgcatttgtacttattgatcatggtccaaattgaattagccgaatgatttttcagtttaaagattttaaactacaaaggaatacaaaaaaaaaaaaacgaccgttttctctttttgggggtggggaacacaaaacgggaaaccaaataaaaaaatggccctaaacatttgtgttttgggagacattaaaacaatggacgaattttttgattggggttccctttcaaaattaaccccgttaatttatccgggaggggagacccgaaacccgaaaaatattgggggttggc

SEQ ID NO: 120914 - DNA, 482 bp, Arabidopsis thaliana columbia
gcacgcgtacgtaagcttggatcctctagagcggccgcccttttgtgttttttttttttggttcgcaagggatcaatgtcatcagatgcaagcaatatagcaaatgagtagcatacatatatgtctatctatacaaaaccaattcaagcagaaacattagattgaagatcgaacaataaaagagaaggcactactatttaccgagggagaaagatctcagaagttttgaattttctgggcttaacacttaaacccatggcaaactgagagcacgatgatgagaatcagtgcgataatgatggcgagcactatgagttttatcttcatgttctgaagccacatctttcttctcatctgcgttcctgttgttctgaaatcttgtgcctgtgagcgaagattttcggttttgtccaccaaaagctcaattttctcaccacgggcaagaaccttcttaatgttttccatcattacacccttaactt

SEQ ID NO: 120915 - DNA, 442 bp, Arabidopsis thaliana columbia
gtaagctgggatcctctagagttgccgcccttgggtgatgctttttttttcaaaagaaaagaatacacagcacggaacgaaagccgtctgctcctgaatattcaccttttaggattgaaagcctccaaaagaaaaagaaggaagatcttggcataaaagaaagaaaaaacacacctgaaaagattaggtcctttgcgggggggcaaaggaacatataaaagcacaggaacctttagaaccaaatccacatgagtgtgaccagtctttttacccatctattctcatataagttttggctgaagatatatataaatattataccggcttctttttctctaggcctccttacttaatgcaagaaatatgacgaatcttgagagaatgatcgttccgcagagtttttaatgctcaacagcaaccgcttcaaatacctcaaaggact

SEQ ID NO: 120916 - DNA, 470 bp, Arabidopsis thaliana columbia
cacgcctacgtaagcttggatcctctagatctttcgcccttggggtatggcttttttttttatatagaccatatgctcgctgattaactcaaagatataccactaacaatagtcaatcaaaattttgaaacgtcatacaaaaagaaatttctaaaaaagacacaggataagtatctatgtatggacgaaacatgctaatctcggggggtcggggaatagggattgatatctgacttaaggactacattcttactaaaaacaaagaagaacttttttggaaaactaaacagaatttgtaacaagagcggaatgtcttgtaagggggtgactcctctcaaacctcacctgagggatatagctccttataccagcattatgatatcatcaagcgggtctctggacaaacaaaaaaaggtcgaaatggtaaaagcattgtagtggccactggggtagcttccagccccccgaaa

SEQ ID NO: 120917 - DNA, 486 bp, Arabidopsis thaliana columbia
ctgcacgcgtacgtaagcttggatcctctagagcggccgccctttgtgtttttttttttttttttttttttttttttatagggtaaaacggtcacaacaggttggaattatcccaagttttctgctcaagtctcgttgaaatgaacaaaatgaatgaaattgaattcttttgaggataatggggacacaaacgattttttcttttcggggaggcagaagagatcagacttggatcacttagcttttctctctacctataaatctattggtttgggagcaaaaagagacaatcttgctttggccttttcttcttggggttggagcctgtgaagtaaacttagaggatctatacctttctattctaattcatgaatttcctgcagttaggggctttacataagcatggcaccttgagttcctctgcctcgtctggatcaaataaagaatcatacgttaactcctctcccacagctacattggccttgg

SEQ ID NO: 120918 - DNA, 481 bp, Arabidopsis thaliana columbia
gcacgcgtacgtaagcttggatcctctagagcgtccgcccttggggggtgtttttttttaataattttttttttttttttttggaaaccacatattttctttaaaatagaaaatactacatgggttttaggatatcacaaccacaaaatttggtaatgtaacataaacgaccaatcacaaatcatatacaactggctaataaggggggggggagggcacaccttacaataaatctgaaaactaagtctaggatattatattatcgggggaattaatatctagatattaattgaataattcccatttaaattttgggggaaccggtctaacgggttggagggttgccggggaggctgaactaaaaacaaacgtttcccatcttggtggtatgatcaccggaggacttggtgaggaggccctcggtttccttgacgcctccttggaaaagggcagcatttgcccgtccttgggttgggggttt

SEQ ID NO: 120919 - DNA, 474 bp, Arabidopsis thaliana columbia
gtgagctgggatcctctaaatcgttcgccccagagtgaagggggttttcaaaaaacaaagcaggcccgcccgagcggggggcaccccccgccccgccataatgaacacaagggaaagaaaaggaggctccttggggagagaaacaaggggccccgggcagacaggcgcacgcccaggggaaaaaaacctcttagggggagggggccacaacacgacgggccctcaagaaaaaaggcacccccccggggggggggggggggcagaccacaacaggaagggggggagaacagccccccgacggccaccccggggggagggaccacaggcccgaagccggggaaggggggcctaaaggaagagagggcatggccaaacacggaaaacgcgggagggcgggcaggacgaaaaggaaaccgccggcggggaccgagggaggggaggcgcaaccaaaaggcgaaacccaaggggagggaa

SEQ ID NO: 120920 - DNA, 477 bp, Arabidopsis thaliana columbia
cacgcgtacgtaagcttggatcctctagatcgtccgccctttggttttttcttttaagcatcaaagggaccgcaccaaaccgggataggtgaaccaaaatgtctaaccaattcgcaaaccaatcaatggaaactttcaagggggctaacaaacacacaacagaaatacaactctcactcagggaagaacatccttctttggggagaggggaaccaaattatgatgagtcccggaacagagcacccaaaagaagatattcagatcagaactggaattgcatctccggagagtatcccaaagcttcaaggtttgcagtcatggccttgttcattggcggggggccacatcttaggatctgaatatcaaatgcaggcgcagggcaatgagcctgaatcatttcctttgatacatatccaacaccaccatcccatacttgcggaggctggttaaaacatagaaattttcggacgcgtgggt

SEQ ID NO: 120921 - DNA, 483 bp, Arabidopsis thaliana columbia
ctgcacgcgtacgtaagcttggatcctctagagcgttcgccctttgtttttttttttgtcttactatataaatttggattattgagtagcaaaatcgacaagcttgaaaaatagaaacataatgagaaatgaatcatttagaattgaaggaatcatgtttgttatttatcacttctttttcttcttcttcttggcggtttttttgggcgctagagccaccacaaacaatagaacactcaatgccacaaatgttaccaaaacatgaaaacaatccgttatctccacttttcttgttcctcccacttggcttttggatgggagctccaatcatttgaggatttcttgggacgatttcgttaggcttgtaacttgatttagggttaaagttagagtttgttttgtagtcagaacttggttgataacttgaccccacgtctaaaaccactggtaaattggcttgccatctttctaacttagaacgaa

SEQ ID NO: 120922 - DNA, 468 bp, Arabidopsis thaliana columbia
  unsure (1)..(468): unsure at all n locations
cacgcccacgtaagccgggacccacaagagcgtccgccccacggggaaaggcgnnacaaacccaaagggaccagccncngggggaacacaaaaaaaagaaggaaaagcagagacggccacgcaaaaccaacgnccacctcgatgaaaaaaccgaacgaccaaagggcaaagcaacaaacagacaaaacgggtnttttaaacggagtggacanaagccgcaccccaacaaaaaggaagcaccaccccccacaggggcgacacgaagcaagccancaagcacacacgcggcacgagcaaaacaaaaccccgaggagcacaaaaccagcccaggcaagccgagcaaaggaacgaccaaacgcncccagcagcaccgacagaccaccanagggggccaaaacagncagaaggcacggggaccaccacaacaagagccccccacacccggggaacgagaaaaaccaaccaggc

SEQ ID NO: 120923 - DNA, 464 bp, Arabidopsis thaliana columbia
gcacgcgtacgtaagcttggatcctctagagcgttcgccctttgtgtatttttttttttcaacttaaaagcttctgattcagagagaggttctccaaagacaaaacacaacaggcaacacaaagcctaaaataccaaaagttacagccaaaatgtcaaataccgattctaccctcatcttcggcgacgccatttttttttggggggggaaaccacacggggctcttcttcgaagtacttccctcctacttccatgaacccttttaccctccatgacactccttaaaataaccaaactgaccctcccgtttaaatgcgttccctccatcttctctaccttgagactcacttccctcacgtgcatctcctcctaaccgaacgtgaccaccgtgatcacacactacaccgtccccaccaccgttgagaattgcgcctccacttttccgcttatccagttcctctgca

SEQ ID NO: 120924 - DNA, 474 bp, Arabidopsis thaliana columbia
  unsure (1)..(474): unsure at all n locations
gcacgcgtacgtaagcttggatcctctagagttgccgccctttggtttttttttttttataataaaattttcttttttattagattatgaacttacatacataatttacaacaaaatcttcccacgataagggtttatcataaatgctttacaatttagatattcgagggctgatatcatatgcccaagttnagtacgataaaacgtgtaatcccacaaaaagaacaccaaaacaaattattatataatctgtacaataaaaccaaaactccaaaaaataatgaaattccgaaaataaccttttaatatttgtagtctttgacgtgaaggctctcggacgcaccttcacctaactgagcatcacccttgtagccaccaagggttgcttcaaagttagccttggctctagccaagaacgcctattgagccttgtccacattctcctctttacctccccaagccttgagtgtactc

SEQ ID NO: 120925 - DNA, 491 bp, Arabidopsis thaliana columbia
  unsure (1)..(491): unsure at all n locations
gcacgcctacgtaagcttggatcctctaaatctttcgctcgcgggtgtagggccggacacctagatccnnnnnnnnnnnnnnnnnnnnnnnnnnnnnnnnnnnnnnnnnnnnnnnnnnnnnnnnnnnnnnnnnnnnnnnnnnnnnnnnnnnnnnnnnnnnnnnnnnnnnnnnnnnnnnnnnnnnnnnnnnnnnnnnnnnnnnnnnnnnnnnnnnnnnnnnnnnnnnnnnnnnnnnnnnnnnnnnnnnnnnnnnnnnnnnnnnnnnnnnnnnnnnnnnnnnnnnnnnnnnnnnnnnnnnnnnnnnnnnnnnnnnnnnnnnnnnnnnnnnnnnnnnnnnnnnnnnnnnnnnnnnnnnacgcctcccgaatgggccccacgggggaggtttcttatgacccaaggaaaacggccaaaggttgatggccctgcaacggcggggcctggagaaaatggcagaacgcggtccacccgtggttacgccaaaaaagaaa

SEQ ID NO: 120926 - DNA, 485 bp, Arabidopsis thaliana columbia
gcacgcgtacgtaagcttggatcctctagagcgtccgcccttggggtttgtgttttttgagctatcctaaaaaaaaatggatgaaaacaaaagtaccagctgtaaaaggttacaaaaatgaaaaacgacaggacaaatgaaaacgagtattcgatacaagaccgaacaacctaatactaaccctcgcaggacaattgctccttctggaggggtgaactaaccgaggcggggacaaaaaacaaaaacaagttactcttattgcggcaccattacacaagcgaaaacccccgaacccactacattgcaaccctattcccactgcgaaaccgggcaacagaaaacctgaattgccgagactaaccagggattataaaaccggagaagcccctaaattggtagctgggttcaaaccaaaaacgcaacgaatactccgaccgtgtttaactcatgcccgaggttccgggacccaatcctgccgaataaaa

SEQ ID NO: 120927 - DNA, 484 bp, Arabidopsis thaliana columbia
ccgcgtacgtaagcttggatcctctagagcggtcgcccttttgtgtttttttttaagaaacaaaaatttaaattattccaaaacaatgtcttataatacaagcaattacacaaaatgtttataatacaattcaaattattgaggacttccaactaggcaactacacaagatgcttgctccttgatttttcttgctagacaaagagaggtctgcctccacgatggctaattcttgaaagagctcagaaaactgaggtggaagaaacaatgaggagagacttgggagagaaacaatagagccatcaaaagcagctcgtaaagttctagtcactgcttcttcttcctctagtctctctttaagatgcatcacctgcataaacacaaacattcaaattattggtatagagattttgagttaggaacagaggtgcttactccttcctctaagtcatgtctcttgttactatgtagctgagatgaatctt

SEQ ID NO: 120928 - DNA, 463 bp, Arabidopsis thaliana columbia
gactgcacgcgtacgtaagcttggatcctctagagcggccgccctttgtgtttttttttttttttttttttttttttttttttttttgtttttttttttttttttttttttttttttctttggggagaaaggaaagaaccccctttttgtgatttaagggaaataaccccaagggacctttgggaaaatcaacccgtacctcctttaaggggggaaaggggttccccaaaaaaccctttttttttgtacctggaaacccaaacccgggggaaacaaaaaaaacccccttttggacaaaaacaacctggggaaaaacattaacaatttccccctcctttttttttttacaccttttttggagggtttttggaaaaaaacggtctttccccgggaaaaaatggtttttggaaaccaaaaacaagggaaaaacccctttgttccgggcaccacaaaaaaccgtgga

SEQ ID NO: 120929 - DNA, 484 bp, Arabidopsis thaliana columbia
ctgcacgcgtacgtaagcttggatcctctagagcggccgccctttgggtttttttttttttttttttttttattttagcctccacaccaggaagcggtttgccgacagtacctgcatttcgtgcaccccgtaaggggtttgacattgccattacaaactcagtcatgccatatctttccaaaagacgatgaccttggttattttcccattgatgcatgacaggtcgagggagagcaaaggagcatcacatcattaggcgaagcttccgtgcagcaaaagcgctcgagtcctgcatctctttatccattgcttcataaccttgtatcaaccgagtgtacatggttggaactccagtaaatacagttatggagtcgttggttttttcatcattcaccggatatgattcacgccatctacgccagattccactaacactaaatttgggcaaaaactccaccaaagaccgtgcgtaaagaggagcaaa

SEQ ID NO: 120930 - DNA, 441 bp, Arabidopsis thaliana columbia
gactgcacgcgtacgtaagcttggatcctctagagcggccgccctttgggttttttttttttttttttttttttttttttttttttggtttttttttttttattgaaaaagaacataattctgaaacgttttttgacttttgaaggaacaccccctcagaaacaaaaacaaacaaaacgatggtgctaagggaaatctcctcccttgggggggggccaaccaacgcagagaaaaaaggtaagggggcccacaacaagacggggggtataccaaaaaaaatctaacctgacgggtttccaaagcggaccccaaaagggggggggaaggctgtgatttcaaagaagggggggggcccacattaacggcaggaacgtatcagaagagcccatgaggggctgaaacctaaaaaaacagattggtaaatatttccagaggaaagca

SEQ ID NO: 120931 - DNA, 483 bp, Arabidopsis thaliana columbia
ccgcgtacgtaagcttggatcctctagagcggtcgccctttgtgttttttcttttttttttttttttttttttttttgagacacaaaagtatacattcacaaaatgagaggactttgctgaaagtttgttacaaaagaaacaaaggcttaacaattaaaaaaagaaacaccaattagcagcttaacaaaggatttttttatactggtgaaaccaagactttaatcatacattaaagaaaaagaagtaaagtctaagaatctaaaccaagtggttcccattgaggaactctcttactgaagaacctcccaataactctggaatcaagaatctcaagagctcctccagatttaacacatcttggagtcttatactgattcaaagatgatccttgtgagacacaaaaatccattaacgaatcaaacgtgcccaaactcacccatttttattccaatggcccaatcgacttgggcctggtcctgcat

SEQ ID NO: 120932 - DNA, 299 bp, Arabidopsis thaliana columbia
tgcacgcgtacgtaagcttggatcctctagagcgttcgcccttgcgtttatttttttttttttttttttttaagaccaaaaccaaagtatatttaggaggatcttgaacagaaatgaacagaagcaagacatcaaacaccaaaaaattgacctcttcataaccatatctataaagcacatgagacatgaaattttattattatagggggtggaaaaaccaaacaaaaaatgggacatgacagttcacaaattaacaattttttcaggactcgcagtaaataaaacttaacttactgccc

SEQ ID NO: 120933 - DNA, 205 bp, Arabidopsis thaliana columbia
cacgcctacgtaagcttggatcctctagagttttcgcccttgtgttttgtctttatatgattaaaaagctgactaaattacgggaatgttacaccaaaggtttaaagtttatgggggccgagcgccataacagtcttcagcagatacacccagtagaaagataacacggaaatggacacagatctaagatgtgggagacaaaata

SEQ ID NO: 120934 - DNA, 475 bp, Arabidopsis thaliana columbia
  unsure (1)..(475): unsure at all n locations
gaagcgggaccttaaattttcgcgccgggaaaagcgccttttttattaaaactcttttcccaccacagggaagccctctatataatatttcaaaatgtcttggaaagcggcaactttatagtgggcattttgcgagagggaaaatcaaccccggagaatcttacataaaccaaagtggtcttcttatgggggagggggccccggaccacaaaaacacaanggaaacaagcccccccccagcgggggggggcaaccccaccaaaagatggagaaaaccgaaaccaaaagccccgggcccacgcggggagaaaaagaaacgcacacgagaaacccccccaccaacaacccaaacccgccaccggaagaaaaagaaccccccaaacaaaaaccccccacgcaaaaaggagggagaccaccccggagagcggcccccacaaaagcccccacaccgggagaaaaaaaagaaccgcaccca

SEQ ID NO: 120935 - DNA, 476 bp, Arabidopsis thaliana columbia
  unsure (1)..(476): unsure at all n locations
cacgcgtacgtaagcttggatcctctagagctttcgccctttttttttttttttgaattgaaaaatataattgctcatagaaggtaattaaaaactaaatttacacgaaatccttaaaaagaaaaactcggagatctatcacatgacatgatcttacttgatcgaaactaaaactaaaagcccttaatctgtttttgttatgggtgcacanagagacacaattagacatatttgtgtaatgcatattatgtatgtacggacggatcgcaacgcaagtcgccgacatcaggtgtcgagaggttcaacggcgaggctgggctcaatagaaggagaaaaagccaagaaaatgaggagaatcatgaggagtagaggaaggaggaggagtgttcccggaggcggtggaagcggcggcaggaacggtggctgaatcagaagaagcagagagagaaagagaagagaggcgacggatcttgccg

SEQ ID NO: 120936 - DNA, 481 bp, Arabidopsis thaliana columbia
  unsure (1)..(481): unsure at all n locations
tgcacgcgtacgtaagcttggatcctctagagcgttcgccctttgtgttttttttttcaaagcaacatttacattaatagtagtgcatataacttttgcatattcatagtgttataaaagagcatataatatacacatcagcacaaaagcattggaaggcacacatttaaaccaaaccaaagggggccctccangtatgtcagggggagaaacccatcttcgcctttgttctcatcatagatcgcaaacatcattgcagcagttggaggcaatgtgttcttcacaaagacgaaaatagccttttcggcactcagcttgattcttttacggacaacatacacaaattgcccaacagttagatcagctggaacaaggtacttcttcttgtcgatattgggaacatcacatttttcagctctctctacgatcactggaattctgtctggatacttctccctgatgcgagaagattcaatttggc

SEQ ID NO: 120937 - DNA, 478 bp, Arabidopsis thaliana columbia
  unsure (1)..(478): unsure at all n locations
gcacgcgacgtaagctgggatcctctagagctttcgcccttcgggtaattcgttttttattttttttttataaaaccagaggggggcgccattatcattcagacaatattcagccaaaatcagttttaaatggaattttacaaagaacccaaaaaacgaagtgacaaacgttttacaaccaaaaaagagattttgtaatttggcngaggggcaacagccacggacggcaacaagcaaagagaaagcaccccanaggaggggggaacccacgaaagggaagcacgaaaaagaggaagccccaagacggcgagcccaagggacanccagaaccccccgaccccnaaggagacaggagaggaagggaggaacccacagaagaaacccccggcaaaggggggcgagggccacagcgaaggcggggaccgccaggggcccaccggcggggaggggcccaaaggaaccggccggaaggcccccg

SEQ ID NO: 120938 - DNA, 469 bp, Arabidopsis thaliana columbia
  unsure (1)..(469): unsure at all n locations
cgcgtacgaagcngggatcctctagagcggtcgccctgtgtgttaaatcatatttatgatgatggtggttttaacgaaggaaatatggtttgtttaaccaaaagaccttgaccggggcaaaacaagggaaaccgttggagaacacgaaacgcctctaattactttaagacttaaaagtcgagcaaaaattacgtcccgacggggggaaaaaaagccggggggaacaagcccaaaagagggctccacccgaagggaggaaagaaaaagaaggcagcgcggggccccccccccggcggaaattttttgggcaggacaggggccttttggtttatacaacccctcttggttcggaaaacccccaaaccccccgggtccttccggaaacggggggcgcccccggaaaagccgacccgttcccgcgaggggacccgcttttccatttgggggggcgaataaacctggggggaaa

SEQ ID NO: 120939 - DNA, 490 bp, Arabidopsis thaliana columbia
  unsure (1)..(490): unsure at all n locations
cgcctgcaggtaccggtccggaattcccgggctgacccaggcgtgcgaggcgacagaagaggatggnggagttaaccaatcaaagagggtcggataaaccaaagtaccatgaccgaatcagaaatgtccgacggatggagaacatgcgttgactcttattattctcagactttacgctagagcaancattttcctcctaacggggggagcaannnnttagaagaggaggccttttaatatgctccactcttaatagaataatgtatatcgacggtgttttggtgatatccaatgtatcaattgtttctgcaaaanaaacacaaagtgttaacaggcgggcgttgcaagcgagcgccatgagagaggtgagcgtggtgtggcggctgaggggggggggcgcctctaaaaagaatcaaccttaagctaccgtcattttctgaaaggagattatttttcttgtgggggagctcaattttatctgtcgggcgcc

SEQ ID NO: 120940 - DNA, 451 bp, Arabidopsis thaliana columbia
  unsure (1)..(451): unsure at all n locations
gaggggtcgaccgggggggaaaaacccaacaaaacnnanacaggaagaacaaaaggggnaacaacacaaaaccacaccccccccgcggggggagacccaaagaaagccacaccaaaaaaagaaaagggaaaccaaaaaacagaaacaaaacgcggaaggaaaccgcgcctcaaaggggggggcacgaaaaacccaaaacaaaccaaaaaaacccccccccccccaaggaaggggaacaccccccccccggggggggccccagaacaacccagaggggaaagagaaaaggggaaagacaaagagcgggacccaaggaggaaccacaccgaaaaacaccccgaggagacccaacaagagaccccagcaaccgggcaccaagggcgaaccccccgagggaaaggggcgacaaccgcaagaaaaaacaccaaaaggaccaaagaacaacaaccga

SEQ ID NO: 120941 - DNA, 465 bp, Arabidopsis thaliana columbia
  unsure (1)..(465): unsure at all n locations
cggaagcnngganccactagagcggtcgcccggggcgttaaaacctacagtgagatggaaacggagcctatggggagaagaaagaaaggcaacgacggcaaggcaagaagggcccggccaccccccggaaaaaacaaaaaaagccgacccccgcagggggggaaacaggggggcccaagcgcggattctcatcccggggggggccaacccccgggaggagaaacccccccccaaaaacccacacccgggaaggggggggcgcccccaaaaaaagacgngccaaaaccagaacacaccccggaggggggggcgccccacacggggggcagccaggcccaagaacggggcgcccaacccaccggaaacaacgggagcccccccccccgggcaacgggccccgaaacccccccagggccaaccgggccggccccaggaaaaaaacccccgggggaggggggcgggacc

SEQ ID NO: 120942 - DNA, 389 bp, Arabidopsis thaliana columbia
  unsure (1)..(389): unsure at all n locations
agaagaaccgaggggagaccaaagaacaacagcaangaaggaaggtttcaagagcacgccgccccccaaaatgaaggaaagcgcgccccgaaaaaaaaaaccccttaaaaggagtgggaacccaaaccggggacccaccccgggaaaaccacccccccaggggggggggggggggccacccctataaaacccccccccgcacagaaacttaaaaaaaaggcccccgccccccacacaaaaccaccaagcaagagaaggggccaggccctgaaccccccaaaacaacaccaaaaaaaaggccaagcgaccaaaccctcaagcgggaccccaagccatctcgcggggggggagggggggcgaaaaaaccaacgggcgccgaacccggggag

SEQ ID NO: 120943 - DNA, 476 bp, Arabidopsis thaliana columbia
  unsure (1)..(476): unsure at all n locations
cacggaagcnnnggaannnaggnnngagcttttgncgcggagcncacactcccaanngcnccgccggcgggaaaaccatggcgcactacggaagggcaggcccaccggatatcagcgacacctactcacttctcgttcttaacatcaccttccgtacgactgctgatgatctctatcctctatacgcaaagtangttaaagggggtggangngnncatccccagagatcgaaggactggggatcccccggggttttgccttaggtccgcctaactataaagacgaagctcacacagcaggggtaaaggcttgctgggatagttgtttgatgccaaataaataactgtcaagttcggcaaacatgggcccaacgctgaaaaattttccaaagaaaaagtttgggcacacccccccaaatcatcgaaaacctaaagaccgggacccttaggcggatcttcccccaaagaaaaaccccc

SEQ ID NO: 120944 - DNA, 494 bp, Arabidopsis thaliana columbia
  unsure (1)..(494): unsure at all n locations
atgtccggccggattattctttgggggcgaggaaaatccccggaggnngnnnttnnnttnnntagggggagggagaaaggnatgaaaaggaaangagagaagagggaaagaaaagagagaattttatggggtgggaaagagtaataattgttggggaagaaaattaaagnagaaagatctctctttaaggagggggannnaanaagaagtgagttggaggggacactacggcaacctagtagtactggagagggtacaccctttctgggcttaatggagaaaagagcaaggaggagaagggagacgggtggtgtattcagaacaacgagttaatgtttacaaggggggggggggtatttcgcgagaaaaaggaaaatgggtcggagaaaggcggactaattttcgccgaaggaagatgggcttccggaagaggggggtcgctggttgtgtcgccttgagaggagaatctgtgttagaaggagagggctttggaa

SEQ ID NO: 120945 - DNA, 416 bp, Arabidopsis thaliana columbia
  unsure (1)..(416): unsure at all n locations
gaaagggggggaaagaaagaaaaaccaggacaaaaaggaagaacagaaaaaaccgggagaaaaggcccaacaaaaaagacgcgaacaacaacaaaacgaaacaacaaaccacggccaaagcctttttcnttaggagaggggaaaacccaaagagggcgacgcaccaaaaaaaaacacacccccacgagcaagagaagggcggagaccacaaaaacgaaaaaaaccgcccccacacaaccccacaaagaaggggagacgccaaaacacaaccgggaacaaagcaaaaaaacagaaacgagagagaccaaagcgcgcaaaaccgcgccgacacggagggaccaacacaccgaaagcgcaaaccaacggaaaccgcagaagaaaacaggaacgaacgaaaaaaaaccaaccccgcacgg

SEQ ID NO: 120946 - DNA, 395 bp, Arabidopsis thaliana columbia
  unsure (1)..(395): unsure at all n locations
gaccnagagcggtgccgggggataccccgaannganngncaggcagggcncagcgaaaaccaggaaaaagcccggcacccgccccggacaatgaacacaagaaaaacaggcgcaagcccnaaaacccccaacaagaaccccttatccgcgagggggaaaaacggggcaacagaaaaaaacccccccccccaggaggggcgcccccaccaaaaaaagggccccaccaaccccgagggcgcgaaaaggaaaaaaaacccccgggaaacaccccccccggggggaccccccaccccaccggcgacagccaaccccccccacccaaaaaaagctggtcccacccacccgaaaaccccggggagccccgggaacccccccaaaacaaaacggccaacaca

SEQ ID NO: 120947 - DNA, 493 bp, Arabidopsis thaliana columbia
  unsure (1)..(493): unsure at all n locations
cgcctgcagtgtccggnccggaattcccgcttcgaccggcgcgtacagcacaatgacaccgngcncgcccaagcccacggacacctcacgaccnccacagcgaaagaggccggggacaaagacgacaaaacttctctccgcaagaacaagaaaaccctacacagccgccaccaccacgccgcaggggtttttttttggagggtaggaggcacggaagagggncgagggcggaaaagccaccgacaaccaacgggcgggcgccccaaacacacaagacggggaggaacccggggcagaccccgccggagggcggggagcgaccggagccgaacagccgcaacagggcggagacggagcaagccggagggggcgcagccgccccaacgacgcacaaggccaagaaccccaaccgggcgcaaacggagggcggagccagngnccccggccccggggcccaaggcgcaggggccaaccaaaaaaaccaggaggccca

SEQ ID NO: 120948 - DNA, 459 bp, Arabidopsis thaliana columbia
  unsure (1)..(459): unsure at all n locations
gaccntagagcggtcgccggggggaaaatcccnnnaaaacacaccntaccccgggggggggggaaagaaggcaaaaacaacaaaaaaccggaaccgacaagacacaagaaaaggtctgcgggagaaatagactcgagaacaaggaagtaagacgagaaggggacaanttccctcccaggnggggggnganaacagagagagcgnccaatccaaaacagcaccacacggggggggccggaagccccgcccctatccagggcaacgggggaaaccnccaaggacgggcccccccgggcaggagcaccagcnnaaaacacaccgggggggagacccacaaanaagccagaaaaaaagagcccccggcgccccccacgacgagagggaccacccccccacggcgccccccgggccgagcaaaaacgcaaggggcccgcgggaccgacccaaggggagccaccg

SEQ ID NO: 120949 - DNA, 536 bp, Arabidopsis thaliana columbia
  unsure (1)..(536): unsure at all n locations
gcctgnagggaccgggncggaattnntggtttgagccacggggaaaaccaattttanatnnaaacntgggcatcgaaagggggcttgaagattcgaatcgagaagtccgggggagaggaagaagaagaagattggttgggcaagagttttttatacaagcattttgcttgtctcgagaaaaaagaaaaaccctttttttttctgggggggggggaaaaaccccagagcccgggctcaaaaaaggaaaccaacnggaagaaagggggggcaccgggggaaaacgagaggagaagcgagacagaaacgccgagaggggagggaacgccaccggggggagagggggaccggcccaccaaccgaaggggggggggcgggggcgggggggccacagggggggagcacgcggggacacgaaggagagagggcgggggcggcgagagggggagaccaaggggagggagcgcggaggaaaaacacggggggcgcacagggggggaggaagacgngaagggggaaagaaggggcggaagggggga

SEQ ID NO: 120950 - DNA, 281 bp, Arabidopsis thaliana columbia
  unsure (1)..(281): unsure at all n locations
cccgggaanaccggaccggnaccggcaggcgnaccagcnancccaagagagaggcagagaagagcgaggcgcaaccaagggcacagccggcgccagcgngaaaaagggagacgcccacaaagccacacaacaaacccgtccggagcagtggagngnaaagcccggggggccgaaagagagaacaaacccacaccaagggcggggcgcacaccgcccgcaacccagacgggaaaccggccgcgccagccgcaggaaagaaacgaccaacgcgcggggagagg

SEQ ID NO: 120951 - DNA, 471 bp, Arabidopsis thaliana columbia
  unsure (1)..(471): unsure at all n locations
cccccggagggaccggggcggaattcccctcaaggaggggggaagcgnannaangaaaaagaggcaaaccacgggcgcgagacaagcaacaggaaacgcggccataggggggaccaaaacaaaaagctctggggcgcgggggaacacgaggaagagggggaaaacccnagagggaaacaaaaaaatattctcctttnaggggaggggnaaanaanagaaagggggggagcaaaaaaaaaaaaaaagcccccgagcgagagggggagaggaaaaaaaaggacgcaaagcacgaagggggggaagggggacacagcgagaggagcgaggacaagaagaagaggacggagcggaaggaaagacagcaaggaaaagagaacgagacagagaggagaacgcgggacggaagaaagcgagaagaggggaaggggcaagggagcggaggcccgcgagcaaacaagccgcgagagacgc

SEQ ID NO: 120952 - DNA, 496 bp, Arabidopsis thaliana columbia
  unsure (1)..(496): unsure at all n locations
acggaagcnggggacctctagagcggtctgccctttgggttttaattccttttcgattgttttcttcagctaacaggagccaactaatcaacaactagccctctggcgctggccaggggccgtgcccgaactttaaggcggggggaaaacaaaggctttaaaaaaaaaacacccacccagggccgaatccctcctcgggggggngnagaacccagcccaacaagaaaaaaaatagggacaccactcaccgcagggggacccccccccggaggtccctttctttgcgggcaaaccccccctggttatgcggggccccctgtcgccccccggcgggaaaaaaaccccgagggcgtccgaaaaagaggcccccccctccccctctccctggaggagaccccaaacagccacaccccctttgttccctaaaaactcccgtcgccgcccccctagggcttcaaaccccggcaaagggcaaacccgggagccgcgaacattg

SEQ ID NO: 120953 - DNA, 344 bp, Arabidopsis thaliana columbia
  unsure (1)..(344): unsure at all n locations
gaccnnagagcggtcgccgggggnaaatccaannaagaagccancaccggaaagaggggaacctcccaggaaggaagccggaggggccgggaacacgagggggggggttactcagaaggggaaataacaacaggagcttctacttgcatagggaagcaaaccaattcttgtgccaggatggggncccacagcagcacgggacggcacaacgagcccccananncaaggggacccggcgacgcgaaaaaagcgcccgaaaacaacccgggcaaacaggcccaagccccggaaaaaccgcagggcccaccgggcacaccccggaggggaaagggcacgaaacccca

SEQ ID NO: 120954 - DNA, 534 bp, Arabidopsis thaliana columbia
  unsure (1)..(534): unsure at all n locations
cgcctgcaagtaccgggccggaattcccgggtttacccacgcgagcagagcctactcaacatatgcgagtgaagctgaagggagatcgtcgaggggactatcaagggaaggaattaacctgtcatgaaaaggaaatcctccaagctatcaagtgaacctgtgtgatagcaaaagttgggcttaaaaccgacacctttcttttttttaaaggggaggganacactccaacagagcgggaagcccgctattatacgcagaaaaaggcgggtgtggcggtaaccgggggagattattgtggggaaccccatcctgcaggaaatcaagtggggggggcccgacaaggacctacgacgccgacgggcagagcgactagggggaacggagagacacggggataccataagcgacagacgcgagggggcggggcgccttgagagaaagccagtccctgggccccgagtgcacgaacaatgagagaggttacgtaggggacgaggaaagcacagcgagcgggcgccggtgaaaaaaagagaa

SEQ ID NO: 120955 - DNA, 417 bp, Arabidopsis thaliana columbia
  unsure (1)..(417): unsure at all n locations
acgggggggaaaaggatanaaagcaggggcctcggagcgaagccagagaagcaaaacatatgtgtgtggggattatcacataccatctctaaataaaaaggcccaccccaaaaacatcgnctcncgcggggggacccaaaaaaaaaaaaaaacccgaaggggaaaaacccccaaacaaaggagagggggcgacccccccttttttgggggcccaagaggaaccggggaaggccaaccccccccccgcccggacaaaacaacacccccggggcgcccccccagcccgcgggaccccccccgacaaacacaagggcccggaccccgccccccaaagagaaacaagcccccccccccgaagggggaggcccaaaaacaagggcccccccgcgccagccccgaacggcggggcgggagaaa

SEQ ID NO: 120956 - DNA, 564 bp, Arabidopsis thaliana columbia
  unsure (1)..(564): unsure at all n locations
cgcctgcagggaccgggccggaatncccgggtttacccaaggggaaaagcaaaganaanaanngaaacggaggacggcgacgggaccgggacacccgaaaaaaccccacccgggggagagagggagcgcgaaaaccctctcaaaggggcccacaccggcaaagacgcgagaccacaaaaaaaaccgcggcgagcgcttttttttataggggggggggcaaggaaaaaacggggaaaccgggggggaaatagacgcgaaaagaggaggagaaacaaggaaaaacgaccgccggctagatcgagacaaaaaagggcgaacaaaaagagatagctcgattgggccccaaaatggggctaattaaaaatgggaaggggggtgatttttatgcaactcggggatcctcgagcaagctaaaaaaaagctgggaagggggcgtataaaaaaggggttgaggaatagtgaaaacttttaatgagcgagaattttctgcccggttatggcgtggagaaccttttcacgtaagaaatggcggcgtataacctgttccgagtgtgagaacggggg

SEQ ID NO: 120957 - DNA, 325 bp, Arabidopsis thaliana columbia
  unsure (1)..(325): unsure at all n locations
acggaagcnngggaccannagagcggttgnccggggnggttaaaccccnnannnnnangngaccgaagaaaaagaaaagggggaggcaaccaacaaacacaccatacatatatgagaaactcataggcaacttaaaagggtacacaacttccaacttaaggcctgaggaaccacacaccagggacatgctactggggggccccacngcnaaagggcgagagancacatgcatggggaaagaccaagaaaacacaggaagaggcgccacacggacgcaaacaaaaacccccccacaacaaaaccagggaaaaaaggccccaacccc

SEQ ID NO: 120958 - DNA, 427 bp, Arabidopsis thaliana columbia
  unsure (1)..(427): unsure at all n locations
ggtaccgggccggaattgcnggctctacccacgcgggagatccactctatcnctaggggacttaagaggaaaaaaggggagaggccgaggctgaagcacatgtggaaacaaatctacggccgatataggtttcatgtgctctagagaatcacaacatggcctcaaagccactccctaaagtctttttttgggagggggggggaangcgaggggagccaacgccgaaccaaacccccgcggaacgcaaccgggggagggccaccccaaaggggcgggggcgcgcgcgggggcggaggggcgcagaagagcacgcacccccggggcggcggccagagggccccccgaaggagaacaacaacaggcgcccgagaaaccggaacagggaccccccagcggagagaggccggcaaagggagcaacacgcaac

SEQ ID NO: 120959 - DNA, 451 bp, Arabidopsis thaliana columbia
  unsure (1)..(451): unsure at all n locations
ggaccnnagagcgggttgccgggggnntaaaccacgcaagccacaccnaggganggcagggaagacaagncncnacaaaaacagggaaaccnaaacaagacagaggacaccaaaacaagaaaggggaaagacaacacaaacagggccggaagaaccgcccaccaccaaaagggnttttgtgcgggggggacngaaaacgcccaaacaaaagacaccaaccacaccgcacaagccgggggggggcggncaaaaccncaaacccgaaccaccngcngcggcgggcaaccgggggggcccacccgcananggggggcacgaaaccccaagccaaaaaaccacgcccccagaccggccgacacgaaccccccccaaaccgnccgacaggaaacaaccccaaaaaacgcgaaaaccggccgagggaaaccgggacacggggaaaaacgggcccgga

SEQ ID NO: 120960 - DNA, 541 bp, Arabidopsis thaliana columbia
  unsure (1)..(541): unsure at all n locations
acgcctgcaggtaccgggccggaattgccggtgtcngccgaggggggagggccaccgacgagagangagcacgggaaggaacgcaaaaccccggccacccggcagaggagacggacaacaagaagcgggggggagacgcacggggggaaccaagacgcacgaaccgaacgaaagggcgaggaagaaaaaggggacgacatttttttttaagggggggggggaaaaacgggccccgggaaggccgcaaagacagagnggggcagaaaagaaagggggcggcggagggcccacgcgcggagacacaccggaacgcggggagggaggaaagaaccaccggggggagaaaaagcggggggagaaagggggggggagagcaggggaaacgagggacgagaaaagagagggagaaacccccgggacaaaagccgcgggagcggggggacaaagaaaaacggcaaagggagaagcagaagacgccgagggagacccgcacccaaaagacgggggaaccccgcgggcggacggaaaaaaaaaggggggc

SEQ ID NO: 120961 - DNA, 180 bp, Arabidopsis thaliana columbia
  unsure (1)..(180): unsure at all n locations
ggaagcnngggaccacnagagcggctcccttgggttttatacncgnncggnggaganangangacannagggangaggaaagacacacanacggaagaggacgcaagaaacaaggacggggaaactgttttagctatggagcccccccccaaccacaatcatatccccagaagatatcag

SEQ ID NO: 120962 - DNA, 494 bp, Arabidopsis thaliana columbia
acgcctgcaggtaccggtccggaattcccggtttgacccacgcgtgcaccgccgcgtacggtggagatatgatgacattacttatgaggaaagacacacttactgaagatgaggcaagattttatgttggggaaactgtcttagctatcgagtccattcataagcacaattatatccacaaagatatcaattcctccttatggggggaggcgacaaaaagcgggcacatagaagttatccagattttggattatgtaagccattaagattgtagtattctccaggaaaaagatttcgtagttgcccacaaccttagtggggctctacaaagtagatggcccgcctgtggcaccaagaattacccgttttcaatgggacaattccaaaactgggcgaaaatagaaggaggctgtcttattttacagagggacccctgactttttggctccaaatattttgttaaaaaaagggaatcggatggaatgggattggtg

SEQ ID NO: 120963 - DNA, 411 bp, Arabidopsis thaliana columbia
  unsure (1)..(411): unsure at all n locations
caggtaccggtccggaattcccgcttcngcccacgcgtaaggcccagnaganagaaagnggagggagcggngagggaagngaaggnnggaaaagagaggaggaaacgggccaagggacnagcaaaactggccgaaaacgcggggaaagaaggaggagccccaaatctagagggagacagggcttttttttagcgggcggggganaaacngcacaaagaaaaaggaaaaaaaaagcccacgggcggcaaggggaggggaccaacccaggcgacagcacaccggaggggccgagcgacccccaaaaacaagagggcgggagccccacgcaaaacccaccaaagggagaccccggacaccccgaaaacaaaaaacaaaaagaggccgcacccccccgaaaagggaaccaaagca

SEQ ID NO: 120964 - DNA, 433 bp, Arabidopsis thaliana columbia
  unsure (1)..(433): unsure at all n locations
ggcggagcngggancctntagagcggttttgccgggggtttgattctttaagataagaaggggggggagaaactgagtcaaaagaactaaaaagccgcccaaacgacaacaaactcttgaggagcgtcccactttttcccagaaaaagtaatggataaaaaatttcccaccgggacggagaggcggtgaaataaatggggggggcaagaagcaaaaaccaaggggcacgnagaagaacccccgacagaggggggggcggggggcgaaagaacaaagggaccccnaccagaggcgcggagccgcccgcacccaaaacaaaaccggccccgggggcgggaacgaaggccaaaagcggccccccaaacggaggaggcagcggcgcacaacaaaaacgcaggggaacacgccgacgaggaaaaccggggcgggcccc

SEQ ID NO: 120965 - DNA, 492 bp, Arabidopsis thaliana columbia
  unsure (1)..(492): unsure at all n locations
cgcctgcaggtaccgggccggaattccctcttcgccgacgggtaagtcctnttaaattntggaagggatggagaaatacgctaagagtactaggggtgcgctcattggaaaccatgtcaataagatcatcccatttttgcagtcgagatgtactccatttaaatttgcccctctggagggagggaattttttttacggggggggcacgaaaaagaagcggaaaggctggtagtaaagtgactggggggttgggaggttttgggccggctgagcattgggggacatgataaaaagggttggaccttggggcgggtggggggatatgttccttgggggttgtgcgccttagcgcaccagggggaatgctaaaaaaggagtgtcgtgtgccagccacgatggagggggggccggaaaaattgcttaccgggtttatggggggtggagcgagaaaaggcgtttgggggtgcgatgaaggtgccgaggagaagctct

SEQ ID NO: 120966 - DNA, 466 bp, Arabidopsis thaliana columbia
  unsure (1)..(466): unsure at all n locations
cgacgaagcngggacctctagagcggcctgccttggtttaatcctttaaacattaaaaagatgatggcgaggaggagtcgactcagacaggggaaatctactatgaccaccagggtaccgtattttttcgaacgatgaacaaccagcggcaaaatatgtacgtcgaaaaaaaaaaaaaatcccttcactgggggggggagaacccgggaaccaaagaagggaaacacgcgccccggaagcccgggggacagcacaccccgatttttccttataaggccggcggcagccaatttcggagggggaggccgggcaaagcctctaccacccccgggttttggaaaccggacggggcccccaacaccataggggggggggaaacgtccccgggggacaaacccccctcttgctttcttcgcggggggccccgaaaaaaaacaaaaaaaaagggggagagggcttccctggg

SEQ ID NO: 120967 - DNA, 566 bp, Arabidopsis thaliana columbia
  unsure (1)..(566): unsure at all n locations
cgcctgnaagtaccgggccggaattnccgggttgacccaggggggcagtcccgttnaaacattaaaaagatagaggggggagaggagctctattagaaacagaggagtgcttagattaccacccaggggtccgatttttacccggagccggatgatatagctttagtgggctgcagtgtttgtacagcgtgaaaaaggagaccgggttttttttttttttgggaggggtggggganaaannaccaaagaggagaccgggggttatggagaaaatcccggcgcccccggggtagtttgccgtggtgagggtgaggattgcgtggataggctcttgagtcgcccggggggggaagtctttttgctcggtgtgtagtacggggtgaatgctgtgttgatcggtgttcgagtgatggggtaaggctacttgggcgtcgtgtgcgcgcgtgggtgcggtgggagagcggttgccgtagcgggggaaaataaactgttttggagtttgagaggcatggctcgtatatgggagcgttacagagtgggtgatgtgtgggggtggaggggctcat

SEQ ID NO: 120968 - DNA, 488 bp, Arabidopsis thaliana columbia
  unsure (1)..(488): unsure at all n locations
gggaaacacgcgnacggaagcngggatcctctagagcggttcgcctttttttttttttctttaatacaagcagacagctttgattgatgcataattgatcccgatacaaaagactagatgtcttccacaaagcaatatttttaattactacgatttagaggactcaagacataactgagtaagacgcnacgatggtttttacctcacatagcacttctgaatcgatttggattttttttaaaaagcaaactaaatgttggtgcgggttaagactcccaatctttcatcttcttgctcccttttggttttgcgataggagcatccatgcctgccattttcttgttgtatttttcacgtagaggatcattggaagtccacgggttactccaatctgttgtgtcctcattgacaaggtgagtccatttagttcttccactacgaccaaagtgcttgacttgcataactttggggagaatcgatttggccca

SEQ ID NO: 120969 - DNA, 512 bp, Arabidopsis thaliana columbia
  unsure (1)..(512): unsure at all n locations
cgcctgcaggtaccgggccggaattcccggcttgacccacgcgtgcgagtccgattatgagctcattgcnggggatcatgggaaacgattatttggcgtttggtaaatatgcaggcaaagctggtcttgttgactttttacacggacttggacagcgatatctaagtctaggatactcaacacctttcctctcttttttttggaggggagaaagaagccacagggggtggaggcaaagccaggaggaaccgctggggggggaaaaaaacgcacgccagggactggcatttggatgctggcctcttgtatttgcctttaccggaacaggaaatgtttctctgggggcgcaagaaattttaaagcttcttcctcgcactttgggttgaacacagcaaactgtctgagcttattgtgtaaagacaaaggaattatctaaaatgggtatttcacgaaaggggggctttcaagattgtgggggtatgattccagccaagagtggttgaacaaaaaaa

SEQ ID NO: 120970 - DNA, 427 bp, Arabidopsis thaliana columbia
  unsure (1)..(427): unsure at all n locations
cacnagagcggcctgcctttgtgttttttttctttttttgttttttgttgtttagtatgaggtcttttttttgtgctttttttgttgaacgggaactggtgtataacattgaaggtttttacaaggggaaccaagggtttacaaataaataagactattgaaaacggggttgagctcggttggggggaagaaaaagaaggaaaaacttttcataaaaaaacttggaacaaagggaaaggttggtcctcttaaggcatttttgcaaacccaaaggggacccatgcagagggggataccgtcctcaatggaatttcatttgacacaacaacgcctttttttggttttccaaaaaaataaaatccctattgccacaccctttaaacttcattcaccattttttgttggcgggctctaatacaaaaccctt

SEQ ID NO: 120971 - DNA, 479 bp, Arabidopsis thaliana columbia
  unsure (1)..(479): unsure at all n locations
acggaagcnngganccnnnagagcggtttaccggggggntttaaaccccnngggnggacgcgggaaggaggcggggacttcattaacagcgaccattccacaagattgaagattcaaataaagcacctattattggttcaagaagcttttaatgaaaaagtggaatactgggccttccctactagncctcatcgaggttgaaaccnncacaagcggggcggcagaacatatgggacaccctcctcttggcataagtgctgcacttccttagggagtggctctgaaacagcaagtgtgtagcaaccaggagcaaacttcccgattcttaaccacctagccgcccaacttctacgtggatccatcccaacaatcatccattgaaatttgggggagcgacccccacgataccctcatgaaccccctccatcttggaaaaaagacaattctccaaccagcgtctttaaaactggcctaggttt

SEQ ID NO: 120972 - DNA, 476 bp, Arabidopsis thaliana columbia
  unsure (1)..(476): unsure at all n locations
ggaagcnggganccacnagagcggcctgcccttgggtnnaatttcccggttttttttttcacaaaactgaacgacggaagcaaatcttattgacgaaattactctcaagagtaactattggcgtgcgaaaatatagaatgacctcgataaaagacaaacattatatgtaagagtccctccaccctggccttgagaaggcgcatctagggacccaccaaccctgtctcgctggaactgcaacctcaaacatgttcggatacgacagatccagatttgacataaaggcttcgaaagttgctttatctttagcatacccaggttgggatgcatatttatccactgtacgtaccctgcaaccttttgagagccgagcaggaataatcaaagtgtccctttggcagtgaaaaatcccgccaatgcacccaatcggaaaacttgaacgggcccttccttccgccaaggcaaccctcccccca

SEQ ID NO: 120973 - DNA, 465 bp, Arabidopsis thaliana columbia
cgcctgcaggtaccggtccggaattcccggtttgacccacgcggacaaccccgcttacgttattatccaacccaaagtggcgctcttctcaacctcgagtctgtcgcgttctcctctctccaaaattttttccgatcaggtgatgggttcagccatccttcttgttccacattgtttcctggaagcgccgtctttcgaatattttctcttttgaggggagggattccaccttttactgaaagatatcagccaacagaatctcacccccgataaaccctgcggttgcagactagagccgcgcggacaagaattgtgggtagaagacttcaaaactgggtgggttgagttctgcgctaaagccttatctttggctgggagaccacttatggtacgaacccaaccattagcacaagggacgaggacgtgattaagaacaatacttgtccggggcgggaaatccgcggt

SEQ ID NO: 120974 - DNA, 483 bp, Arabidopsis thaliana columbia
  unsure (1)..(483): unsure at all n locations
acggaagcnngggaccactagagcggttgccctttgtgttttattcttgttttttttttttgggaaaaagcacaacggaagcagaaaatacggaacagagggccctcaaaacattttagcttggcgcaaggacatatgtctacncgacgtacaataaaccacgaacattctatggaagagggcaatcaaattcggttgaaaagggacatcgccaaacccccaagccatgtttcttggaactgcaacatgaagagtgttcaggagccactgactcaaagtcccccacgggggccagaaagcccctaaatccttagttattcaccccatgtagggcttctgttaaacacctggagtcccctaaaaaccttggtagtcgtcaaccacacatttcttggcggccttcggcagggacaccctggagaccctacacaccccgctatacactcgggacccgcctactgcgggggaacccccccccacctg

SEQ ID NO: 120975 - DNA, 406 bp, Arabidopsis thaliana columbia
  unsure (1)..(406): unsure at all n locations
cgcctgcaggtaccggtccggaattcccggcttgaccacgcggacaacgcacgcgcacgaaaaaacaacccagagggggcgcggccgaccacgggaacnaccacccgcgggcacaaagcgccacaaccacagaaggggacagcagccaaaaaccccacaacgaagaagaagcggcgcggacaaaccttctcttttaagggggggccacaaagacggaaggaacgcgccaaaaaacccaacccaaaaaaccagcaggggcgcccccctcaggggaccggacaggcgaaggacccacaaacggaggaggaagccccgacccagaaaaaccgaagccacgaaaccgcaccccccggccgaccaagagaccaggaaccgcacaacccaagaacaaacccccaggaaggag

SEQ ID NO: 120976 - DNA, 458 bp, Arabidopsis thaliana columbia
  unsure (1)..(458): unsure at all n locations
agcnnggatcctctagagcggtcgcccttttttttatttcttttttttttttttttttttttttttttttttttttttttttttttttttttttaaaacaaagggggttttattattgaaacggttttataaatccacaaaaccccacaaccccgtttcgatcacaaacagggaaaacccaaaataggggtaaaaaaacccccacaagttcccaaattagggattttaagccagaaccttaaaaatcgacaggggccaaactattctttttttacaacattgacagacaaaaaccaaatttagccgggggggggagccaacgacggaaacattgagtttcgggactcataaaaatcctcaccgaccggaaattgctcaactttaatttcctcaaccattttaacaacttcccccattgggggcctttttttcggttggggcccaacgcaagctaaacc

SEQ ID NO: 120977 - DNA, 487 bp, Arabidopsis thaliana columbia
  unsure (1)..(487): unsure at all n locations
cgacgaagcngggacctctagagcggttgcctggtgtttattcttttaaatttgttattgtaattggaggggtatgttgaccgtgaaaccggtggcgatgccgaatcaatttcttttgggacccctcgaaggaaaaaccgacagccattcttagccatgggcaccgcacaaagtgacccacccctgatcaagggtgggagaaaaagagcgaaaggggccccccaaaagaaaaaacccagccgcaagagagggggcccagaaaaccggaaaacaacncccccaagcccccaaagaaaaacccgggagcccgcgggcgaaaaaaaaaaagaggcccaggccccaaaaanggggaaaaaagaaaaaaggggccccaacccccggggggcggggcggcgcacaaaagaccccaagaaggaaaaagcggcccaaaaaaaaggggagaaaaacgggggcaaaaacaaagggggggggggggggggggagaaaa

SEQ ID NO: 120978 - DNA, 505 bp, Arabidopsis thaliana columbia
  unsure (1)..(505): unsure at all n locations
acgcctgcatgtaccggtccggaatttccgtttcgacccacggggaagggcgctataaaatccgcacaagcaaatcggaggtactatgtggaccggaaaccggcgggatgccgaataatttcttatgagaccctaccgaggaacttcttgtgggtattcacagccaccaccacacgataaaggnatgttctcttattggggggaaaaccnccaagcgcaacgccttaaaaaagagaatcgacttggggggaagaagcgactcccatgggactttggaaccatgttggtgttctgctacaaatatagggggcgaagagcacaggctaacctgtgcaaaaagggaaccacagtggatgtttcttgggggatcagctgaaggtggttgagggcgcacgaaatgggactatgggaggcgaccatgaggtctcgcgggggggcggcaaatgaaagatgatcaacggtgaatatgtgagatacgcgaccagatgcgggaagcgaaaatttt

SEQ ID NO: 120979 - DNA, 482 bp, Arabidopsis thaliana columbia
cggaagctgggatcctctagagcggcctccctgtgggttttaattctattgaattggttttggcttttttgtttgagaggatttttttttgattacccgattgttaactccacagtccactgacagagacagagtttgtggccccccccccaaagatgggaagaaattggtggaaaaaaaaaatgatgttcccctcatagggggggaagaagcgaaaggggcccaccagcaaaaaaacacccgcccccctctgggtgtttgtgggaacctcgtataaatcccctctaaagggcgggaaaaggagctcaaagattgagggcggcccaccaagcctgcggggcgccgcgaccctttgggtccaaggagttttatgcggggccccatcctttttttggaaagtcaaaaaacaatccccgaaaactaaagaagggccaccaaacaactggggggggaagaaaaaacgcgggggcagaaaaaaaaac

SEQ ID NO: 120980 - DNA, 494 bp, Arabidopsis thaliana columbia
  unsure (1)..(494): unsure at all n locations
ccctgagagtccgggccggattcccgggttacccacgggggaggtctggattgaataggtttggctctctgctcgaacgatactctctaataacccgattgtcaactccacaggccacagacagaaacagagttctggtgccttgcctccgggttggcataggtcataccgcgggaaaaaggctaatttttttttttaggggggggaaaaggcncagggaaccacacgcaaaaacccagcccggcgagggtgggtgggagtggaagccgcgtgattgtgggcgctataagggggagaagaaggtctcgcataagagtgggcaacgtaggggttagaagcaaagagggtgggggtgacaagcgaagagcggggcgaatgttcgattgcaattggacggataggggggaggcggagccgggtggtgaactttcaaattttagaaaagaggggggttagttcaggaaaggaagtctggaagagaaaagtaggagatt

SEQ ID NO: 120981 - DNA, 186 bp, Arabidopsis thaliana columbia
acgcctgcgtgtaccggtccggaattcctttttttgaccgacgggggaaggccttatctgggtattaaatatgggctttattgagggtgtgtttaggatagatgatgacacgagggaacacatgggggggtaaattcggtgtgtatatatgtggcgatagattttgccttggggacaatgttgggt

SEQ ID NO: 120982 - DNA, 248 bp, Arabidopsis thaliana columbia
  unsure (1)..(248): unsure at all n locations
ggcggaagcnggganccactagagcggcctccctttgtgttttttttcctgtttgtttgagagtttatactcatgtgggatgtaagaagagaaagaaagagccttggtcttcgcgngcggaggaaaatatttgttttggcgacaaaaaaaataggtctgagaaaccctccagatagaacgcagacgaaggtggcgctcccagaggggggggagaaagaaagggcgcaacctttcgaaaaaaacgccca

SEQ ID NO: 120983 - DNA, 514 bp, Arabidopsis thaliana columbia
  unsure (1)..(514): unsure at all n locations
acgcctgcaggtaccgggccggaattcccgggtttgcccacgcgtacgaccacgcgttcgntgaagagtttagactcaagggtgatgtaagtgtgcatgtttgtgcatgtatattgtttttgccggaaaataatttaattggggatataattcatatggatgataattttaaagattgcaagcataagaattttttttttagagggggagagattattagggggcgatcttatcgtaggaatggtggacacgacgtgtgagaacgggaaggcatcattcggacggggggaggaaaacaagcgggggggatgggaacattgttaggagtttttggtggaacttggctccttaccggagttcgtgagcctttgccttttgttgtggctgggtgattattgtaataatggattattgttgaagattagagggtcgggtgtgggttgaccaagtgtttgctttagggagattgagtgtctccgggggttgttctggggggttggaataacaatagtgg

SEQ ID NO: 120984 - DNA, 475 bp, Arabidopsis thaliana columbia
  unsure (1)..(475): unsure at all n locations
acggaagcngggatccactagagcggcctgccctttgtgttttatttcttggtttttataatttttggttttttaggtgctcatgcttncgaaagaggaaaagaattctttccaaagccataagaaccaccctttttccccattttttttttccagattaaagggggaaaacccccccgaaaaacaggggggtaaaccggggggtgggcccttttcccggacagaaaaaaaacatttccttcaaaagtcaaggcggctcagaggaaagcgtccctccaaaggggggcaccacaaagacctgagtgtttagccgggccccacaaaggggtttttaagcccctgtttcgcggagcaccggaccccccttttctgggaggggggtaaccccttttctttttttccccaaatataagggaagggggggtttttgttttggcaaccgattggattcgccccccccccaaaaaacctgggc

SEQ ID NO: 120985 - DNA, 480 bp, Arabidopsis thaliana columbia
  unsure (1)..(480): unsure at all n locations
ctggggagagcagccggcggaagcnggganccncnagagcggcctgccgggggggtataaaccaaggccaaaagaggcagnaaaaacatcgcaccaacgacaaagaaaccggggcaacaacaacaaagaaaaacatcccgaataacacaaaaagccggccagctaaagaccctgtgagcagcagtgctacaagaaacataaactcttttagagcggggaaggaaaaggctctcggaatactgaaacacaaagcaccaccttgggctgaggggggaagaaaagctccacaaacctaccaccagcgtggaaaaaaagaaaaaacaccaagcacctcgggcggggagagaagaaaagccccacaagcccaaacccgtgaggaaaggcaacaagaccccaacaaccgccacgcacgaggaagccccccacaaccacgacaccaagggcacggggacccaagggcaccctccgaacccccggcca

SEQ ID NO: 120986 - DNA, 507 bp, Arabidopsis thaliana columbia
  unsure (1)..(507): unsure at all n locations
acgcctgcagggaccgggccggaatanccggtttgcccaggcgggcgggccnctagncananntnncntcttaaaaacaggatccaaatttctgaaaaatccattcactacaaagaaagaagtgctggctacaactcttagtgggaactatggctgccctctgggcatggggggcggcacgcagaagttttttttgtcgggaggggggggangaccagggcaagagaaggggggggaaacacggcggaaggagacgagaaggggcacagggggacaagagcgcgggggaggaagagggggaggggcggcaagaaaaaggagaggggggaggccgagggggggagcacaagaggggggggggggggaggcgcgggggaggacgagggggggggggggaggggcggagccggcnagggagaaggacgggggggggggggggcggggggcgccggcgagagagggcggggggcggggggcgaggaggggcaggaggcagcgggggaacgg

SEQ ID NO: 120987 - DNA, 445 bp, Arabidopsis thaliana columbia
  unsure (1)..(445): unsure at all n locations
ggaagcnngggaccannagagcggcctgcctttgtgtttttttcctgaatntntatcacctttaagttttaccaggtggaggtggtggtggcggtgaactgctgctgctgctgttactgctgcttctttttcctctcagnggcctcttaggactgcggctccttgaaatcttcctaggaatccttcttggtcttggtgaactagangaagaagatgacctcccacgtctcccagctggacctcgtcccttgcggggtgagatggaacttgaacgagagcgaccaggcctacgaattggggatcggctccgcctacggattggagatcttctgggaagacctgggaagcctcttggaggggagaccttttcttagaggaagaggagccctctttcgaacagactggcactaatttcttctagggaagcccctggaggaaatcattt

SEQ ID NO: 120988 - DNA, 462 bp, Arabidopsis thaliana columbia
acgcctgcaggtaccggtccggaattcccgggttgacccacgcgtgcgatgcctgtctctctcctctaatcttttttatccgctagggttttgaagcaaggtttctcgcgattttctcgatatctctcgcccatggcgaaaccaagtcgtggccgtcgttccccctccgtgtctggctcggcatctcgttctctttctcagagggggggggggggtcgagcccctccaagtctatttcccgctcacgctcccgtggtagagcgctctcttcatctttatctactttcagaagcgtcagttctggggatcggagtcctccacgtcggggaaaaagtcctgctggacctgctaggggaaggtcgtctccccgctgtacaccttctaaaggaagatgtttactctccaaaaatagcgggttaagaatatattgggtctcgagggggatgctcttgggcaggaatg

SEQ ID NO: 120989 - DNA, 191 bp, Arabidopsis thaliana columbia
gagcggcctgcctggggggttaaatctcggtggtggtttttttaagcaacaacagcggaagcaaaccctaccggagaaaatactccccagagaacggaaaggctcccgaaatgggaacgccccgcgaaacacaaacattacatgacacgagaaggggggccctgtataataaggcgctgagggcaacccac

SEQ ID NO: 120990 - DNA, 412 bp, Arabidopsis thaliana columbia
acgcctgcaggtaccggtccggaattcccggctcgacccacgcgtccagccccacgcgtggggcatttttcacggatatatcctccgaaagactcaaccttctttcttatcctccacaaggagaaatggcgcgagactcatcttacagcgtcaccagtgactatgtcagctaggagcaaacccttgctggaaggttcctcattgagggaggggaagccttcacttatgaaaccagggaccctttcacagacccagttccctgctttggggaccaaacctgctgacaagactgcccctaaaaactcttaactgaaccatggggagaactaatgttggtgaatagcatggaaccccatggaaatacttgacgtgtgatttggacctccatcctctgagtaataaacacccgagg

SEQ ID NO: 120991 - DNA, 470 bp, Arabidopsis thaliana columbia
  unsure (1)..(470): unsure at all n locations
cggaagcnnggatccnntagagcggtttcgccttgtgttttaatctttttttttttttttcggatctaaaagcgggaaggaggattgatcgaccctcatcaaaaaaaatgcatacaccttgaatattgcgatttctatggtgtgggagtatgaaaaaaggtcgatgctaagtatgcgnggggggggcaattaattgggggtgaggaccggggccctccgggggagaagctcaccagcttagggagaagagcttgggcaatacacggaaacttcttccactcatcaaaaagagcttctagaatctctttggctttctccttaaggggaaaccacaatccattcctaaaacggaacagaggttttttcccgggccgacattaaccatcttttcccccaccatggttctccgggagaattttgaccctgtgtttagggaagaaatagctttattggctgccgggaggagaaac

SEQ ID NO: 120992 - DNA, 294 bp, Arabidopsis thaliana columbia
  unsure (1)..(294): unsure at all n locations
gagcggtttgccngggggttaaaccaagggaccaaaaacangaacacgaaanaggcaaaagagaaaaaaaaaacacacgaggacgccaaagcgggcngcgggctaaccaaactcattaaagcagccaagaaaagaagagggtatgattcgcttgagagtgcgancaaaaataactggcgcggtgagncnaacngnnccaaacaaanacagaaccnnacaccaaacaaaaaaagaaacaggaacctcccaattacacggngcagggcccaagnagcacaagggagcgagcaccaa

SEQ ID NO: 120993 - DNA, 486 bp, Arabidopsis thaliana columbia
  unsure (1)..(486): unsure at all n locations
cgccagcagggaccgggccggaancccgcttcgacgacgggtcanncnnaggcnctctgnagggcctgaccaacaccgggatctctaaacctcagggtttctgcaacgcaatagagtcagcaccaagacccataagcaatttattaagagacagacaaaatggtgtacgacccatcaaagttgcgtcttttttgtcaggggtttgaaccaagccagaaacaccagcttccgaagaatcttcctcgtccgagctggagacagcacatccggatttctacaaaattggctatgttcgaagtgtgagagcttatggagtggagtttaaagaaggtccagatgggtgtggggtctatgcttctaaggatatcgaacctggccggcgagctagagtgatcatggagattcctcttgaactgatgataaccattagacagaagcacccttggatgtttttccctgatatgagaccaagtgggcatcctattt

SEQ ID NO: 120994 - DNA, 179 bp, Arabidopsis thaliana columbia
  unsure (1)..(179): unsure at all n locations
agcnngggaccnntagagcggtcgcccgggngggnaaantcccagagaaaccngcanggnancncacagaagcaaannngacactcgcgtgacagcataagaaagaatgaaaccaaatcctaagtttcacatgtaagaacgtctggcacaaagcatacttggactctactatgcctatc

SEQ ID NO: 120995 - DNA, 442 bp, Arabidopsis thaliana columbia
  unsure (1)..(442): unsure at all n locations
cgcctgcaggtaccggnccggaattcctgcttgacccacgcgggcaatcgggggaanaacagaagcggaacaagggcacgagaaattcaaactggggggatctccaccagaagacgactggaaaaaggccaaacttccccacgcgaggcttttcaagccacagcaaacttatgataagtaggctccaattttttttttagggggggggagaaaccgaaaagaaaccgaaaaaaacccaccctccctatagacccccagaaacgggggactggctatagggccctgggttctaagtatttgactacaaagccctttggtagggaggccgtaaagcctggcaaatgacccccgctaggaagggggataaatccacaggctttgggacgaaagcgccaagggaaaaaacttagggggaaatggataccgggcttcttacacccag

SEQ ID NO: 120996 - DNA, 468 bp, Arabidopsis thaliana columbia
  unsure (1)..(468): unsure at all n locations
gcgnacgaagcnnggancctctagagcggttgcccggggtgtttattccttttgagggaatcatgatttattcatatgatgattaattcaaaatttcagtttcacattacacattctcttgttcaaaatcattacactcgcaagctaaagtaatccgtttcaatattagcctatctcctcttaggatccacctcctgaggggtccaangggnngccgacgggaactggnacaggaacctcgaccncaacaacaacgcaggccgacatcaagaaagnctttgcaaccgaagctgggtgttccaagcaacatctcacaacctttgttggatccatgattcctgcagccatcaaatcctcgtacttgccgggtgcagcattgtaaccgaatttcacgttatcgtggaaaagcaccttttggtaactacacttcctttaacaccaacatttttggggatttagttttagggg

SEQ ID NO: 120997 - DNA, 496 bp, Arabidopsis thaliana columbia
gacgcctgcaggtaccggtccggaattcccgtttcgacccacgcgtacagcgcgcgcgtgggtgagaagacagcaaaggctttggttaccgagctcaagaaaatgtctaaggaggttgaagacagtgaacttgcagatgttgcagctgttagtgcgggtaacaacgacgaaattggaaatatgattgctgatttctctttcaaggtgggcaagaaagggggggggacccttgaagagggtaaaagtgccgagaacaacctctacgtcgtaaaaggaatgcaatttgaccggggttatatctctccttccttggggacagacagagaaaaaatggtccgtcgagtctcacaattgcaagttaccttttgtttaccaataaaattaccaatggcagggatctttggtggtgttttggaggatgcaattaggggcgggatcccatattttattttgcggaaaacctggaaccagaagcttttgccactcttggtggaac

SEQ ID NO: 120998 - DNA, 448 bp, Arabidopsis thaliana columbia
  unsure (1)..(448): unsure at all n locations
gaccnnagagcggctgccgggggggtaaaccccgaanaaannaaacgncggaaanngggggaggaaaagaaaaaccaaacccgcggggccgggggcaaaacacggaacacagggaaaaaaccagggcacgcccgcccggaggagagggggagacagaaaaaaaaancccacccctcaagaaagaggggggganacccgcgaggaacccaaaaaaaaagcgccccccnnggggggggggggggaaacaacaccacacccgggagcagaccccggaaaggcaagaaaaaaagagcaccaaccccccgaaggccccgcgggggacaccgggcccaccacccaaggggggacccggcgaagcggacaaccaaaaacccgcccccagaggggcaaagccacaaaaggacccccccccaccgagacaaggggccccacccacccacgccgggcc

SEQ ID NO: 120999 - DNA, 449 bp, Arabidopsis thaliana columbia
  unsure (1)..(449): unsure at all n locations
gcgacgaagcngggaccactagagcggtgcccgggggtttaatccttttttattattcttttctgaataaaaagcacgatgccttacatatatcttttgcagggaatagatatatttacaaaaagataagaaacgaaagaatatgaaatatacttagacaacaataaaaccaaagacctaatttttattggggggggcgcacacaccggggaccccacggaanagagancacaaccaagggggagacgaccagagggaaaaatatttttcaagatcaataccaagataacatttcttacggggggaatggcttccaaaaatgaactttatgggacgcaccttgaattaacctaaaaatatgccctctcctctaagctggccattcataagtgcctcctggagccccacccggttaaattcataccccacaaaatggggggccggcctat

SEQ ID NO: 121000 - DNA, 458 bp, Arabidopsis thaliana columbia
  unsure (1)..(458): unsure at all n locations
cgcctgaagtaccggggcggattacaggttttaacgggggggagagcgttantattaaaattatcacagccgggaggaagggggggagtcggagacagccggacaaaaaaaacggaaagatgctggggggcggttgtttatttcttgttatgggggcggatgggctaaatggggggaagggtgtaggggacgaacgagaaaagcggcgtttttttttttggggggggggggcaagaagaaagggagagagcctgtttggaggagtgtaaatcctgtaaggggggagttgggtagaaagttcatggacggggggggaaagagtatttgacttgggggtgggggagagagattgaggggagagagtaactgttttaggagtaccatgtagagaaggggaccagaatgtggaaggtgggagcgcctttgttgtagggatcgaatgtagaatacgtgggggg

SEQ ID NO: 121001 - DNA, 431 bp, Arabidopsis thaliana columbia
  unsure (1)..(431): unsure at all n locations
cggaagcnngganccantagagcggttgcnccttgngtttaattcttttcaggggaacttttcattcacgtaagcacgacagagtcaatacttgtgacgatgagcatcaatatttactactggcaaaagtatacttaaacaaaaacaaaaacacgggtaagggtctaagggaaactactaaaaccagctgatacgggtactacnccanaganggatcaacataagactcacacgcgngggatttgccggtcaccatataggtgactggggatgacgcttaattttgccagcctcgtttacacttttgcccgactcttcctaagaactactcaccttcataaccgggaagcctaacacttggggcttctataagggcccaaagaaattcttgcagaaggacaagtcccccattatgattcgaagtccgaagg

SEQ ID NO: 121002 - DNA, 343 bp, Arabidopsis thaliana columbia
  unsure (1)..(343): unsure at all n locations
atggggaagcgataaagggggggtggagggaaaggccgtctaggttaccaccgcactnaccttaggagagagaaccacgcctgcaggtaccgggccggaattcccgggtttacccacgcgggcgaagccgcntgaagcagacgacgcgggcggacagcgtggggaggaattataccctctaagctgtcgaagctccggacttcttcgagacgtgtttgttacttaaacacacgaaacaaggaaaacgcgcaaactaagggcgttcctcgaatgaaaggggcctttttttttccgggggaggggagagaancagggaggaagccctcggagagaagaagatgaa

SEQ ID NO: 121003 - DNA, 419 bp, Arabidopsis thaliana columbia
ggggtgccgcgtggctgtgggggggccgggcggcgtgggggtggggcgggcgcttttgctctctcgctccctcgttgtttggtggttcgtgcttggtgtgcgcgaggtgttttttttttggggggggggggaacacgagagggcgggcgggaagaaagggcgcaccgtaggaggggcaagagagggcgaaagaaaggagacggggaagggggggaggagaggaggcgggaaggaaggaggaggggggggagccgaacaagcccgagaggcgacgatcagacggggcgcagaggcacggggccggacatagcaagatgttcgtattagggttggataggtgtgacgggtttgttgattgtggtggttctatgtgtttatcgatgtagtgatgttgagatggttttggtgtggatgagatg

SEQ ID NO: 121004 - DNA, 271 bp, Arabidopsis thaliana columbia
  unsure (1)..(271): unsure at all n locations
agcnngggaccacnagagcggtttcccttggtgttttaatctcatgagaacgcttttaaggaatgagagggatttgtttttcctaaataaacaagagcgctcgggtaaacaaatggcaactggggttgaagaaatttgactcatccatagaaggcgacgctaccgcacaagatccggactatcatcatggggggggcgcccagggcccgggaaaacaaaaaggaagaagatccccaacccagccggaggggaaccgcaccccttaccaacc

SEQ ID NO: 121005 - DNA, 536 bp, Arabidopsis thaliana columbia
  unsure (1)..(536): unsure at all n locations
cgcctgcaggtaccgggccggaattcccgggttacccacgcgtgcgggcacgcgtacgacaagagaacggggacaagagggatcagaagagctggactggtggagccggggataactcaggaggagattggtgagcgaagcaaagaaagcgaaaatctccggaggagaaaaagangagggagagagttcctctttggggggagggggaaagatgccgggggagagaaaaaaacaaaagggtgagcaatggggggggggtgggggaaaaaccccagggaggagaggtgagaaagcggaaggaagtaagggaacgaacctccggaggagagcctgcacgaaggaagtgcagtgcggaggcgtgagggttgagggatagaggcgggggacaacgaggggctggtataccgccgagcgccacacggagcagaaattggggaagactaagaaaatcagccaatatgcaggtagcgagaagcacaatctttggtgtatgctacgaaaacaaccccccgcaacccaactcccaacaatggggg

SEQ ID NO: 121006 - DNA, 483 bp, Arabidopsis thaliana columbia
  unsure (1)..(483): unsure at all n locations
acggaagcnnggaannnggnncgagctttgncngcggctcgcgctcccaattgctccgccggcgggaaaaccatggcgcacttcggaagggcaggtccaccggatatcaacgacacctactcacttctcgttcttaacatcaccttccgtacgactgctgatgatctctatcctctattcgcaaatcattgaaaggaggttgaggngnnnattcccagagatcgaaggactggngattcgcgtggttttgcggttgctcggcctaaatataaagaccaagctcacaaagcagaggaaaggcttgacggaagagttgtttgatggcagataaattactgctcagtttgcgaaacattggccaaacgcttaaaaaatttcccaaggaacagttcgggcacccccccccgaaatcacgaaaatctaaaagaccgtggccctaagctgggtcgtccccccaggaagagcccccccccccccaaacct

SEQ ID NO: 121007 - DNA, 504 bp, Arabidopsis thaliana columbia
  unsure (1)..(504): unsure at all n locations
cgcctgcaggtaccggtccggaattaatttcttggncgacgagcacactacccggcggccgccctttttttttttttgtggagttagaatgctatgaattccaaaccagagaagattcaaataaaacagagactattaaggctgttcaaacaggaataattcttgcacatgaacactaaaccagaacagattcctgcttacggggatgcagncagaactcgagaggtggagggcacctacggaaagcaagtagttctacagagggcagacgttccagtgcttaatgaggaaacatcatcagtgcaaggcaaacgggttgttatttatacaccgtgttactttcacaaagggggtggcagcatttcgaaacataaagagattggacttcgagaaagcagattatcctttgcgcaaaggagcaggggtacccagaaaaggggagacctctgattggtcaccccctgtcgggagaactcttccttagaaggaggaggcctttttgga

SEQ ID NO: 121008 - DNA, 435 bp, Arabidopsis thaliana columbia
  unsure (1)..(435): unsure at all n locations
acggaagcnngggacctcnagagcggcctgcctttgtgttttttttcccggagtaacacggaaccaaaccgaaattgaaacagcaaaccgatccatattagcttaggttttacacttttactttggttactgtcattcataaatctgacactggacccaaaacagagtaatgcaactcttagttatcaaactcngggatcggagaagaaacctacggcccgaggcatgtcttgaatgcagagaagactcttcttctctttgcatatgagatgtaatcaattgaattaaagaaaaggggaggaaaaataaaattaggaacttaatgagattgacaccatcagcttcgagtcttaacggttttgaagagtttcgatttgccttttttcccctgcaaagcttctttgcttcgcatcttcaaaacaataaaactttctt

SEQ ID NO: 121009 - DNA, 409 bp, Arabidopsis thaliana columbia
  unsure (1)..(409): unsure at all n locations
cccatgacgagagcccaaaggggctggattgagagcagaccgcacctttgcccttcttcatctcttgactcccactcacctttgatgccgcgcccctggatctctcattcctaccggaacaggaccttccgaaagcggctaaataatatgggagtgccaacagnaaaagcccccgggagaaccaaaccccctataggcgggaaacgttccgagccacggagaggcccccggaaagagcccaaaagagggagccccttggcgccgggcaagaaaacagggaccaagaaaagagggggggcgatatcccccacatggtctaattttcgaatgggcgcagccctcatttcccattagcgtggtggaaaaatcccttcggacaaccccacgtcaaatgaaaacccgtaagggt

SEQ ID NO: 121010 - DNA, 473 bp, Arabidopsis thaliana columbia
  unsure (1)..(473): unsure at all n locations
gcgcctgcatgtaccgggccggaattcccgctttcgccggcgcggacaggcaagangcaaaganngangggggcgggagcggaggngaagcagaaaagagcccacgcgacngncgaacgagggggcccaaagggcacagccgcgaagagagacgagaacagccaagggagggcaccccccncngcgaaagactctccttggggggggnaaaagnngacacgaccaaggacaagaaagggacccccagagagggcagagggcgaaaacacacaagcagggccagcacgggagcggggagagacacagcaggggcagcccgaccgggggcaccgggcccgcaggcaagaaccaagaagccaggaccaaggaacgccaagaaaccacacaaagccagggcgaagaaacaagaccggcgaccggggcggcgcggaagagggcgagcccggcaagccccaggaggaaaaaaaggcggc

SEQ ID NO: 121011 - DNA, 489 bp, Arabidopsis thaliana columbia
  unsure (1)..(489): unsure at all n locations
cggaagnnngggaccannagagcggtcgaccgaggggggaaaaccccnnnnnnnnnncnnncncgcgngnnggggggagaaaaaaccacaggaacccaggggggagaaaaccgaagcacgcccaaagacagaaaacaccgaaccaacaaaaacccgacaaaccccgaggaaaaaacaacacgggaaaaacaaatcctcnccagggggtggggacaacaanaaagagacccgagcacgcgaaaaccccccccnccagggggggggaagggaaaccccccccccccccgagggggagaaaaaacaggcgggggcacacgcgaaaccccagaacggggccccagggcccccaccaaaccaaaaaaccgaaaaccgcccaaaaggaaggaaaccccccccgcccgagcaacgggccccccagggaaacaccccccaccaggccggaaacaaaaccccggagcaaacccaaaagaagggccggggccaggccgg

SEQ ID NO: 121012 - DNA, 520 bp, Arabidopsis thaliana columbia
  unsure (1)..(520): unsure at all n locations
cgcctgcaggtaccgggccggaattcccgcttcgacccacgcggacaaccggagttccaaaaactcgctgacgagtgctgaatagtaacctctccggcgcttatcgagaaaaaccctatgtgccagacttctcttacgctttccttgcgaaatctgcctcaattttggattgaagacaagaactagaagctcttcctccagaggggaaangaaactgggggggggttctcacgggagattatcccaattaagggggcggaaggggggatcttgttacatcaaaaaggactttgggagattcaggggtcgcgctccggacttcgaagaaaccccgaattcacaaaccaccgggcccggaatttgacttttgtaggaaaaccaaaggagggggcatttggatctgtgaaatggagggggagaagaaaatggtctccctctgcaaacccccaggttggaaatctaggggcgacggagcctgaggttgaggctgagaaccagccggcgaattaacggctgggga

SEQ ID NO: 121013 - DNA, 426 bp, Arabidopsis thaliana columbia
  unsure (1)..(426): unsure at all n locations
aaacaacaaggggaaagggggganaaacaaaaacaaaacagaccagaaccagcgggagagcacncaagagcgggaccaaaggggcncacaaaggggagagaccaacggaganggggcagccaaccggtgttagggggggganaaaacaccgccggggagggaacggaaagccaccgaaaagcgggggaagggaaaagagcaaggacagggggggaccgaagaaacacaaggaccgggcgcagaaaaggaacaaggggaaaggccccggggaaaaacaagggaacccccccagcggggcccccggaaaccgagggacgaaaaacccgccccaaccggggagaacaccgcccaaacccacgggcaaggggaaagggaaaggagaaccccggggcccgcccccaaaaggaaaaaagacgccgacccccc

SEQ ID NO: 121014 - DNA, 326 bp, Arabidopsis thaliana columbia
  unsure (1)..(326): unsure at all n locations
ctctagagcggttcgcctgggtgtttaatccttttttttgttatgatacttctattctggggaccaaactatttgaccatctttggctcttctctataaactggaattacatgaacgggcaacccatattgggtgggaaattaaataattcacgctaatggaattggccctgttctaagactagaaccagaagaacaancacancccacaattttataaaactgcaagatcatctaatttaaagtaaaccatactggaagagctctcaggcacataaagcttcttacagaacctgattcattaaaaagcatctgcctaatgctctg

SEQ ID NO: 121015 - DNA, 488 bp, Arabidopsis thaliana columbia
  unsure (1)..(488): unsure at all n locations
agnnngggaccnnagagcggctgccgagggggttaaccccccaacaaacaaaggggggcngngagggganaacaaaacagaagacagcaggagaacaaaggaaaaggcaaagaaacacgtatttagaggaacatgggaccacaatcagatcgattatgagcaaggcaccacagacctccttacgggagggggaccgaacacacaggggaaacggngcagaaggaaccaccccccacgggggggggcgggaaaaaacaccaaagggccgggaacaaaccggacgcgggggggggacccggggaaacccggaccgggaaccgggaagcggaccaagcaacccaaaagaggagaccganaaaaagccgggggaaaaccagggaaaagggggggccccggggcggaaaggggaaaaggcaccaaacacaagcaaaaaagagggcgggaggcaaaaaggggaaagccggggggggccaaaaaggagaagcgaa

SEQ ID NO: 121016 - DNA, 522 bp, Arabidopsis thaliana columbia
  unsure (1)..(522): unsure at all n locations
cgcctgcaggtaccgggccggaattcctgggtttacccacgcgggcgatcccatncaaacatgtatagtgttaaaagcaaagcaagtgcgaagtggtttcattaggaacggtgcaatggatgggaagggattaatgattgtgggggcttgtggggaattgctcataatcgagcggagtggaggcaaaaggttttcttttttgggggggaggggaanaaaanagccggggggaggaatagaaggagaaacacgcgagggcaggcgaaggggagagaaacccaggggtgggcgagggggagacaaaaaagaaagagaggggggggcgggacgagaagaaggaaggcgagaccgacgacgcgagggcaagggagggaagcgaaggaaaacggaagcgcgcagggcaggggagagaggagggggggagtgaacgaaggcgagagcggggggaagagggcggagcgggaactatgacgtagtcggttctgggaggaataagtatgatggtggaaagggggtgggata

SEQ ID NO: 121017 - DNA, 476 bp, Arabidopsis thaliana columbia
  unsure (1)..(476): unsure at all n locations
acggaagcnngganccnctagagcggctgcnccgggggtttaatacttnaaaantangcaaaaaaaaaatggaacggtacaaaagttccagctctaaaagtttacaaaaatgtaaatgtcaggacaaatgactacgaattttcaatacacgtcgtagaacctaaatctaaccctagacggcgaattctcctcnataggggggagccaaccagacacggacaaaaaagaaaaagaagccccccgnaggacgggaccaggacacaaacaaataaacccgaacccaccagaggggggacccggagacccaaacccgcaaaccggggcaacacgaaaacccggancagccgacaacgcccgaggaaaaaaaaacccaggaacccccccagccggcggcggcggaccaccgcccccgaaacgaaaacccggagcggaaggaccccagcccaggccagggacccgggcccgggccaacaaaa

SEQ ID NO: 121018 - DNA, 445 bp, Arabidopsis thaliana columbia
cgcctgcaggtaccggtccggaattcccgggtctgcccacgcggtgcgaagcaagaaaatcaaagaagatagttttgtgatggttttctataaaaagtgcagatattttctttgtcctagagaaagaggcgataggaaaaatgggtctccaagagcttgacccgttagcccaattgagcttaccgccggtttcctcgttttaggggactgacaaaaaccgggtgggggaatatctctagtaaaaagccgccgggcacgacttctctctccacctcatagctgaaacccatctacacaaactggatccatgggttttaccaagtactggcgtttttccgtgaaaaaaaatggcgatttttgtcgccccagggtgataggaatgtttccaaccggcgccagggacctaatttcggtgtgccaggttagggttatttgagaacccccc

SEQ ID NO: 121019 - DNA, 444 bp, Arabidopsis thaliana columbia
  unsure (1)..(444): unsure at all n locations
ggaagcnngganccnnnagagcggtttccctagggngntttaaaaccccnnnnggcgatnagcgnggatagaaaacaaatctcacatttgagatgctaaatctatcaaaccgccaccaaagcaatatcttggtctagataaggctattactttaggttaactgctaccaccattccttctctacttcttctcattgagaagaccaggagnngcttnatccggaaccgacaattgctttgttttcccaagagaagtggaagatgaaagcctcttcttttggcataccatctgtggaggttttttttatcagaaacaacctcttctttggcatacttgtggtccgacataaccctaaatttccagcttcgggttggccaattcctgttgcccccactagacttgatttcaaagtttcgggtaaccaagttctttttgccccactta

SEQ ID NO: 121020 - DNA, 458 bp, Arabidopsis thaliana columbia
  unsure (1)..(458): unsure at all n locations
acgcctgcaggtaccggtccggaattcccggtttgacccacgcgtgcgaccacgcgtccgtcatcagcaacaacaataggctgcttcgctcgtcaggagttgttgctctcgtgcttcgagagccatcaccaccgttctgtttatgagcaacgtaccggaggacacggtttacggaggaccgaaaccgcagttccttatttagagggggggtnngacccaagggagacagaagcaaaagaaaggcgagccgagaactaaggggagcgactacaattaccctttgtgccgttgaaataagagacaggttggattccttgtttgttctctgccagaaattccatctcgcatgggttggccattggatttgaacaccacctgtttcttatctgcttagaggagaaagcttgttcaactgttggcggccgttgctcaggggagtccataagaacccttttttt

SEQ ID NO: 121021 - DNA, 273 bp, Arabidopsis thaliana columbia
  unsure (1)..(273): unsure at all n locations
gcggagcnngggaccnnagagcgtttgccgggggtttaggccccaagaaagaaaaacagccaacgggcgggcgagggctcnggaacaacngcaggaacaccaaaaaagggaaganggacatagagtgcatgcaaacnaaaaaaacaagcacgagaatcgacagaacccggaacataaaagtatttttttaagcggtgcnagagagcacccacaacccccccgcagaacaaggcgcacaccgggggacccagcaaagaacccaaccgcgcgggg

SEQ ID NO: 121022 - DNA, 470 bp, Arabidopsis thaliana columbia
acgcctgcaggtaccgggccggaattcccccttcgaccacgcgtaagccgacgcgtccgcccacgcgtccgcccacgcgtggcgaagaattagaaagaagggagagaaagcaaaaatggcactaagaatgtgggctttttctacagaaaacgctctcaagctttcttcttctgtttccaagacgaatctttttctcttgtggggggggtagaagcaacgacacaggtttggagaggattgaaccctgcaaattcacatgagggggttaaacatgaaagggtctgttgccaccattggcatcactggcccatgcttaggaccatttaagggaagtggggtttgttagactcgccaaagacaattcttaagggaccaaagagaaaagctttgggacccgcggaaagtgggaaggcatcaaggtgagatctcttcacccatcctcaggggaaatcattgggggtttcacaaag

SEQ ID NO: 121023 - DNA, 460 bp, Arabidopsis thaliana columbia
  unsure (1)..(460): unsure at all n locations
cgcgnacggaagctgggatcctctagagcgttcgcccgttgttttaatcctttattttttttttttaacgggacaaatcggggtttcactttcataagaaacccgcatattcttttgggacacacgaaagaaaggcatagaatatggaaatgtccgatattgggaaggcccctgagcgcattttgaatttgttttttatgaagtaggagagacacaccagaaaaaacnaaaaggaaaaggctgcacatattttttccttaactcaaaagctagacacttttgtacaaaactagcatcatgaggaactcagaggaatcacgaacctgtttcctctgggatgccacttcttcctccaccataggtctttatatggaggctactcaacaatgtcctgcttgattgcaattccaacttccaagctcttgaatgaactcgtggtcagacaacctgtatggacgat

SEQ ID NO: 121024 - DNA, 472 bp, Arabidopsis thaliana columbia
  unsure (1)..(472): unsure at all n locations
gacgcctgcaggtaccggtccggaattcccggttcgacccacgcgtacgctcctcaatcattctctcttctctctccctctctggtctcaaactccattttagtagcaagcttagatctcctccttccacagtcactttctcttctttctctgcttttggttcttcaatcgatttgcttcagattcccccattcctcctagaggggggtgncaaaacacagaattcacatgggttttgtctaaaaatcataaaaatcatatcttttttacggatttgaagatgaatcagaattcctctgttgcggaggcgacacttcagcttaattccggggaaaaaccaatcgcgggatcgattccgttattcttccctggtcaacaacgggaacaaaagctcgttagggacgatgttaacacacccaagacttagggtgggcgtcttggccgacgttaattcggccggggaaagacccac

SEQ ID NO: 121025 - DNA, 485 bp, Arabidopsis thaliana columbia
  unsure (1)..(485): unsure at all n locations
gcggacgaagcngggancctctagagcggctgncctggtgttttatactctttttcttatgcgtgggaacatggagaccccaattatattcgatactgaaaccatattacaaactcattttaataaattgcatgcaagaaaagatggtaacacaataaatttattacatagaaatgannngcaaagattcttctccggtgtagagaganctaacataccaggcagaccctaatgggataaaggtactgatggaccattttaaagaaacaaacgcttgaacaaatttttgaaaaaaagggcattggcgctgcgaagaaatttttggcaccccgggccccaagctcctttccaaagggccccccggggggggtcatatttaggattcaagaccctggtttcttgggccaacaaaaggcggggaaaacttttgtgggagtggggcggaccatatacccaaaaaacaccaggggggcttggaaaacctc

SEQ ID NO: 121026 - DNA, 513 bp, Arabidopsis thaliana columbia
  unsure (1)..(513): unsure at all n locations
cgcctgcaggtaccgggccggaattcccgggttgacccacgcgtgcgagcccgcgtgggcagacccctgggaaaataaaaaacaaaggcgaanagagcgcactagacaacagagttcaggaggtgagggaacagttcttcgtttaccgacggggaatggggactgggcacatctaccccaggagaagagaacgggcctttttttttttggggggaggggaaaccccgagccaagcagggcggcaagaaggcacccccgactgggggggaggggggggccgcggcccagcagcgagcgtgggctgcaggggagcgctggatagggacagtttagtgtggagaaaatccgccagaaaggttattggattcttggcgctacgcaaggcatgtgtggcttctctaccggcttgatagagacacgtggtgggctcgttccgcggcggcaagtcatggtgcctacgatcgcgtgtagagcactcaaagcggatgcgtgtggggcagggtgggacccaac

SEQ ID NO: 121027 - DNA, 517 bp, Arabidopsis thaliana columbia
  unsure (1)..(517): unsure at all n locations
cgcctgcaggtaccggnccggattnccgggttacccacggggcagagctcttnaantccttatttaatcatctcatcttctggaaattcgaggtgtttataggggtggggccttagcactggaaggaatgttttcgtccggggaccaacaaagaaaaaatctcttgtttccttgaaatcggcgagggtctctttttgggagggtggggacagnacgaacaggcgacaacgcagaaaaccccacgaaaccagtgcgcggcgcgccccccggagacgaaagggggggtcgcggaaagcaggaacccacaccccagcgcgaggcaccccaaaggggcggccccgcanagaacggcgaggagacctcacgcgcacgaaaaggaaagagaacctggccagagccgggagaaaaaggccgccgcccctctccctcgcgggggaggagacccttttaggggaaacgtactgtgttttggggcttacgaggcgcggtatcccgccgccgggagcccatttatctt

SEQ ID NO: 121028 - DNA, 509 bp, Arabidopsis thaliana columbia
  unsure (1)..(509): unsure at all n locations
acggaagcngggancctctagagcggtttgccggggggttttattctcccaacaaanaaaaagggagatgaagggggatgatcaaggcgtctaacatgctgggggacaaaaggcccgcacaaagatgttctttgtctaagaaaaacacccaaacaacaatcgcacgcggaacccgaaaacaaccccccgcngaccccctcaagtggagaggggccgcnaacacaacggggcaacccccaaaaaaagaacccccacgacgcggggggggaggggaccccccccagaagaggnggaccagagaggcccgggagggaaccaccgaagaaacgcggaccgcgcccccaggggggggaccccggaagccaaaaaccaaaaacccagaacggcgcgggggaaaaacgaagcgcccggggggccgcccccaaaaagaaaaacccgcgaccccggcgcgaacaaccancccagaagaaagaagcgcaaacaaagggggggcaaaaagagggaaaaac

SEQ ID NO: 121029 - DNA, 401 bp, Arabidopsis thaliana columbia
acgcctgcaggtaccggggcggaatggccggctttacccacgcgggcaagcccacttaaaatatggaagtgaactgagagggggcgctcctgggggccttcatgagaggcaattatcttggcagagaggaattctgcgggccgtcaaccagccttgtctcacaggggaaggattgagacggaaaagttttttttttaggggggggggaaaccccggggagcgaacccgacaggggacccccacaacagcgtggcaagcggaaccccgcagatccggcagcggaagtcaaacgggagggaacgttccggggggccggcgagatgtcctctccgcccgcgcgtaacggggctcgtcaccggtcgcgctgcactgccgagctacgtatgtctggggcccgcgct

SEQ ID NO: 121030 - DNA, 476 bp, Arabidopsis thaliana columbia
  unsure (1)..(476): unsure at all n locations
cggaagcnggganccantagagcggctttgcctggtgtttttaatactctttcgaataaaatcttttctgctttcgttagatcaaagcgataagaaatcgatatggggaaactgtaaacttttacatttcaccaacaatgatttacatattatagaaagaaaacaaaaaggaaaaaaaaaagccaaattactcatttagttgataggaggaacgctgggagaaattttcaccacggcgacaattgcgacaacgtggagcaattcctcccttgaaaataccaagaaaaccgaaagcttcctccccggaaccaaccatgcccttgaaccatgggggaacttttgggaaaatcaagagcagtttttttttttttcttcaagttggtcttcgggacaaaaaatttgagggggaattaacataaaaggttaacaaaccacccccccaaatttttctttctaacatcccgggagctcccttt

SEQ ID NO: 121031 - DNA, 523 bp, Arabidopsis thaliana columbia
  unsure (1)..(523): unsure at all n locations
cgcctgcaggtaccagggccggaattacctggtttacccacgcgggaggcccgcggtacacttttcatctcctagacagaggagactcgggagatgagaaagaaaatggcgggggggtgttattaactatcagataatacacagtgaaattggttgcacggagacctacctggacaaaaaaaaaagaagcgcggattttttttttttaagaggggggggcaccagagtngaagagcgtgggaagggaaaaaggagcgaaccggttagcgctgtgtgaaggggtacccaataagaaaaaatgcggagacggtaggagacaataggccgccgttgagaaaaactcgccaagaagaaaacctggtgaaacaaaaggcgggaatcagcagaagggtggagcaccgcaaggcaaacgaacgagatagggggagcgagagggagggggagaagggaaaggaggaacgcgcnaccggaagggaattggtagacagctgcagtagacgggaagctgagaaaaagtcacgcg

SEQ ID NO: 121032 - DNA, 506 bp, Arabidopsis thaliana columbia
  unsure (1)..(506): unsure at all n locations
cgccngcagggaccggnccggaatnnccgggttgacccacggcggcgaacacatncgnataaaaaaaaaggcacaagctgcgcgacagtcttttctacgagggggaacttgagggagatattgagatcaaagcctctgcaaagaagttccatcacatgcgtctcgggagaccacaaaatgttgcgaaaactttttcttttaaggggggggaggagccccggcctgaggagatagagtagacaaacttccgcggaggtatattgtgggggctctgccattggggggggagcccataggagtgcgagggaagagcaacccaggcccggggatcaagaaaaaaatccgagggggcccgaggcgctaaagggggatccaaccaaggaggtcggacgctattggtgcccataccacgcacccctataggtaaggggccgggagaggggggaataggaacatgacagcacaagtggacggcaagcaggcgcccgcgccggacgagcgggtag

SEQ ID NO: 121033 - DNA, 460 bp, Arabidopsis thaliana columbia
  unsure (1)..(460): unsure at all n locations
ggaagcnngganccnctagagcggtttgcctgggggttttaacccccnnnngnggnggngngggcaccacaagaaatacatctatataatatttcgaaatggcttggaaatcggcaactttatagggggcatttcgcgagagggaaaatcaaccagggttaatcttacatagacacatgggtaccctaaataagggtgggccgggaccacaaagacacattttttccatgctaccccccatctccatctccatctccactattatttgtgaaaaacggagccaaaaagtttttgcccaacgcggggaatgaagtaggggttttgaaaaaccccttcaacttaactttgaccctgctcccggaggacgaagtccccccgacagatgaaacctccgtggcaaaaggaggagggacatcctggggatcgctcttttaaaagcctcaaaccggggggtatccaa

SEQ ID NO: 121034 - DNA, 517 bp, Arabidopsis thaliana columbia
  unsure (1)..(517): unsure at all n locations
acgcctgcaggtaccgggccggaattcccgggtttacccacgcgtgcgcccacgcgtncgaggacgcgtgggctctttaagtatgcaggattggacaccgagaatcttcagaactttgaggggtggctctttgtacttttcccgtatttttcataacatgcttgcagaaggtgttggtctctccggcgttgttttttttttcgggggggagaanaggcaancgccggaggcatttgaagcctttcacctcttcagctgagtggtaagtaatgggggaaagacatattttaggctgcctaatataaggctaccgtaggttatggaaccctacacttttctaaatggttaaagaacttcacaggaggttgctatcttctgtttttccactgagagtctgcggctacagaaaccttgccggttcggttccatgggatttgatattggccttgggggagtatgtgctggtgccaaggggggttattcttttctctatggggcctcgagttcagagccggag

SEQ ID NO: 121035 - DNA, 458 bp, Arabidopsis thaliana columbia
  unsure (1)..(458): unsure at all n locations
cgaagcnggaccnnagagcggctgccggggggttaaaaccccgncnnnnggnaangaggaagagggggggggaanctgcggagcgggggcaaacaaaaaaaaacaaaggaaggagagggaaccctgggccccccacaacccacaagacgggcaccaaagaaacccggagaagggcccaaaatggtgggggggggaaaaaaaaaacaccccaggggggggnaaaaggcaaagccaaaaaggggaggggaccaaccctggggcaagcccccccccccgcgggggcaaaaaaaagaaagggggcccaccccgaaaaccccaccacaaaaaatcccccccccgagtcaccccaccctgcgccgaaaaaccacagggttcaggggaacggtgggaccagaaccccaaaaggcgggggggaacaaaagggggtgagggtataaccacccaccccacccagccct

SEQ ID NO: 121036 - DNA, 557 bp, Arabidopsis thaliana columbia
  unsure (1)..(557): unsure at all n locations
caagtgaccggagccgggaattcccggcttcngacccacgcgggcgcagaccacngcnntnncagcaaggggaaatgagagaaagagaggcgggatagagaaccttntgaaggctggctgtcaccctcacattcctattttcggttggggagggaagagaggaatggcgttgctcataatccaagaacaaaccatatggggggctttctcttgagtgtccgcgagggggaggagtttcttttttattaggaggcgaggggaaaaaacgcgcagaggaaagaggccgcgagaagaaagacacccaccacaacgaaacccggcgagggaggtggtcggaggacggcgtggggacactaacaccatttaccctagggggtcgcagcaaaagaagagggggatgttggggggaatcaatctgcggaaggtgttgtgtggttacgagaagcaatatgtgttctcctctgggggagtagagacgacccgggggaagggttgagaactttgcggtctttagggggaggcggtttcggagtttcccctgtcgtagaggggcaacc

SEQ ID NO: 121037 - DNA, 462 bp, Arabidopsis thaliana columbia
  unsure (1)..(462): unsure at all n locations
gcggaagnnngganccnnnagagcggttgnccggggnggtttanacccaaaaaaaaggggagaagcaccnaagaagaaaaagaaaggcacaagcctaacacaaaaccaagaaaacactcgggacgcaagcggcaacagagccccnacnacagacacacccanaacgaggangcccagagagaccttactactaggggcgtccccaacaaacaaaaaggggaaagggacacaaaacacacaacagacccggggggaaggaaaaacctctttctggggacaggccccaaaagaaggacaaagaaaaaccgggcccatatttttgtgaattccgagggtgttttcaaggtccccatttaataccattcaagcatccaaaanaaccccctggagagggcgggtttcataattataaaacctggtccttgtggttcacgaaaaaaagtccttcccctcccacaccac

SEQ ID NO: 121038 - DNA, 442 bp, Arabidopsis thaliana columbia
  unsure (1)..(442): unsure at all n locations
cgggaccggccggattctgctcgaccgggggagccagtttaattccctaaaaccctttgggaaattgtatctctctgcgttaaaaaaactcttccctggttttggtcgtgtgttactaaatggaatcggggtcgtagggaacaacttgggaggcaaataaaacgttttttttttttgggggggggccncacggggggggaggaaaacggaaaggaagcgcccaaacggggaaggggggggggggacccagaaatgacggaacgggggccgcgcggacgagggcgggggtggaggggagtcacgggagaagaagaaacggcgggtagtgtggcgggtgtggatattgagacgcgatggtggggtagcgggggggggggagaggctggggggggagggggcgggggggtggctgttagcacgggggccggtcttggaacggagg

SEQ ID NO: 121039 - DNA, 404 bp, Arabidopsis thaliana columbia
  unsure (1)..(404): unsure at all n locations
aggggttgnccggggggggttaagaccgnnnggngaaaaaccacggaaaacaagggaacganagggaanangcgaaacagacagcccacaaaggncgcacaaaaagaccgttaaaaacaaaaaagaccagaccaccagggcaaaaagccccacagaaacacaggaacttttttattgcggtgtagagggcaccaaccgcaacggtgaacccaaaccggaaaaaaaacccccgggagagaggggaggagaaccggcccccccaaatgcccagggcgcccccaggagaaaagacctagggtcccacagaggaaagaaaacggacaacggggcgacgaaagcctccaaagggggaccaagaacccagcaccccgccgggcggaggcccccccccaacaccagaacaa

SEQ ID NO: 121040 - DNA, 457 bp, Arabidopsis thaliana columbia
  unsure (1)..(457): unsure at all n locations
gcgtacgtaagctgggatcctctagagcggttgccctgggggttttaatcttttttttttttgtttttttgtttggttgtggtttgctctttcttgtggggaaagggaactttttttacaaatctcactcggctaaacagaggtggaacctccccaacccacaaaagagtcgaaatagaaacccaagcattgctcnttgagggattgggnggccaacnaaggagagaaaatacattggatttgcaaccccccacacacaagacaagcgggcaacgggggggctaaaaggcgggtttaactcacttgaaaggaagagggggacccttcaaaatttcttcctgggccttaggcgggggttaacccccattaaaatcctatccccaaaccgcggttcctggtggtccctgaaccccccaccccccacaggggtaccctatttggggaatttggggaaaac

SEQ ID NO: 121041 - DNA, 492 bp, Arabidopsis thaliana columbia
acgcctgcaggtaccggtccggaattcccggctcgaccgacggggacagggcaattacaacaaagacccacaaaattctttgggttttctttttcaaatcccattaataaaaaccttaccaacccatgaagtaaagtaaactcctttcttataaactctcttttgttctttttttttcaacttaataaaacttccctcctacggggggaagaacaagaaagatgaagagaggatacggagaaacatgggatccggcaccaaaaccgctaccagcttttggttgcggagaaggttcttcaagggggggtaaaaagaaggctgatgatcacaacaacaactgctacgtggatgatgagcttcttgctgttcttggctacaaggagcagtcttgggagatggctgaggtagcgagagacttgaccaagtgggagggggagggtaaagagggggcgggtgtagtgagtaaacgaggtggtgatgtgacccatggga

SEQ ID NO: 121042 - DNA, 473 bp, Arabidopsis thaliana columbia
  unsure (1)..(473): unsure at all n locations
cggacgaagcnnggacctctagagcggttgccggggtgtttattcctttattatgttttgtgcattagtcggcgcggaggttcttagggcttaaaaattcttattccaacagagttcctcaccgagagatattaagataatgaaacagaagcatatttcatcacacccagggtgctttattcccaaatattatacagggggcaaagcnnncaagggagngaaacggaaacttgctaccgaccaaaagacggggaagaagacggcccaccgaacccaacaacggggggggaaaccacagaagcccgaaccgcaccctttggggaatacaccaactttttgtgagcatccacaggttccatttcactcaaatccttgagaatcgccaccggggccattgaaaaccttaagctctagcaggaaaaaaggttgtcccgacagaatcgggccaacccgggaaatcctcacgaggcccc

SEQ ID NO: 121043 - DNA, 533 bp, Arabidopsis thaliana columbia
  unsure (1)..(533): unsure at all n locations
acgcctgcagtaccgggccggattcccggcttacccacggggcaaagcctaaaaatgatatgcgcaagaatccgacgggtgttgttgtaagcactaggttgtactatttgaacaaccaaacactcgagaaggatttgtgggaggacttccttagggggtacttctgcaggagagagtaattgaacaacacttttttttttagggggggggaacaaggnggaaagagaaaaagagagaaaaacgcgtggccgacacacaaaaagaggtggggtgaaaaaaaaaactaaaaaggtggtggggatgataggagaggaagggggtgtgatattattgactctggtgcttgtaagacggattcggtgcttgtcgtggtccggcttgaagtgtgggtagctggtatatggccgagaaggaatagagataaaggaggggaggcgtggaggcggggggagaagtgagatacggtggtaggtgttgggagagggaaagctggggataaccagacgtgtgagtgagaatatggaggtggggat

SEQ ID NO: 121044 - DNA, 479 bp, Arabidopsis thaliana columbia
  unsure (1)..(479): unsure at all n locations
agcnggganccacnagagcggctgccagggggtttaatcttgtaanaganttaggnnnggngngaggggaaaaaacaaagccctcaatccaaaaaccaaagaaaccgccccagcggggataacccccccccaaaaggcaggccggggggagaaaaaaagccaaacaacggagcggaggttcctcttaaaggggggggggacaaaaagaggccaacacaaaaaagaacgccgcgaacaaaaagagccagagggcaaaaaaaccccggcaaagaaaccaaaaaacggcgcggagaagacaaaagagaacccccccctaaaagggaaaagcgccgcctgagaaaaaaccattacacgggaccggccccccccggcgcgcggagggaggggggagaccccccaaggggggcaaaagaggaacccgggcggggagaaccagccaaaaaggggcccccggggggcacccagggaaaaaaaacggg

SEQ ID NO: 121045 - DNA, 497 bp, Arabidopsis thaliana columbia
  unsure (1)..(497): unsure at all n locations
cgcctgcaggtaccggtccggaattcccgggtttgacccgcgggtgcgggccancgttagagactcagtcgagcagagagggacgacgattgggcccacctccgaagaagatccttaccttggcatgggtcgattcacttcccaagttgcctgggctgatgcctggtgcccatggtgcaagagccctgaagtgtctcttttttgggggggagggaggggacccgtaaacaaaaggggggagggagcgggccggggacggggagggggcaacgacaggcggccaggggtcagggcaaaagcggcgggaaagaggggggggggggccgagcgcaggcaaggggaacccgggcaagggggggggaacggggggagggagcggcccgcgagcggggaaacggagcgacgggaacgggcgcgcaacaaagaaaagatgggacggggacagggggtgagaagagacccggggaggagatcgtgaggggggagcgcaccccgag

SEQ ID NO: 121046 - DNA, 397 bp, Arabidopsis thaliana columbia
  unsure (1)..(397): unsure at all n locations
cgaagcnngggaccnnagagcggttgccggggggnaaaaacccgacncaacccaaacaagacanaaaggcgcccccaaagggtncccgaacgaaagcagggaaacatntagaggaagcggcaggattgcgggcacaaaacgagcagggatgagaatggaagccccccacaaacggcacaacccctttttagcgggggcgccgcncccaaggaggggcagggcgaccaccacccgcccccaccggggggggggccgcccccccgccccaaaccccccaccccggggggacccccacaaaaccgggacccccngggggggcacgggggccccccccagcgaacacgggggggaaaccgaaccccgggccggggccaaaagcgcccccccagccgcaaaa

SEQ ID NO: 121047 - DNA, 378 bp, Arabidopsis thaliana columbia
  unsure (1)..(378): unsure at all n locations
gaagnacgagcgaagaaagaaaaaaccaacacaggcgcaggattagcagcaaacgagccaccgagacccgaaaacgccaacccagaccacacatacttaaaaggagcagggacacccccgcgcgggaacgcggaaaaaaaaccccccaccggggggggggggggggcccccccccaccaacaaaagccccccccgcaaaggcacagaaaacacgcagggccgaaggacgaaaccaaaaccaaaagaaaggacccagcaaccgaaaacccagaaccagcccacacagacgacgaagaagcgaaagcggaacgacggaaagccgcgaaaaacgaccagcaggcagcacaaacagacgcgcggaagaaagaagaaggcccg

SEQ ID NO: 121048 - DNA, 375 bp, Arabidopsis thaliana columbia
  unsure (1)..(375): unsure at all n locations
ggggggaagcttgagaagnacccggggaacccccggcaccaggccccccgccaacgtttctggggcaagaaaaaaaaacccggaacccggaacccggggggaaaaaaacccaaanttantcgggggtgggggccccccccccgcaaaaccccaaaaaaaaggccccccacggggggggggaaaaaccccccctttcaaaaacccgggcgaaaaaacaaaagccaatcccgggcgaggagacacggcccccacaaaacatcgcccgaccccagcaccccggaaccccgccgacaccccaggggtcggcgaccccttgatcccccccccaaacaaggcccccccgcgcacgcaccccgaccaagccaccccggccgg

SEQ ID NO: 121049 - DNA, 507 bp, Arabidopsis thaliana columbia
  unsure (1)..(507): unsure at all n locations
cccgcccgcagggaccgggccggaatcccggcttacccaaggggaaaagcggaaaggagcatctgggggctctgctcgggcacagcagaagaagncactcaaggaatcgaaggtactgggctcacagctatcgtcacaggagcaccaagagggacgggggaagagaccacgcgggttccggcgcgnaacctgtgcctcaaggggagagggcgggaaggaaaacagaccccgggaaaaaagccaccagaaaagagacggaaggaaacaccccaagccaaaacggacggaacgagaggggaccccaacccgaaggccacaggcaagaaccccgcaaaaaaaaaacaagccagaggacccgcccaagaaacagaccaagaaaaaaagcggggacgaggggcaggggccccccgagcgacccaagcgaaaacagggaaggaacagggagcaaccaaacaaacgggggcacagagacggaaacaaaccccccggaggaaaaggaggaaaaaa

SEQ ID NO: 121050 - DNA, 467 bp, Arabidopsis thaliana columbia
  unsure (1)..(467): unsure at all n locations
ggaagcnnggaccncnagagcggctgcctgggggtttttatctttttcattgtttttgattttttttggggggcgttttttattttttcttatcgtgctcgaaaaaagaaaagggattggttgttttttgacccattacttttgtgcgaccaccttggcctcggcggggggggccccaataatgtttgggggttgccccgcccccccccaaaaaaaaaaaacccaaaccccccacccggcggacgtttcagaaccccggggaacaggcgccataaccccccccccaggaaaaccttctggtgcccggaaggctccctcttaccagggtgctgttttgggggacccccaggggccccaaagctctccccctcccccacccgctttggggtggggggtgttaacaaaagggggaaaaaatgggagcgggaccccaaattttttctttttgggggggagaaggaaaaccc

SEQ ID NO: 121051 - DNA, 445 bp, Arabidopsis thaliana columbia
  unsure (1)..(445): unsure at all n locations
gggggggcgaagcgcggaacacacaaaaangaacacccaaagaacggcgggagcgacaagcggcgaccgcgcggcacacgccacgccccgaggcgcgggaaagcacaggaccgcgcccacgacggcgacgccgcgcccgccgccgcgggggcggcgccccctccccccgcgagcgggggcgagccccccgggacgcccggacggaaaaacaaagccgccgcgcaacgcgagaggggcggagcagacaccagaaccacgaccggaggcggaagaaaaccgcagacaaacagccaaagacagagacacagagcaaacgacacgcacccacggagcccgaacgagcaccggagcagagagcaggatacacgagggaaacaaaccaaggaggaacggagagcacagagcgacgaacgaagccgacccacgcccgacgagcgagagagac

SEQ ID NO: 121052 - DNA, 496 bp, Arabidopsis thaliana columbia
  unsure (1)..(496): unsure at all n locations
gctgccgcgtcgtaagcttggtcctttagagcggcgccaacctttttttttcttctgttaaaaaaggaaaacttaagccttgttcttggaaaccctacaatatctaagaacattccaacacattttctttggccttgactgattcaaacaaaaaacacaacccaaccgtaaattctgaggggacaangcgccggacaaaacaaaacacataaaaacccccncgcgggggcggaaagaccggaccttcattggggaaagggggggggaagaccttaatgacttacttgggaaaatgggaaaaaagaatngtgtagaaacttctaaaaccctgaaatttcaaccaaaaatccaactgaatggaaatggctgaggcagcctgttggggaatttgccttgaactcatgcttcaagataaacggcancgcgcgggtcgcgcgtgaaaaagtcgaggggcccggggacccatcacaagaaggggctctgaaagggctgcctt

SEQ ID NO: 121053 - DNA, 493 bp, Arabidopsis thaliana columbia
  unsure (1)..(493): unsure at all n locations
gcacgcctgcagggaccgggccggattacccggggggaccaacccggccgaccacgcgnacggaaaaagaggggaangcccgcacaacaaaaggaagagggccaagacgaaaacccgcgagagcacatcacaaccggcgcccaaaggcggcggggacgacacaaggaaaggaccaccctcgcaatgcggggagcgcccccgccgaaccggcggaaaggaggagacaaagccagcacccggcgagggggaggacacaccgccccacgaccncggccgggcggaccaccccgcgaagacacccggaaaacccagagaaaagagcccaaggaagaagccaaaaaaacgggccaaagacaaacccacccagcgcggaaaacgcggccggaaacaacacgggcagaaaaagggcacccaccaaacccccacgagaaaacaccgcaaagaagcgaaaagaagggccaaaccccccagccacaccagcgaaagaagcagg

SEQ ID NO: 121054 - DNA, 534 bp, Arabidopsis thaliana columbia
  unsure (1)..(534): unsure at all n locations
ccgggacgcctgcaggtaccggtccggttttcccgggnggaccatcgcgtccgctcgtccgaaagggaagccccggacgaggcaactactttactggctgacggcaatgaaaagggcgcagcttttaagatcggtatcggcctccataacggccggagcataccggacaaggagcccctccctcttgagggtggcaacaaancaaacctatgaaggccagaaaaaccccctgccacgggggggaggacaccaactgtaaaaggtgacnngattaaacccgaaggaaggaccgaatggcaaggagaacaaaaccaccagaccgctaaatacatcgaggtcaataaccggggaccgggagctggccaactaaaaggccgtcttggggtaagggggctaagtccgcggctgaagtagacactaacccgggggtgactgggggggccagctaactggagccaacaagccacccccccgagcaactggatggtgggaggccccccgaaagaggccaggcataaaaccgcctgcggaaaa

SEQ ID NO: 121055 - DNA, 551 bp, Arabidopsis thaliana columbia
  unsure (1)..(551): unsure at all n locations
agccggcacgccggcggaaccngggaccctcnnaaagcggggcgaaaacccgcnnagaaagnnagaagaaaacccacaacggggggaaaaaacaaaaagcacacgggcaaaaacgacaaaccccccaaggaaaaaaagccaccggggaaagggaaacaaacaagagaaacaccggggccctctgatgaagaaggaaacccgggaggaaggcaaaaaaaaacccccncngagcgggggaggaggacaacaaanggaggacccccaaccccaacccgggaaacgaccgccaaaaaaggaaagcccccaccaaaccncaacccggggggcccaccccaacaccccacaagccccggaaaaggccgggccgccaagacaggaaaacaaacgggggggagcaaacacccaaaacncgaggggcggagaaaaaaaaaagcgaaccaggcccacgcagcccccccaggggaaacccaacggggggacccaagaggaggggacccaagcgcaacaccgcccacgggggggcgaacgcccccccccccagggaaaaaacg

SEQ ID NO: 121056 - DNA, 442 bp, Arabidopsis thaliana columbia
  unsure (1)..(442): unsure at all n locations
caagaacaacccngngaagtttttcaagaccaatgtgattggcacactgaacatgctaaggctcgccaagctccctcacattttantgtggcccaccccaacctcggatggatatgaagatccccccatttgtggggggggtgggaccttttttggaaatgtcaacccaattgggtggtaggagcttgggtgaagaaaggaagcctgttgctgaaaccttgatgtttgactcccccccgcaacatggaattggaatcccctttgggtagaatcttcaacacttagggccccccatgaaaattagtgatgggccggggtgaaagcaacttattgaaaacccctcccgggggaggcgttgtctgtcaaaaaaccggggccacaactggccggtttctgttgtttctgacaaaggggagggccacaagccccacgggaaagagaa

SEQ ID NO: 121057 - DNA, 581 bp, Arabidopsis thaliana columbia
  unsure (1)..(581): unsure at all n locations
cggcggggccgggaccccctagagcgggcggccaaccgttcggagaagcaggacgccgggggggggaaaggaccggggcgcaagaggacgcagaggacagaacgcagacaccgaagaggaggccgaagaacaagcaggcgaggaaacacggcagggggggggggagaagagaaagaaaacnccttccctcgggggggagggagccgaagaacaaggaagggcgcaaagaaagaaacccccccggaanaggggggaggagggacgccccaccacgacgagcgcgaaaagagaggaaaaccccggagggagagaaacaggagcacccnggggcggacgcgaggaggaagaggcgaagcggcacgaggcaagcaaggagcaggcgnncgcccgggacgggggaggggcgacaaccccggggcaagaggcgcccggcgaagaaaacgagaaccgggaggcggagaggaaagcagacggggcgcgcgggaggggagaaacaaaagagncccccagcagagcaaaggggaggagaagccgggggcccgcaggggagaaaagagacgcgggaggccggggggggaaag

SEQ ID NO: 121058 - DNA, 526 bp, Arabidopsis thaliana columbia
  unsure (1)..(526): unsure at all n locations
cacagcgggagggggagagaagagagaagttncacaaagagtacgctaaagcggaaccaaaccgaacaacggggaccagggagaggaagacaggagaaagcgagcgcgaaaggacagggggggaaaagaagaggctcgttgnctttccgggggaggggagcggaccgaaaaggccaaaagaaaacaaaggcccaaaaaaggggggggggcgggaaacaagnagggaaaaaagaggacaaaagggaaaaaaaagcgaccagacgcacgggggaaaagcccgaacaagaagggcgagccacggaaaaggggacaaaagggaaacaacggaaaagaagggagaacacgcacaccggagaggaaggccaccccgggggggacgaaaaccggggcacgaaaaaaaaggaaacaaaaaaagggaaaaagaaggcnacaaaccgacgggagcaagngcggaaaaaagaaaaacccaccngcaaggggaacccaaagggcggaaaaggaaggaggggggagaggcaagaaaaaa

SEQ ID NO: 121059 - DNA, 376 bp, Arabidopsis thaliana columbia
  unsure (1)..(376): unsure at all n locations
gcacgcctgcaggtaccggnccggattcccggggcgacccacccgtccgcccacgcgtncgcccacgcgtgcgggtgagatgaattcaatgttatctaacttagcattcaacaacattattataatggtgacgggaaaatgttactatggagatggtgcagagganganccttcctgcttttcgngggggggagccnancgcagaggcgangagaagaaaaggcgcaggacatgcgggggagcaccaccgaagaagcganggannacagacnncgagagggcgggaaaagaagacggcngccaggcccgaagagnccncccaaagaacgggcgaggaaaaacgggcggcaaaggagaaaaaaggagaaaccgaaga

SEQ ID NO: 121060 - DNA, 518 bp, Arabidopsis thaliana columbia
  unsure (1)..(518): unsure at all n locations
caggcacgcgtgcgnaagctgggaccctctagagcggccggccatccgttcgggtcgagtaccctcctttcagggggtagacgacccgaaaaggggccgcgggccccgaggaggacaaaagcctacggggcggtaccacaagtgaccaaacggagaaacaagggaccggcgggccctccgtttgaatgtagggaaaagaaaaacaaaccacngaaaaaaaagcccccgggggaggggggagccacccagcttctcacccaccccagaaagagcccaaccagcacccgaccgggggggggacggcggaccccagcgagcaaaagagagaacccggcgggggggaggaggctccaggggaaaaacccacggacaggaacccccccgcgggaagggccccccgaagaaaaagccaaaagcggggggcgggggggcaaggaaaaccacaaagggaaacagcgaaccccggaggggggggggaacgggggaaggaaacaccgcgaaaggggccaaacaccggc

SEQ ID NO: 121061 - DNA, 502 bp, Arabidopsis thaliana columbia
  unsure (1)..(502): unsure at all n locations
gggaccgggccttttaccggggggggcaatcagnccaaacaaacnancgccaaaagagggggagaggggcccgnagagggcccccagcgccacaaaacgacactctttaagaacccccaaagggaaaaaagcaaaggaggcgagggggagagaaagcctncctaaaatatggatgtggggccccacagagaggggcgagacgaaaaaaaaaacccccccgggggggggggcggggggggccccaaaaataaaaagaacaacccgangcccaaagaaagagggaacccgcgaacacacgacgaaaggcgaggaagagggaagcacgcccgcgagagaacacaaaagcganacgggagcgagcgagaagaaaagacccggagaacagcgcggaaagaacaaacgacagaagaaacagcgggaggagaagaccggcgcgcggcaacgaacgaggcgagcggcgagaacagaagacggggacgagcaacgccggaagaggcgccga

SEQ ID NO: 121062 - DNA, 532 bp, Arabidopsis thaliana columbia
  unsure (1)..(532): unsure at all n locations
gggggggggcatccgngnccaaaaannaagnnacnncaaaaaaggggggaaaaagaaacgaagaaaaggaaagcgcccggagagcgagagcagacctctctagagcagaaggcggagaaaccagaaaggacgagagaagagggcgggagaaaaaaacctgctttttggggcggtggggagaacangagggaggagagaagagaaaaaaaacccccccaatgggggggggggggggggacaccccacctataaaagcgaacagcagaagcccaaacgagaagcagggtagcccgggcgacgcagagcgagaagcgagcacgccagagataacgcgacacgagggaacagcgagcgaacacgcaacagggccgaacgcagagcacggcgaggaaggaggcaagacaggaacggaacgggagaaggagagagacccgagcaacaagcagagaaaacgcagaaggaggaggaaagcacgagaagggagacgggaggaagcagacaacacacgaccgaggaggggcgagagagaaga

SEQ ID NO: 121063 - DNA, 480 bp, Arabidopsis thaliana columbia
  unsure (1)..(480): unsure at all n locations
ccgcacgctgtgcggagctgggatcctttagagcggccggccatccttttaattactttctccccacacgaggggagcgaagacatttactaatctagcgccggcgggagaaaaaaggttttttgggggggaacatagcaccagaccagggaggctgcaaganaaaaaaaaggctgaattttgnctgtngaanaananngaggaagggggggacaaaaaaacccccccaccgggggggggggggcccccccattcacaccaagacccgccgcacaaaaaagaaagacctgggaggacgtaacataaccaaacagaaagcgaactccccgcggggcgcacaaagaaaaaacccccggggggtcggtgcccgaagcagcccgcacgtgcgacgaaacaccccggcgggggggggggacgcccccaacgaagccgtgggagcgagcgcccgccaacgacaaagaggaaaaaaaaaccggccgg

SEQ ID NO: 121064 - DNA, 487 bp, Arabidopsis thaliana columbia
  unsure (1)..(487): unsure at all n locations
cgcctgcgggaccggnccgcttaccgggggggacatcgcgtccgcncactcncncgccncacncggggaagcgaaggcancgacaggggcgagcccgcggcgggagccgctactgtgtgtacggcggaacagaagaacagacccgggaggcgcgacgcccngagactccttacatcaggccgcggaggaannaanggacgcggcggngaaaaaaaaacccccaggcggggggggggggagcaccncgccaaaaaaagccggcgccacnccagggaagccggggacagcgaccaagcggagcaaaggcgaaaagaccaaggggaagagaaagcggcgaaagggagccccgagaacgaggaagcccgaacagaggcccgcaaaggggaaaaagccaacgcgggcaggcgacgaagggggacggggggccacccaacagggcgagaagaggaagaacgggggggaagaaccaaccgcgcgggagccgcgg

SEQ ID NO: 121065 - DNA, 539 bp, Arabidopsis thaliana columbia
  unsure (1)..(539): unsure at all n locations
ggcggcacgccggacggagccgggacccactagagcggccgccacaacgtgttcgcccacgcgtccacacagaagagggggaaagatgtgactggagaagccccaaaaagaccctggcgccaacacacaaatcgcagaacgcaagaccacacaccccagaaaccaaacaaaaaaaccctcgcagagagaggaggaaaccacgcgcgaagacacacactcaaaagaacccacnctgggagcagagagggagacctacgaccagccagaccaggtatcaagaaaacagaccacacccaaggagaacggggaaagaaaggaagccgagaaacacgcccaaagaggacaaggtgggcggaaacccgcgaaacccgcccccgcccgacaaacggaggggaacccccccccccccgaggaggaggaccaggggagcccgaaacggagacgagagggaaaacaccgaggaaaaagaaggggggaaagggcccccccccaaagccggaaagaggaaagagcgggtccggacccggggcgggggcgaa

SEQ ID NO: 121066 - DNA, 538 bp, Arabidopsis thaliana columbia
  unsure (1)..(538): unsure at all n locations
gccggcacgcctgcagggaccggnccggtannccgggggggtcacccgcgnccgcccacgcgnncgcggacgcgagggggatanngngngngngnananananacccacccaaccacaaaaactcttctgattgattgctccaagaacaacggcctccatagagagcatccganggcccctgcctctttgcggcggaacccaccaggagagncagagcgcaaaaacacccccccgggggggggggggcaccccattttgcaacgctcgagncggccccctaaacccagcgggaacgagtctaatctccgagggaatcgacgggggacaaaactcgccgggaccggaacgggaataaagccggcgaaccggcccgggtgaggaaaagaggaagcccgggagcaaacacacgggcttaagccgggaccaagaacgccccgggaaacggacacagaaataggagcaggatttcccagggaaacggcgggacgaaaccttctgtagaagggaagcggttcggaaaacccgggcccggaaggg

SEQ ID NO: 121067 - DNA, 552 bp, Arabidopsis thaliana columbia
gcacgcgtgcgtaagcttggatcctctagagcggccgccctttctttttttttttttttttttttttttttgtggtgttaaaaaccaaaaaaaaaaaatctagagcgtcggcggaggtgcattttatcattaataacccggtaagatttttatcacatgtatagaaacaaagacccgcctaaatttctggggggccaagccaaccttgggcttggccagaaattcacagccctgaaaagtatgtgctttctgcagaaaaccagcggggacgagttgttattcccaagaggaaatgctctatgcatgccggaggctatggggctcatacttgagggagcttccacatgccacggctgtatcccacagacattaaagcaagctcccaaagcctgtttggaaggcccaacatactgactttagacccgggaattggggaccattgtacagagatttcacgccgttggatattaaaacgctggcccaagtacaccatttagcatcaaagcgcccccttttgagatgggcgttggggaaaagtccccagcaggagcc

SEQ ID NO: 121068 - DNA, 535 bp, Arabidopsis thaliana columbia
  unsure (1)..(535): unsure at all n locations
ggcggcacgcgnacggaagccgggaccctcnagaggggcggcacaacgcgnncgacgagagccacaccanaccgggggccccnnaaagaaacaaaagggcacaaacagaaancacacgaaaggccacagccgccaagaaagcgcgggaacggcgcaagcaaacagagacacagcgctcccactagaagangaanccncngcagggaagacacaccacacaccccccccganngagggcggccagggaaacgaaccctaaccccaaaacgaggagccacaaggacgcagacggagcgcgaaggaaacccggctgagacgcacccggcaacgaggggacaaagaaactgggatagagcgcaaacaacctggccacaaaaccaccggagggagagagagccgcaacgcacaagagccttcctgccgaagaaggaaccccgaagacaagaaaatgaggcaaagccccaaccgggagatgcccgaccgcaaagagaaagcacacacggacgcgtggggcgaccccggaaaccggaccggg

SEQ ID NO: 121069 - DNA, 526 bp, Arabidopsis thaliana columbia
gcaggcacgcgtgcgtaagccgggacccactagagcggccgccacccgttcgaggacgcgtgggcggacgcgggggtgggtctgatcctgaccacgacgagaaagacagcacgcacaacagaatcaagagcctagtgacgggggaagaaaaacagcacaagagaccagagccccccctccctgcgggggggaggaaaggaaagggacagaaaacaaagctggcccccccccaagaccccgaggcggaccgggcccaaacatccaaagggagccgcgggaaaaagcaacaccccccgaaccccggggggacgaccacggcccgggggagaacaccgcggggggaccccccaaccaaggaaaggagaatcccccccccccccccacccggggccgggagacacccccgccccaccaccccacggacccccccccccccccaaggggcaaccccccggagggccccccccacccaccccctggaaggaaaaccccccccccccccccccgggaacccccccggacaccc

SEQ ID NO: 121070 - DNA, 534 bp, Arabidopsis thaliana columbia
  unsure (1)..(534): unsure at all n locations
gcaggcacgcgtgacggagctgggaccctttagagcgggcgccctaccctttcgtataattaaaaaaaccatgaaggggggtcagaccaaatgcacacaaatacataggcatttatgttaggcgaatacaaatatgtaggaacaactcggagaaatgactgcttcacggatacnccagtcgctcttctatgcgcggcaccaggaaggggcgacacgccgcnggcgcgcacccaagaaaccagcggcgggggcacccacactttgaaggggagagaggcgacgcctaggaggctattcggtttcgagggataactaaggcggaaacttcatagagcagtccctttggcccaaacaaccagataccaaaccgaggagatcactgcccctcctataacacatgcgaaatgggaacgtgcatgaagaagaaaagacgcaatgagagcgacaaaaataagcgagagagggtaaagggcggaacaaaaactggccctcccggcctcagaacctccccggaaacaagacgggaccccgagc

SEQ ID NO: 121071 - DNA, 531 bp, Arabidopsis thaliana columbia
  unsure (1)..(531): unsure at all n locations
gcacgcctgcaggtaccggtccggtatttcccgggtcgacccatccgtccgcaaaatttcaataaccatggagggtgttagtgcaactatgcataagttaaggccttatttgttaatgatctttttgcaatttggagcagcaggaacatatattgttattatggccacncttatcctccgttttaggcgggacgncgnaanngnggattcgaancaagaggctgccctnngccttgcaccttttgcactcatcttttgaaaggaaagtgaggccgaaaatgacactatcgggtttgtggaaaataatggcacttggtttcttagagccagtcttggatcagggttttgggtacttggggatgaacattgaattagcaacataaacatctgcgatcatgaacattcttccttttgcaacattataatagctgggattttaagaagggaaaagttaactatgcgggggacgaaccaaagcaaaaatattgggacattggggggtcttggaggggcccaataatgacatggaca

SEQ ID NO: 121072 - DNA, 544 bp, Arabidopsis thaliana columbia
  unsure (1)..(544): unsure at all n locations
caggcacgcgtgacggagctgggaccctctagagcgggcggccaaccgcggcgaacctccgaacaaaaacaaccagaaaggaagcggcgcgggaaccaaagagccccagaaggcccaagagccggaaggaaacaacacccaaagaagcaggaaccacaaaaaacaagaggaaaaaccccttcccccggggggcggcngaaggaacgaaggaggaggccaaaaaccccccaaaccggggaaggggggggccccaggaaccgaaccgggaccgaccgccggagaaaacaaacggacacggcagacccaccccgggcaaacaaggcccagcaacggccacccgaaaccacccggccggaaaccggggggcaccggacgaagaccgccagcacccaaccagcccaaagcccgggaaccaccgggggcggggaagaccccgaggcgcgggacaacgaaccgccagggggcccccgcggcaccccccagccgcgggccccccaggagcggcaaggaccgccagaagaaagaacgagcgaagccgcgaaca

SEQ ID NO: 121073 - DNA, 587 bp, Arabidopsis thaliana columbia
  unsure (1)..(587): unsure at all n locations
gcgcctgnaggnaccgggccgcctttccggggggacaaacccggccgacccncngagcccacaaaaccgggaaggcanaagcgcaccacagcagcaaccaccggaaccccaaaaacgggaaacaacaagagcggcttctccttgggagaggagtggcttttggcagcctctttcaataaggttgtgggncncaanaacaggagggcgggacagaaaaaaaccccccaggcgggggggagcggggggcaccacccctcaagagaagcccgganncganngccaccacgagaaagaggagaggagagccaccgcagcaggccccgggccccaaacaaaaagccaagaaaccagcaagnaagccaaacccaacagaccgccccaaaaaacccgggcaccgaaaagaaagaagagagagaccccgaagcacgcccgggaaggggggggggcccacccccccggaagagggccacaggaaaaaggcccacagaacaagcaccgccggggggcgcacaagaacgagccccaccccccaggggcgcgcccgaggaccagcccaaaagaacaaccagcggaagcaggacaaagcc

SEQ ID NO: 121074 - DNA, 528 bp, Arabidopsis thaliana columbia
  unsure (1)..(528): unsure at all n locations
gcaggcacgcgtgcgtgagctgggatcctttagagcgggcggccttccttttttatgatttcgactacaaaagggggggccagaccggggaaaaaacaaaagaacctcgagtttctaggcgacgagtgacctagactcatgaaacgaacaaacaaatcgcaagctaggcgaacatcccctctcttgaggggggaaagnngaaagaacaaaacgcgcatagaggacccccgagaggagggggcgaacgcacacaatagcacaacgggccaaaaggggcacatccgggggggaacaaaacggaaagaaggaacgtaggagaaagcgccctgctctgtcgcgaaagttcagcaagaggaacggctctgagaagaaaaaaactggacaggcatgtccgtggctattcgaagcaaacacggaacggagtgcccgcctacttaaagacagccctggaagaaccccccatcgaccacctgagctggcaccagcgccaaaacccctgaagggacccggataaacaaagattcgaag

SEQ ID NO: 121075 - DNA, 526 bp, Arabidopsis thaliana columbia
  unsure (1)..(526): unsure at all n locations
gccgggacgcctgcaggtaccggtccgcttttcccggggcgtccaacgcgtccgaagatattgactaaaagtcaaacagtcgttaccggaatcaatggccgggattaaaacttctccggcgactattaagctcttcaccgttctattcctcattctcacaatctcatcgccacctccctccttttagcgggcggcaccnncccatggtccttcacacaaaacaaaaccctaatctcagtctgacgatcactcctcctccgcgtcgcaaacctacgcgcttcacgtggagacgcattgggttcgtctcgtgtacgagcaatggctgatgaaatcgatcgtggattagggctagggtttataagccaagcttggtctgttggttgggattatatgtggaattacccttggagaaagggagggattgactaccgggagatgtatggcgccattggggatctcaatgaccttatgggtttagtgcctgactttaatagagccgaatctaatgctgaaaaagctagctctg

SEQ ID NO: 121076 - DNA, 547 bp, Arabidopsis thaliana columbia
  unsure (1)..(547): unsure at all n locations
gggggggggggggggggccctggggggggggggagcagggcaaanaagnngcccggaggggggaaaaaaaaaaagaagagacccaagaaaagcacgcccttggagacggcagggggaacaggcgaagaggagaggaagggttgagggcccncctacaatcagncgtnnggaanannngngaaggggcccaaggaaaaaaaacccccnacggggggggggggggcaaacaaaaaataacggggaagcgcaaagcagagaagaggagggggagaggaggacgggagccgaacacgcgggccgagcagaggaggaggggaggcagccggggggccggcaccgagagcggcgaccaacaggggacgaacgggcagggaggagcgagaacgggacggagcagggagagaagcgacagggaacgagcaaaaccgagagataggcgcagcaaaacaggagagagaagggagaccgaggcgcagggagagtgagaacgagaccggcaagcgggccgcgcgcgcggaagaggcacgacgaaaccaggggccagcgc

SEQ ID NO: 121077 - DNA, 487 bp, Arabidopsis thaliana columbia
  unsure (1)..(487): unsure at all n locations
gcacgcgtgacggagccgggatcctttagagggggcgaccaacgcgttcgaccacgcgtccgcgaaaaccaggggaaaagaagaagatcaaaaaaaaaaggatgtcagaagaagaaaggaaggagaaagaacttccagaccaacaacgtccgaaaaaagaaagaaanaggcattcggctgcttttgaggggaggaaaaaanaccaggaggaagaggcgaaaaaaaacccaacaaaagggggggggccaaaaagaccggagagacgaaaacaaaggtcctcagcgggaaagggaaaaaagtcaggaaagccgggcggagaaaacaataacgggaccaggccagtaacgagggagggggggcccggacacaaaaaccacaaataggtgccaagggggggaaccaagggggggctgagatgagaaacaaaaccgccctggaaacggggggaagacccacgaaagagacccggaaaggaaacgagagatgg

SEQ ID NO: 121078 - DNA, 483 bp, Arabidopsis thaliana columbia
  unsure (1)..(483): unsure at all n locations
cgcctgcaggtaccggtcctgttttcccggggcgacccacgcgtccgcccacgcgtccgtgaaaaccaggaaaaaagaagaagatcaaaaaaaaaaggatgtcagaagaagaagtggtggtgttgaacttctggccaagcatgttcggagcaagagtgatcatggcatttcctcggtattttagggggggnncgagnacaaggaagaagatgggtttggtcacaagaccgatctattgctccaaagcaaccctgttaacaagaaaattccggttctcatccacaacggtaaaccggtatgcgagtccaatatcataagtcgaatacatcggatgaggtcttggaaagacaataaaactcttgcggctactaccttttgatccttgtgcaaaattcacatntgggatttttgggctgattttattgacaaaaaggtttgttgccccttgaaaaaaacccctgccaaagaggggccaagaacata

SEQ ID NO: 121079 - DNA, 539 bp, Arabidopsis thaliana columbia
  unsure (1)..(539): unsure at all n locations
gcacgctgtacgtgaagcttggatcctttagagcggcgcgcccatatcttttttttttttttctaataaaataaacaggttatccttttcccaacatatctccaaaactgttcaacaaaccgactataacattaaacaacttaataacaaaatcacaaaacacccaaaaaaaaagaaagagtagattttgcggggggcnaaccacaacgcccaacaaaaacaaaacacccccccnanngggcacccaaaccgccactttttataaggccaccactttccccaaggaaggaagaggggtatcaaaaaatcatgaagaaccggtgacgacgaaccaaacctatccgaatccgagggaaaaccgaccctgcagcgagcgcgatcagaaaacaaaggggccgagaaaaaaacaggcttggagcggcgaaacagagacaacatcaggatcaaacaggaaaggcctacacaaaagataaatcgaacacgcggcgagacagagagaggccacaggaaaaaatacaagtacgaaggagaaaacctcc

SEQ ID NO: 121080 - DNA, 623 bp, Arabidopsis thaliana columbia
  unsure (1)..(623): unsure at all n locations
ccgcgccgcctgcaggnaccgggccggattacccggggcggccaacacgcgccgccaanactaccaccggaaagaccggggggccccgccggcaccaaaggcccggaaaacggggcacccagaaccgcccgcggcaccgcgcccaccccgaacccccccgcgggcaaaacaaaaaggccgagcgacgacgtgctgcctcccagggaggcgggagaccccgcggaggcgcaccagagcagcaaaaacacgcgccccacgaaaggggcggcgggagaagcgccgcccaaagggagaacgaaagacaccggggcccagggaaccccgcacacggcgcgcgccgcgggccccccacgacgggaccgggcgcgcccaccgggcgcacgacgcggcccagggaagaggggccggccccccgcaagacgcgcggagaagaaggagcaaacggagccagaagccgcgcggggagaggcgcgcccccccgggacaccgggggcggccggagccacccagggccgccgaagnagacgggggcggggacggcggccggcccacagcgcccgcggggccgcggggacccacccaacaacaccgcgccccggcgcgggaacaccacccccgcgggg

SEQ ID NO: 121081 - DNA, 502 bp, Arabidopsis thaliana columbia
  unsure (1)..(502): unsure at all n locations
aggcatgcacgcgtacgtaagctgggatcctctagagcggccgccctacgctttctttttttttcccttttacgctcgggtctttcttcattttctgaccgagaaaaacagagcagctaaagagcattgacacatccaaccccaaaagggaccgcaaattaaagctgagagacaaacacctccggatttagggggcgaagacccgccaggcaaaggaaggagtcacaagaccccnaagcagaccccccccgcagaaacccaacagaaggcgaccacacgaggaacgcccgcccatggaagccccctgcccgggaaccacaggcttagaccgaagcgggaaaaacgtagcccgcccgaaaccccatgtgtttctcgcgagcttaataacattccaacgggcaccagacgtggggaggagatgggggaaggggacgagggataacgaacggcgcgcaagggccacgaaacacccgggatacaaagaggggagaaatttttgagc

SEQ ID NO: 121082 - DNA, 542 bp, Arabidopsis thaliana columbia
  unsure (1)..(542): unsure at all n locations
ggccggcacgcgngacggaagccgggacccacnagagggggcgaaaaacgcnnnnaagganaacgaaaccaccaagcaaggggccnacaacaaaggaaaaaggagcaaaagaaaccgcgacagacagggagcccacaaacacgccgcgaggacacaaaaaaaaggaacggcgcaagacccgctcaaaaagagaagacggnannaagaacggggggggggggcaaaaaaccccccacccggggcgggggggccacgcacaaaagaagcaagcacaaaggagaaaaggacccggaagaggaagcccaaccccaggcgggggagccccacccacngccaaccgggacggcgggggaaaacccgccggggccgccggaggcggacaaagaaagaaaccggcggcacccggccggaaaaaacacagcccggggggagcacgagagcaaancccccggaagaaggacgaaaagcccggcgcggcgaaaaaaccgagagaccgccggaaacccccgcgccccgaggaacagagaggcgcgcaggcgggg

SEQ ID NO: 121083 - DNA, 249 bp, Arabidopsis thaliana columbia
  unsure (1)..(249): unsure at all n locations
ccgggacgccngaggnaccggnccggtatncccgggggggccaccgcgnncggnganaacgaaacccnaacggggggggcgacaacgacggagcagggaggaacggcancacagccgagcagaccgcaaacaaaggacccccgaacgccgggaagaaaccaccggcnaaaaacccctcnncccctggagtcgggaanaagaagaaggaggnnnnnagcaaaaaacccccccccggggggggggggggac

SEQ ID NO: 121084 - DNA, 368 bp, Arabidopsis thaliana columbia
  unsure (1)..(368): unsure at all n locations
aggcgcgcgagacggagccgggaccccccagaggggggggccaaaccnnnnaaacannngnccggcggggcacgggggcgaagcagacccagaaaacaccagaaggcacggggcaaccggccgaaaaagagcaggccgagggggtaacccggaagcgccaccaaaggggaagagcccccttcacaaggnagcnaggagaacccggggggggaaaagcggcacaaaaccccccccngggggggggggagggagaacccaccaccacacgggagaggggccacccgccagcccccgcgaaggagacaacgcaggagcaaagcgacccgcccgcaccagggaagggccccaccngaaccggcggggagggg

SEQ ID NO: 121085 - DNA, 536 bp, Arabidopsis thaliana columbia
  unsure (1)..(536): unsure at all n locations
ccgcttgcagggaccgggccggccttcccgggggggtaatccgnncgcccacgcgnncgggggggnggaggacnaaagcagagccacggaganaccacgcaccagngagagcccnggttgaagatacaagggagggagaacaacagaaagagcggacannccnagaaggtcccttcncttgggtgtgagaaaccgagggaggggcaaaaggaggaaaaacaccccccgcgggggaggggggagaaacacctttagagggggccaaaacgcaagggaagggagggaaggcaaaccaccagggtgtgaatttgccggagacggggggcaaggaattagagacccctagggagggggccgggcccaaaaaagaaaaaaaacccgggagggggagggggggatgaaaaaaaaaaaatgaagtcgagggtcccatggggggagggggaaaggaaacgggggaaaccgggggggggggggagggaccccagggagggggggccctggcccacaaaacggaagcggggggagagaataaacgg

SEQ ID NO: 121086 - DNA, 501 bp, Arabidopsis thaliana columbia
  unsure (1)..(501): unsure at all n locations
gcaggcacgcgagacggagccgggaccccctagagcgggcgccaaccgtcgaaaaggagacacaacgagggggacacccgaaaggcccaaaagagcagaacacccaaagccagaaggaacaaaaaaaaacgagcgggcggcccgcgccgaggaaccctaaaaacagggggagaggnaaaagaggggccgaccccgcccgaagaaacccccaccaaagcggggacgaggaagaagaacacagataagaggcacagaagaggaaaaagaaaaggaggacacccccaagagaggcccgcgggggtaaacaaagctggcccacaggcgagaccacgacacaagaacccgggcgccccggacgcagcgacaatagaacccagaccgggagaaaggccgagaaaagccccggcaacaaaaaaaaggcaaggggggaaaggatccgaagaaaacagaacaaaagggggagcgcacccgcaggagaacagcaagccagcacccccaagg

SEQ ID NO: 121087 - DNA, 544 bp, Arabidopsis thaliana columbia
  unsure (1)..(544): unsure at all n locations
ggacgcttgcaggtaccggnccggatttcccggggggaccaacccgttcgaaaaattgagaagaaaacctaggacaaatacggtcttttttttttctttttatgggtcgcgaatctctgtcttgtgtgtcctcgccgccatcggcgactgcgcccagnacctgcgggggcgtttttaacttttggtgtgggcnnnnganttcatccgactgatgagagaactccccagctattacgggaagaggaacgctcttgtgaaacctggacccttcgatgccaatggggagggagatatccacaagcatgagccctgggaattaacaggggtttcgaaggtgaaaacccggaccaagaagggacttctttagaggggtaaaaaaaaaacacggaatgggcgcaggatgaatcgagcactatcaaggggcaccggaaaggactgggacagacagaaaatccgcagggagatcagtggctcggcgagaaaaaaaccctgtctcccacaacggcgggccccaaacggcttgggacaagtggggaagcagaaa

SEQ ID NO: 121088 - DNA, 490 bp, Arabidopsis thaliana columbia
  unsure (1)..(490): unsure at all n locations
ggcacgtcgtgcggagccgggatcctttagagggggcggcctctctttttaatcacgcgtccgcctcacacacgggcaaagggaatggacaaacactgaagaacacgaaaccacacctagtgcttaacattgatggagacccataacctggagggggatacacaaagaaaactcgcttcgctttgagggcaggnnacccaagggaggacacacgggagaaaacccccccacctgggggggcggggcaacccttatatacaacgccttaaggggagagggcaaagcacgcggagggcaacggcctgaattctcaaccccccaccaaacaggaagagccaaataaaaaatctggaatgcgaaaaaaacaacaccccacaaatccaataacctgcatcaaacccctcaaaaaagaatgaaatgaggccctgcccacaaagatggaaccccctgaaaaggaaaaaaagaaacacaaccccaacagagggcgaag

SEQ ID NO: 121089 - DNA, 545 bp, Arabidopsis thaliana columbia
  unsure (1)..(545): unsure at all n locations
gcggggacgcctgcagggaccggnccggcttncccggggggacaccacgcgtccagccacgcgtccgcctcacacaggggggatcagactggacacacctataacattacccgtatcctcaatgagaagaaatccgagatcaatctagacgcttacaacggggacagcaagcnctccccctacaagagaagtgcncggngcnccaaggacgcagcnnaggaaaaaacccccccaccaggggggggggggccccccatgaaggaaagctcataanggggaacgcggaagaaggcaaagacagcaacagaggacaagcgcggggacgggcatccgaggaggaggaagaagaaggagcaagcaggacccgaagggggggcgaacggagggccagagaggcgcctggccgccgcacccaagccggcgagggcccagaacaacagagaggacgggcccaagggggggaacgaaacccgggggcgccaagaggggaggagccacggaaacccaacggggggaggcaaggaggcagcaaccgggagaggggg

SEQ ID NO: 121090 - DNA, 403 bp, Arabidopsis thaliana columbia
  unsure (1)..(403): unsure at all n locations
cggcacgtcgtgcggagctgggattttttagagcgggggaccttcctttttttttatctttctttcctttaggggtcttgagcttcttctccttgcgctgttcctgcagcttaaatcccatttagaaaaagaccacacggatataagagatgattagaagaaaggcanacaaattggctcctgttttgnagnngggaaacnacgnggggnacctnnacgagaaaaaccccgggncaacggggggaaggacccagagaagaaaccaggccaaacaacaaagccaaccgaggggcggcgaacaccaggcaaggagaaaggaccacaccagggcaggcaccaagggggggcacaagggaacacaacgaaggaacagccagaaccaccagccacagaaacccacaca

SEQ ID NO: 121091 - DNA, 540 bp, Arabidopsis thaliana columbia
gcaggcacgcgtgacggagctgggatcctttagagcgggcgaccttccttttttagaatcgggactagagtgaggattccttgaaaattaagatcgaaaggctaaatcacagttgctttcttagaatgggagaagatgtataagtcggaagtatgcctaagctaaagaacttgcctggagaaaaagggggaagaaaaaaaaaaggaacggaacaggaaaaaaacccggggaagcggggggaggaagaaaactatccaagaaggggggcgcggcccttgattttttgatttttgggaaaactggggaaacaaaacggaggaacagaaaaaaaccaccgataaaattgaaagaggggagacgcagaatttctgaaccacaccagacatggggggggacgagaaaaaaaaaaaccaaatgctttgggcaaaactaaatcccccaagggaaagggaaaagcgaggcacaatagaaaagcgcccgcaaaacttggggactacccactctaacccgaggaagctatcaccataaaaaaaggccaaa

SEQ ID NO: 121092 - DNA, 527 bp, Arabidopsis thaliana columbia
  unsure (1)..(527): unsure at all n locations
agccggnacgcctgcaggtaccggtccggttttcccggggggacacacgcgtccgaaagacctgagcaaaaactgagggaaaaaaaaaaaaaaaaaaaaaaagacttctcctcaaaaatggcgtttacactaggtggaagagctcgtcgtctagtctctgcaacaacagaacaacattcctgctgtttagggggcngcaacaaangggatcggaccgagaaaagcccccgcgaagcagaggcggggagaccactacccaggagaacaaacagggnncaagaannaggaaccagggaagaacccacggaccnaaacagagaaacagagacaagcgccgaacccccggaggaaangagacacaganncccggaaaccaagagacaaaagcacccaccggagagagaaaagagcaaagcccgggccacagcccaaacaccaaagggaanggcgacaggaagcgcaagaccaaggggacggccaaccaaaggaccaggaagccaacccggggaagccccaccacccgaaaa

SEQ ID NO: 121093 - DNA, 173 bp, Arabidopsis thaliana columbia
ggccggcacgcgtgacggagctgggatcctttagagggggggcaatctgtttttaattattttttcatttctaacaaggggaaatatatatagatacggtccccctcatgggaaccatggatatattttgacacattgcatgatgatagtgccacgaataacacacacagaga

SEQ ID NO: 121094 - DNA, 572 bp, Arabidopsis thaliana columbia
  unsure (1)..(572): unsure at all n locations
gcccccacgacngnaggnaccgggcccctanacccggggcgacagcagcgnnncaacaaaannancaaccacacaaagggggaacnaaaaacgaanaccacaaccccgccacaggaaccaacgcacccatacccgaacagcaccacaaagagaaggagacgccacccccaagggaagnccaacaagcccgcttcccactcagaacgatgagacaaacggaaaaacgaaacccgaaaaaaaaaaaaccccccccccacgagggcggagggggcaccaccaataaaaacaacaacccacacccaaagcaaaaaacacacagccgacacacaaaaccacataacccacgacccaacccccaaccagcaccacacacaccaaccgaaaagaacaccacaacaaaaccacaaaaaacaaccccaacgaagaaaaaaaacaaaacagcggcgaccaaacacaaacacccacacaagcaaagacaaaaagaccaaacacccacagacaacacacaccacaaccacaagaaacagacacacaccgcgccgacaaacaaaacagcagagaacaccacacac

SEQ ID NO: 121095 - DNA, 526 bp, Arabidopsis thaliana columbia
  unsure (1)..(526): unsure at all n locations
ggcatgcacgcgtacgtaagcttggatcctttagagcggccgccctttttttttttttttgattttatctccagaatgggcaggagacataatttggatctgttttaataaaaacaaataagattttgattacttacaagctcaggatttgacattttgactgtgagagaaagagagactcacctttgaggggacagngngtagagagtgttgtttatggtgaaagaagcatataatattttgatgttgcttttgagttattttttgatgaaaggtttttgacagacgagaagtctttggtcactaccatcttgaagatcaatgactcttgcttcccaacgcactcgagctgcaagtgctcgagccatctcgattactcccactttgtcggttagaacaacccatccctcagggcgaagaatccggtccatctccaagaacaaggccattaggctggatcggtctgagctaagatgtgtgagaagttcattggcatgaagcatgtgatatgttcgaggatatgtcg

SEQ ID NO: 121096 - DNA, 486 bp, Arabidopsis thaliana columbia
  unsure (1)..(486): unsure at all n locations
gcacgcgngcgnaagctgggatcctctagagcggccgccctctttttttttttttttttctttcctatgtggggtttttatcccagaagcctgcaaaaatatttatattatgaaaacttatatttcaggggcccgtcatccccaagtcgggggggaaacaaaaagcgggattcctccctattagagggggaagccgagacaaagacacacagcaacagaaagcgcccagagactgttgcggacccaccatatcaagcgatagagacagagagacccaggaaaaaatatcacatgggtgaggggaggtgagaacaccaaagaaaaaaggaagagaagatgaaagctactcccaagactttagaaccctatggagacccnttggcggttctggtggattccatccatcaggcctactacgccgggcatagacatatcatctctgtaaacaaaagacgccatggcgaacgggggggaatcaaacacaag

SEQ ID NO: 121097 - DNA, 537 bp, Arabidopsis thaliana columbia
  unsure (1)..(537): unsure at all n locations
gccgggactcgtgcaggnaccggnccgctatacccggggggaaatctcgtttagncctcttcttccacttccagaggaaatcgcttcctctgtttttttccgatctaaattcacagctcatttttaaatgggctcacggcaaggaccaccgaagcatcagaacaaaagcggcaaatccctccattttgnngnnggagancaacgaagacggaagcgggggaaaacccccaccagggggggggagggccccacctttttaccgatgtcgagagcagataccccggaaacgcgaatacgggaaatacaaaaccctaactggagccaccaggagtcgagaggggaccaagggaagaggcgcgggaacataccacaagggtagcgcctgggtgggccaacgagcaaaaagggggggcaaaagggaagggaacagggagaacagatgccgggaagaaatatagacgaaggagaggccggcaagaacgcgtggatgagaacttcggaaattcgggggaagaagaagagggcccccggaaggag

SEQ ID NO: 121098 - DNA, 542 bp, Arabidopsis thaliana columbia
  unsure (1)..(542): unsure at all n locations
caggcacgcgtgcgnaagccgggaccctttagagcgngccgaccaacccnnnncaangacgccaaaaaccaaaagagggcgagcagcgcaaagaacggaacccgcgaagacaaagcacaaaagatttaaacacggccggctaaaaggacgggagacaaacaacgggacaaaaaatttttttctttgggggaggaancaacaaaggggggggaggaagaaacaccccccccacagcgggggggagccaccccaccanaacccacggcgccccggacagacaccaaaaagggggaggggggccacggagaaaccacaagggacaaaaccgcgcccgcacacccccggggagcgcccagagccgcaaccgcacgggaaggaggccgggccagaagccgccggggggcccagggcgaaccaacaccgcgcaaaaagaggagcaccggagcaagccaacaccaaaacccccccaaagaaaccnggaacaaaacaagaggacccaccggaagacgaagccccccagggaccaccccggcggcaaagca

SEQ ID NO: 121099 - DNA, 587 bp, Arabidopsis thaliana columbia
  unsure (1)..(587): unsure at all n locations
caggcacgcgagacggagccgggacccactagaggggggggccaagcgttagaaggaaagaagccccaacaaagaggggcaaccaacagcaaacgcggcaacgacagaggaaacccaaagcccggaaacacaggagcagaccgaacagcatgagacaacaccgcgcgcggcgcgaaacaaaaaacaggaacacctacaaagagggnggccgganaaacccngagggcgccccacgggggaaaaacacgccacgccnaggcgggcgggggacggccaccaaacagcaagaacaggcagcgccccggggaacaaccagcggaacgaggccgaaggacgacaagaaaaaagggggagaaccaggaacgagccacccaaggggagaagaagacagccccggggcgccccaacaagggcccaagaagagaagacgccggccccgccaaggggcagaagagggaaggggccccgaggaaaaacaaaagggggggagagaaaaaaaacaagagaccgggcccggaaaaagggcgggcacggacaaggggaacaggggagcagggaccaccggggaaaaccaaaagagggggggg

SEQ ID NO: 121100 - DNA, 540 bp, Arabidopsis thaliana columbia
  unsure (1)..(540): unsure at all n locations
cgggcacgcctgcaggtaccggtccggatttcccggggcgacccacgcgtccgcaagaatcgatccaagaatctgagtactacacacataaactcttcctcactgcaaactacgtcctcctcggtgcatcgtcaagctgcatcttcctcactctctctctccgacaaaacccaacacccttgctgttgggggcgganccnccnncacgccaccacgancgcagacgcccccncaggcggggcgggcgcaccccatggtaagaaccggngggacncaactcacatgatcgcaactgtccccaccgccattttccaaggctcagaccctggcccatccttaccaacactgcgaaatgcccccgagagccccaacccctcaccgacgggaagaaaaaacgcccaagaacctgaaaccaacccggggggccccagggcagaaaacccatgccctcgagtggaacggcccgcggtcacccccccccaccgaagaccaccccggacggcgagggggaaaccaagggagggccaagaaaaggaacgg

SEQ ID NO: 121101 - DNA, 576 bp, Arabidopsis thaliana columbia
  unsure (1)..(576): unsure at all n locations
caggcacgcggacggagccgggaccctctagagcgggcggccacccgttcgattttaaatcgacccaaaaaaggggaagcactcaaaagagagaaaaagaggcccaaaaaccgcggacgcaccaggaaccaaggccaaaacagagaagggacaagagacaggccaccggagggaaaaaggccacaccaggggcgtnggaaaaannanagagagnngngcnggaaaaaaacaccccccancagggggggggggagggcaacacaaacacagaccaggccccggagagggcgaggaagaaacgcgggaaacaagcgccgggggagacaggaaaacagcaaacagacaaaaagcaagaggncacccaaagaaggcggacaaaaaaaacggggaagaaaccgagggcccgggccaagaggggaaaacccccggacacgaggacgccccacaaaagccgggaggcacacagagcgcaaaaacaggaaagagaagaaaagaaaaggcccacggggaaaagaacgaaccacccaaaggaaggaagaaaaaaaccgacgaaagggaaagaaccaacaggggaaa

SEQ ID NO: 121102 - DNA, 537 bp, Arabidopsis thaliana columbia
  unsure (1)..(537): unsure at all n locations
gacgcctgngggaccggnccggtctccgggngggtcatcccgccgctcaatatagatcatgcaggggctctatcttattttctggagaagacgacattcaatgggcgggttttcatgacacatgcaacaaaggccatctacaagctggagctgacagaagaaagatctttcttttgagggtgtgaggaaganatgggggtcgatgaacaaaacatcaccaagtctagggacgagattgaggacattgacttccatcaaacaggggaagtgaaaggcataaaggtctgggtggtacacgggcaggccatggtattgggagcagccatggttatggaggatatacgtggggtccgaaacctcaataaaggcgaactaatccggggaggaagacccgcatctgagagcaagtggagctggcaaatactaccctgactaatgcataattgaatcccactaggggggccaggtagaaaaaacaagagtaaagggggaaaaaccctacagggatggaatgaatacaaacggcgcgaaaggggg

SEQ ID NO: 121103 - DNA, 535 bp, Arabidopsis thaliana columbia
  unsure (1)..(535): unsure at all n locations
gcaggcacgcgtacgtaagcttggatcctttagagcggccgccctttcttttttttttttgttgtaaggcactataggattagaacgaaactacaaggggacggtgcttccccaacttgacgagattacattattacaaagcgaagaatgaccattaattgcctaaagaaggatgcctccctcttcggggggangaacgacaaacgggtgaaaaaaaataactcatcggtggtctagaccagaatctcaacatgccatctgaacatttcctccctcgtcaccggcagattcaaagtcacaagcccaacctcggcgtcgtacgtgaaatcaatctctgggctttcaacggcgcattttagaggacgctgagaagagtaagctccaaaacgaccacagcctctgacactgacagataccagagctgttggagaacggttatcgctgagcgcgggagaagccgaggagacctctccatcgaagaattcaggattcttgtcgggcacgggattgaatcaatcgactcgattgctccact

SEQ ID NO: 121104 - DNA, 526 bp, Arabidopsis thaliana columbia
  unsure (1)..(526): unsure at all n locations
cactcgtgacgtaagcctgggatccttctagagcggggcgcccttctctttttttttttttgtagctcacagaaaggggggttttctcccagacatcgaagaacctacttgcgatgtggacgttttctcagcagataggaaagaaattaagctttaggctgaggtccaaagagaaaatccccctctcttggnggggaggggganacggagccctaaggggagagggtaaccaccccttcggggggaggaggaccgcgtatcaaccacccatggctatgcctctacgacaccgtcggccttgatgcaaccatccaatgtatgaagcaaagatatacctctggcaacaacggtctttcaccattcacacaggcctgaggcgcacacctgattggctcaatagtgagctgtcgggacgcttgatacaaagcaatccctacactcacccggggatcaagacttctcccatacgggggtaccagggcaagacggaggggcccccccccataaggtccgtggacgcagacag

SEQ ID NO: 121105 - DNA, 519 bp, Arabidopsis thaliana columbia
  unsure (1)..(519): unsure at all n locations
cgcctgcaggtaccggnccgcttttcccggggcgtcaccgncgccggggaatggagagctggagacggagcagcatagcatcaaggacagaggcaccagcggtcaagtggccgtctatttccctcgactgagctgaacgcatcccaagggcaagctagctctccccactccctgctcttccggcgagaancagccgcaagcactgcgaggagaaganaaaccccagacagagaagaaagancccccgccgcgaggggccggaaaacgaggcaaggaacatgcgaggagcaagccgactgactgagctctggaccctcgccagattcctgcgaaaacaggacgcattgcaagaacaagcgctgcctcagctgtagggcccgattcatgggggccataacgaggccaagcggaagacgccagagttaagcgagccggctgagaaattggaccctggaggcaggcaagcgcaaagcacaggggcgaagtccaaaaaaaaccaggctccaagaaggagaaaaa

SEQ ID NO: 121106 - DNA, 397 bp, Arabidopsis thaliana columbia
  unsure (1)..(397): unsure at all n locations
cgtctgcaggtaccggnccggctttcccggggcgttaatcgcgtccgcccacgcgtccgcccacgcgggcggntatcattcatctttttctacaaaatatcaaattcagcctcgaatgagatggatgttttgtaactcacgcaacaactcgatttcatcggaggaagattcctccctttcagggggganagccataaggcgnncaagacgnnacaggaccccgannggacgcggngaaggcgaaaccttaaaagaacccacacccgccggggggaaggcacangcgcncggcngcacagangaagaaaagagaaaagaaccaagggccacgaaagaaacgggccnagagacggagagaanggagaannacggcggaagcacacagaccaaanccaaa

SEQ ID NO: 121107 - DNA, 533 bp, Arabidopsis thaliana columbia
  unsure (1)..(533): unsure at all n locations
gcacgcgtacggaagccgggacccactacagcggccgcccagcctttttaaacatagttccccccaagcagggggaaaaaacaaaacgaaagagcccgacacacgaacacgcaaaacaacaggggaaacaccccaagagaaccgacacagacaccccccagagaaaaaaacccctacacaaaaggagaggagaacaccccccgacgccaccccaaaacaaaaaccccccnaggaggggggggccgccacacaaaaaaaacacaaccacacagcccaaccgccaacacaaaccccaacccacaagaccacggacagcaccaccccaacacgcagacaaagaccgagaccgcccccacaacgaacaccccaagccaaccaacgccaccccggccacaacacaacaccaccccacgcgcccccacacccgaccacccaaccccccccccccaccaacagacgaccagacaagcgcacaacagagccgaacaaccacccccaaaagagcccccaccaacgacaacacagcccccaga

SEQ ID NO: 121108 - DNA, 561 bp, Arabidopsis thaliana columbia
  unsure (1)..(561): unsure at all n locations
ggcaggcacgcgtacgtaagctgggatcctttagagcgggcggcctacgttttttatttggtgtgtttgttgaatttggggtttatcagccaaggaaacaggcatatatacaaaagcatggtgaaatgcatattggaggaggaaaaacatgggacaaatgggcgacccaaaaaaaaatccctggcttttcgggtggggcccgcnacggggactttactttctaaacaaaccaggggtgggaggggggctactaagtgtttcccggatgggtatgtccgcaaactggggagaggaagtgacaaccgggggaccggaacgcgccttggggggccgttaaggggccgaagactttcggggacaacgaaatggggaaggatgggcttggtgatggggtaggcagggaggggggggcgcggggatcggcccgagggcgggggagagaagggaagatcggtggggggggagagggggggagggaagcagtgagatgggaggggggagcgcggggaggcgcggagggaggaggaaagtggggcagggggagcgggaagggaggggggg

SEQ ID NO: 121109 - DNA, 539 bp, Arabidopsis thaliana columbia
  unsure (1)..(539): unsure at all n locations
gccgggacgcctgcaggnaccggnccggaaaacccggggggaccaacccgtccggcagggcgagccgccgaaaggagcgtcgaacagcacggcagccgcgggatgcaacagacagccggagcaccgccgccgacgaggagaaggcaccccggccacagaagagggggcagccacaagccccccctcccgatgaggagccgggancggaaaacagggcacccaaaaaaaaaaacacccaaggaacgggcggccgcagacacaacaaccacgngaagcaaccccgccggccagacgggcccacgaagcccacaaacgcggggacgccgcgggaaacaaaaggccccagaagcgaaagacggggaccacaagacagaaaccaancccgggcgccccaaggcgaaggggaccgaacggcgccaaaaaccaaaacgccaaccacgcgccccaaaaacgcaaccacaagacccccccccgaaggaacggacacccaacncccccacacgcggggaagaggcccccgcgcccacgaccgccgaagg

SEQ ID NO: 121110 - DNA, 377 bp, Arabidopsis thaliana columbia
  unsure (1)..(377): unsure at all n locations
ccaacccttttttattaacacttagcttttctttggggtttcattattttcttttattttgtaacagaaataaaagaaaattttttaaaataaaaagatgggttacatttcaatgtccgtgggagcaaacccttccctcccattttgaagaagggggcnagccgccggggcagagccaaaaacaccccacagaggcgagggggggggaggggtttaaacaaacggnaaaccaaaggcccagagaaagggcgcgcnggaccccaacaaaaaagccgcggaaagaaggggaaaaaggaccagcgggaaccacaaaaggcggcgccaaggggaagacaggaaaccaaggcaccaagaacaacgcgacgggaaaaaaaaac

SEQ ID NO: 121111 - DNA, 414 bp, Arabidopsis thaliana columbia
  unsure (1)..(414): unsure at all n locations
aacagaaanaaaagaaaataattgaaaataaaaagatgggttacatttcaatgtccgggggggcannccncgttctcctttttggcngangggnncnagccaccgagacaganccgaaaacacacaacagagcccgaaggccgcaacgganaaaaacaaacgccaaaccacanncccagagaaagggcacgccagaccccgcccccgaagcggcggaagcagcacgacaaaagaacaccgggaaacaaaaagggggcgcgaanngcaagacaagaaacgaagcgaccaagagcagccccacaggaaacaagaaccggggaacaacaagggggcccccgggggaacaangagaagggcacaagcgacanagcccgaccaaccacnacaagggggggccaaccggggcggaaacgg

SEQ ID NO: 121112 - DNA, 463 bp, Arabidopsis thaliana columbia
  unsure (1)..(463): unsure at all n locations
gacgggcgaaccangcaaaggggggacaaattttntcgaagnaatagaggccatatttgacggngaacacggcgcacaggaatccctcctgtttggctgttaggcccccaagcgaagatttttgcgttaaaaggccccccaagaagaggggggggatccccactttttgaaaccaaaagccgctccgtcgaaaaaacgggggggaaggcctaatcaatcccaaaactggggggcgcgataccaaaaatggggcctgaaaacatgggggccggaaacgagggcggagcggaatataccgcgggacaggccaggaagcgaaagggcggacaaggggtttgggccagggcgggtacacaacgacaacctggaccggccgcgggagacgggggaagcgacaggccgcagagggaaaaacggggaggcggcgaaacagaacctagcggggggccgaggggccgaaggg

SEQ ID NO: 121113 - DNA, 515 bp, Arabidopsis thaliana columbia
  unsure (1)..(515): unsure at all n locations
caggcacgcgtgcgtaagctgggatcctttagagcgggcgcccttttcttttttttttttaaagaggctcaaaatgagcattagaagcagcaaatttcataatagtgggatacttataaagctaacttagcagctagttaatgtgaagagaagaccaaccacacatccataaaaaaatttcgttccttctcgaggggatgggggncaaggaagaaaaccaaaannaaaagcaagaccaacaccgagnnctcgggcggcccaggcggcaccatatttatactggctaacgacaagggccaggacatttaggttacaccaagtaaaaacaggcatgttatacaatcccgccgttcctcctggataagcataggcaaccttgagccggatttttccaccagaccaacccttttccagcgtgggagtaacaagaaccaaagcttcactcaacattggacccctggaggatttgtgtcccactgggtccatcaccacccgaagtgattggattacattgg

SEQ ID NO: 121114 - DNA, 554 bp, Arabidopsis thaliana columbia
  unsure (1)..(554): unsure at all n locations
cgcggggacgcctgcaggtaccggtccggatttcccggggcgacccacgcgtccgcccacgcgtccgcccacgcgtgcggtttcaccaaggcccacgtcactcaccctgaactaaaatgcactttctgtctcgagatcatcgggattaagaagaatcctaacgggcccaaggagacaccccctcgttgtgaggggcaggggaacaancaccgagggcaaggggagagagcccggncttgcgacaccagctggaaaggttgtctggggaaaatacgctcaagggacaaacaatccagagacgacgggggtataaacgccggtctacctggggaaccaaaaggccgggacctgcgtagaagcatggatagagaccagaggaaggcgaaaaacagggcggccaggcgaatcgggcggatccccggaacaaagggggggatctcaaggtatgctaagaaaggcggggcggggctgcgctgcactaaacaagccggaggggggctttatgaagaccccccaaaaagaaagggggcaccgaaggccattagagcccgcca

SEQ ID NO: 121115 - DNA, 326 bp, Arabidopsis thaliana columbia
ggagggagaccctaagagcaaaaaaaccccccagaggggggggggggggaccccccccaaaaaaagggcacagaagaacacagcaaaagaggagaaaaaagcgggaaggaaaagaaggggacacacccacacgacacaagccacagcgcacgcacaacccaccccaaccaaaccccccacagcggcacgaacaagagagtacacgaacgcggaccacgccgccagaaagcgcagcagaccgacgcaccaaaacccagccacggcacagccccgcacccaccaccccccgaccgaggacgaacagcggcaccggagacaacgcagac

SEQ ID NO: 121116 - DNA, 522 bp, Arabidopsis thaliana columbia
gcaggcacgcgtgcgtaagctgggatcctctagagcggggcgacctatcgcgttcgaaaaataaaacttgttgattagggaatataaggtgatggtggtctccccaaagggcacagagaagaagagaaacaagaggccaaaggaggagaaagggaagagacaaaaaaaaaaaaagaaaaactccatttgggggggggagagcacggaagggagttttccccggaacggccccaaggggaaaggagaaggaggcaaccatggggggcgccaaaggcggaagccacgccaatggcagccaaagcaggggatgaaagaacggataaaaaacagggggggaggtttcgcgggagagaccagacggggcggaaaaccacccacaggggagccccggaacgccggcatagtgaaggaaaaagggggggggtttggacaagggggggaggccactcaacggaaggagaagcggggctgaaaaaatcgacccagggttggcgcccacccaacccaaaaaagggcgggggc

SEQ ID NO: 121117 - DNA, 511 bp, Arabidopsis thaliana columbia
  unsure (1)..(511): unsure at all n locations
gcaggnacgcctgcaggtaccggtccggtattcccggggcgacccacgcgtccgaaaaacaaaacaagagcactagagaacacaagcgagaaggaggtcaccggaactagccgcagagagagaggagaaagggaccacaccggaggccagagaggaggcacccaacagggaagcggccctcaaacataggaggggagaaagaaggaaggaaaacacaaagagaagaacccgcagcagcgcagcggaggaaaacaagaacgcggccagcaaaaggaggagaacacgaccaagaccctgaaaggcacgaaggataagaaccaggagaaaacgagggcgacccagaagcggaaggggaaagacccggagattgagaaaagagacaaagaggcggagccgaaccaagaccaaagggcgaaggcaacggatgatgggaacaagccgagccagcccggagcggggagaacggcccgaagcaggagcccagccagacacgaacagtacctaccacaac

SEQ ID NO: 121118 - DNA, 513 bp, Arabidopsis thaliana columbia
  unsure (1)..(513): unsure at all n locations
gcacgcgtgcgtgagctgggatcttctagagcgggcgacctccctttttttttattttttcttcttgggagaggaaacccactagtaataataggcgaccaaagaaacaaagctgtcttttaaaaaaatcgtgatcctacaaaagtcgggatactggaattggaaggagatctcctccctttgagngcggggggacagcagaagaaaatcaaaggnccaaaagcccgaggatccctgagggaaacacccgccataataataaccttagaaaactcggttcggaggacccattgggctcttcaagtgcaagcacctcacaatttggcaggttttgttcaagagagaaacgaggaaggtaacactcttgtgaacattttgaaagagctgcctctcctccatggaaagattaccgacaggcaactccaaacatagaaccctgttgagctggaacttaactggggcccttggcgattcgatttgggggcaaagactgttggggggaaacaaagtggg

SEQ ID NO: 121119 - DNA, 471 bp, Arabidopsis thaliana columbia
  unsure (1)..(471): unsure at all n locations
cgcccgcccacgcgnncgccnncccacaggaagtaaannngnnncagggaggaccccaaagagaaagccccattttgaagcccggagagaggcaataagctccattatcactcaccggaaggagtcccctcctctttgggntgtnggagaccattgaactccagattggtataaagaaccacgaccctcgggaggagcacatatttttttggtctgtgaaattgcctcacgttgctaggccaaggatgaagatttgcatgcttggtgatgcccaacacctcgaagaggctcgaaagattggattggaatcgatggatggggaagctgttaagaaagtggacaagaacaagaaactggttaagaacgtgggcgaaaaattggctgcttgggctggttgtgaatccggggttaaggagattgctgaggtgtctcgccccggccgaaaaaggcacaaaaataaccgactcttgg

SEQ ID NO: 121120 - DNA, 317 bp, Arabidopsis thaliana columbia
  unsure (1)..(317): unsure at all n locations
ggcgtgcacgccgtgcgtgaagctgtggatcctttagagcggccgcccaaccttttctatggtgttttcagcgggggagagggcttcaaaaaccgggaaaagacataaggggaggacattgaataatattgctatgacaagacaccgaccccggcagaaaagagaccaagagaaaacgactgctccntttagggggggaaagncnnacgggaagactgccaaaaaagagacacagctttctgcaccgcgaaaaaaaaggagcagccacaagcgcgcngcaccaaagcccgccagggaggccacaaacaccgcagcac

SEQ ID NO: 121121 - DNA, 504 bp, Arabidopsis thaliana columbia
  unsure (1)..(504): unsure at all n locations
acgcctgcagggaccggnccggtancccggggggaccaacccgtnccganggngtngacacgcggaggagagccaaaaagaaaaccaaaactgacatttgaggaacacaaggagagccaccggcaacattatcacccaagcaaccccaggatctggggctaaggagaagaccctcnccttcaggagcagggngncaagagggaaaaccgggaaaaaaaagcaccaaggccggggggcgggagaacacagattaaaccgcaaaagctattcccgagacccggcagacaggggagagaaacaacccgcggggccgagagggggaacccaaaaaagaacatactggggggccggaaacgggccagcggcccgaaaagcccctagggcttggaaaacccaacccgcacggggccggctgggaacaaccgacagcgggggaccccccgcccccccccctaaaaaaaagaccccacgggaaaagggggcccaggagaaagagccccaggc

SEQ ID NO: 121122 - DNA, 516 bp, Arabidopsis thaliana columbia
  unsure (1)..(516): unsure at all n locations
gcacgcgtgcgtaagctgggatcctttagagcgggcgcccttcgttttttttttttttattttctttctggtgggtgagaaaaaccaaaaaaaaaaaatctagggcgggcggagggacatttcgtcattaataacccgggaagaggtttatcacatgtatagaaacaaagatcgctccattttcggggggggnaagccccccttgagcttggccagaaattcacagacgtcaaaagtgtgtgccctctgcagaaaacccggggggacgagttgtgattcccaagaggaaaggccctatgcatggcggagcgtatggggctaaaacttgagggagcttccacatgccactgggtgtgtcccacagacattaaagcaacctcccaaagcatggttggaaggctcaacatgctgactttagacccgggaattgcggaccatttcacagaaatttgaaccgtggggatataaaaacgctcgcccagagccaccaattaaaatacaaaggaccaccttttg

SEQ ID NO: 121123 - DNA, 544 bp, Arabidopsis thaliana columbia
  unsure (1)..(544): unsure at all n locations
ccgccacgcctgcaggnaccggnccgttttncccgggggggaaaacccctcaaanncntctactccctcgcagaggggtgattgcttgaagcaaaatctcaaaaagggagaacgacgcaggttttggcacaaagcgctacattccaaggaaaagctgggcaacaaacagaaagaccctcccatttagaggagggcannnaagcgggacaaaggagacaaaaaaaccccaagggcggggaccgggccaacaccccactaaccgcacncngcggaaccgaccccgcgcacggagacgccaaaacgcgggcggggaaaggcccgggccaaaaaagaagggcgaagccaaaacaccgggaaagacaaaccggcacaggagaaaacaccggggaggcnaaagaggcggcaaaaaaaaacaagaggggccgggcgaggaggggaaaggggagaccggcaggagagagaaaaggaagacaacccccggcgaaaaaaaaaaacaccaagggcgggagcccggggaaccccacccgaacaccaaagaaaaaaa

SEQ ID NO: 121124 - DNA, 220 bp, Arabidopsis thaliana columbia
  unsure (1)..(220): unsure at all n locations
cacgcgngcgnaagcngggacccactagagcgggcgcccacccgnncgacnngacaaaaccccaccaggggaagggcggacggcagcncaaaacagncaaagcaaagaaacaagactgccaagcccagancaccaacaaaacagaggggccaaacaaagggccacgatcctcctctcggcggggaaaaacaaagaggacgngccacagaacaagagcccc

SEQ ID NO: 121125 - DNA, 185 bp, Arabidopsis thaliana columbia
  unsure (1)..(185): unsure at all n locations
ccggcacgcctgcaggtaccggtccggatttcccggggcgatccatccgtccgccttgacgccgntttcttcttggatcttcttcttcctccagagaaaacaacactggccactggcaacaagagacttctaggcnntttgttttgcctacagagcnnttatcttcccagcccttcccttcgacc

SEQ ID NO: 121126 - DNA, 532 bp, Arabidopsis thaliana columbia
  unsure (1)..(532): unsure at all n locations
ggcaggcacgcaggcgnaagccgggaccctcnagagcggccgaccaacgcgnncaaanaccngnccncccgaaggggggccagaanaaaaaggccgagagacagccaaaaaggagggaaagcggtcgggggggcggacccgggaaagccggaccgggaccggaagggggaccatctccttcctttggggggaggaaaanagcngggagaaaccaagggaaaaaccccccccggggggagaggggaaccacccacaaagccacacaacanacgagccggaagcaaaaaggggaaagcccggggggcccaaagagggagcaaacccacaccaanggccgggcgcccacggcccgccnaccagncgggaaacccgacgcgccagcngcagnaacgaaccggccaacgcgcggggagaggcggcncgcgaacagggcgccagggaggggggccnagcaccagggagacggcaaaagcggaggcccccaccgccgggcccggaaagaggggcaaaagcggccacgcgggcggcccaa

SEQ ID NO: 121127 - DNA, 526 bp, Arabidopsis thaliana columbia
  unsure (1)..(526): unsure at all n locations
gccgcctgcaggaccggccggctttccggggngtcatcgnncggacgacgaaaagnncgcggggaatcancnnngngcagcaacncccgaagaacccaganngttatggtactgatcgaatcaagtgagagtgaagacgagatcctcatcaaaaactttttcttttcanctgttggnanccncaccgaagcccacggagacaaaacaccccgacggagatggggggatgggctttttactgccagcgaacgtgaaattagcgatgaggaaggagaggaagagggacccaaaatgacgccgccccagtcaaggggaacccccagcactcggaaaagaaggaagaaccacatgggctattgagggaaagaagagcccatatgcggagacgggagacaccaggagaaagccttgggaaaagcccatggaggctaacggggagggaaaaaactggtgcgtaatggcgcatataaaaaaaactttgcctaaaggaggccttcgctttaaaagcgcggacaaggggtacccc

SEQ ID NO: 121128 - DNA, 468 bp, Arabidopsis thaliana columbia
  unsure (1)..(468): unsure at all n locations
cggagccgggacccgctagagcgggcggcccacccgtccgccaacacacacagacgagcgggggcaggccccacacgacaacaggggacggagcgcggggccgcacaaggcagggaaagaaagagaggacgacgacccagcaatcgccggccagagagaggagacgccccctcccccccggggggggagggggcgcaaggaaaccaaggcccggggcaagccccccaagcacggcgagagaggccggcaccagggcaaaacgagaagaacccaacgcgcaggggnaccgacgcgccaaggcccggggggagacagcccaccgggcggcgaagaaacgggggagcgaggaggaagagggaagagcgaggaccagcgggggcgggagaaacgcacacaagcggcggcgcgccagagaccacagagaaaacccggagccccaaaaggcgaggaggcggagaaggcccccac

SEQ ID NO: 121129 - DNA, 541 bp, Arabidopsis thaliana columbia
  unsure (1)..(541): unsure at all n locations
gcacgcgtacgtaagctgggatcctctagagcggccgccctacctttttttttttacaacaaaatcaatcattgatattgctcatgagctgacgcagctgattacagccgcaaacacagcgttctagggcgtacatcaacaaattacaaccaccaagaatcaaacccgagcttcccttctgttaaggggggannagncacanacactagtagagtagagatcaaaaccctccgattgagcaagagactgcatcttccattaaaccggcttgatcacaaagaggtttgacttctttcagcacatctcatcgccctcccagataactctctcctttggccctgggggaccttcttctccataaagagcaatgggaaacaaatcaacgatgtgctcaatagagaacctaacaaccaaaggaagaagatgcatgatcccatgggacccagacccggaatatatgcaatgggcggaccccattctctcatatactgaaccagccggctctatcacagaggctttaccaaaaactcaagggcaacag

SEQ ID NO: 121130 - DNA, 487 bp, Arabidopsis thaliana columbia
  unsure (1)..(487): unsure at all n locations
cggggcgcgtgaggaccggccgccttccgggggggcagcagngcagaaacaagccccaagaaaggggcagcnaacaacncacacnccggcgaccgcacccgcgcncgaacaccacgcgggggagggagagagcccgacgacgaagaagacagaggagaaaaaacctacacagggccgangganacaacggggaggccgnaacgaaaaaaaccccccaccgggggggggaggaccacacaccaaccaaggccaagggagggaggagggccaaccggggggggagcaaaggaacccggaggagacgggagggcgaaggcgggaaaaggggggagagggaaaagaagaggaaagcaaggcgggggagaggcgacgcaaggggggaaagggagggggacaaagcggccagagggagggcagggagggagaagggagggggcggggcggacagagggggggggaaagaaggagaggggcccggggggagaag

SEQ ID NO: 121131 - DNA, 532 bp, Arabidopsis thaliana columbia
  unsure (1)..(532): unsure at all n locations
gcaggcacgcgtgcgtaagctgggatcctttagagcggccgacctaccttttttttttctcatcggcaaccaagggggaattacacaaaaaggcacttattatttagctaacaaaactggcaaggccatggatgccaaactttacagtgcaagctttaaccacatcctaacncccgttcgtgtgggggggagaaanccctacaccaagaacactaaaaaactccaatctgtaagacccactggaaagacctctttcaagctgtgctctcgccaggggtggaggcacattctcaaatgactctcaaagggtcatctaacagctgcagacattcttgtggggcggcgtaaaagaagccttcttccttggggctattgggaatcactaaccgactcttagggcttcccattcgagtagagagaaacgccctcaccgggggtgaaaatacatcccaactcaacaatcctggaggaaactcatctataagcttaactaggaacctcctattaacgtggatagtcttgttgaaccccg

SEQ ID NO: 121132 - DNA, 504 bp, Arabidopsis thaliana columbia
  unsure (1)..(504): unsure at all n locations
cacgtgtgcgtgagcttggatcctttagagcgggcggccttttttttttttttttttttctttttggagggggagacctgattggtttgcaaaccaaaaatcaaaaacaaacaagagtgttataatttcgaatagatataattatcatttcacaaacaaggcacngggaaataagtgactcttatcgngtgggggnnnnnagccgaaccaaaagncggctgaccaaaggacggggggcgggaacacgaaaagttgtttcctctagacttcctctcgatccaagttgctactcttgaggatagttgatttgcaaagtgggcaagtcgcggggatgtataggcatttgtctacgcatgaacaggggaaatggaggccacaagggagttcccttagctctggtgcgtgtgcatatgcagagagacagatgcaacattctggatcttcttgcaaaagagtttggccaaggggtgaatcagtaccacactcatggattattcgcctggg

SEQ ID NO: 121133 - DNA, 508 bp, Arabidopsis thaliana columbia
ggcaggcacgcgtgacggaagctgggatcctctagagcggccgacctactctttcttttttattttaccaacaaagaaggggacccgggtacagatagaaataaatcacaagcatagggtattcagcttttcttaaaaggaaaacattgatctcctaaatacataataaaacagccggtcgtccctttggagggagggaagagcggcccgaccagcggagagactgagccctgcttgcatccagggccgaaacactagcaaagctgcctttggcagaaccatcggaaccatgtgtccagcatcatggacctctaggaaagtgagggaaccggaggtcctcattaaacccgctggtttgtcgtctacgaggaatggaactgacgatgctgctacaaacactttctggcctgaccattccatagggtgaacccactttgagtttacaaaccaactgcaaaagagaacgaattgcccaggataaacaaggagcgtaaatccatccggaaga

SEQ ID NO: 121134 - DNA, 178 bp, Arabidopsis thaliana columbia
tcccatgcacgctgtgcgtgagcttggatcctttagagcggccgccctttctttttttttttttaacgattcacatgtgcgcactcattatttcaccaaaagcaaagctcagtgtctattaatcaagttatagtggtggatctacacatgttcttattggatggggtccgcggccgga

SEQ ID NO: 121135 - DNA, 551 bp, Arabidopsis thaliana columbia
  unsure (1)..(551): unsure at all n locations
gccggcacgccggcagggaccggnccggtttncccggggggccaacgcgttcgaggntatgtcgatcggattctgcaacttcaccgccaagttcaacaaaactaagatagctcacaatgacttctcgggtgctaggatgccacctctttgtaaccattgaagaactctggagctcctcctcttcggggggggcaggaccagggcggccttcttccttgggccacaccgtgttgtggggggtaaagaaccgcttctttttggattttcttcatttgggtttctatatagaccttttttctcaagattaggctttatttgcctaaccagaatggggtatcccggagaaaaggccctttttaaaaaaaaaaaaaagggggggccgtctagagggatcaaagttacgtacgcgtgcatgcaacggaaaagtctttattagggggccctaaaatcaaatgacggggccggcggttacaacggcggggacggggaaaaccctgggggttacccaactaaaacggcggtgcgggaaaacccccctttcgccggggggg

SEQ ID NO: 121136 - DNA, 548 bp, Arabidopsis thaliana columbia
  unsure (1)..(548): unsure at all n locations
aggcatgcacgcgtacgtaagcttggatcctctagagcggccgccctttttttttttttttctttttttcgacctaaactatttttttatttatcaccgaaaaataacattttcattttttaatattcatcgcattctattagtacaataaatacaacaatacatgagncactcgctccctcaggtgaagcgggtcttgnggaaaaatcatcagcctcccatgctacttgaagggtaggaacggagaccatgagattcttctgctgtagaatctcttgacgctaacaaattcaccttgactatttcagaaagggagcttgaccgtgcgtacgcagccaatacactcatattgaaatccctgaaggggtcaccgcgtagagactgaacatacatcatggaaaagtccgagccgtttccctctagagttacatccctaagtcggcttccagtttgagcacaacaaacacggatcacattctcatcgcagcttccacttatgagggaggcattaccattcatggaggaggaccgggtatggttcatcgagc

SEQ ID NO: 121137 - DNA, 475 bp, Arabidopsis thaliana columbia
  unsure (1)..(475): unsure at all n locations
ggccggcancgcggacggagccgggaccctttagagcggcggcgcctactcctttctatgactcaataagcggagcacagggggcattccttgatcataaaaaaccaacggctaagatcagccctaaacactttccagcaagaacaaaacctattacatggaatacagaacaaacccacctcctccttcataggcgcggacccccaccnacggnnannaccacaccaaaaccccacaaagggggcggggagaacacacagcaggaacaagggaaggcccacacgaagacccccccaaaaaaaggaccaccacaaaaacaaggaagaacgnccccngggggggagcaacnccnaaacaaagaaaaanacagaaagccggccccggaaaagaaaaacaccnccgcggaagacaaaaaaacaagcccgcgacgacaagaaagaaggggggagagaaaaaaaaaaaaagcggaagcccc

SEQ ID NO: 121138 - DNA, 532 bp, Arabidopsis thaliana columbia
  unsure (1)..(532): unsure at all n locations
cacgcacgcgtgcgnaagctgggaccctttagagcggccggccacccttttataaattagccaccaaaacggggggactttcttctggtgaccctgagaaaccggcatcggaccacggtttttgatggccgcaaaaaggcagaagccaaccgggccggaaagaaaagcccctcaaataggnggggggcaagangaggggggaacagcaggaaacacccccccanaagggggggggggggggcgcccctctacaaanggagacacgggggggccgcgagaggcaacgaaagggggccgcccccacgaggcgcggggcgacaaggaaaatcccccccccccgcagggggagcaaaaagaaagcagggcgggggggggccccccgaaggccaagaagcccacggatcccgggggaggccgccggggaccacgggagcccaagaagccaaaggacgcggagaggcgggggggcaacaccccgccgcggggacgcccccccgcccccgggggggggagaggggggcccaccgagagg

SEQ ID NO: 121139 - DNA, 520 bp, Arabidopsis thaliana columbia
gcaggcacgcgtgcgtaagctgggatcctctagagcggccgcccaacccgttcggaaaggggtcaaacttggggaggcgaccaaagaaagcaaaaggacaccggttagcgaaaactgacacgagggatccagcagcagattaataggcaaaagagagaagcggcgccctcgatatagggggggggaaaaaaacccagcttaatcttccaggacccggcctcagagccaggggggggccacccatgactctcctttgggcaccgggcagctcccgtgaagcgaaggcgggacaagcgggccaccgggaaacacggaacaaaaaagaagaccatcgcctttccgaggccccacttccaacccaaaaccttggcgggaaaacggatccgggggccacaataggaacccgggcccaaagggggaacacgcggggccccggcctcccccacaagcagaaagcgacaacaggaagggaggcaccctgcggaaaagagcaaaggagggccccgagctccaaagaaag

SEQ ID NO: 121140 - DNA, 464 bp, Arabidopsis thaliana columbia
  unsure (1)..(464): unsure at all n locations
gacgccgcaggaccggccggtctcccgggcgaccaaccgccggaaaggcgcccgaattgagggcgtacgccggcgaagattcatcggaaactactgacgttacgccggcgaagattccatcggaaacttaactgacggaaggaagaaggctcctctaagcaggggaagagnacaggaggaagaagcagggaagccacagnatcggcgcgggcgccccgatcctcttcggtcctatggctcactctatttctcagaagtgcctcggggaaacccaggtgagaatggtggaacgggtgagaaggggaaaagaagcagctcgagcccatgggggacggaaaaaaacatgggacgaccccctccaggcccagggggaccaggggcaaactcccgaaatgcaccgcgaacaagccagcaatatgagagacaagggaaaccaaacctcggctgggccccggaaggggaac

SEQ ID NO: 121141 - DNA, 490 bp, Arabidopsis thaliana columbia
  unsure (1)..(490): unsure at all n locations
ggggggnggggggagggtctcttgaggagaggcggaaacccnnnaaaaaaaaaagaaacccccagancggggggaacgagacgaagcacgcaaacggccaacgccgcagaagccggaaaagacttggggcgagggcagaggcgccgacgagcgccagagcaaggcacgcgggaggaaggcctccctancaccatgagcgtnggaanagaangaaagcgagagtcgagcgagcaaaaaagcccccacgaaagcgggggggggggaggcccacccataaacgggagaggcccgcggaggagcaagcgcaagaggcacgcggcgcgaaagcgacccgagacgaagacacacaacgccagcaagaacgcggcccaccgcgagaaccgaaacaagaccggaaggagaaggcaaacaccggcccaacaacacagcagcagcccacaacaacaacgccaagagagacgacaggaagcgcggggcgccgcacagcaag

SEQ ID NO: 121142 - DNA, 531 bp, Arabidopsis thaliana columbia
  unsure (1)..(531): unsure at all n locations
acgcaggcacgcgtacgtaagctgggatcctctagagcggccgccctccctttttttttttgacaacgctgccgacctcttaaatctctgtcgggacgctaccggtcaccatcgactctctcgcgtcggctacatcttctccttcatcatcatcatcagaaggaacatcgacgcattcctccctatagcggggagagccaggaccaancattctctcatcaaagaagccgatactccctccatcaacatcatgattcttaccatcatctccttccttcttaacattgatgacgaccacatcatcatcatgattttcctccgcttgcttcttcacaacctctatatgttcctcctcttgattctccacaacatcttgaagatgactgccctcttcttgggtgatcacaactacttcttccttcacctctttaacatcatctttggagggaatctgttcataaataacctctttcttctcttccacattaagatcaggcgccggagcacccttagcggacgccctcaagctac

SEQ ID NO: 121143 - DNA, 554 bp, Arabidopsis thaliana columbia
  unsure (1)..(554): unsure at all n locations
gagctggggcgctctagagggggggcaaactnttttaaaaaanaggcccccaaaaggggggaaaagaaaaagnagaaganagaggggganaagacgggagaggacctggaggcaaacagggacaacgcgggcagagcaaaaaaggaagaaaaaagacaacttttcccttggncggangggngnnnanaaggaggggcaccgggggaaaaaaacaccccacacaggggggcggggaggggaaccgcaaaccaaaacangaaggaggggcggaggaagcagcgggcgagggcaggggaaagaggcggagggagggggggaggggggagggcggagggggcagaagagagggggggagcagagggagggggcaaagaagagaagggagaagaggagcacggacggaagccaggaagccacgacgacagcggagcagagggagacggcgagcagggaggaaggcgggaagcggaggacagggaggagcagggaggagccagcggggacggcgaagaaagcgaaacgcacacaagcaacgagagagaggagcgaggaac

SEQ ID NO: 121144 - DNA, 528 bp, Arabidopsis thaliana columbia
  unsure (1)..(528): unsure at all n locations
aggcacgtcggcgnaagccgggaccctctagaggggcggaaacccgtttttaacctagggtcggccaacgaagggaaaagcaaccatcaccaacacacaccctaagagaatgggccaggacaaggactattgcagacagatactagacaaatgtccccacnnagaagaaagcggctttcntcttggaagaggcnnaaaaagaaaaaagaaccaaacngagaaagcccccaganccagagggggagggaaacaaaaagaagaaggacaggccacgccgcgaagacaacgggggcagacagggcgaaggggaaaaacacaaccaccaccgggggacgcaccaaaaaagggacaaaaaaacccgaacgggcccgggaagaaccaaccacacacggaaacgcgaaaaaacacccccaacccccggggggggggccaagaaagggaaaagggcccgggaacaacaacacacaccaagggaccgaagggcgccaccgcgggggaggagggccaccaaaaaaggggaagagcgaa

SEQ ID NO: 121145 - DNA, 555 bp, Arabidopsis thaliana columbia
  unsure (1)..(555): unsure at all n locations
cgcctgnagggaccggncccctatagggggggggcatcagcgnccgaccaagggggcggccccagacgggancagacccaacgaaaagaaccaaccggagaagagagcacaagctggttgacggagcgaccgaaggcaaccggagaaggggggcgccaaacnccaccagaaacctcctttcccttagcgacggtgggnaaaaagagagcggcgccccctggcgagaagaaccccaccggctcggggggggggggggacacccaaaaagagagaactcccaaaaccacgggagaaagacaacggaaggaggggccgtgacaaaagaccgaaacaaaagaacgggatgcgggaaaaaggagccgcgacaggggagaaaagcagcagcccgagagcgggagaaaagcagcacacacggacaggggccggggagagcaaaaggggagaggcgacgacacccgcaaccagaaagaccggggcggggggcccggacccaacaacgggagggagaaaaagagaaagatacggaggaaggacgcaccagcggaagcaaggcgg

SEQ ID NO: 121146 - DNA, 530 bp, Arabidopsis thaliana columbia
  unsure (1)..(530): unsure at all n locations
gcaggcacgcgtacggaagctgggatcctctagagcgggcggcctctttttttttttttttctgtgattaaagatggagataagactaaactataaaatgggaacgatattcgagcgaaactgattgagattatagcagagacacttgtaatgtaaacaatcgaaagcaaagcttgcctgnctttagagggngaannangngaagatagggncnagaagaagaagccgcgagagggaaagaggaaaccccattgttcttcccagaaataagtacattctgaagaattgactgggagttcgccatctgctgatacaagatcataaggaagagcatctgcgaattctgatggaactgatttccagagaagtgaaggatgccattccgtttctttaaccacgctaaatatctctgccgctactattctgctatcttgtgctgacaaatgaataccggcagagaagcaacagttttccaggcatctgctctctgaaaagcagagaagagaccaaccacttctaggccgagttct

SEQ ID NO: 121147 - DNA, 426 bp, Arabidopsis thaliana columbia
  unsure (1)..(426): unsure at all n locations
gccggnacgcctgcagggaccggnccgctattncgggggctacaccgcgnccggagcatnncaaggaaaaaanactgggagaaacaaaaagagaaaactagtatgagaaacaaatccttaattaaggaaataacagtaatgcacgtgatgatataacaaaagggggngnnnagttcctctttttatgggggggnncccnnnaaaaagncgggganaaaaaacaacccacaagaagaggagacgagacgcccatgcatttaancncgcaccnnacgacaaagagggagagagaggancgcccaggggggnncaccnncaccggacgaaaagccncngcggngggagaaagaacggccnggccncagccccgaaacagaggaacagagagggcaggaaggagacaanggnnggacccgcgcgggccca

SEQ ID NO: 121148 - DNA, 343 bp, Arabidopsis thaliana columbia
  unsure (1)..(343): unsure at all n locations
gcacgcgtgcgnaagctgggatcctttagagcggccgcccttccttttttttcacttctttcgtccacgcgtgggggaaaaccttggtgacagacaaattaagctctgtacttgagaggcatttgcacaagtaaccaaaatcgtttccctcgggagaacgggacaaaggaaactccctccattttcaggggggaaaggncnnccannaccaaaaaaggaaaaaaccccggcagcgagggaggagggaacaaagaaacacgccaaagccaaaaggaacaancgcggaggaggagacagagaaaaaccaggcncccccacccaaacggacacacnggcacaaaag

SEQ ID NO: 121149 - DNA, 518 bp, Arabidopsis thaliana columbia
  unsure (1)..(518): unsure at all n locations
ccggcacgcctgcaggtaccggnccggttttcnccggggcgttcatcccgtccgcccacgcgtccgcccacgcgtgcggttctctcagtggagaagaagactcgagtcatctgcagaaaagattctcgatcggattggatcatataagattttagggatttggaaaaaatcnngatcccctgcattttagggcggcggcggacggaacggggaatccgatccctacccccgcggttttaacagcttcggccaatcatataggaatcaggtgtatgccggaaaacatggcgttcctgaaatgtaagaagaatgatcctaacccagagaaatgcctcgagaagggacgtgaccgcactcgctgtgttcttggcctggacgttcttctacttcattctcgttcaatttctctacaaggtcttaatttgagctgatcttaagcatacaacaattgttggggctcctttctgttaaaacttgatgaaaatgggagatattgtccccttggtagaattaggggt

SEQ ID NO: 121150 - DNA, 530 bp, Arabidopsis thaliana columbia
  unsure (1)..(530): unsure at all n locations
gcctgcancgcggacggagcngggatcttttagagggggggccaatcgngntttaanaaatgggcgcccngaagggggggaacgaacgaccaaaaaccccccgggggaggcggcaacaccacaattttggggaaaaaagactttaggattcaaaatcaaagacgaggaaaaaggcactgcctccattttgaagtagggaaccanccgaggggggnngggagaaaaaaccccgggggggggaggaagaaaaccacctatatagagcccccgattccaccgccaacgagaggggcgggccaaaaaaccaagtggtgggtccatggccaactcaccaccgctgggaagaaaaccccggggggattcatggaggctacagaaaaagggcccccagctaagaaggtggccacaacaagaaagcctgatgggggcgggaagattggggacaaaacccccgtattttcagaccccgggggggggcccgggaaatacgggcccgggcccccgggagggcaccgaggtttgcctatagg

SEQ ID NO: 121151 - DNA, 510 bp, Arabidopsis thaliana columbia
  unsure (1)..(510): unsure at all n locations
cgcaaaaacgggaggcaaggaaggggggntcccaacggaagagggancaccgccggagccaacaacaaagctggaggagcggtcgccggagcctccaagaaacccgccgggggaaacggaccacctccgattagggtgacagggaccaaccacagggtctaccgggaaagacccccctggggggggggggggggcccacacatctacgaaggattgtgaaacaacaccacacaggaggaggggccaaccacagactacgggaaaaagcccccctgtgcccccggggggaagaggtaacccgccccggaaaggggaaggagaacggccgaacaaactcgcgggggggggaagggcagaagcaacaagggggagaaagaccgggccgacctccaacatgaaaaaaagagaaaaaacagacaaagagggggcgaccgcgacaaaagaaccaaacaaacaaacgcggggcaggggagaccaaaaaaccctgtaaagggacaccgaaacgccacg

SEQ ID NO: 121152 - DNA, 516 bp, Arabidopsis thaliana columbia
  unsure (1)..(516): unsure at all n locations
cacgcgngacggagccgggatcttcnagagcgggcgaaccctgnnntaaaaagcatttcccccgaaaaaggggggaagacctccaatgaaaaaatcggcagagccacgagaacacacattcgaggaggaatgaaaaaaaggaagtcgaaaaaaagaggcgngcgaagagaacccctccctttgggagagggggcaaaaaacagggaatcacagacaaaaagaccccccncccgggggaggggaaaaaccaaacgcaaaccggtgggaataaacccagaactcttcgccgggcttccatcaagcagaaactgggccgaacaacgactgacggagcacggggagggccatacggaaggccacaacaagacgcgcatcaagcgcgctcgcgcacacgattggcccagcacgagaagctaacacaacacctccagagcaggggagaccatgaggaacatcagagccaggaggagggggaaggaatatttgggagtcaacagcaacccccggggcaggaac

SEQ ID NO: 121153 - DNA, 563 bp, Arabidopsis thaliana columbia
  unsure (1)..(563): unsure at all n locations
caggcacgcgtgacggagcggggaccctctagagcggggcgcgcaaccccgttcaaactngatctaaccccgcggcaaagggaaggaaccaaaccggaacagcgaaagcaaggccccgcgaggcaccaccgaccaaaacaaaacaagacagtgcaagacacgcccgcaaggacccgaaaacatttccttctggggaggaacaagacaccgcgaaccaccgcaaaaaaagaaccccgagaggagggggggggggcccccacaaccgaggagccaaccgcaggcaaaggcaaccgcagggggcacacaaccacaaggggagcagcaaaacgggcccacaaagcacccaacaggaaaggacccagaaccggcgcaaaagacgccggaaacgccccccggagggaaacaaaacccagcaaccggcgggcccccccagccgcgggaaccccgcaaagccgacacacggcaagcgccccccggggggaaaagaccaccacgacccgccccccaagggagaaacagaagggcccacggggggaaaaaaccccccccgaccccccccccaa

SEQ ID NO: 121154 - DNA, 401 bp, Arabidopsis thaliana columbia
  unsure (1)..(401): unsure at all n locations
ccggnccggctttccngggggcttcagcgnccgcgctgtataancgggaccgggggcgggncaggatccggnacagaagcggagcttctcgaattcggtgtttttgatgatttgagagagttcgctgaaggcttgacctctgctacannccaagctcctccttttcagaggtgaagggganngaagggccgangngaaaacaaacgcccccgaaggggggaagggagcccccggaccggcaagagagacacgccacncnggagcnaaccgcgggcaagcaaaaccccaaagggaagaaacgaaccccgggcccccggccaagaaagaaaggagggcnccggaggacccaangcacaccagggagcacccaagggccccaaaagagaggaagaccagggagg

SEQ ID NO: 121155 - DNA, 553 bp, Arabidopsis thaliana columbia
  unsure (1)..(553): unsure at all n locations
caggcacgcgtacgtaagctgggatcctctagagcgggcgccccacccgttctactatttgttccctcaggcaaaagagcctcttaaaccacaagcgctaaaaggacaaagggggcgggattctataaactcggaaagccaaaccgcgctcccgaatccaagcggaagggcgggccatctccctcnctttggagggggaaaaanaagcanggggcaaggcggcancacacaatnccaccacatnagcacagggcagtggaagcacgaaataaaagaaggacagctggaaaagaaaaaaataggaaaacaccccgctatcaaggcgcaacccagaaccctatcagaccagaatctctacaacatcctaggggcataagaacacccccacaatcgccccttccctgggtaaaggaagcagggggcccaacaacggctgggacaacgggggccgcaaaaagggcccagacagtagggccagggcggggggccaacggaaaattgacccggctcccgaagcaggcggccgggtggagaaaaccccccgaaggggagg

SEQ ID NO: 121156 - DNA, 585 bp, Arabidopsis thaliana columbia
  unsure (1)..(585): unsure at all n locations
caggcacgcgtgcgnaagccgggaccctctagagcggccgcccaacccgtgcgaaaagagctccccacaaaagagaggagaaatctaccagcccccctggggccccgaagaacaaacaaagggaaaagcaaacaaacaaacacacgacacataaccaacacaaagggagacgaaaaacctaaacccggggggggggnaccnccaaagagacggaaagaacgaaagaaaaaccaccccgaacgcaagcagagggggaaaaaacaaaaaaaacccaccaaccagaaaaagggagcccacaaaacagagcgcgggcgaacaaaaggcaaaacccacccccaccgaacccaaaagaaaaagcggcccccaaaaagcacacaaacgaggagcaagtgcgcacaaagaagcagcccccgggcaacgagggcggggccgggagaagagacccacccaacccgggaaaaagaggacaaagcgcagaaggatgagaaacaaaaaaagcatccggcaaaaaaggagagggagcacggagcccaggaaagggggagaaagcacccggaacagggaggaaaaaaaccgaagacgggc

SEQ ID NO: 121157 - DNA, 529 bp, Arabidopsis thaliana columbia
  unsure (1)..(529): unsure at all n locations
ccgggacgcctgcagggaccggnccggcttacccagggggtccacccgngcggaaagagcggcgncnncnncaggggcaccatnaacnccagagacaggagggcccaaaggcgaanaanaaccataangangcacacaaccaaagcacccancgcgcagaggcgcccaaaaaaacgcctccttcagaggggggggcacccccaaagcccggcgccactaaaaaccccccctccgaggcaggggcgaaagccgatcacgaaccagctgggtactccaccggcgagcacgcgccgacgagaagaccaaggacacgggcagggaaccccgcagcgacggcggaccacacggacacggacgacctccccgcgacgacgaaccgcaccgcggcgggcaacgagggggagagccccaccccgaaccccaagcccgcggaaaaggccggccgccaccccaaccacgggagcggggcggggaaaccccgccccccccggagcccgggggccggccccgggccaaggaaagccggggc

SEQ ID NO: 121158 - DNA, 531 bp, Arabidopsis thaliana columbia
  unsure (1)..(531): unsure at all n locations
gcaggcacgcgtacgtaagctgggatcctctagagcggccgccccctctttttttttttatctcataactcaccgaagaagattcacaaacgacatgagtgaatcaacatctctatgctctgaagggtacttaatagcccgtggagctcttttcggaaagagaagnatcgcggcctcccccctaacggaggctcttgctgagcaaactccttctgctcaccgtcagctcggaattgcgccactgtaactccttttcccgcaagtgtctcagccaattcgatgtacgatgcttccatcgcctggcagaaagggcaccaaggagcgtaaagtacgaccaaccacgcctctttacggttctctagcttcaaaagaatctcaacccctcctttgctcaatgcaaccacacttggtgctttcaaatatcctcttgcacagcagcaggctttgagtctgcagcaccaacttcctccttgaagtgccctttgtgtagaccacattctttagctttagcaactntccaccaccaccttc

SEQ ID NO: 121159 - DNA, 545 bp, Arabidopsis thaliana columbia
  unsure (1)..(545): unsure at all n locations
gcatgcacgcgtacgtgaagctgggatcctctagagcggcgcgcccttcctttttttaatatctggatgctgtcagttggtgttaacactatgtagttatgaaatgtgaataaatattttacttattgtgtttgggaagtttgagatagagacgtggtacttatataaaaagaaaacatccctcccttaaagggggaaganaaaaaggggggggttccccccaaaaaaaaccaagcgcggagaggagggaaaagacatatgaggaggggcgatatgaagcacccaactgggggggaaaaggagcgaagctataataggccaaccgccaaaagaggatggcaagaagaataacggctatgcacagaaccttgggaagagggcaaaacaatttgttgaacacaaaaaaaaaaaacacggcggggaacggttcctggagagtagcccctgcgaaagagacgaacgcggaagccacgtgggtccatacttttgaaaggaaaaacctcgagaggaagggggacaaaaaaatggcctcctaaaaaccacaa

SEQ ID NO: 121160 - DNA, 520 bp, Arabidopsis thaliana columbia
  unsure (1)..(520): unsure at all n locations
cgcaggcacgcgtacgtaagcttggatcctctagagcggccgccctctcttttttttttttccggtcaagtataggggggaaatgatgtaaaatacaatcgtaacaagctcttctataactcgatgggagtcacccaatacaacaaggcctgtcaaacacgatcaaatcaaaagttccctcgtaaatgggggagcanaccacagggggatgctagctcatgaaatcacccatctggttgcaatcaaagaccaagaagaagctaaaaagggtatataaaacgggttcttattgacatctactgagatggaagctcagctcacgtcatggcatgagtcgacgatcgcatcagcaagatactcgcattgggccagagataacccggccaatgatatcctcccgtctttagtcatatacacatgccattggtcccgcatgttatcgccctgagctttgtttaggccggagaaagagaacatgccaatttgcttcagaaagaaggaccagtccttcccgctcttg

SEQ ID NO: 121161 - DNA, 501 bp, Arabidopsis thaliana columbia
  unsure (1)..(501): unsure at all n locations
gcacgtcggcgnaagctgggcccctttagagcgggggaaatctttttttttttatttgacggaagaggagaggcatatgaatagaagtctaatacgtggccaacattgaaacaaaacatccacaataatgacgagccaattatcttcaaccataacttaaacaaaaaccaaaaagttaaactttggggcgggannccnacaaagacattaaacaagaaagaaacccgagaccgtggaagaagaaagaaagacctgtcctctctagggagctatcaagtgcagagagggaaagcagaccaagcaccagagacatgaccattctcacaaacataagctctcacaactggtgcaccaggatcatgaaacccaaacacccttctcaaacaaaacgatgaaggcaaatcccaagcctgatcgcacaaacaaaacgcgcatgtcaaaccagaagggcgactccgatcacagcagataatcgatccccaaactccaaaccggggaaaa

SEQ ID NO: 121162 - DNA, 522 bp, Arabidopsis thaliana columbia
  unsure (1)..(522): unsure at all n locations
cgcctgcagggaccggnccggtatncccggggggacacacgcgtccgcccacgccgccggaaaggagcggcctagagagaagaaggcganccatggcggaatcggggccctcttgtataccagaagacgtagtcttcaacatcttcttcaagctccaagaagaaccaatactcaattctnggggcgcgngcgncngcaccaanaccnccccaaaagccccccaacggggggggaggacgcagcgctactccgcnanccccaccggcagcgccgagcnccgcccgcgggcacccgccgccgccgcagccgcgncnccaaccaccggggcgggaacggccccgacaccccccgggggggggggccccaaaaacaaacccgcagaaaggagcccagggccccaccacgcgggaaacccccncgaaaaccccgaggccggggaagaacgggagccagggcccgaacaaaaccccgacccgaaaccaaccacgacggaacaagcgccgaacggcgaagaaggggcag

SEQ ID NO: 121163 - DNA, 524 bp, Arabidopsis thaliana columbia
  unsure (1)..(524): unsure at all n locations
ggcatgcacgcgtgcgtaagcttggatcctttagagcgggcggcctctctttttttttttaaaggtaaataatagccagagaaggtaagaaagcgaatgatgattattcaaaggattatttggatttaaaaaagaccctctttgacaatctgttggaaaatacaaaaaaagagncngttctttatacggcggagaacagacccttaagctggaccaaaagacctgccaaagtagtcgatggctcaaatgcaccagctgatgaaacgaaagcgagcttccatgactctatatcgttcttggtcactgatgagataagagaagccaatgatgaattgaatgcttccacctctgtatgctcctctgggcttgcactcaactttgtgaaagccaaattaacggttttgacccattcgggatcaatgccttcccccaaaaccggacgcgtggnnnnnnnnnnnnnnnnnnnnnnnnnnnnnnnnnnnnnnnnnnnnnnnnnnnnnnnnnnnnnnnnnnnnnnnnnnnna

SEQ ID NO: 121164 - DNA, 483 bp, Arabidopsis thaliana columbia
  unsure (1)..(483): unsure at all n locations
cgcctgcagggaccggnccggtcnnccggggaggacaccgncgccggnnnnggggaaaggcatngatgcgcgaatgggncaaaaccgnnaatctggctctacaaagttgagtacatgcccagaagagaaacagaggtggaagcattcaatcacattggcnctctcttacatttgnggggggaacgananagagacancgaagcacgaaaacccccaacagggggggcaggggagaaatggacnaccccgacaggncnnnnggaacagcnnaagggacgggganaggcnggccacaaanncnnnacncnnnnnngggannngccaacagannngncaaagagggngcgcnngnccgccaaaaaaccccgagaaaaaacancaggcaccgggcgaacgggccgggggacgaccgaccgccaaaaaaaaaaaaaaagggcggccgccccagagganccaagcnaacggacgcgggcaagcgacggc

SEQ ID NO: 121165 - DNA, 367 bp, Arabidopsis thaliana columbia
  unsure (1)..(367): unsure at all n locations
gcacgctgtacgtaagcgttggatttctctagagcggggcggccttcgttttttatttaaaacttagcggacataccgggggaaaagttacnagatggcctctcgccttatagagttgaattataatttcccgcaaacgcgcgccccctggaacaaacaaggaggggggcggggcacacgctttcttgaggaaaaaattactcaccatttttggggggggagagcgccccaaacaaaacacactttcctcgcgcctctgatcaccccccaataatacacgaccgcttgaaaatcgacgaagaacaaagggacgcccctcgggccgcggccaattttttattcacttttattaaccactgttctcaca

SEQ ID NO: 121166 - DNA, 531 bp, Arabidopsis thaliana columbia
gcacgcacgcgtacgtaagctgggaccctctagagcggcgcgccaacgccggtcgagacttgtagcagccaacgaggggggaaacaaagccaaacagaagagggcaacaaaaacataccaaaaacccaaaaggaggggagaaaaaacccagggggaacaggagagagaaaacacaagcgtcacagtggagggaagggccaaaggagggcccgtacggggcgaaaaaaccaaaagagaggcaggggaccacaaccacaaaaaacgagcaaggaaacacagaacgcaaaagaaggcggggaccccaaggggaaggaccctgaaaaagagggaagcgcaaacaacaggcgcaccaggctagaccgggaaggaggaacaagaaaaccccgccggggggggacaaccaccccaggcgggagccaagcggggagaaaggcaggccacggacaccccaagggagccggcaagcagcgaggggacgaagaccaggccccaaagaggggccccacgaggcacgcgagccccccagggggc

SEQ ID NO: 121167 - DNA, 547 bp, Arabidopsis thaliana columbia
gcatgcacgcgtacgtaagcttggatcctttagagcggcgcgcccttcgttttttttttttttccacaccaaaaacagggaattgcgaaaattagttggtctatggacaaagaaaaccacacaactctttgaggccaaaacgaagcaacctataatgcagtgggtccatacacaaaagtccctcgtatatagggggggaacacacacaacgatagattttaaaaaacccccccccctgagactggggaacataagcttaaagaactctatactaactaagcccttatttgcctgcgaagaagatcaagaagaagaaaggcattgctccactcatggagagacacacgaactgcattttgcttagaggatgtacagtttacaggcaccgacggttgtgctcaaatgcgggaccaatgcagacgacaacctctgcggagcttttaccctaatgcagataaccatcatgatcggctacaggagttaagagacatgaacctttaacagatcaatcccaaccttgagcatttcaagagcggaaagactgaac

SEQ ID NO: 121168 - DNA, 556 bp, Arabidopsis thaliana columbia
  unsure (1)..(556): unsure at all n locations
gctggtacgcctgcaggtaccggtccggtatttcccggggggacccacgcgtccgacaacttctacctcctggttcgagagaatatgacaacaagaaagccttactcagtcgaaaactaagggcaactaatcaaagcagatcaagcctgggatataccgatctcgagtcactggcaggcgccccctcggatttgggngagggcacagangaactcgtgcatataaaggagattctccaacagacgctgggttcccagaggagaaaggacaatagactacttcgctagttccagaagagaatgccaagtttcatcaggggttaagctttccttcagctatctctgggaaaggtgatgtgactaaaagaggagatcgacccgctgccttctacaaggatttagacacatttggaacacttgacatttgtaacaacaaatgttgagatttagccctcgtttcagaatggatagagatgacactgatgggtctaaaggatggacacacaccaaaaatgtgcgcctggttgcagaaattggaagcacacaaattgcgaaga

SEQ ID NO: 121169 - DNA, 573 bp, Arabidopsis thaliana columbia
  unsure (1)..(573): unsure at all n locations
cccgcctgcagggaccgggccggaattcccggggcgggcaggcggccgaggaagactcacncaacancccggacctcaatgtagcggacaaaaagggaggccgggaggaccaagacctcactccgcaagcaaaagcgccgggaagaaaacggggggaaacaccccggggaaccccctcccataggagagggaganccccnnggggcaggggaaaaacggacaggaagcgcccncagggggagggcgccaacacccggggaaagaaggggacccccaggagggcggccgctcgccaaggcaaaaaaggccccacaaacgggggggggccacacaacccgaggggagagaagaaccccaaaggcggagcgcggcgccaaacaaggaacacaaggggaccccgaggaagaaccccggaaaccagggggaaaggagggaagccctggagccccgaacaggcagaaggggaacacgcccgaggggcaacagagncgggcggaacaacccccgccggaagccccctcgggagaaggggaaaacgcacccgcacagcccccggggaggcggaccccccag

SEQ ID NO: 121170 - DNA, 549 bp, Arabidopsis thaliana columbia
  unsure (1)..(549): unsure at all n locations
atgcacgcttacgtaagctgggatcctttagagcggccgggctttgcttttttatattgttaaccttcttaaaagggggcccaagaaagcactaggaaattgaatatagcgtgggggcctgctttttaggccagacaaacccatataacaagaacaccacaaaaaaaagagacttccctccttttgntgaaggaaaacaggggaagaccttattgaaaaaaaaccccacccatgggggggggagggatccaaattttgcggtggtagcaccatctaaccgggggtaggctaatcacctcacgggtttagaagttggggccgggggctagagtttgaaaggataattgacctcacatgcctaaggaatcccagccgcccggacacgggagaaacaagagctaagggttttgcggaacctggaaggcaatggaagcgttggtgaggggggggggcccatgggcatggctgaggaggtttaacccccggagcacacgcggggggaaaaaacccccctggaggaccgaaccaaagcccgctggcagggggggt

SEQ ID NO: 121171 - DNA, 420 bp, Arabidopsis thaliana columbia
gccgcagggccggccggaatccgggggaccagcgccgacagcgaagacacaagagggcgaaagacaaacgaagggggacgaagagcagacgccaagcgcgatgacggggacgccaaaacacgaacgccgccaaatcctcccaagaagcggcacccaaagaggcaaggccaagaaccacgcgagacagcgcaacgcggcccggcgccaaaacaaacacaaacgcagacggcccaaccgccgggagggcgcaagacccaagagccgcgagccaaggcgagggcaaagccggcgggacacgaagccaagcaaggggaaaggacccacaaaacagcccggaacacggaaaagcgggggacgagaagcacccgaaaaacgccacacggaggggggaccgacaaagacggggaaaaagaaaaaaac

SEQ ID NO: 121172 - DNA, 490 bp, Arabidopsis thaliana columbia
  unsure (1)..(490): unsure at all n locations
gagccgggaccctttagaatgggcggcaatccgttttaagacgcgnggcccggccaagcgggaattagacaaagatagaagatacaaccgggggttacagcttaattgtttgagcttttgaaatagaagcagcaaagccgaagtnnggaaanaacaaaatcggctancatttagnggtnagaggaannannnacgngaaagaangaaaaaaccccccccgagggggggggggggaaccacaaaatccaggcggccgcccaggcgagcgaacacgcggggcgaggacacgtggggcgacccgggaaaagcggaccggcacctggaggggggccagctacccccataatggagcaaagacaagcccggcgaacaaaaggcaaagcggctcccgcgggaaaaagtgaagcacacccaagacacacacaaaacgacgccgaggacaaagggaaaagcgcggggggcctaaggagggaaaaaacccccataaatg

SEQ ID NO: 121173 - DNA, 582 bp, Arabidopsis thaliana columbia
  unsure (1)..(582): unsure at all n locations
ccgcctgnagggaccggtccggttttcccgggggggcccaggcgggccgaggacacgngggcggacgcgcgggcggacgcctggggtttgagataaaaaaagacactgtggactcatctcttcttcattactctcatcgggggggagcgccccctccaaccggctgtgagggaccgaaaatcgcttctctttagggcgacggggggccgcccccgagggccaaaaggccaaaacaaacacccgcgggagccgaggcggggggaaacccctaatatcaggcctaacggggcgcgtgaaccgaaaaaaaacaaaaaaaaaaaaaaaggggcgggcggggtcaaaaggatccaaagttaacggacggggggcggccgacgggaataacgtttctatggggggcaccgaaaatgcaagccgggggccggcggggtaacaacggggggggggggggaaaccccggggggagccccaacaaaatcggcgtgggggacaggccgccgtggccgcggggggagagcagaaaggggcccccccgtcccgctcgcagagagaggcgggcccagaggcggaggcgcccgcccg

SEQ ID NO: 121174 - DNA, 503 bp, Arabidopsis thaliana columbia
  unsure (1)..(503): unsure at all n locations
gcatgcacgcgtacgtaagcttggatcctttagagcgggcgcccttcgttttttttttttttttcttttcttttagggaaccgaaactcattatctcacacagtaatagtgtagtacatagaaagatgataaactcatatatcatgagatggtcgtagaccaataaaaaacaaagtcctgcattttgggggggggngaaaanaagcccatgctcaattctattgtcccccaaacattgggtttaaacctttgaagtatgaaaaaccttttttggagcagcagaattcatcatgcggagagcttcaatgatgagatcacaaaggggatgagggtctggaatcacgtttacatcaaccccaatggtgattataagtttgtccacatagctttgaatacagatattgagggcctgcgggacaccaaaggtacttgcagcaatgaaagctattcgatggccaaaatagctaatttcttcgtctgggaccaccacatttgagaatata

SEQ ID NO: 121175 - DNA, 507 bp, Arabidopsis thaliana columbia
  unsure (1)..(507): unsure at all n locations
ccgcgtgcgtaagctgggatcctttagagcgggcgcgaaacctttttaattttttttataacataaaggggggaacgggggcggccaacacccctggaacggaagggccgccaggctttttgatcaggggaaacccaccaaattttttaatctaatccgaggaaaaaaactccctcaaattggatgtaaggaacngagggcccgggcaaaacccgaaaaaaccccccncaaaaaaggaagggggggcccccctcttgcacttaccagcgccccgagccggcgggaagccaacaccattttgggagaaacaagcggcggccccctagaagcgggttcgcacggccccttgcggcgacccccccccagacacaaaaaccatggcgggcaaggacccccccccgggaggaggaggccccccccccgcgaggccgcggctcaaaagggggccgaaaagggcccacccatgggtggccgaggcgcccccgaacagaaacccggggtagcccc

SEQ ID NO: 121176 - DNA, 545 bp, Arabidopsis thaliana columbia
  unsure (1)..(545): unsure at all n locations
cccgcttgcagggaccggtccttttttcccgggggggcccaggcgtccatacaaatgnnaaaagacaacagaggggtacggctgcgagaaaaccacagaagggtacggctgccagaatactacagaaggggatagccaccaaacttttntctttcatcctctaaaaaaaatctctttcgttttgaatgtaggaaaanngtccgggggataacaaaaaaaaaacccccgggttaaagaggggctgggcccctttgtttaaacccacctccctgacccggggtgggaacaaaatttctgtttttggggggaggctaaccccccatcctttttgtgaccattctttaccgtttcgatcttgaaaactcaaaaagggggaaaggctcccgcacccggggggcgtcttctcccgggtgggggcgccgaagggaccgaccggtacactaccttttcctcggggggcccacgataaccgggatcccccgccctcattcctttgaactgaaccaccagggggaatgtctccctcctgctaacggaggcccccc

SEQ ID NO: 121177 - DNA, 520 bp, Arabidopsis thaliana columbia
  unsure (1)..(520): unsure at all n locations
cgcacgcgtgcgnaagctgggatcctttagagcggcgggccagagcggttttttttataaaacctaaaagttggggtgatatcgaaaagctgaaagcaacaaacaacaaccaaatgggggttttaaacaaacaaaaaagatgggggccgacaaaaggtaatcacaccaagaggacccctccctctttgggtgggggggaaacacgcaagcggatacagggaaaagcccccaccggggggggggaagcgggaccaaaaaaaaaagaganaccgggggcccaaaacgcgaacgaaccaggcgggaaaccgggaaagggccccccacaaaaacgagaagacaacaagggcccggcacggacaaaaagaccgcaaccaaccggagggcggagaggggcccccaaaacccacaaaagagaaggngagaaacccggaacaaaaaaggcacgcgcggagaaaacgaggcgcccaccagaacaaaacggggcagaagcgcagagggagaaaagggggccgcacaaggc

SEQ ID NO: 121178 - DNA, 587 bp, Arabidopsis thaliana columbia
  unsure (1)..(587): unsure at all n locations
ccgcgccgcctgnagggaccggnccggaagcccgggggggggggcgccggaaaaaagacacggatngggaggcctggccaaacacatacaccccattgcgccgccccaggcggcggaagaaaccaccaagaaggcgaccgaagccactagaacaagaaacagggcgggccgctgaacaacgggcgaaggggncaaggcagggggagaaacagaggggagagcccccgaaacgggggggaggggacaacccacggggagaagcgggaggggggcccgaaagggggggaggggggaaggggggcaaacgcagccggcgggcgggagacgcaggggaaaacagcagggcgggcgagccacggcggcgaagaaaggagcgagccgcgggggcgccggcgaaaggggcgagaggggggaggaggaagggaagcgggcgggggacggagggcgcagcgaacgagggaggcgagaggaggagagcgagagcagagaagcgggagaagcagcggagcagcgcgcgcccggggggcgggagcgggggagcgggggggaagacagcgggagagagcgggggggaggagcgcagggga

SEQ ID NO: 121179 - DNA, 497 bp, Arabidopsis thaliana columbia
  unsure (1)..(497): unsure at all n locations
gcacgcgtgcgtaagcttggatcctttagagcgggcggcctatctttttttattttttttttgcgattctacggggtacaaaaaaaggaattgctatgaccacaagagttttttctctttcttctacacatatacatatcccctggaatatatgcaaatcaccagannggaatgcctccatttgagngagaaagaacnnaggagggggtgccccagactgaccgccccgaaagggggaggagagagaccaatggataacacaacaccaaaaaaccgcgatttttttaatgaggctatccctaatttttttacttgaggctgaagaattgggaacagaatcggccccaagctgttgaaagacactgggagggaggttcccagcttgatggaggttgaatctctaacgcccaaagaatgtggagggggcctggagttatgactggagaaatctcaaagacccctgctgagggaatggaaaaaaaccgaaaatccccctg

SEQ ID NO: 121180 - DNA, 555 bp, Arabidopsis thaliana columbia
  unsure (1)..(555): unsure at all n locations
cacgcgtgacggagctgggatcctttagagcgggggccccagcggttttatgatggccgcaaaaaaaagaagggaactcccatactaaaaaaaaaagacacactctcccaccgcctggctttgtgagtggcccattcgaccagatgtacgggaaaaaagaacggagaaccacaacctttatgttgggggggacacgaacagccgagactgcagcaacgagaaaccaccagcagggggggggggcagcccccaataacgcagcaccaaacccatctaacaaactatcgccaaaaacggaaccggcatgagcccttacataatgaccctcgccaaaagccgggggtagggaaccccaacggccggcatgggaaagcccccaaaagagagccggaagactgcaccccgcgggggcaacaccacaacgactacgcgcctgggaggagacacaagaaaaaaaacaagcccgccaaccgggggaggggtccagaaaccgacggcgagagaggccaaccggaagataagncgggcggaaaaccgaaaagaaaggaggcgggc

SEQ ID NO: 121181 - DNA, 538 bp, Arabidopsis thaliana columbia
cgcctgcaggtaccggtccgtttttcccggggggacccacgcgtccgcggacgcgtgggaccctcacaatttctctctctaacgtttctaaaacatcctctctctctctctctcataacatggctgaaacatctgatgtatcgccattgaagcgctacagagaacaagatctttcaccttgagggggaaacgaacaaacgacaaaagccaacttcagaatcaccctctggctgttacaaccaaatactctgttttctcaacgattcagacgaacaaaacccacacaacagtgacctaacttccttcataaacgctcttcagcaagaaaatcatcggatgaccactccgccggcggctcaaaacccccaccggcgaagactccgtttcctcatgggtgtcctccaaaggagaaaacagcggaagaatgaccgcaaggagaaagggatggcgcctcttttggaagcctcccaggaccaaaccggggacccccaaccacaattttggcgagagtactatgcaacagcccaccgccggcccg

SEQ ID NO: 121182 - DNA, 435 bp, Arabidopsis thaliana columbia
  unsure (1)..(435): unsure at all n locations
gggacctcaaggggggcaacgggtaaaaaaaccacaccgggggacanaagggacagaagcaaacacaacgcacaagttttgacacagaaaaatgaagaccgaggcgccggacgcaggggccccctttctctggaagccggannagagagggggcccgccgagcaaaaaagccccaaaagggggggggggggggcaacaacaacaacaaaacccagggggggataaaaaaacggaagaaccggaagagagcccggcgagagggaagaagacaaaaaacaacgcagaacaaggcccacagacagagggagaaagaccacgaagaggaggcacgccgaaccagagaagaaaaacgaaaagggccgcagagcccgggcagagacgagagggaagcgaacgaggggcagagcaacgcagagacgcgcggcgagacacaaa

SEQ ID NO: 121183 - DNA, 637 bp, Arabidopsis thaliana columbia
  unsure (1)..(637): unsure at all n locations
cccccacgtgtgnnggagccgggaccctctagagggggggaaacggggttaaatattttcccccaaaagaggggaaaataaagataagcaccgggggaggggaaaaaacaaacgaccaccctccaaacaagngggagcgcccaggaaaaacggcaaaagagggcggagggggggaanaaccccccctanncacctagtgantgttgggggnnaaanaaanggagaggaccctaattgaagaaaaaacaacccccaangcgggggggcgggagggggggaacaaatcaaaaatagaggagcaccngggccggtggaaaaaaaaacgcaccagggagagcccaggacaggaagccaccagagcgcggaacccaacacagggggggggaagaacaaggaaaagccgccgcgcagaaaggaacggagccccgcacgccagaagcgcgcgggaggcgtcgcagtagagcagacgcgaagggaacgcaggggggcgcccgtgaagcgaggggccgcgcggccgcgcggcagggggccgagacgggcccgaggcgggagaaaagcgcggggggggggggacgccccggccggccgggccacggcgccgggcggaccgaggaaaaggacgccgggccggcgagag

SEQ ID NO: 121184 - DNA, 522 bp, Arabidopsis thaliana columbia
  unsure (1)..(522): unsure at all n locations
gggaccgggctttttnacgggggggagattcgggttcaaagattnncgcacagaaacagggtgggatgaggatgaacatgttggatttggttctcgaaggaggctcttctggtgggactgataacggaaaaactccaagggttggagggagagacaataattttatatttggatgtngagaaaaaatggggagattttcctgaattaaaacccttcatggtgtggagtggcgcaattttatagaaggaaacacgcggtgtttgattggtcggaatattattgcgattgaacattttttaaaataggagggatctggtcgatgctttggtggcaaaggggaagaaagatgagagaacggggatttggggaactgtggggttgtgatggaagattgtgaatttgagtgtgatatattagacggggatagagatgttttgtgtagaaacatatgacaggggatgtctatggtttatgtagtatttgttgagatgggggggttgttttggggtagtgtcgagatgg

SEQ ID NO: 121185 - DNA, 502 bp, Arabidopsis thaliana columbia
  unsure (1)..(502): unsure at all n locations
gccggcgnaagccgggaccctctagagcgggcggcaaccgggccaaaagaaaggcgacgagaacggggaagaggggcaccccaagaaaacaaaggcgccacaaacacaggaacccgacgacccccaaaaaccgcgaagcaaacagcacccgcccgaacaaaacaagcactcccacggggggggggcagaaaacccgaaagacccccaaggggaaaggcccccccccgagggaggggaggccacccacaaagccggagacaaggggacgagaccgaggggagagaagcgccccgcccaccggcagggggcagcggggcggccggaacaaagcaacgcgggcgccaaaggagcgcaaaggcggaaaacgaacccgcggcccgcggccaaagccagagagaaaaaggacagccagcacaaaacagcagacagcgacagcgacaccgggaccgccgcgacaagacacggaaggaagggggagagaacccaccccaggcgcccccca

SEQ ID NO: 121186 - DNA, 511 bp, Arabidopsis thaliana columbia
  unsure (1)..(511): unsure at all n locations
ccccgcctgcagggaccggcccggatattcccgggggggcccacgcggccgaaaagcagcgagaagacgacagggggggacggctgccataacacgacacaacgggagggaaagaaagaaaacagagcagtgcacccgaccagacccaaggaagccggaagacgagaacaaccccttcttctttaggggggggggggacacacccacggcgcccggccccgggaacgccccccgggaaccgggggccggggggccaaaaaaaaagccaccggcgaagacgccagggcccccgcggcgcccaaagaacacgagcacaaggaagggaaaccaccnccggcgacggaacacgacacaagcagcgcagaagaaaacagcggacaggagggccccgggggggagccacacgaccgcccgggggggacccgggacaaggaacggcaccagccggcgccccacacaaggccgcggggcagaggcgccaaccggcgccccttaacggggcgcaggccac

SEQ ID NO: 121187 - DNA, 550 bp, Arabidopsis thaliana columbia
  unsure (1)..(550): unsure at all n locations
cccgcacgcaggcgnaagccgggaccctctagagggggggcaagcgggttaaacacacgaacgcccacgggggggggaaacggaagaacacacgaggacgacaaaagaccgagaacaacaggggccaagaaaaaaggacaaaccccgaacaaaaccaaaagggggaaaaaacggcctcccaaaggagagaggaccagaacaagcgcaggaccacacaaaaaggcccccanagcggggggcgggggccccaaggaagacgacacccagaaaaggcccaggcaggagggaagcgagccccggaagccaaggggagcagggaggcaagaaaacaaccggggggccgagggccaggccccgcaacaggggggggaaaacaaaggcgcgagaccgacaccggggacgaaccccccaaaacgcaaagacgagcggggggacacgaaccgaccccaaaaaggggccccgacgggcgagggagccccacccgccccgcgggcagaccccgcgggcgcgaccccggggccgccccggaaaagccgccccggcccccgag

SEQ ID NO: 121188 - DNA, 180 bp, Arabidopsis thaliana columbia
  unsure (1)..(180): unsure at all n locations
gcccccccgccngcagggaccgggcctttttacccggggggagcaacgcgttcaaccacacgtccgcccacgcgtgggggtgtgagaagacnacagaaggggacaatagcctggagaagttgattgttccacctgcccgcgaccaagctaaccgaagctctgtaacacagcagacccgca

SEQ ID NO: 121189 - DNA, 490 bp, Arabidopsis thaliana columbia
  unsure (1)..(490): unsure at all n locations
cgcatgcacgcgtacgtaagcttggatcctctagagcggccgctattcgttttttttttttttttttttttttagtgggtaaacgggggctctaatggatgtgacagaatcagtttcatagaattgaaaataacgcgaaacttcataagattttaaagacacatcccggaaaaaactccctcgattttcggagggacnacaacgggccccaccctaaccccaaagacacccttataccaggacaagccctgcctcaattttggatttaaaaccttgaagaaccaacggatatcaaacgcacactgtgatactaaaactgcaacacaagaacggatagccaagtcctgtaacatagcaccacgctggaaattagctttcggataataccccccgaatgactgaagggtacaacccgtaagccaatggtaaaaagcgaacaacaatgtccgccccagaagtttaaaaaaaacaaaggataccggagggcttc

SEQ ID NO: 121190 - DNA, 557 bp, Arabidopsis thaliana columbia
actagagggccagctggtacgcctgcaggtaccggtccgtttttcccgggtcggacccacgcgtccgtacggctgcgagaagacgacagaagggtacggctgcgagaagacgacagaagggtacggctgcgagaagacgacagaaggggatagccacaaaacttttttctttcgtcctctaaaaaaaatccctccgttgaggggggaaaaaaatgtgtccggtggagaacaaatggctaaaggtgggtcacaaaggagctgtgcctggggctaaaagctcacatgccatgactcgggttgggaacaaagtatactgttttggcggtgagcttaagccaacgatgcatattggtaacgatctttaccgtttctatcttgaaaatcaagactgggcgatagctcctgcgaccggagaggcttctttcacctgattttggtggctcaatgagtaccgatcgtttcaacgatgctatgtctacagaggccgagactatagacgggcatacaactgtgcttatttcccatgatactgagaccactgattgctaatggtggct

SEQ ID NO: 121191 - DNA, 567 bp, Arabidopsis thaliana columbia
  unsure (1)..(567): unsure at all n locations
gggaccgggccgtttttcccggggggccaagcgttcaacaaaaaacccacggnngggggaagacnacagaaggggagantaagaaaaaaaggaagctcccaaagatttcgaagaggggggaaaaccgactctgcgcagccaggggagnnggaagggagccgttttcctttgagtggtgggacccagngggggggatttcaccgggaaaaagccccaatgcgggggggggggggacccccctttaggaagagccgggcgggaaccaaaagggggccgggggggcacaaaaggaggagggcgggagagaagcaaagcaaagggcaaagtcaacccagagggaaagggggcgcgcccaactcccctggtcctgggaaggagggaaacggcgaggagcaaacgcccgggggccccgccccgcgcgagaggagaaaaaacagggcgcgaggggcggggacgagaatcgcacgagaggagaggaagaggcgagaagagggcggtcgagggccggggcggagccgcggacggagaggggggtcaagaggcgcaacggcgggcacaatgggggga

SEQ ID NO: 121192 - DNA, 523 bp, Arabidopsis thaliana columbia
  unsure (1)..(523): unsure at all n locations
catgcacgcgtacgtaagcttggatcctttagagcgggcggtttttgctttttttttttttgttatttctacgcggggaaaatgggctacaacgacttaagctcatcaaagtacattgacatcatttggggatttgattctctcacacactaccacaacgatgggaatncacattccctgcctcttgggagnaganngggaaanagccattggccatgagcagacacaaaaaatttgtgggagggactttctaatttattaacttggaatggatttcttgaggcaggctacaatacctctcgaatgagcctcctcaggaacaacacaccctgaatctgacttagtatcatcatcttctaaaatggagtggggagaacgcagactgcctagagtctgacaagccctcaatggtttgaaggggtctggttatcatatattaaggtcaaaaacacatcggataagattgtctattactgggcttcgaggattgggaggtcttgacgtttgaaactaaaaaaaagga

SEQ ID NO: 121193 - DNA, 545 bp, Arabidopsis thaliana columbia
  unsure (1)..(545): unsure at all n locations
ccggcacgcctgcaggtaccggtccggttttcccgggtggacccaggcgtccgtacggctgcgaagacgacagaagggtcatgacagtgttcttgtatatcttaagccctagaatggcatatctcttttcggaatgtgtggagagtcatgcatatgagacttatganaaannncttcctccctttggaggggagnngaagaanangcctgcaccggatatcgcaccacaatactatacgggaggtgactcgtacttatttgatgagttccaaacatcaagaactccccatactcgaagacccagaatagaaaatctataccgatgggtttgggaacataagagatgatgaagccgaaccactgcaagacaatgagagcttggcaaactctaggcagtctgcgttctccacactcccatttagaagaatgagatacctggagaagaatcagcggggggctgtcctggagaaggctatttgcaaaggtattgaacactgccccaagaaattcattacaggttaataaattacaaagggaacctaaaa

SEQ ID NO: 121194 - DNA, 532 bp, Arabidopsis thaliana columbia
  unsure (1)..(532): unsure at all n locations
gcatgcacgcgtacgtaagcttggatcctttagagcgggcgatatgcgtttttttttattttttctctgtcgggggggaagaccaaatttcatgggggatcaatcaaattgtattttcaaattttctgagggaacaacggaaaaaggaataaaaagggcactgagnaaaaanatcggtttcttttgggggggggcncgnccgagactcgaagattatcgaagcctccaactactgagggcggagggtctccctgtggatttcccagcctccccaggagagtttctcgggatcacgccggggatgacgtcacctgtacgggttttttgcaacaactccccgctggctggaaaattggcccggctgccacttactggagaaactctcctcgacccttccgggcggttctcggagccgcccacgcgtccgaggacacgtgggcgaacccgagggtcgaccccgaaatatcggaccgggacctggggcggaccaacttttcctaaagggagtcctattaaacctaggcgaaatcag

SEQ ID NO: 121195 - DNA, 516 bp, Arabidopsis thaliana columbia
  unsure (1)..(516): unsure at all n locations
gccggnacgcctgcaggtaccggtccgtatattcccggggggacccacgcgtccgcccacgcgtccgcggacgcgggggcggctgcgagaagacgacagaagggatcgaggagagcaactgcagtaagtggcagccgggacaattttccaggcagcgaggagctgctgcagagatccctccattgtggggggggccgcggcgngatcccgagaaactctcctggggaggctgggaaatccacaagaagacactacgaatcaggagttaaaggcatcgataatcttcaaggctcggacgaacaccatccccactgatacattaatgttactcagcgacctttttattcctttttccggtattacactacgaaaattggaaaaaacaatttgattgatccaccatgaaaatggggctcccctccccgagaaaaacacgaaagcacaaataaaagcggccgctctagaagatccaagcttacgtaccgcggcgagggaggacatagccctctctatagg

SEQ ID NO: 121196 - DNA, 355 bp, Arabidopsis thaliana columbia
  unsure (1)..(355): unsure at all n locations
agcagggaccctaanaggggggggaaacgggtcaaatanaaaaccccccagagggggagagatnccgggngaaaaaaaagggccgcggaagcaacccccccctcaaaaaaaaggggcgcagaacaaacaagaaaagaaggcaaaaaaaaaagcgggctggcnctctgggntgaagggaaanaanaagagggacnttttnggagaaaaaaaaccccccacgggcgggggggggaggggcacacaaaagtagaggcgctaatcgacgggggggaaacagaccccccggagcggacgccggggaaaaaccgccggggaagaccaaggggacaagaaccacaaggcgcccggaggggaa

SEQ ID NO: 121197 - DNA, 546 bp, Arabidopsis thaliana columbia
  unsure (1)..(546): unsure at all n locations
gcacgcgtacgnaagctgggatcctttagagcgggcgcgtattcgggttttttttttttttctttctggggagggggaacaatgtattttcaccagatgagacagatactaaggcatacaatgacaagtttgtattattcagcaaaacaagccaatttttgcggaacccaaattgctaggtttgggggtgngcacgcnaaaagggcggaaaanataaaaacaaacccagatttgagagcatgcagaccatgacacttggactgttgggctttattcattaaccaatgagtaatttattctcttccaagaagctgtagggcggaacttccaggttgtatggggcaagacctttcctaattcttccagatatatcngaatgtgatccgtgacacggacaaaaccaaccaccataatcaccagcattaggcagggggatgcaccccaaatgagtgcatactccacccacgatcaacctttctggattctggactctaaccgaggcttcttggggggccctcagggggccaacctccacactatggggca

SEQ ID NO: 121198 - DNA, 552 bp, Arabidopsis thaliana columbia
  unsure (1)..(552): unsure at all n locations
acgcctgcaggtaccggtccggtattcccggggggacgccacgcgtccgcccacagcgtccgtacggctgcgagaagacgacagaaggggggttcgagtgtgagcatgtctgcaagtaaagatgtccttgcccttgcatccctcgaggttgacctagggagcatagaaccttcctcaccgtgacggggaagaggcgnggaaagcccgtcttcatcaggcgaccaacagaagatgacagcaagccggccaatagtgtggatggtggatccccgagggacccacaagaagactcgggtagaggcaagaatccagaatgggtgaccgcggctggaggatgcactcattcggggcgcacccccttgcctaatgcgggggattatggggggtgggtttggccgcgccacggatcacactaccgaatacctgggaagaataaggaaaggggcccgcaccatacaacctgggaggacccgacccacaggccggtgggaagaggaaaaaacgacccactcgggaaaggaataaaacacacacaggccggggggcacggag

SEQ ID NO: 121199 - DNA, 475 bp, Arabidopsis thaliana columbia
  unsure (1)..(475): unsure at all n locations
ccgcacgcgnacgnaagccgggaccctcnagagcggccgcaaacggggnnnaaanggnngngagcngacgcgggggagaaacggacagaacgaagggacgagccagnacaacaccacagaaaaggaaaaaacgcggaaccccagggaagaaaaagacacaggcggaaaggcctcctcttaaaaagggggcgacnncaacgggcggcaccagnccgaacaagacccaccaagagccgggaaaccgccccccgaaanggcaancagaagccnngaaggancaacgcccagcaaagggccaccnccaaccccaaacggcgacacgaaancggaaagcccagnaanaggcaacaccgncagaagcgggcaacccgngagcagccagcaccaccggaacccccggacggagcaacccccgggggaaaggcaaaaaacccaaaangnaggccggcaccaggaaagacaaacaaaaagcacc

SEQ ID NO: 121200 - DNA, 410 bp, Arabidopsis thaliana columbia
  unsure (1)..(410): unsure at all n locations
gcacgcgtacgtaagcttggatcctctagagcggccgccacacgctttcttatttttttttttatataaacgaggaaaaggggggaactcaatcacccaacaatcaaggcaaaagacaaaaacatcaagggaaaccgccgaaacaagtaaaacaaaaccaaaaaaaatccctccattttcgggggggaaccnagaaacccacacaaaaccaaaaaccccccgtgcagaaacaaaaaacccgacgctcaaggcgcattaacaaacttccccacccgaacggggaccaaccaagatcaaaaaagaaacatcgctacgccagaaccccatagacacaccctttagaaggaaccccccctaacccactaagcagagcgaacagaaccaccccaaggaggagacccacaaccaga

SEQ ID NO: 121201 - DNA, 448 bp, Arabidopsis thaliana columbia
  unsure (1)..(448): unsure at all n locations
caggcacgcgtgcgtaagctgggatcctttagagcgggcgggatatgcggtttttattgttgttatatttcttctgggaggaaataaaaacatatgtataggcgctgagtttaaacagctttaacattaaagcacaaacaaaaaaacacaaacaaaaacagaaagaaaaggaaacatcccctccctttatagagagagaaaccncacccggggggcttggtggggaatctcaccattgggggggggcggcggccacactttaaacttgagttcaggcctatctggatctacgcttggctggccttttcccttggagaaccttttccccagggtggtgtttcccgaggggagagaaaaacccaaacgccgacagtctgggggaagggggggacacccgcgggaaaactctgcctggggttcgaggggggcggagggccctcctccgggg

SEQ ID NO: 121202 - DNA, 502 bp, Arabidopsis thaliana columbia
  unsure (1)..(502): unsure at all n locations
gcagcacgcgtgcgtaagctgggatcctttagagcgggcggtagcgcgttcttccattcttccttactgtggggaaaagagtacaggctttaacattatgtgggcataacatctaaatgggcaactttatggggtgcttttttccccactcagggaaaccaaaagtgggaaagcctccctccctttgggggggcncaacanaacagcatacaggatcaccaaagaccggctataagaaggggggggttaaaaccagtccatgtccactctaacgcccaaatcattcgggctttttatcgagtttcttcttggactcgccgctataaggaccagcctgataagccggggttctgaaccgcgacgaagaaaaccctcggcagaccaacccacacatttcggaagtggcgtctgggagtagggcccaccccaacacaaaagggggggatttatggatacccacggcccccaggagggcaggggcatcccccggccaaagacaaaa

SEQ ID NO: 121203 - DNA, 544 bp, Arabidopsis thaliana columbia
  unsure (1)..(544): unsure at all n locations
ccggcacgcctgcaggtaccgggccggtattcccggggggacccagcgcgtccgcccacgcgtccgtacggcggcgagaagacgacagaaggggacggctgcgagaagacgacagaaggggaagtcaaaggaagtgaaaccttcttcctctttcttgaatccatcaaagaaggctcccctcctccgtngggggggcaaanncttggcacggatgtatagggaactaaacacatctaggagcaaaaacagcccgcctgatggaatcaaaggaagagagatccaccattccgtcccaatgactcgctttcagcctcatggaggccggtggggaacgacacactccaaaacccgttgaaaaactggacaaggaaatcggtggggcatccgaccccgcgggctccacttagaggaaaaggggaacaggccaccggggattacacctcacgggggaggcggacacccaccaccaatgccaacccccgggcgcccgggcccggaaccaccaggggaacgcacccaggggcaggcaggagcccggcccaaa

SEQ ID NO: 121204 - DNA, 537 bp, Arabidopsis thaliana columbia
gcaggcacgcgtacgtaagctgggatcctctagagcggccgcgcaccgggttcgaactgttgtggtcgacgaggggcggggaagatttagattctaccaaacggaggccaaaagattcaccacaacaagaaattctttaacacccaaagaaaacaactcaaaataagccagaagcacccctccctctcagggggcaaaacactctttaaccagggagggactgagacccgcggaggataaccccgccatacctgacctggaaccattgcacggcatcatcctggggtacccggaggtgaacaccaacacgagtctggcatctacgggggggagccacacgatatcctgggcgggcaaggacaacgaaaaagtccacccccgaaaaaccaggggaaggagcggacccgactccaagaccaaggggccccgggaaccaaatccaaagcaaccaggggcactgaaggccctcctaagaagcccaactccctaactccaaaccacgcccaagaaggtggggggcctccaacccccaaaggc

SEQ ID NO: 121205 - DNA, 527 bp, Arabidopsis thaliana columbia
  unsure (1)..(527): unsure at all n locations
gcacgcacgcgtacgtaagcttggatcctttagagcggccgctattcgttttttttttttttttttttcttctgaagggaaacgcatagttttgtataaatacacgggctcttctctttacagctaccactcggatgcagaggggttttatctgatctcctcaatttnaaaccnttcccctcaatttggnggggagagaaannnnatctaaggaccaggggaataaaccaaccgggggattatagacagccacctggcgatttaatgatttagggattgatatctcacaagttaatggtgggcaacctcctcatgtttggctttatcttgggccgccccgaacttcttgggttttaacaactcgaccaaaccctaaagaaccttatcaacacggggcattcctcactagctgggcatcaacctctttcttgactacaggaatctgtccctccttgggctttttttgggctacaaacgtgcttctctggtttggccctaacttggaacgttatcatctttttgacttt

SEQ ID NO: 121206 - DNA, 529 bp, Arabidopsis thaliana columbia
  unsure (1)..(529): unsure at all n locations
gcacgcacgcgtacgtaagctgggatcctctagagcgggcggaaacgggttctaatggttgttagatgaaacagggggggggagcccaaaaagggaaccccatccgggaatggataaaagacactgggaggacaacaaggagaaaagagagaaaaacttgaaaagagcggnctatccgctccttaaaggggggggacaaaactttgaggcaattaattagggccacaccaaaacaaaaaggagggcgaaacaaggaagaaacggaggaatgggacaaaaaaagggcgggggatgctaaagacgatgagcctgaactttcatctccgccggaaaaagatgaccacaccgggcacatctaaccggcgaaagaaacctgcgacaagaaggacaagaagacccagaaactagccatctgtcaaaacaccccacggggaaagaaggaccaacaaagaggaagcctcttatttcttcaccgcgggaaaagcagggagggaaatagcacactccggggaggcccccccttaagggg

SEQ ID NO: 121207 - DNA, 431 bp, Arabidopsis thaliana columbia
  unsure (1)..(431): unsure at all n locations
gccggcacgcctgcaggtaccggtccggtattcccgggtggacccacgcgtccgtacggctgcgagaagacaacagaaggggaaagctcaaaaagcaatgactcgaccgtcaagattacttgagacggcggcgccaccaccacaaccgtcggaggagatgatcgcagcggaanccgcctcggtggtgaggggggcggctcttctttgcgctcttatctgagatgctggtctcgccggcgtcggacgatgcgcttggctccggcggtttacagccagaggagattcgccgtcaccgaacaaaggcttgaaaaagaaagctcttcagtctcttccaagatccactttcaccgccgcggaatcaacctccggcgccgccgctgaagagggagactcgacggaatgggctatttgccccactgacctcgccgacg

SEQ ID NO: 121208 - DNA, 519 bp, Arabidopsis thaliana columbia
cccgcacgcgtgacggagccgggaccctctagagggggcgcgaaacgggttcaaacactctttccgcccaaacggggcacggactggaaggaaacaacaaaaacagggcacacagccgacccccagagcagaaggaccagagaaggacaaccgggcaggcgcgaaagaagcccgggctaaaaaaaagggggggaaggaagacagaaccccccctccgaagagaaccccccaagcggggggggggggccccgaggaggggggaaccccaaggaggaacccaccagggggagccccacccccccgcccaggaagggccgccccacccaaacgaaccggagaaacgaaaggacaccccggggtgcagaccaaaaaaaaacccccccccccggcccgggaaagacgcgaacccccccgcaggagacggcacaacagggggccgcgcaagaaagaagggcgacacccccccccggggggcccagaaaacgacacccccgggaaaagggcccggagaaacggaag

SEQ ID NO: 121209 - DNA, 524 bp, Arabidopsis thaliana columbia
  unsure (1)..(524): unsure at all n locations
ccgcacgcctgaggnaccgggccgcttacccgggggggcaacgggccaaccacagcgacggcacgaaacgagagggtatggggagcctaaactggctctgatcaggcggtggatcaatcggcgggctaggcggaaagagaaatatctcggcgcctaggaagaaaaaagcgcctggctttgagggggggaggcccccaacccgggacaccggggagaacacaccaaacngaagcgggggagggaccacccctgggtaggcccaagtgtaggttccttaccccccctcaaagaaccccacccaaggacaggaaagggcgccgaccatagggggcgggaaacacccatcccacagggcccagggctagaaaacccaaaaacccacaagggaggggcgggatgaacgcggaaacgacacggggggcggcgcgagaggaacatggaagccagactgagggggggggacaccgaggagaagggggaagggaaaacggaggggaggggaagggccccgcgacgcaaaaaga

SEQ ID NO: 121210 - DNA, 449 bp, Arabidopsis thaliana columbia
  unsure (1)..(449): unsure at all n locations
cacgcgtacgaaagcagggcaccactagagcggcgcgccgagccgtcccaacacgcgcgcacagacggaaggagcggggggacccggaaacgcgacaccggacccagaaaccgggaacaacgggggccacacaaagaccaaacgggcaagaagggacccagccaccnccttccctcccaaaaggggggagagggccccccgcaagccaggggggcaccaccacgaaaaagggggcagcgccaccaaccagccacacggggccaaggagggcccgcaagaagcaccgggaacgaccagcacggaacgacccaccgggccaacagcgggcccgcgcgaccagcggcgcgcaaaccccgccccagcgccaacccccgccacggagcgcccagccgaaccaacgggagccaaccacaagagaaccgcccaaagccccccggcgaaaccagcga

SEQ ID NO: 121211 - DNA, 388 bp, Arabidopsis thaliana columbia
cgcctgcaggtaccggtccgtatttcccgggggggcccacgcgtccgtacggctgcgagaagaccacagagggggagagtaaagaagatacaacacacccttgagaagcttttataatattttcttagaaaccatcaaggagcttagaaaaatgagcccagcggcccccctccggtccttattagggggcgggggcccggccctggtgtcattctcttgataatatccccgaacgagggaggagccttagaacccagtttacacaaggaaaattatcaagataaccctaccggccccaattgcatcccttcactcagtgtcgggcacccccctgctgtccacaccaacagctccccaccgctcgcacttatgccccacccacgacgac

SEQ ID NO: 121212 - DNA, 487 bp, Arabidopsis thaliana columbia
gcatgcacgcgtacgtaagcttggatcctttagagcgggcgcgaaccgggtttatttattttttcttccttggcaaaaccctaaagggcattcctttttttggggggaaacttatagaatcaaatttccagttttaccctctgacaattcaactgagactcagaccacccaaagggcctccggtcgggggggaagaaacaaaagggttgccgcttcacagcaccggagtaatgaaaccgtagatggcctctttgcctttctgcgaaactaatttgtggggcaatgacttctcctgatgagttgatagtataagcaacaaactctgagaagctaactctgggaagaagaaacccatcttccctttctctcgtactataatccgacggaccctggttctcttggtgattaggaaccggaaggcaagtcaggctcctcgtgctgcctcccctcgggccagcttttttcgctgatatataaggccactcca

SEQ ID NO: 121213 - DNA, 539 bp, Arabidopsis thaliana columbia
  unsure (1)..(539): unsure at all n locations
cgcatgcacgcgtacgtaagcttggatcctctagagcggccgctttctttttttttttttttttttttttttttttgggtgattctttttttttttttttttttttaaaaaactgaatgaatcattccaagttctcaaaagatatgataggaagcaaccatttcccgaaacccaggccctccatttacggggggaagacggaaaaaaggtgattgctttttttaaaataatccgcgcggaaaaagtaaacctgttttggcatctcaacccctattggtaagactctatgttttgttgttgaaggaattaaagatccttcatctgcatttgaatagcctctttaggcaacccgttcgccataacattctcttcctttgctacttcctcaacccttggngacttctgtatgaagattctctttatatgagacttttcaaccgatgggaaaaccgctattaacatcactttaaaaagcttgtcatcctcctctttaaaaaggcctctccggaagcaacaagcattaataccttcaagagccc

SEQ ID NO: 121214 - DNA, 578 bp, Arabidopsis thaliana columbia
  unsure (1)..(578): unsure at all n locations
cacgactcactaggaggaacaagctggtacgcctgcaggtaccggtccggaattcccgggtcgacccacgcgtccgtacggctgcgagaagacgacagaagggggcatctaagagaggacgacagagagcgacgattattagaacaccacaagaggtgatagcctcattactctgatctgtcatactatcgcaaatatacctccgctgagaggcgagaaagatgtgtgcatccaccgaacacatagaatcgggcgggatacaatacgatactggggctggtattagaacctcatatgccatatcgcgcagacgctaacagagcctacttggctagcgatggatcactatgcgacctcgcatagctcttgcgatctatccgattcctatacccttacatgacaatggtcgagagcatctgcgaccggacacgcttctgttacctgaaacgccaatgccacggtcactattgggggaacggatctatgagcatcangacactggtctacaactggcgatcccaacggatgttatgacctgatactgtgaaagaagaaagcaaactggggacagctgctgg

SEQ ID NO: 121215 - DNA, 170 bp, Arabidopsis thaliana columbia
catgcacgcttacgtaagctgggatcctctagagcgggcgcttttttctttttttttttttttttttttacgctcagtgtaactgtttagagagttaacaaacctctatatagaagggaagaatctttcagactgatgagagtaacaatagcaacatataggctactaaa

SEQ ID NO: 121216 - DNA, 460 bp, Arabidopsis thaliana columbia
  unsure (1)..(460): unsure at all n locations
catgcacgcgtgcgtaagcttggatcctttagagcgggcggtctatgcggttttttttttttttatattacggaagggaggttttgcttccttcttaaatttctggaagattcaaattgataaaatccaagattagttgagattgagggctctctgtgaaacaaggagcagagcacaccctggtttgagacgggggggngncanannaacccaggggaggaagatgaccacccccctgataccggggnggcagatctaactctttggttccgcctttagtgtggcgggagttgagttgagcctctgatttactacctttagcaccatcatcctgttcctcttcttcttataaaaagaccctgagggatctaggtccttcaccttncgaaactcgacgaatgggcttttctgtgcgcgtggaaacttaattttaacacttccaaagcctccttaacttgga

SEQ ID NO: 121217 - DNA, 497 bp, Arabidopsis thaliana columbia
  unsure (1)..(497): unsure at all n locations
cgcctgcaggtaccgggccggaattcccggggcgacccacgcgtccgaacggctgcgagacgacaaaagggggcggcagcgagacgacgacaaaaggggacggcggcgagaaaaccacacaacggggaggggaaaaacacaacacaaagaataactccttcccacaaaaaccctcctgtggggggggggcanncnnnaaagaagcccagaccccggagaaccccccncccaaaccaggggcggcgcgataatattcccccgacaaaaagagacccaaaaggcggggagcaaaaccagaccggggaagccccaaaaccaaaaaaaaaagggcacccacaccaagacgaccgaagaccaaaggggccacccccagaggggccaaaccccgaccgggaaccgcaagggcccggcggggagaaggaggggaagacccggagcggccggagcggcgcccggaaaaaggaccaccccgaccgaggggacagaacaaaggggcc

SEQ ID NO: 121218 - DNA, 546 bp, Arabidopsis thaliana columbia
  unsure (1)..(546): unsure at all n locations
cacgcacgcgtacgtaagccgggaccctctagagcggccgggcaaaccgttcgaacggttgtgagacgacaaacggaaaggagaagaagcattggacgggcccaaagaaaaggctagaagagccacaccagagttcacatacagtaaagaggccaggacccggagatnccaaagaaccctgaacaagggggagagncaaacaagcgaggacgacagaaaaagaaaacccccgcccgagggaaagacgcacccaccctgagaggccccgggcccggaacaaaaaaacagacgggtgggaaacacccccgggggggccgcacccccaagatccacctttaggaaagacccgagccccccaaaatcggaagccaggggcgcgaacgggaaccccaaaccacaaccggaaaaaaaacacaaccaccctcctggcccgggacaaagaaaaacccccacccccggccaaaaccgaaaggggaaccgagagcgcaaaaccacccccaaaaaaaaccggaccccaaaaccccgggggcccaaacccgccgggga

SEQ ID NO: 121219 - DNA, 538 bp, Arabidopsis thaliana columbia
  unsure (1)..(538): unsure at all n locations
cgcctgcagtaccggtccggtttcccggggggggccaggcgtccgtacggctgcgagaagacgacagagggggaatgacgataatgtcagatcttccacgggatttggtagcggagattctcaggaggggtccgttgacatctctaagagcagtgcgagggacnngctccctgctggtcgaggggggcaaagatcggagcggtctcaagaagcaaaacgcccaaacaaagaagaagcaatgggaatcgaaggagatgggggggaccacgaggaggagacttagggggtatccaaccagcatcgatatcgccaacaaggggggacccccacttacgcccaaggggacacctattaggccaaaggcggggaggaaaaccaccatgaagccggaaaggggaccagaagccctccccggggagggggcacccatcaaggcccgacccaaagaacccgacctacagggcggggggggtggggaacccctaaccgggggaaaccaggagggtcgcaccccgaaatgcgccaccccagaaggggc

SEQ ID NO: 121220 - DNA, 550 bp, Arabidopsis thaliana columbia
  unsure (1)..(550): unsure at all n locations
gcacgcgtgcgtaagctgggatcctctagagcggcgcgcgccagccgttcgaccaccttttcgcccacggaagggaactgttggaccccctctaccattggaacaaaggccaaacaggaatactgaaaaaacctcggaaaggaaaatcggggaccccgaccaggaagaacgggggaatcctttcgaaaataggggaggnggagacnagannnncaaacagaagcaagaggccccccaggggccgggagaaaccacagctccgaagcagaatcattcgctcgcaacgggaggctcagctgcgggggcataatcggggcttatctaacgagcaagctgggaaatgcccgcccctgccatagcaacatcaacacggaagagggccaagattccgggaagggcgaccatgctgggacgagaccaaaaaacaccaggggagggaacccgcgaatgggggaggaaaggaaaggcacccggggagggcggcaaagcccgcaagggtcgcaaggcaaaaaccccacggaacggcgggggccaaaaaagaaagggggaa

SEQ ID NO: 121221 - DNA, 514 bp, Arabidopsis thaliana columbia
gcacgcacgcgtacgtaagcttggatcctctagagcggccgcccaaccgcgttcttattgttgtttttttacatagaaaaagatatgaatcatattctttgggacatactcatgacctctctctctcctataagcaatggccaaagaaaaagactacacacccaaaaagggttcctccccttagaggggagcacgagcatgccccatatatgaaggatactcgcttggcatgtgcctcagtcctcgccttttaacttatgggcctttgcataaacaataattaaggggtcaaataaggatgataacaatcaagtcttgatgcttacgctgggcgacttctgggctagagctttaggtcttcgatttttcttaaaacccgaagacgaagaagaagaagaagaagggatgatcccccttgtttttgctcgaaggggggaacgaagattatcaggccgccatgaaaacggagaagaaaaccaggaaggacccgacccggaacggcttctaattgctt

SEQ ID NO: 121222 - DNA, 508 bp, Arabidopsis thaliana columbia
  unsure (1)..(508): unsure at all n locations
agctgggctcttctagaggggggggaagcggggtcaaataattttcccccgaaaaaagggggaggcaaagcatagatcagagacccggcattgagacaaagaaatttttaaccaagacggcggaggaggtgcaggaaccggagagggagaaggaaactggtttcatatgggtgtnggaaaaanaagggggagctctcggtgaaaatcccccaaggcgggggggggggggacaaaaaataaacaggcccgtgggaggggggaaaaggggaaggaagggaggaagacggaggggggagcgaagggaagaggggacaggaaggaggacggcggggaaggggcaggggggggtgaggagagagaggaggggcgaagggaggggagagggggagggccggcgggggggaagggggcgaagggagaaggggggggcggagggagggagaggcggaggggcaggggaagtgaggagggggaggggcacggaccgagagacggggacgaggaggga

SEQ ID NO: 121223 - DNA, 508 bp, Arabidopsis thaliana columbia
  unsure (1)..(508): unsure at all n locations
ccgggccccttacccgggggggaagcggggtnccaaacaagangcccgaagacaacgggggggggaaccaccgaacacaaacacaaggcgaagacccagcggaccttcagacgcggcaccagacagggggagcgacaccacggggagagagcacggctttctctggggtgcgggananaaaaccagcaccccatgggaaaaaaaaccccacgacgcggggggggagggacccacccccacccggcgcggggngaaaagggaacggaccgccagcggaggggcgcccgacacaggagcaggccaggcggccggcggggacgcgataagaaaacgccacacaggcgacagcacccaccgcgagggcagcacgaacagaaccacacgagacgaccggacgacggggcggggacgggggggaggcaccgcacgaggcacgcagagaaaacgcccgaacgcccaagcagagaagggcgggaggcgaagcagccaagcacaagcgagaacggag

SEQ ID NO: 121224 - DNA, 466 bp, Arabidopsis thaliana columbia
  unsure (1)..(466): unsure at all n locations
cgaaacancattattacacacagagaccagggccgtacacagatttatgaccaacgcaaaaacgcacgagaggggcgcagaccaaaaaaaaanaactcccctcccatttggaagttgggnnaaaaagaggcgctgctcaagaaaaaaccccccaaggggggggggggccccccataaaaaaaaaacccgaggggaacacgcaaaacggaggagggcgacagccgcaccgacgaagaggcaacggggaggggggggcgggaagacgggcagcccagcgccgacgggagggtgaggagcggcccccgcgggcgggaacaaacggcgcgcaccggggagacaccgagcggccagcgcccgaagagaggacaaggcgggcgcgaagcggcaagggggggggggagccgagccacgagcagaaagaaggagagagggcggcgagcgtagggagagaaagagcagagagggg

SEQ ID NO: 121225 - DNA, 237 bp, Arabidopsis thaliana columbia
  unsure (1)..(237): unsure at all n locations
cacgcacgcgtacgnaagcngggatcctctagagcggccgcgcgattcgnncganaagacgaccgacgggggacagggcgaaacagagacacaggannccaannacagggggaaacaacgggggttacagcggannnnacaaccacaagcaccccaggggaggaggagcaaagaattcctcattttaaggggggaaccaggnccgaaggcacaacaggaacaaagagcgccaaagaa

SEQ ID NO: 121226 - DNA, 552 bp, Arabidopsis thaliana columbia
  unsure (1)..(552): unsure at all n locations
gcaggcacgcgtacgnaagccgggatcctctagagcgggcgggaagcgcgtttagatataataccaccacaacgggaggatggccggattctgaccgaggcaagnacctggggtaaaacaagacgcgcgggtaaaaaaaacccaaacggaaaaaacagacgagggaaaagccggaagaaaacggtaaaatagggaagagggacaccccccgggggaaagagagggagcaccccaccccgggggggggggggaaacaaaaaaaaaacccccgggaagcgcgggggggnggaggaaagaaacggagcccaggaccggggggggggggggaaccccgagacccaaaaggaggggcgggggacccccgcgaggaggaagaacggcggaaaacaaggggcgagggcggggccccgaacaaggggaacncaacaagggcacaaacccggacagaggagacccggggaggaggcaccggcgccaagagaaaaaagncccgccccaaacccgaagaaaaaagagggagaaccacccccggaggaaagggacgccaccccc

SEQ ID NO: 121227 - DNA, 551 bp, Arabidopsis thaliana columbia
  unsure (1)..(551): unsure at all n locations
ccgcctgcaggnaccgggccgttatttcccgggggggccaggcgtncggcgagaagacgacagaagggcgggggacggatctgaccgtgtcaagaacttgggtccattctctggcgaattcccgagctaccttaccgggaaagttcccccggagactacagggaggggacacaattagctttcttttaggaaggaggggccncgnaccccgggaggacccaacaagagaacaacgccccccaggcgggaggggcggggggaacgacgacagcgacaccgaagcggggcgcccccaaacggaaagaaggaaggaagagaccccaaaccnacccgcccggaccccgaggggacgccgaaaggggccaaagaaaggggccacacccccccccgaaagagggggcccccccgggagcggacacccgaacgagaacaccgggagaggggaaccggggggcacagaaacaccccccgcgaacgcccgagggggccggccccagcacaaggggaaaagcccccacacgcgccgggcggcccgcgccncccccccgaag

SEQ ID NO: 121228 - DNA, 543 bp, Arabidopsis thaliana columbia
  unsure (1)..(543): unsure at all n locations
gcgtgcgnaagcttggatccttttgagcgggcggccatttcttttttttttttttatctcctcagggagggactggatgatggaattataaaagtaagaaacacactgttggaacaattttcttggaatcataccaggatccttgtctacaacctgtacaaaaaaaaagctccctgcttttggggtgcggcannaacgggnggacaaccacaaaaaaacaccccccgcatggggggggcggagcgcgctttaaagaaggcccccccaggcggagcgggaaccaaaggaccacgggggggaagaaacccaacaagggcacccccaagccacaacctcgttaacgcctcccagttcgagacctcaacacgggggaaaataaggaaaccccattttcctgctaacaatgatcttttgacgaccagggaacctaaactagctctacaaagaacctcctgggaagaacccccaagaatatcctacacctaacaaaaaaaaaaccgggtcaatcggactttagccaaggaccaaaaaccttaccaaaac

SEQ ID NO: 121229 - DNA, 498 bp, Arabidopsis thaliana columbia
  unsure (1)..(498): unsure at all n locations
gcatgcacgcgtacgtaagctgggatcctctagagcgggcgcggcacgcgttcgttcactgttccgttcgggggaacggaaaacaagaacagtgactaaaacccaaacacaagagattcggataacttaaaaacacgaggaaagaagcagtatcactttccccagaaaaccaaaagtccctcctttcgagggggaaaaccnaaaaaaaaaaaagggtaaagaagccatccccaatgggagagagcatcatcgcccccagcagcggctgcagacgtggcaaacggatctgcgactccagggggggcacccgaaccagcagaattctcgaacctgaactaagaaccgaaccccctaaactgctgcaacggctaagcaaaggcttgggacctcctgatggctggataaatcacacttctacgggcatacctgatggactcctaaaagggggcagctttgatctcggaaacttccactgcctcaggggttctcggccccccc

SEQ ID NO: 121230 - DNA, 481 bp, Arabidopsis thaliana columbia
  unsure (1)..(481): unsure at all n locations
gcatgcacgcgtacgtaagcttggatcctctagagcggccgctaacgcgtttttttattttttcttttgggggaagggacaagataattaaaaaagggcaagagcttgaaaacttaatgtgcacttgggattaatataaacaataaaaagacttcaagagatctttggaagaaggaaccctcctcttccggggaaggaaccgataccagcctccgactacaactccacaccatcatatgctacttataaaagagcttttcatattctactatataatacctggaacctggttatggaccactttataaaatctattaattattattagacagataataagggggatggaagatgccaattatctaaggggccaacaaaatacctcaaaaattgcatttttaacatcttatcttaaacccatcatnccattttgctctccagtctccaccaatcgacccccatcctcgggttgcagcaaagg

SEQ ID NO: 121231 - DNA, 556 bp, Arabidopsis thaliana columbia
  unsure (1)..(556): unsure at all n locations
gcacgccggcgnaagcngggatcctctagagcgggcggcgaaggccgnncaanacggnngcccacacccacgacaagggggaaagaaacggngaaggagagaaacgaaccccaccaacaggacaagccagagaggggagaccaaccaggagccgacaacacccggatgcggagggacattctaatactaggggggggcaccgccccagagggngcagacagacaacaccaagcagagggggggggccggccaccccgggaaagcgcagaccgaacgcggaaaaaccgcgcgcgccaggggcgaacaaccccccccccccacaagagaccggagaagggggccaaacaaaaccgcccaagcgggcggaaagccgagaaaaacccccccccagggggccgcgcccaggggaccaggcgccaaacccagcancaaggaaggagccaacccccggccgggccccgaaaaacgaccggcaaggnagaaccgcggggccaagggcaccagccccaacgcgcccagaacgaagaggcgcggaaacacccggccggggggccaa

SEQ ID NO: 121232 - DNA, 547 bp, Arabidopsis thaliana columbia
gccggcccgcctgcaggtaccggtccggaattcccggggggagccaggcgtccgtacggctgcgagaagacgacagaagggggaagccctgaggaggcaatcggagctatctgagctagaaaaacagtccttaaggaaacaagccataaaagagaggaaacggagacaggaaccgctcttcgatttagggggggcaagggggaacgggatggagctaaggaagagcgcgagaagcccaggggggaaaaaacgaaaagaagaggctgaagctgaaagcaaattgagaggcatcaccgaagaatcgaggaatacggagggggagacaagagacgaacccgagccgcgagaaagagctcgacaaggaccctaaggtgcagggggagaaggacacacgagccaaccctaatccgaccccggcgggaggggacccaagggaaggggggagcgaaaaacaacgagaagccggccccaaaagcccaacagagggggcaagaaggcgggagaagcaaaaggagggggcggggaaaaggaaaaagacccaaaagga

SEQ ID NO: 121233 - DNA, 439 bp, Arabidopsis thaliana columbia
  unsure (1)..(439): unsure at all n locations
cgcatgcacgcgtacgtaagcttggatcctttagagcgggcggtatctgttttttttttttttttttttttttaacaaaaacttgggttgatatcactattcagattatgattacaaccatatctagataaagaagctggatacaaatacataatcttatggactaatgnggccatgcctgccatttcaggggggaacaaggggaacaagctcaagggcagacttcctgctaataatgagagaccctgtctcttccaaggggatgtccttcacattcttccctacaggcactacccaatcgaagaagtaaagcaaattcaacagtcccaattccacgggggggattcccagcgtcaccccgggacagattctccggccagaaccaaatggtaacagctcaaagtgtacccctctgtaatctatggagctggcaagaaac

SEQ ID NO: 121234 - DNA, 340 bp, Arabidopsis thaliana columbia
catgcacgcgtacgtaagcttggatcctttagagcgggcggtttttcttttttttttttttttattttttttttgggtttgttttcttttttttttaaagggaacgcaaacacttttgggagcttttcgattaaaaagggtgaaaacacttactcccgacttaaaataaaaagaatcccgtccttttacgaggagggggaaaaccaaacccaaaaccaactaaaacaccccgagggggggaggagctttaccgactttatccaagggtatttccaaacctcattttttttaaaaattttgaacacaaaggttgggggggcaacaaccggttttggccgga

SEQ ID NO: 121235 - DNA, 410 bp, Arabidopsis thaliana columbia
  unsure (1)..(410): unsure at all n locations
ccggcacgcctgcagggaccgggccggaatacccgggggcgcccacgcgtccgtacggctgagaagacgacagaaggggnggagacggaagaaggagtgtngatccggtcccgcggggaaaggactcgccatcgttgccgccgagacaccggcgggacatagaaacccnccacacccctcctacgaaggagagagcaaggnacnngacccacacaagcggggagccgccaagggcgagcccggggaccggccacagatcacggagtacgctccaaaaaaaggggccccgggccaacaacagaaagggagaccccggggaccaaccgccgggggggcccaattcacccgcggagagcccgccaccgccggagaggaaaaaccggcaccggggaaaacccggaggcgcggcc

SEQ ID NO: 121236 - DNA, 319 bp, Arabidopsis thaliana columbia
  unsure (1)..(319): unsure at all n locations
taaaaaaaaacccaaagggggnaaaaaaaacagaaacagcggggagcccgccctccgagaaaggggaggcgcaaggaaagcgggaggggagatnacccctcggggtgggaaaaangggggggccgggaaaaaccccccggggggggggggccccacataaaggggagcggaggaggaggacacccagcgccgaacagacagagcgcacaagggccagccaccgaaggggcggcgaccggcgcaccacgcacacaggcaagccacgcccaccgcacccacacccaaggcgcaggcacgaaccgagcaacgcgagcgcaga

SEQ ID NO: 121237 - DNA, 521 bp, Arabidopsis thaliana columbia
  unsure (1)..(521): unsure at all n locations
aaaaaaaananacccccccnaaaagaggggacaccaaagaagccacaacacaagaaaacaggggcgacgagagccgcccagaccttctaacgaaggagaaaagaccagacgacaacacgggagaggaaaaaaaggagaggctcccctancacctctcnggggaggggaaaccggcaggggcgagcgcgccgggagaaaaaaacccccccagaaggggcggggggggggggaacacccctttaaaaaggaaccaggaggagaggcgcgaacacgccgggagaccgaaccacccacaaaggcgaagcccgggcgagggcccggagagagagggagaagaggcagcagcgcggacagcagaacgggcgcagcgcgacagaacagacagcaggagggaaaacaagagaacggggagacgcccaaggagcgaggaggaaggaaccacaaagcgaaagagaacacacaccgacggaaccagagcgacgaaggagaaccgagacacccgccgagaaaagacgcgcggc

SEQ ID NO: 121238 - DNA, 543 bp, Arabidopsis thaliana columbia
cgcatgcacgcgtacgtaagcttggatcctttagagcgggcgctcttcgttttttttttttttttttttttttatcaggaggataaaacttttaatactttaatttttatcgcggatacaaaacatgagaagcatttgaagaatttttggtttattatacattaagccgcaaaagatccctcctctttgagggggcaaaacgaacatggatgagaggtatgcttatggacttttcaactaaggaggggggagcctggcacatcataaaaaggacaaactagtaagatagttgcgcgaggaatgaaaggaaggggtctcgcatgtctacttcttgtggtttaaccagaggatcaatggcgtctctccatccttcataatctttgggagaaccagcaccaggcagctcgaatccattcacgtaaaagggtggtggcggggagactcctcttgagacgctattcttgaaggaaactctaggggcaagatcagattttgagtggctgaaggccaatttcaagggagaatggaatgagtttcctaacg

SEQ ID NO: 121239 - DNA, 525 bp, Arabidopsis thaliana columbia
  unsure (1)..(525): unsure at all n locations
gccgcacgcctgcaggtaccggtcccgtattcccggggggacaacgcgtccgtacggctgcgagaagacgacagaaggggacgacgacgaaaaaaatgattcaaaaaactatttttttccgtaaggaagaaaaggtatttttatgttttaaaaaggtgaagaagggccagaatcgctttctctagggggggaggganncccatggattatataattaaataagcgccttaagaaaagaaaacagatgccgaagtttaaaaaataaaaaaaaaaccaaacataaggggcgnnnnnnnnnnnnnnnnnnnnnnnnnnnnnnnnnnnnnnnnnnnnnnnnnnnnnnnnnnnnnnnnnnnnnnnnnnnnnnnnnnnnnnnnnnnnnnnnnnnnnnnnnnnnnnnnnnnnnnnnnnnnnnnnnnnnnnnnnnnnnnnnnnnnnnnnnnnnnnnnnnnnnnnnnnnnnnnnnnnnnnnnnnnnnnnnnnnnnnnnnnccaaaaattgccaaccccaatggggaaagggacg

SEQ ID NO: 121240 - DNA, 519 bp, Arabidopsis thaliana columbia
  unsure (1)..(519): unsure at all n locations
cgcatgcacgcgtacgtaagcttggatcctttagagcggccgctattcttttttttttttttttttttttttaagggaaaaataatatttttgatcagagtgagttcacgcagtttccatgtatattcatttgttcctaatttccatgtctggcctcttttgggggaaaacaaatccctcaattttacgggggcgcgggnactccactacaagcctctaaaccaaccagtgattaacacgcgctttaacatgagagtgggactcacgtgaactaatctattttccccaaatctgaagactttcactttttttttgagccctctctcttcttcttcttcttcttcttcttcttctaggccttcagcacaaatctcaaatcacggggatttcaatttccaacacaaagaaagaaaaaatccctcaataaaaaatctcaatcggaacgccgatgatggatccaacaggatcgccaagaacatcgaatggctctcctccaagatcgtaccttatctttatgcc

SEQ ID NO: 121241 - DNA, 584 bp, Arabidopsis thaliana columbia
  unsure (1)..(584): unsure at all n locations
ccccgcacgcgggacggagccgggatcctctagagggggcggaagcggggtntaaaaagatgcccccccacgaagggccgaaaagacaggaacgccccccccgcccagcgccaatagcccctgtgtccccaagcagggacaaccaagagaaaaaaaaaacgagaggccgcaaggggggacancctaaccctcggaccgggagaaanagcnacgaaaccccccacggaaaaaaaaccccccccaagggggggggggggggccccaacgaaaccgccgccaangaaacaagacaaaaaaaagcggggcccgcgcggcaccgagcgccccgcaagccaaaacggggcgaaactcacaaagaacctaagagggcacggataaaggcgccccacccagcacagcggaagggaggaccaaacctcgcccccgcgcgggaagccgcaccccgcccatcagagagcggatgcacctcgcccccgagaccgaaagacggaaaagcacccgagaccgccaggaagaaggaagggccgaacccccgccagcacaaaagccgcagacacacgggcacccgaggggccccggcccag

SEQ ID NO: 121242 - DNA, 544 bp, Arabidopsis thaliana columbia
  unsure (1)..(544): unsure at all n locations
cgccngcaggnaccggncccttatncccggggggacagacgcgnncaaacggcagcgagaagacgacgggaggggggagagccccgacgcgaccaaccaccnccagcggcgccgcatatccaaaaaagcgcggggaggaaacgaagaaccccaagacccccgaaaggcgaaactactcatgggacgtagggnanaanccagcgaacagccccggggaaaaaaccccccaacccagggggggggggccccccacaggcagggcccccaaggcccaaaaaaaagaaacgcgagaggggcggccccgccccccacaagaccaaaacgggaccgcgccccaaacactgcaaccgggaacagcccaacgccacaacaagggcaaggaccccaccgcaacgccaaagaccgccaccccccacaggcgggggggggcgcctggcccaacccccgaacacccgcggacgcacagaccgcgccaccggcagagcacaaaagacgaggagcccccgccagggggccaaccggcacgacaagagcgcccgaccag

SEQ ID NO: 121243 - DNA, 523 bp, Arabidopsis thaliana columbia
  unsure (1)..(523): unsure at all n locations
gccgggacgcctgcaggtaccggtccggttttcccgggtggacccacgcgtccgcggacgcgtgggcggacgcgtgggctgcgagagacgacagaagggtacggctgcgagaagacgacagaagggtacggctgcgagagacgacagaaggggacagacgccatcattaacaacatcctcctaagcgggggggagncnctccgggtggcggaagatttcacgacgacccttcaatccttatccgaaccggagaaatcatgtcggacgctttgatcaatggattggctggagctggtggtgggatcattgctcagcttctcacttatcctcttcaaactggaagtacgcgccaacagacggagcgggatctgaagagggagaagaggaaacttggaactatcgaacacatggggcaaggctgccaaacaagaaggatgggagagggtataatgggggattggcgccgtctcttgctggaacgggtgcatcacaggggggggaccaccacttctaccaagggggg

SEQ ID NO: 121244 - DNA, 499 bp, Arabidopsis thaliana columbia
gggggggaacgaccgcccgagagccgaccgaggaacgagaccggccctcgacgcacacaagaaaacgcccgcaagaagcgacgcacgcccacgcaccacttcctcctctctccgggcgtggggaccaccggcgggggcgcagcggaaaaagaacccccaaacgcggagggggggagcgcccccccagaagaaagggcccgggcgggggggcgcggccgcaaagggagaagcggccacggcccccgaccgcgcgccacagcagaggccgcccgcgggcgacgggacgacacaaggaggacggcccccgacgcgcggtagggaaccagcgcggcagacgacgccacagcgcacgcacgcccaccgcgggccccagcggccccaccccacacagcgcgcccgcgcgcgaccagacggcgcagcgcgcacgacaaaggacggcgcggaagagacgagccaaggcggcacggagagcgggcgaggcgggcgcagcgaaagggcg

SEQ ID NO: 121245 - DNA, 471 bp, Arabidopsis thaliana columbia
  unsure (1)..(471): unsure at all n locations
ccgcctgcggaccggccggccttccgagggaggcagccgncggagagacgacgaggggggggcanncaacnngacggacaagaccaganncccngactcttagactgcgactgtagcgaaggagcgagaggaaacggggnnacttctctatttggaggtgncacnggggggcangccaggaccaaaaccccccgcccgggggggggggacccccccccggaaaaaagngagggagccagaacccagaggggaacaccgcggggagggcgggaccggcagcgaaaaggcccgagcccgggggcaccaccagggaaccgagacnaaggaggggacgggggggaagggccaagggggagaggggcgcgagcgaaacccgggccggggaaaaggggagggggcacagcccaaggggggggggagacacaggaggggggacaagaggggggggaacgaaaaaggggcaggaagggg

SEQ ID NO: 121246 - DNA, 487 bp, Arabidopsis thaliana columbia
  unsure (1)..(487): unsure at all n locations
ggcgccgcggaccggccggctccgaaggacgagcccgcgccagcggncggcggaggggaaaaggggagcgaagagaaaaccacaaagagaagcccagagcccaagcagcnacacaagcaaggggagggcgagggcccctcaaaaaggcggtggccganaaaacaggaggagaaaaaaaacccccggagggggggggggggccccaaagaggggagagcccaggggaggggcggaggaaacccgggcaaaaaagaggagggggcgggaaggaccccaaaagggggcaggggggaaaaagaccgggggggggggacgcacggaatagaaaaacgcggacgggcgccgcaagaagaaagcggagggagggcgcggcggggaggcgcccgaaagaggaggccgggagcgggggcaagagagggagccggaaccccccgggacggggggggacggagggaggggcggaaaagaacccccaggaagggagggg

SEQ ID NO: 121247 - DNA, 549 bp, Arabidopsis thaliana columbia
  unsure (1)..(549): unsure at all n locations
cgcctgggggccgggccggctttcgaagaggttatcagncgacacgngnncggcgggggggggaganacagaaggggggaganaaaacccccaaagaaaaaacttttagagaaaacatcgggggtgctccaaacacacggaaaagttcgagggcctggttcccttttggntgttgggcccanaaaaagagggcnnaaaacaaaaaaaaccccccngggggggggggggggggggaaaccacagaagggaggaaccngagggggggggcggaggaaaagcggcgcggggagaaaaaaaagcgcagcaacccacaaggagcgggaaaccaagcacagggaggaacaaagggggaaggcgcaggccaaggagaaggaagcaaggaagggaaaacgaggacagaggagaggggaaacagcgagaacgcgcaggaggcacgggagggggcaagcaggaagaaaaacaggggggagaggaaagggggggaggggcgccgcggggaggcaagggagagaggaaagagagcgagaagaaggaaagagaaaggagaga

SEQ ID NO: 121248 - DNA, 486 bp, Arabidopsis thaliana columbia
  unsure (1)..(486): unsure at all n locations
aaaagggagaaccccccgaaaaaaaagggaccaccccggcccgcacgaagaaagaaaaaaaagggggaaaccccctcctccctggggccgaagaggaanacaagcgggggcggcgccccaaaaaaaaaccccccaatcggggggggcggggggggcaccccccaaaacgcccccggggcgggcgcgccgcccgaaaaaaaacccccgcgcccagaccacaacccccccaacgacccccccgacacgacaccacccacgcaccacccccggagcaccagcgaggaacaaaaagaccccgcgacaggcgcacagcccgcgcacaaaaaaacacaacacccacgaaggcggcgacgagaggacggagcggccggggcccggcgcgcagccaacgccccgccgccaccccccagacccgccccccccccgcgggggaggagagagccacggggcagacgcgcggcaagagcagagagccagagagggcac

SEQ ID NO: 121249 - DNA, 468 bp, Arabidopsis thaliana columbia
  unsure (1)..(468): unsure at all n locations
cgcccacgcgnncgcggacgcgaggggggcngcgagaagacgacagaaggggagggagngcngaaacactttggagacgacgaggcgggngcgccacagcagaaggaggagaacaaaanccctccttcgtttttgggatggagganngagggggaaggcaaaggcggaaaaaaccacccaattggggggagggagaaaccgctaaaggagggccccccccgatccgggcagaagctgggagaccgggaaacgagggggggcgcggttcggcaacacaagatgnagctccagaattgcggggaagtcaaaaggccaaggggatataccgaaatgggtgccaaaaagcaggaaggaagggaaaaaagaggggggggacaaaagaaatagacggggggggaagaagggaaaaaaaaaaggggatcgcggggggcgcccgagaaaaaagggaaggaagaacaaggggcgggg

SEQ ID NO: 121250 - DNA, 473 bp, Arabidopsis thaliana columbia
  unsure (1)..(473): unsure at all n locations
cgggggcgagaagacgacaggaggggnagagaanggngacacccgngaagcngggagaagcacctttgaggnaggngncncgnnnncccaccacgagaacgngaagagaggnnnggtttctctcattttggccggagcgccganccgctgatactaaaattgttgaaagaccctactgaagggagggtcattacctcgattcaaatggcgaaagggttctcccgaggagcagatgagcttgatgatctttttcttgacatcccatctgctaaaacctctgttgaggcaatagttcccaaggctataatgggaggtggggtccgacgaaaattcgttaaaagaaccctctgatcaaaaggggggcggggaaaaattaaggcggtttcagagaggggcccacccccttatcggaggatttttctcttttgaaaaaaacccccgaactattccggaggtttgaggatttaggtccc

SEQ ID NO: 121251 - DNA, 420 bp, Arabidopsis thaliana columbia
  unsure (1)..(420): unsure at all n locations
gggagcgggggaaccaacacgaaggccacaaggaggggaannnaagcgaaacaaacaccagagccgggcggggacaaaagaacaagacgnnancaagggcagccccccccaaacaacggtggtgggacagaaaaaggggggtatgcagaaaacaacccccaaagagggggaggggcggacacaacaaacggggaacccacagggagggccgcaaaaagcgaccggcaacaagaagctttggcacggaccacccccaaaaggagcccagaccaagggacccccaaaaggggtgggggggaaaaaaaaacggggcggggagaggccgccccccaacgaacgctaaagagccagggggggggggagccccgcccccccccggaaaaagcccaaacaaagggggccccccaaaagggggaaaaa

SEQ ID NO: 121252 - DNA, 377 bp, Arabidopsis thaliana columbia
  unsure (1)..(377): unsure at all n locations
ccgggcgccngnggnaccgggccggctacccggggggggcacccgcncgccacgcgnncgacggggggggaagacacagaaggggaaccaaaaaaaaaaagagagnacacnctacgagaccgggagcgaaacggcgaggggggaccagangccncgccggaaagccctctccgctcgggagtgggnnggggnctnggccatcctccaaaaaaagcccccagccgggaagggggggggaacccccggacaaaacgccccctgggccaacaagaagggggatccggcgccaaaaccccaccgggccggattgggtggcggggcgaaacggaaaactccacccacggaaggggaggagcccaccgggggggggagccgga

SEQ ID NO: 121253 - DNA, 574 bp, Arabidopsis thaliana columbia
  unsure (1)..(574): unsure at all n locations
gcggacggagccggggacccctagagcgggcgggggagccccnnaaangggngnnnnaaanggaaaagggagaaagagccgcccnaacannnnaccaaacaaaacagaacaancacccaagcggcgggacaaaggtgaaacccccgggaccacggaccaaaaaaaaaactcctcaaaacaaagagttgggaannnnaacagacaaaaacggcaaaaaaaacccccgagggggggggggaaaaccccaaagctggaaaaaccgccaaagaaaagggcagcccaaaaaacacccgcaaaagccccacccgggggcgccggacacccgaaaagaggggcgccacagaggcgggtaaagaagaaacccccgcggggaaaaaaagaaaaaacccccccccggaggaagaaggggaaaaagaaaaaagggcgccacacacggcccgaggggggagaggaagcgccacccccgcccgggagggagggctccggaagaaaaaagaaggaacacgcgcccgggggggagaccccccccccaccagggggagaggaaggcccagaccggggggaagaaaaacag

SEQ ID NO: 121254 - DNA, 508 bp, Arabidopsis thaliana columbia
  unsure (1)..(508): unsure at all n locations
aggagacaagaaaacannngaaagaagaacaaaccgggaagggggccctgggacccaaaaccccaaacaaaccctgaaagaggcaggcaaacacagaaaaaccccctccctcctgggccgccgggaacacccaaacgaaaaaaaccgccgaaaaaaccccaccatggcgggggggggggggacccccacaaacaaaaagcgcgcccaaaaccaaaggggaaggaaaagaggggggcgaagggaacccaacccccccccgcgggggaggaccaaccaccaccacccccggagacaggggccccccaccgggagaaagagcacaggccagcccacccgagggggagcacgagacaacccgacacccgcccgagggcggagaaagagagaccaccaccggagagaagaccccggagacaaaaacccccgcgcaaaagaacgacggggccccccgcaggaaacaaccggcggaacaacagaccgcccgggggggaaggacaacatcgggaag

SEQ ID NO: 121255 - DNA, 458 bp, Arabidopsis thaliana columbia
  unsure (1)..(458): unsure at all n locations
gccgagagaagaaacacaaggggcaggggnggaaaagnccnncaaaaaaaaaaaaacncgaaagcagcccataaacacacgcgaagcggaacaaaccggaagaaggngagccacagaaggggnccccccttccaccctgagctgcnggacgnggnaaaaaaaaattccccgaaaaaacacccncctaggggaggggggaaacccaatgaagaaacccccggtctggaaaggaaaaaaacccgggccccaccaaaccaaggaaagcagaaaaaaacaaaacacccccctaaaaaaaacaccacaaaaaagaaaaaaaacaccgtggaaaaaaaaaaaaaacaacaccccgaaaggccacaaaaaaaaggggggagaaccccaaaaaggaggaaccaccagggaagaacgaaaaaaaaaaaccagaaccacaaaaaaaataggaacacaaggaaaggcga

SEQ ID NO: 121256 - DNA, 520 bp, Arabidopsis thaliana columbia
  unsure (1)..(520): unsure at all n locations
cgcctgcagggaccggnccgctaacccgggggggcagcgcgnccgnacgggaagacgacagaagggacagagaacaaacanagagaggggatagaccgcggncagaaanngaaggagcaggaaacagagcgcaagcncaagncncagaagccccccganacagacccctctgntatagagacggggcaganncncaagcagcaggaaacaaaacgcccacccaaggcggaaagagggccacacacagaaaagggggaccaggaggacaaacnagaaggggcagggagggcnaaaaggggcagaagcagcgaggggagggagggaagggaaagaaaccaaaaaccgaaacgccgggaagccgaacaagggaaaaancccccaccagcagggaagggaacgcgganccaaaaaagggaccacccaaaagcgggacaccgcgggcaaaaccggaaccccaaacggggacaccccaaagagaaacagccccggggcacagacaaacggaaccggaaaaggaacg

SEQ ID NO: 121257 - DNA, 433 bp, Arabidopsis thaliana columbia
gcgggggggaccatacaaaagtttttacaaaaaaaatatttcatcattttagaatctttcacaaaaacccaaaatttcttatttttttgggtgggagaagagccccaccgtgatctcgctagaattttcaaccattgggaagttcatgaaaccctttttgactcttttttttgcgggaagaagaggttgatttttttaagcaggcaacaagcttttattggcctttggattcccataactggccaaaccaacctcttttaccgcccccaccattggtttttcctttcgcggttttagaaactttatccctgtttcaggggaaatgttggggggctgcctctttctgaaaaaacttccccaatgtttgggccccttctttaaaacccccttctttttggggcgggccctttggtttctaacaaacatttgtggg

SEQ ID NO: 121258 - DNA, 436 bp, Arabidopsis thaliana columbia
ccccaagaggaaaaaacacaaacccgaaaaaaactatgataaccacaaaatggggggcgagggggccaaacaaaccaacaaagcaccgcctggaaacagagggtgagagcaaagcccgtgggaaaaagtcaacagacaaccaccttcagggggccgagaggaaaaccccaaaaaaccccggaaccgccccaggggaaaaagcagagggcccccgggggggaaaaggaaaatcccgccccaacacccacaaccccccgcgggggagccccacaaagcggggaaaacaaaaaaaggggggggaaaaacgggggggacaccaccggaaaggggccccacggagagggcccacgggcccaccccgccgaaaagggggccccccccccacagggggggggaaaaaccccccgcccccccggaaggggaccccccagaaagg

SEQ ID NO: 121259 - DNA, 250 bp, Arabidopsis thaliana columbia
  unsure (1)..(250): unsure at all n locations
ggacgcctgcaggtaccgggccggttacccggggggacccaaccgtccgtacggctgcgagaagacgacagaagggggaagaacagagnnagntntcaaggggaatccacagatccactgaaatcaacaatggtgaataaagccccgaagaggaaacatgtatcaccngactcttctcttctcgggaggggcaaagannnnggggnnccaaanacacaaaagcccgactctgggggccggagaaaaccca

SEQ ID NO: 121260 - DNA, 364 bp, Arabidopsis thaliana columbia
  unsure (1)..(364): unsure at all n locations
ggggngggggggggggggngtcctgngggggggggggaaaatcaagngggnaagggaggggggngggggggagagggggaggnnaaaagaagaggaagggaggagggcaaagggggaggagaggcggactttggaggccgagagagaggggagagcggcaaagagaacgaggagagggggaagagaggcctcccctccaaaaaatcggntgtnggagaagaaaacgaccaccgcgaagaacgggaaaaaaggcccccggggaaggggggggggggaggccccacgggcagaacgaggaccagagcgggggacagcgacgacggcacgagacgagcagcacacagcaggggcgcggacgagcgag

SEQ ID NO: 121261 - DNA, 531 bp, Arabidopsis thaliana columbia
  unsure (1)..(531): unsure at all n locations
cgcctgcagggaccgggccgctanacccggggcgggaccgcgnccgnacggcngcgagaagacgacaggaggggcgaccccaggncaggcgggaggacccgccgagnnnaattttaccaanaagcggaggaaaagaaagngagcgcgaaggcnaaggcnaagccctttttcttttttgggggtngggcaacnaagaggaaagctgttgatgcaaagcccaaggctaaggggggaccagccaccgcatcctaaacggccaaggttaccatctcggctaagaaagctgttgctgccacgaagaaagtggctacgggggccacaaaaaaaaagactccggttaagaaggtggggaagccaaagacggttaaagccccagcaaagagggctccttctanggtagaaaagtgaaggtaggggccgcagggagaaaaatgggtaacgataggtaagacttggataaggcaatcatccttaaggcgacggtggggtggctttccagagaaagaaacgcagaaaacaagaggggggggg

SEQ ID NO: 121262 - DNA, 495 bp, Arabidopsis thaliana columbia
  unsure (1)..(495): unsure at all n locations
ggggaaacagaaaaaagacncnaccgcacnaccaaaaggaaaaacgaaacccccgccacaaaagacgaatttggggagacagggaagaagccccccgngagaaacccgctaaaacaccgaggggtgaaagaanggacaggcccaccacaaggaaaacccgcaaacccgggggggggggggaaccccggggaaaaagccgggaaccggaggcgagaacccaagcggacggagggagggagggaaaaacagagacccgggccccgaaaaagagggggggccacagagaaaaagagaaaggcagcccgcacaagcgcaccggggggaaaagaagacagaagggcgcaaaaaagaaagaaaaggggggggcgccgagaaaaagaagcgagaaaaaacaagggacaaaaacggaaaaacggggggaaaagaagggggggaagaagaaaagcgggggggggaagaaccgcaaggacgaggcccgtcggaaaaaggagaaaa

SEQ ID NO: 121263 - DNA, 493 bp, Arabidopsis thaliana columbia
  unsure (1)..(493): unsure at all n locations
gcggggcgcttgcgggaccgggccgcttacccggnggttcaccgcgnccgcnactagacatnccnnaaaagaaggctcgaggaagcgataaacgagaccaaggtacagtcattgtggtatcccacgatcgatacttcatcaaacaaatcgntaacagaggganagtcgttttagatggggcgttggaagannangcaggcgaccacaaggaaaacaccggagaagaagggggaggcgagaacaaaggagcnagagagagaagcagagcnagaagagaaagcaccaaaagngaaggcaaagncaaagaaggcaaaagcagagaaagaagcgaggaagaagcagaagaagcaagcacnncaacaagccaaacagaaggcaaaggcgagcaagaaccccaagagagggaaccgaacaaacacggagaacggaaaggagccaagaacgacaaaaaagggcggccgcacaggcccacaaaaacggcaagggggaaggg

SEQ ID NO: 121264 - DNA, 378 bp, Arabidopsis thaliana columbia
  unsure (1)..(378): unsure at all n locations
gcggggggggcaaaaaacaagggaaaaaaagggacccccccgcacaaaaaaacccttgcggagagggggcacaacaagccccaaaaccaggggacaaaaaaaaaanccggggggttctcctcctttttttagggctgtcggggancaaanagagaggaaaaatgtgcagaaagaaaaatcgccaccctactggggggagggggggggcacaccccatataaatgaccacaccagcggggtgctagacccagaaggacgccgacaatcgacgccccgtgcttgacacaccaaagagaaagaaaaaacacggggggggggaaaagtagagacccacaaacgtaaggaagtgagtatagaagatagagccgggccacagag

SEQ ID NO: 121265 - DNA, 522 bp, Arabidopsis thaliana columbia
  unsure (1)..(522): unsure at all n locations
gggggggcgccggcagggaccggnccgctannccggggaggagatccgcgnccgcccacgcgnccggaggcggcgagagacgacagaaggggaagaacaaagacganncganggaancctccataagagggccgacccgaattcgaaaacccggaagaaccgaatcgaaaaagtcgctgagaaagatggatgaaggaccaannctgaggaatgaaggaagaaaacacgccatgcgaggggaggaggggagggcaaaaacggaccgggggagctcggaatcataaggcgggcacggggcggggatccaacagaagcacaacggaaatcaaccataacgacgggagaatcccgcggcgccggtcgattacgacggacgcctaaaacaaagggcgaaacatctgaaaacagagccggccgatcggcagcgtcgggaaggggcaaaagggcccgacaaggaagggccgggaccggtggggggggagaaccgaaaaacaacccacaaggagcgggagaaaaaggagg

SEQ ID NO: 121266 - DNA, 386 bp, Arabidopsis thaliana columbia
ggaaaaaccggaggggacaaggcgccccaaggagaggggagagcagcagagaaggagagaagaaggccccaaaaaaagaagaggcaaaccagggggcgcagagaaaaaccccgagggggggggggggacaccccaaaaaagagaccggggggggggggcgcggccggaagaaaagaaagccgagacccgacgcgaacaacccagaaacgcgcggccaggcgcggagggagggaagaccagccaacgggaggggggaaaaggggagccgccgcacgcgcggacgcagagggacgacgacgccagaagaccgacggaacgggaagcgagacggggacgcagcggagaacgcaggaggaacagggcgcagccggccgaggaaaggggag

SEQ ID NO: 121267 - DNA, 567 bp, Arabidopsis thaliana columbia
  unsure (1)..(567): unsure at all n locations
ggggggggaggctggatgtaactgccttgctagagcganggactcgcatgcacgcgtacgtaagcttggatcctctagagcggccggaaccttttttttttttttttttttttttttgcgcaacaaacatcataatagtacacgattatttcggaacgtaaatgtctgcggaacaatagttcaaagacatcattattacggggactgaaaacagcaaagtcctataattaaggaggaagaaacgacagcgtttttgggtgatgggtcattttcaaatggcttcaagagcttgaaaaatgtcagctttgacatcttcaaagtcttcaactccaaagctgaaacgaaccaagttacctttgattccatactttagtctctcctcttgcggcagatcccagtaggacatgatagcaggttggtcaacaatgctttcgcagccaccgaaggatggtgcaatgtaaggaatctttagagaatccacaaacttgattggcggttcaatgcccccatcaatctcgaaactgaccacacctccaaaaccagtcattgtgccgcttgggcgagttc

SEQ ID NO: 121268 - DNA, 536 bp, Arabidopsis thaliana columbia
  unsure (1)..(536): unsure at all n locations
gcggcacgcgtgcgtaagcttggatcttctagagggggcggaaactttttttttttttttttttttanacggcgaaaaagtgagggtgtttgtattattaaaaaaacatatagtaatgtttttttattagtatcaataataagaagaagcaaaggggacaaagacgaaaaactcctcctgtttttggggagagggaaaaaaaaagaaagggggggggaacaaaccaaggggggaacgaggagcaaagcacttggtatgaccaccttgagcaataatgttaccaggcggggtgtttctcagctgcacactcactactggtacaggtttaccaacacgcaaaggctcggattctatctctatctcttcatcgaaaaaagcagcgtcaagggatgaaacattgatcctcactgaaaccccggaaagtgaacctccgggtggggaaatcactggtgagcctttcaaatccaacacgggggccgtggctccctcgtggaaaaatttccctgcggccaggaaaagaggggggggtttcctgg

SEQ ID NO: 121269 - DNA, 473 bp, Arabidopsis thaliana columbia
  unsure (1)..(473): unsure at all n locations
cggggacgccngcaggnaccggncccctatncccgnngctaaaccgcgnccgnacggcngcgagaagacgacaggagggggagccannnaaancngagncacaccaaaaaannnncgatttaaaaaaaaaaccctcaaaaggtgttgatacggaaaaagaaaagggaaagattcctccttanggaggggtgaggcggngaaaaagaancnggaaggagaagaagaccaaaaggccaaggaaccaagggcgccnaaannaccacacagannccncgaacgaaacggaaccaaggggcnnaaaggggancncancgaaccgggccggancgncggccccaagaaaancccnccncancnccggaacgcagggaaannccnacacggaggagcaacggggacgcgggnggagnnganaggancagcagnganncacacagcgcgagcnncacaagccgggggggcaggggagaaca

SEQ ID NO: 121270 - DNA, 565 bp, Arabidopsis thaliana columbia
  unsure (1)..(565): unsure at all n locations
ggcacgccggacggagccgggaccccctagaggggcggggagatcccccgaacngnngnnnnaanagggggggggggcacaacanccaagcaaaaccacancgatcggncacccaggcacggcaccccgcgaaccaaaaacaaggaaccgccaaaaaaacaggaaaaagaaacctcctctaaagagagggggggggccacggggcggggagcaaccaacaaaaagccccaaaagggggggggggggggaaaacccgagagaaccggccgttccgaccccggaaaaggggaacccacaaacaccaagcggcaaaaagcggaggcgaaagaaggggaagagagaagacccgcgggggacgaacggtttaaggggaaaaacccccgcgcggaaggaaggggaaaaaccctgaacggaagggggcgagcgcgccaaaaaagagaagaaaagagcaggaaggaacgggaaagacaacgcgcgggaggccccaaaagggaaagggggggggccccgcccgagcccaaccgggagagaaccgagggggacgggcaacaaaccgggggggggg

SEQ ID NO: 121271 - DNA, 556 bp, Arabidopsis thaliana columbia
  unsure (1)..(556): unsure at all n locations
ggggcgcctgcagggaccggnccggccttcccaaggcggccagccgccgaacggnngcgagaagacgacagagggggaaaacaaanacgaanaaaaaagggganaaaannnnagggtgaaaatacaccagaatgattgaaatggaaaggcgtacctttngggctaaggaattgctctgatcgggagggagggcaagnaaggggggagccnncgaaaaaaaacgcaaaccgggggggggggaggcgcaaccgcngggaaggggacggaccggnncaagggaaacgggngggaccaacacccagccggggagagcgacgaaccacgcggggggccacaagaggaaccggacggaacaccccagngcccgagaagaagcaccggggggggacccacgaacagaccgggganggaccgggccaagaaaagcgaaaacccaccgaaagaaaaggaaaagagcccaccgccaaagaggggggcaaaaaaaaagaaaaagcggagagaaaggaggggcaaaaaaaaaaaagaaaaggccaacgcgaaaaggaaaagggggggg

SEQ ID NO: 121272 - DNA, 474 bp, Arabidopsis thaliana columbia
  unsure (1)..(474): unsure at all n locations
aacgagaaacacgccacggaaagagaaacgccaacaaacgaaaccagaaacccaaccccccggggaaaacccgggaaaaagaaccccccaaaccaggggggtggaagggncnccgggaaagaccaaaaaaaaagcccgaatctggggggggggaacacccccaagcctggggaaaaaggcagagcaaaaaaacgggggcaccgggggcgcaccccaaaaaacagggaaaccgacagaagggaaaccgccccgcggcaaacaaccccagaaggggcgggggaaacaggggaaaaacggggagcgggcccgacccggaaagggccaccaaagacggggcaggaccgggagaaaaaaacggggcgggggcccgggaaaccggagggaaaacgggggggagaaaacaacgcggcgagggaaacaaagacccgccaagggagcggccgcgccaggggagaagagaagaaaagagggggg

SEQ ID NO: 121273 - DNA, 483 bp, Arabidopsis thaliana columbia
  unsure (1)..(483): unsure at all n locations
acggnngcgagaagacgacaggggggggaaccnccgacnngacggcaccgccggagcacgacgcttctctaagacgaaccaagagcggggcgaacaagacacgaggcagggaagaaagacctccttccacctggntcgtcccggccaanaaacagaaaacagnnngaagaagacccccaaggggggggggggggaaaccccagttaaaggaaccaaaaanggaggaaaaagaggagcgggggaaggaaaaaaaaagagaaggggcgaacaagaaaggcgcccgcaaacggggcaagccggaccaacacagggcgccaaaaggggagaggggcgagcgggaggggaccaagacagagcaggcgcgggggggaaggggaagggggacagaacgcgaggggggaaagaaaacaacgcccgaagaggggggaaaaaaaggaagaaagccgaaacggggaaacgggtggaaaggaagagagaaaggga

SEQ ID NO: 121274 - DNA, 341 bp, Arabidopsis thaliana columbia
  unsure (1)..(341): unsure at all n locations
cccgggggggggggggggggccctcggggggcggggaaccacnnnnannaaaagnngggccnaaaaaggggaggaaacaacgcaagagacgcgaagcgaacacgcagccgcacaccccccctggggaaaaaaagcacagggcgcccgagcagcggggaaccgaaaggagaaaagaagccgcctacaaaaaaacgagccgtttggagagnaaaacacaggaggcgccgccggtaaaaaaaacccccccccgttgggaggggggggggggggcccccccacccaaagacagccgccagcgggggggcgaccggagacggagcagcagacggagccggacgaga

SEQ ID NO: 121275 - DNA, 386 bp, Arabidopsis thaliana columbia
  unsure (1)..(386): unsure at all n locations
cacgcgtgcgnaagctgggatcctctagaggggccgcaatcangtttttanagaaggggngggagacaaaacagaagggnnacattttattcatcataacaaaaggggggaagggattgacattgcggccgcttgcataccacaaaagttgggtcgcgagaagccggttccctcaacattagagtggggggccaggaaacacgccanncncgaaaaaacaaaacaaccgggggggaggcggacacccacaaggaccccgaaaaaaacaccccccgaccggggngggggcgccaccggggccacccggcncaggcaggggggggaaccacaaaaaaggcccccgggaaaaaccccccccccaaaaaaaagaacagacccggccgggg

SEQ ID NO: 121276 - DNA, 409 bp, Arabidopsis thaliana columbia
  unsure (1)..(409): unsure at all n locations
gaagagacagaagggggagagagagagaggncgnncangnangagaagagcaanacanggagaaggcnagngtttgaagacgcgagattcgagatccttcttcttcacgttcgctgcttnaagnggcgctccttccttgggnngtgggcnanggagnnangcagggcaccaaaaacagccacccngagggggagaggccgcaccgcaaaagagcgcgcccagaaacccccaggagggggaaaggaaaccaagagaggccagccgaanaccggggggaggggaaacagaagcggganacaaacgacagagacgcnggcggcnccaaggggagagacnccaaccaggaagcccgagaaaagaaccaacccaggccaaagccagaggacacgggggacaccaaaacccaggg

SEQ ID NO: 121277 - DNA, 396 bp, Arabidopsis thaliana columbia
  unsure (1)..(396): unsure at all n locations
cggcacgccggcgtaagctgggaccctctagagggggcggcagcgcgnncgaacggnngngagaagaaaacgcgagacgaaggaagtaagcaaacaggagggagaacaacccaaaccacagaaaacaggacataaccaaacggaagccccagaggccccggcggaagagatcctgctcccaaaaaggggggggagnncannacaaacgcaccagggggaaccnaacagcanacagacaggaggcaacacacgcaggggggggacgggnaaanaaaaggggnnagggaccgggcngagacagaacagcnnccccggcaaacgagcagcaacnggagcagccggggcaaccncgggagcagcagcaggggcggcagaaaccacccccacngccccccc

SEQ ID NO: 121278 - DNA, 349 bp, Arabidopsis thaliana columbia
  unsure (1)..(349): unsure at all n locations
acgccgggacgcctgcagggaccggncccctaaccgggggggaccagcggcgccgacggcngcgagaagacgacagaagggggaggaggnaannaccaaggaggaggagngaancaccaaggaggaggaggaagataccaaggaggaggaggacggtaccaaggaggaggaggctctcccaaggagggggtgggcgacaaggaggagggggaagtgggggaaagccccgccgccacggggggggctacacagagaacaacggctgctcaagatgctgctcgtacgccggagaagcctgtcaaacccaccccgggcactaaaacaatatgagaaccaatcaccaccaggc

SEQ ID NO: 121279 - DNA, 512 bp, Arabidopsis thaliana columbia
  unsure (1)..(512): unsure at all n locations
ccggggcgcctgcaggnaccggnccgctaacccggggggaccagcgggnccgaacggntgcgagaagacgacagaagggggggcccaaccgcgcacacaaaccgcgacagcaaggcggcaagagcccacaagccaccccccccaaaccagggcgccggggaccaanaanccgccctatgattcacaggtgtgggaaagaaccgaaaggagnnccgagaaaaacaacgccccncggggccagggggaccacaacacgaaggccggccccaggccgggggaacccgacaggcccacgacggagggaaggggagaaanccggaaggcagaaacaaccgggggaaaaagccncggcccaagaaggggcaccgccgccccaagggggcacccggggccacccccgccagggaacgcagaaacccgagcncgcgggcccggcgagaggggaccccgaaggccgccgaccccgggaggaaagaaagggcccggaaggcgacaccgaagcccgggggggg

SEQ ID NO: 121280 - DNA, 284 bp, Arabidopsis thaliana columbia
  unsure (1)..(284): unsure at all n locations
cagcacgcgtgcggaagctgggaccccctagagcagccggccaaaccccncaannnaanggaaggaannnaaagaggggcancncanaggcgacaaaaaccggggaaaaagaaaggaaaagccccacccnggggggaaaagagacaaagacacgcgcaagggaaagaaacaaaccctccaaagcaagagagaggggaagaaaacagccnnaccacgaaaaaaccccccccggggaaggaccgggcagaaaaacaaaaggaaacccgccggggcacaggggcgaa

SEQ ID NO: 121281 - DNA, 379 bp, Arabidopsis thaliana columbia
  unsure (1)..(379): unsure at all n locations
ccgcctgcaggnaccggnccggcctcccgagggggcccaccgnccgcgncaacgnaaggaaacnaaaggggggcagcncaaaaaacgaaaacganggggcccancgaagaagaagcaagaccccncaccgaagaaggggcaaacccacaggaagngaaaagggangccccctccggggcagggtgcggggaaaggaaacccaccatggaaggagaaacacgccaccgggaaagcccggccccccacccccgggaaaggaaggggggagaggcgagcccaccaggggggggcggggaaaaaaaaccacccaccccacccacaaagccgcaccaaggagaaggggccgcggccaccaaacgtaccacaggggaaggggccg

SEQ ID NO: 121282 - DNA, 168 bp, Arabidopsis thaliana columbia
caggcacgcgtgcgtaagctgggatcctctagagcgggcgccgcaaactttttttttgtgaaaagaaacgatacaagggatatttctcaagatgactcttcatgcttcggcaacaagacgagaagccattgattattgaagattggcctaacagaacgcaagaaacaa

SEQ ID NO: 121283 - DNA, 497 bp, Arabidopsis thaliana columbia
  unsure (1)..(497): unsure at all n locations
gggcgcgcctgcaggnaccgggccggttttcccggggcgctcaaccgnccgcaggcagcaaanaaccgggagggggaaacagnngcnnangagnncnncacaaaggcanancnncnggatttagaagaaatttcagattcaaaggcacaagtaacagcactacgtnnaanaatctcttcttctttagaggggtgcgngnanntaatggtgagaacagagatactctgactcacaaggcgacagggtattctgcaagactcctaaggaagccagatcagtgtagagctgtttatgaatgtgcgcatcttttctgggctgacgaatgcgagaccctgaagagggagagagggttgggctttgcctgaagagggcaccaaggaatgcagatgctgttccacaaaaggcccacgccatcccgggtacccagagcccccggggcggggtctcttattggtcgaactgctgaacaagtatcccctcctcccggggaaagggaa

SEQ ID NO: 121284 - DNA, 527 bp, Arabidopsis thaliana columbia
  unsure (1)..(527): unsure at all n locations
cacgcgtacgnaagccgggagcccccagaggagccggccgatccgtttgaggnngaaaaggggggaaaagcgcaaacacggaagcaccagcaaaaaaacaagagaaggaagtctaaaacgagaaaccaaagagatacaaggaacccccacacacaggagggggggaaaaaactccctcccacagngggaggagagacccaagaccccgaagagcgaaaaaaaaaccccgcgagacgggggggagaaggggaccccgggaggggaaggacccaacccccccccccgcagagggcccccgggaaaagagggaaaggcccccaaccccccagaaagaaaccgaaaaaggggggggggagaaaccaccaaaacaagaaaaaaccgcgcccacgncccaagaaaaccaaagaccgaagagaggaaaagcccgaaaaaagaggggcggggaaaaaaacagggcgggcaccaacccgccgaggggaagaaacccggggggaaggagacaaaaaaccccccccggggaaacggaa

SEQ ID NO: 121285 - DNA, 517 bp, Arabidopsis thaliana columbia
  unsure (1)..(517): unsure at all n locations
ggggcgccggcggnaccgggccggcttccgnagcgggccaccngccgggcnggaaaggggggaaagggggcnagcngcgaagacgacggagcagcccgcaaacaaagacagngccaagaagaaaaccacctcccgccccccccgtgcgggtatacagtnnccaggggcgctcctttcatngggcgacggaagcaaagaggggcagcacaaggaagagaaggccccactgcgggggggggcaccgcaccaattccagaagacccgacgggggaagaacacgagggagcgggaaaagcgaacaaggatcccaaagggaagagagtacaccaagacaacggcggcggggcagcagaggagaggaaggaaccgggaacccccagcaaaggaaccaaggcggggaggggggggaacccccaaaacccaaaggcccggggaaaaaaggcaccagagggggagggtccgcccgcggagggccaaaggcccaaaaaaaccaagggggcccggaccaagacgcccc

SEQ ID NO: 121286 - DNA, 532 bp, Arabidopsis thaliana columbia
  unsure (1)..(532): unsure at all n locations
cgcggcggagcngggacccttagagcgcgcgccaccccgnggganggnggggcangggggcgggggaagggaaaggagccccacaaaaacccaacggaaaaanccaccagggagaaaaacgcggccaccaaagaaaaaaaaaaagaaggaacccnnaaccccctccgaaaccgaggggggggcccaccncnccgggcgaaaggacaaaaagcccccacccgagaaacagaccccccccccccccgcccggaagacccccaaccggccaacccggaaggaaccccccccgcaaaggggggcaaaaaccccaaacaagagggggcccccccggggaccggcccacaagggggggccccacacccaaaaacccagagcggggagcacaccaaccaaagcccggggggagaggcccgcccccccaaacaaaagaagagccccccggaaaaagaaacaacgcgcccgcgggaaagaaaacccccccgccccggggacccggggggcccccgccagaaaccaaaaaccaaccccggga

SEQ ID NO: 121287 - DNA, 490 bp, Arabidopsis thaliana columbia
  unsure (1)..(490): unsure at all n locations
acaccaaacgccacgcacaccnncnatttgcctacgcagcactggctcttctcctcgaacctccgagggattcaccggcttgttcttattttggngggcgngggcacaggacgagggggaagaagcgcgcaagcggcccaaagcgggggggggcggggaaacaccggganaggggcnagggccncggaaaccggacccacccgcagcggggcggnaggagancaaagccgggaaaacaacnccccccccgggagaaccacaacgagaagggggggggaaccccaacggccgaaaccgaacggaggaacaaagccccgggccgagaggggaacccccccggggggggggaaggacacacaccccgagaaaacgaaacccgccgaagggacggaaacaaacaaaggacccggggaggagaaggggaccaagccaccgcgccgggggaggaggggggcacagcccggccggggaacccaaaaggcgaaaaaaa

SEQ ID NO: 121288 - DNA, 490 bp, Arabidopsis thaliana columbia
  unsure (1)..(490): unsure at all n locations
aaacggacaagggaagaggggaaaacnacccggggacacaggggcaaccaaaggaaaaaaaaccccacggagaaaggcacgggacagggaagacgcaaggagaggggaagcggcggcgccggctggcctccttgggaagaagggggaaanagaaaagggggttgaggaagaaaaaaccccccgggggggggggggggggggaccccaaagatcgagaggccgcggggggaggggaagacaaggggggaggggagagacaaaaaaaaaaaagcggggcgacacaagggacgaaacaaagcgcacgcaagagaggcggtccgcagggaaacaccgagagaaagagcggaggaaaaagagaaaggaacccgaggagaaagcgacccaagtagaacaaagaggagaagagggaaaaaagaaggaggggggggggaaccaaagggggcgggaggacaaaaaccgggaaaagaaaaaagaaaagagggaagggagg

SEQ ID NO: 121289 - DNA, 302 bp, Arabidopsis thaliana columbia
cacgcacgcgtacgtaagctgggatcctctagagcggccgcccaaacctttcgttcatttatttatcattatttggggaaaatcttgaatttgccccccccaaagcgggcggcaaaatggaatcccaaggggggcaacaccacacccccggaaaccaaaccctctcggccccaaaggtcgcttaaccgagggggggacccccacaaaaaaggggcatgtgggaacggggcccccaagcaacacaagaaaaaggcccctcaaaaggggaggtgaagggccaaaaagggaagccctccaaggga

SEQ ID NO: 121290 - DNA, 392 bp, Arabidopsis thaliana columbia
  unsure (1)..(392): unsure at all n locations
gcacgcgtacgtaagcttggatcccctagagcgggcgccctaactttttttttttaaactagaatatatatggggggccaaccatttaaaatggagaaacaaaaacagaggaaatacacacatctttttacaaacctcactcacataaatcacactaacaacgaagcaagagcaatctttttctcatcgggggggngggaaatatatagggggtttaaccaagaacccggttcacaagcaggaagaagccgcacagacgagactttctttacattttcctatttttgagaacaagagcttctcaaagaaccctaatccatgggggagaaaaggatcggggcaaaaaaaaaaaagaagaaccatttgtgagggcaagaatctgaatcgggccc

SEQ ID NO: 121291 - DNA, 553 bp, Arabidopsis thaliana columbia
  unsure (1)..(553): unsure at all n locations
agggacgcctgcaggtaccggnccggccttcccnagtggacccatcagtccgcttgtagtgaattcactgcaaaggaagggaaagcttggcttggaaatgggagctgaacaagccatcgattcgggctaatgtgtataggttgactcgcctggggagcccnagagagaaagcatcctctttttccgggggggaaagancnntntctgatgcgtcatttagaataagcgcggacttcggcgagggaggctcctctagctgttatacagaggcctcaagctggagcttcgaatacggggtataagagtggccccctctcatatcatcaaaaggactaggggggacatccgggaagaagcgtggggttatcctcacccgaacttctgtgggctttttcaaaaaggaaccaggggcctcaccacaaaagggaggggaaggaaaatttgaccccgggagggcattgacttgaacagtccggggagggtccgggggaaaagaaaaaaagaagggccgacctggccatccccagaggggcgggaagggacaagccccccc

SEQ ID NO: 121292 - DNA, 539 bp, Arabidopsis thaliana columbia
catgcacgcgtacgtaagcttggatcccttagagcggccgcccaaacttttttttttttttttttggagaacagaccacattgccaagaatttagagattcaatgcttttcaagagtagcaacagttatgcatttgaacatggctttgcaaaactcggaagtaaacaaaagagaaatctctaaaaaaaggggggaagcacaagttcaagaatccaaatgaaaattagcaaagcagctagtcaccataggccacaattgcaatggcggttgcaacacattgcaatggggacaaatcctccccaacaatgttcctggtaacctcccaacaaattatttctcagacatggaatcttctagagaccatgccccaaaagaactcagtcaacacaggctggaaagaggggctcttatcatatccaggaaagggggtaatatcaattataagggaccctattagcatcttggggcatccctaattaccgtcgaaagataaagagaatggtgtccccattgattccccccatggccctttggtaaaa

SEQ ID NO: 121293 - DNA, 517 bp, Arabidopsis thaliana columbia
  unsure (1)..(517): unsure at all n locations
tggtgcgcctgcaggtaccggtccggccttcccagggcgacccatccgtccgcccacgcgtccggggataactcaggtgaggtttcctgtttcagatagcgagagatttggtgtcccggatctatgttgtgttatggattcgagcgtcttgagcggnggaggagctnnagggtcccttttgtttccggggagggcnaagccgntggatgctgatgggagagctaaccctcataagaggggggggatccacgatcaagaagggatgaagattttgaaagctcctattgtgttgcaggagtttgtgaatcatggtggtgtgatctttaaggtctatgtggttggagatcatgtcaaatgggtaaagagaaaatctttacctgatatctctgaagagaaaaatgggaacgcgaaaggggcccttccgttttcgcagatatcgaatccgaccggtcaagaggacaagaaccttgatatggggaggaagggacctaaaaaaagggaaatgcctccgtaagtt

SEQ ID NO: 121294 - DNA, 522 bp, Arabidopsis thaliana columbia
  unsure (1)..(522): unsure at all n locations
caggcacgcgtacgtgaagctgggatcctttagagcggccggccaacctgtttggtttttatcgtctttcttcatgggggcacaactctcgatttcgtccccctccttgctcaaatgcgtaagtacaatggcgctcccgattctgattacatccccaaagaccccagctaaagaggtccctcctacaccggggggggaggaaagaagaaacgaacccggaggtactcacccgggggcgagggagagaaacgcggccgaaaaaccacccaaacaagggttgaaaacaacccccccgcaaaaaaaaaaggacgcaaaggaaagagaaaaaaaacananaaacccaccccccccccgccccggggggggggggggcaaaaaagacccgcccccgggggggggaaagaagagaaacaggntgggcaccgggggggggggggcgccaccccaaagagggggacgcggcaaaggaggctccttccgccgcccgacaaaaaaaaaaaaaccccctcaggagggggcaaa

SEQ ID NO: 121295 - DNA, 528 bp, Arabidopsis thaliana columbia
caggcacgcggacggagctgggaccctctagagggggcggccacccggttcgtctttgaatacgaaaccaaagggaggcaaagaacaacaaattctcaaaagcggaagcaataactcaaacacaaactagaccaaacaacagaaagacgcataaaggccgaaaagagcacaccccctcaaaaatccggggggggaagaaacttaagcaggggagaacgtagcaccacccccggcaagaggcggggaagccacacccagcgccaaccggaggggaacccggcccaaaaccaacgggggaaacccggagaaagcaccccagccccccccaacgccaagcgaggcaaagcccaaacagcgtaaaaaacggaaaaacgagaacaacccgggaaccgaggggaaaccacagggaacccggggggcccccccacaaaagccggggggccaccggggggggggacacaaacggccgcggcggcgggggcaaaggagaggggggagacccccaccggcccggaaaaaggcgacgag

SEQ ID NO: 121296 - DNA, 406 bp, Arabidopsis thaliana columbia
  unsure (1)..(406): unsure at all n locations
ggacgcctgcagggaccgggccggcttacccggggggaccatcgcgtccgcacaaaacaaatcccaaagctgcagaggaagaagaagaagagagngagaaacaanggcgncgacgactctctcaatcgcaacaacaatccgggcctcttctcctctcactaccgcgaacactcctctcttcctgggggagcccaccgcaagcgaanncccatngcagacacagccccccngcgagccaccgggcaaccaacccccggcccatcccccgccgggaagcnccggagaaaancgagaaaancgggaccgaaaacncccccccaacccncgaagaagcggcgagccgcggcgacaatcgccaagacaaaggcgggggcccccccacccccttaccccccgcagcaggggg

SEQ ID NO: 121297 - DNA, 510 bp, Arabidopsis thaliana columbia
  unsure (1)..(510): unsure at all n locations
ggcttgcaggnaccgggccgcttaccgggggggacatcccgnccggncggaaggggggcnnaccnagggggacngggcangaggggcanacagagaccagaccaaccgancattttgaccggcganncaacacncaacaagcggcggggacgngagggcnanagttgctcctagaaaggnngggggggcaaaaaagagggggacaaagggggaaagccaccccacaggggggggggggcncacaagggggaagagcaacccccaacggggcagagcaacanncgggcggaggggggggggccnccggcggggcaggcgcccggagagccaccggagagaacgggggagggaaacccagagaacgggggggaccaaagaagcgggaaagcggggaaaaacgagaaaacgggaaaaagggcgggggggaccagaaaaaaaaaggcgagggggagaaccaaggaaggccgggcaagggcggcaangagcgggaaaagcaagcggggggggaaa

SEQ ID NO: 121298 - DNA, 464 bp, Arabidopsis thaliana columbia
  unsure (1)..(464): unsure at all n locations
aggaaaacaacaaggggggnngaaaacaaaagcgggggcccaacaaagagggggaaaaaaccagccaagcgagataaaaaagtgggagtaaagaagcgcaacaggcgagggggcaaaaaaacgctgnccaaacaaagggggagagccccaaagaaggcgggagaccggggaaaaaaccccccagaagaggggggggggggggacccccgccgaaaagcagaagagggagccgaggagggcgcaacgcgcaaggaaagaaaaagggagcacgggaggggcaaagagggcccaaaacccggaggaggcgggaanccccaagggggccaaagagggccccgcccaaacaaaaaaggacaagcgnggcccggcccagaagaaaaaacgggngccagggaaaagggaacaaaaagagcgcgggnagggccgaggggggggacgggagcagcaggggagagggaaaaaag

SEQ ID NO: 121299 - DNA, 466 bp, Arabidopsis thaliana columbia
catgcacgcgtacgtaagcttggatcctttagagcggccggccacctttttttttttttttttgacaaagaagatggcttctttacttctccttgagagaattgatacaacaaatctcatctaaaggttttcgatgataaaccacaagaaacatgtctacaaacaacaacaagagttttgtctttaggggggggaaggagatcagagtgacatttacatatcgaaaggcacgcgtttgtacagatccgaaggcaaccgaggcgttgcaaccgcttgcacaggggtccccatgtaagtaacgactccagggttttcagacatgtcaatctcctccggtttagtcccttgaggaggcgccccaacaaaagggggaagcaaatgactcatcttcgaagttcccaaattggtacccaggttgggccccgggacaaaccgttcttccacctccaaacgggaacagcctaaa

SEQ ID NO: 121300 - DNA, 504 bp, Arabidopsis thaliana columbia
  unsure (1)..(504): unsure at all n locations
ctgggacgcctgcaggtaccggtccgctatcccggggcgagcatcgcgtccgatttacacctttttttgtccttggttattaataaatcactgacccgaaaataaaaatagaagcaaaacttcatgtcgtggtttctaatagcggtggcgacaatcgccgccgtcgnatccttcctgctaatccaacgggggagatacaagttcccaccaggcccaagccccaagccgatcgtcggtaacctctacaacataaaaccgggccggttcagatgttactacgagggggctcaatcttatggaccaatcatatcggtctggatcggttcaattctaaacgtggggcgatctagcgccgagctagcaaaagaagttctgaaagaacacgaccagaaacccgccgaccggcaccggaacagatcgacggaagcatttacccccaacggtcaggatcctaaatgggccgattatgggccccattacgtgaagggggagaaaaggttgccc

SEQ ID NO: 121301 - DNA, 494 bp, Arabidopsis thaliana columbia
  unsure (1)..(494): unsure at all n locations
ggcgccgcggaccggccgcccccgaggggggagccggcgaangaaaagcgcganggggggaacanannggancggggaacncccaggaaaagaaacctcagncggggaggcgcgaagagcagaggggcaaaagaaaggaggaaacccctcctactcggtgttgcccaaaaaagggggcgngggaggaaaacccccaaagggggggggggggaccacaacagaaggagccccaaagggnaaccaaaggggggggaatgaggcggcaagggaggcaacgaagaacaggggggggggagggcagaaaccgaggggagggggggaaggggggaaangaggcacaaggaaggcgcgcaaaagagagggggggggagaaggaaagggagggggggggagaaagggggagacgggggagaggaaggggggggggaggaagaaaaagggcgggggaagaaagggggggagagaggggagcgagagggggggggagggggggg

SEQ ID NO: 121302 - DNA, 597 bp, Arabidopsis thaliana columbia
  unsure (1)..(597): unsure at all n locations
caggcacgccggcgtaagctggggacccccagagggggcggccacccttttaggaaaagtgcggccaaaaaagggggagagggggtccacaagatttttctcggcgcacggcagcgaagaacggggagggagcgggccacccaagaccaaaggacaacgagaaggggagagcgcctccaaaacaggaaggagnggggaacagggagagagagccggaaaaaaggccccaagggggggggggggggggccccccgagcggagggaatcgcgcatacaaaccaaggaaaccagggagggacgcgaaccccgggcgggaaaagaaaaaaaaagaggaagcggacgtgagnggcggggggggaagaagacggagagccccaaggggcggccgggggggagaagggggggagacagaaaaagaatcgcagagaagggcggcggggcggcggtgcagagaggaagagaagaggaggggaggggcggcgagcgcggggggcatagagggaacgcaaacgaagcgcgcgaacgcacggcgggcgccgggccgccggccgcggcgggagggcgggcgggaggaacgggaggcagagagcggcgggg

SEQ ID NO: 121303 - DNA, 219 bp, Arabidopsis thaliana columbia
  unsure (1)..(219): unsure at all n locations
cggggcgcctgnggnaccgggccggtttccgnggcgggtcaacnggccgaaaaaacncncnnccaaaaagggcgannagggggncccacaaggcnnnccncgncgcacancnncncattctcttcatttcctctcctactcaagcacgaagcttacgagaaggagnaaggttttcttcgctaggtgttgnggagaagagncaagagagncggaaaaaaa

SEQ ID NO: 121304 - DNA, 528 bp, Arabidopsis thaliana columbia
  unsure (1)..(528): unsure at all n locations
gcaggcacgcgtacgtaagctgggaccctctagagcggcgcggaatccgcgtttgtttgtttggggcaaacaaaaaggaggttataattgaatgcgggctaaaggaagaaaaaccatagggtctacgggctacaattcacagaactgggaagaggccataaatgaagaaacaagccctcccgaagtacaagggtggcanaaccaaaacacactcaggggagaaaaacccgaacaagggcaagagcaaccccacccccggggaggaccccccgggcctctcccctcgcggggggccccccagcgaaaaaggaaagcaaattcaagaggcccaaagcaacaggggcgacccccagggccagcccgggacatacccccccaccagaaccaaacggaaaaagcccaaagggcaggccgcggaaaacaagggagcgggcaaggaaccaaacaggggaaaacccacgggggggggccccaaagtgggaccacggcgcacccggaacccggaacccaacccggggaaaagaggaa

SEQ ID NO: 121305 - DNA, 499 bp, Arabidopsis thaliana columbia
  unsure (1)..(499): unsure at all n locations
ccgggacgcctgcaggtaccgggcccctattccgggggggcagccgcgtccgcttgcatgcaacacagtttgagacttttgggttgttttacgtcaggacacatttctagcaggagtgggaacaagctccactacattgagatgggcgaagaccgagctgaacagaaacccccctctgatgaagagaggtgaagacnagangcggacaacccggggggacaagacggagagaagcgcagaagaagacccacaccgctgcaccacctaaagcccagggacaaagagagaagcagggtacaaccagcagctcccctggggcgcccaagagagacacgggctcatggcaagacccaagggcacgaaacccccgccaaaacacagatcaagaccaacggccacgcgaagggcccggaaccaaaacaagggacaaacccgggggagcgaaaccccgggaggcgcccgaccgcccccagaacacagagggccgacccgggaccac

SEQ ID NO: 121306 - DNA, 542 bp, Arabidopsis thaliana columbia
  unsure (1)..(542): unsure at all n locations
caggcacgcgtgcggaagctgggaccctctagagcggccggccaccccgttcaattntttttaatttactttggggggggggaagcggacaaaacccaggaaaaaaacccggggcaaaaagagtgacggaccaccagaaccgggggaaacaaacgacacaccacccaaaaaaggccctcccacaaagaggggcgggcaaaccccccccaaaaaagcccaaaaaacccacaaaacaggggcgaaagcgccccccccgaaagacagaggaaaacaaaggggggcggcgccccccaaaaaccacccaaaaaaaacccccaccgggagaaccgggggggaaaaaaaaaagaaccccgggaaaaggggccaaagcgggccaaaagggggggaaccccccccgaaagaaagaaaaaggccggccaaggccaacaccgggggagaaaccgggagggcgccgggggcgccggaaaaaggccccgaaaaaacccccggggagggggaggcaaaccccaccccccccgaaggaaaaaggggcccccccaaaa

SEQ ID NO: 121307 - DNA, 470 bp, Arabidopsis thaliana columbia
  unsure (1)..(470): unsure at all n locations
gggcgcacgaaagacggcgcagaggggggaanncaaaacccaccnccggagcaaacccncgaagacaccaatctccttacggggggggagaaacccgccgaagagacggcacgggtgaaaaaaatgctttcnncgggnctgtnagaccgnnaagaaagcgggagggggaaaagaaaccccanngcggggggggggggcggcccccctaaagggaaacccacaaagcagagaacaaagcgggggggaagaaaggagacggccaaggccggggaaaacaggaagaaagcaggcggggaagcgcaacgcaaagagaagggggaggccacagggaagaaaaaagcggaggagggaggaagggagaaaaaagagggggggggggaccacaggggggagaagagggaaagcaaggggggaggcgcaggcgggggagagagggcgcaaagcagaaagaaagggggcggaaaagggag

SEQ ID NO: 121308 - DNA, 493 bp, Arabidopsis thaliana columbia
  unsure (1)..(493): unsure at all n locations
gccacgcgggcggaannanggggggaggcancnncncaaaaannnggggagggaaaaaaacccacaccccaagagcgcgcagttattcggtgtcgggtctggcggcgtagaggggagggnnctggctgcacaattgggntgtngggncggcngncnggggtgaaaaaaggcaaaaaacccgtgagggggggggcggggacacccaggaaaagacaggggggggagcccaaaagggcaaaggggggggaaaaaaggggcggccaaacgaaacaaaacaccccgccgaacggggggcgggggagccccggccggccgaaggggggcagcacccacagaaacgcccgagagcgagcggggggggggggcagggaaaaaacgcggaccccagaggaggaaggagggaggggggagagaaagggcaaacccacagtcgcggggggggggcgggggaagagctgggaggaggggggggagggacgcgcggggggcagag

SEQ ID NO: 121309 - DNA, 571 bp, Arabidopsis thaliana columbia
  unsure (1)..(571): unsure at all n locations
cgccgccggcaggnnccgggccgcctaccgaggggggtgagcgggccgaaaaaaaanncagagacagagggggggccaagaaaacaagcggaaagagaacccagaaaaagaaaacactccaggcaagaaacacaggagcgcgacaggccgggggcgggaagggacagacgcccccttataattagggatgttgggccacacgaaaggggggtcggggaaaaaaaaacccccccncgagggggggggggcgcccccccccaagaaaggcaaacgaacgacaagggggcgaaggggaccggcagaggaaacggcaagaagagaggaacggcgcgagccgcgccaaagagacgcgggagagcgaggaacccaccagacggcccaacgccccgagcgcccagcgcagggcgaacgagcgccgagacggaacagccgcgcaccacggacacgcggcacgccacagacgagagcggaaaaggagggaaggaggcgagccgcggagagggagcggcgggggaaaggcggagaggccggcaacgcgggggggcaggcgcccgcgcgaggcgcgaggagg

SEQ ID NO: 121310 - DNA, 478 bp, Arabidopsis thaliana columbia
  unsure (1)..(478): unsure at all n locations
ccggccgccggcggnaccgggcccctttcgagggggggaggggnccgacaaannncggagaanagggggcccannaaaccgagggggagaacccacagagagaagcagtttgagaggcccccacgagcgcggccaaagcgccaangaaaggaacgaggcccgctccgttcttggaaagaaagagcaacaaaaaggagggggaggaaaaaacccccnccaaggggggggggggcccccccctgaagggggccgnggggaaggcggaggagaggagaaagacaaacacgagggagaagaaagggggacgacccaagcgaaaggggggacaacaaaagaggaagggaaaagagagaaggccgccgggcgacgaaggggaaaagcgagagagggagcggcgaggggaggaggagaggagagggaaagagagaggggggccccacacgagagggaggagaagggcggaagaaaacaggaagaa

SEQ ID NO: 121311 - DNA, 347 bp, Arabidopsis thaliana columbia
  unsure (1)..(347): unsure at all n locations
gcggccgcggcggaagctgggtctactaggaggggggacctgttttttttttttaagaaaaactcgctggggttattagaaaaaagccaacgaaaatacaacattttcaatatgatttcaaaagaaaaagaaaaaaaacattcaagaagaaatagctgaaaagaaaactctcgttttttaggngangcaacnncancacggcgcccaaaaggcgaaccnaccaaagcagaggggagaganaaggcagaaaacaagagaagaagacccccgcaaagagagaaagagccccaagcgcgggaccccaccggagacaggaggaacccaggcaccccaaaagacgccgagaa

SEQ ID NO: 121312 - DNA, 424 bp, Arabidopsis thaliana columbia
  unsure (1)..(424): unsure at all n locations
cgacaaanacnccgaagggangccgggnaatcgnnannacggagggaacgaacncancgangagaactttaancnnngccgngcaagagcncncgaagcnnnccanggggatccagcagcttcttcgtgnttttgttgtcgcgcanncnggatctccggcaaatttcagatgctcacacggctttgctgtcagcctcaccaccgtatcatggggcttgatttgccttcaagtgggcatttgactcatggttactatacatctgggggggaagaagatctctgcgacttcgatctactttgagagtcttccgtataagggggaatgtcaccactgggtacattgattacgataagctggaagagaaggcggtggatttcaggcctaaggtgcttatcggggggcgggggggcgctccccaggggt

SEQ ID NO: 121313 - DNA, 489 bp, Arabidopsis thaliana columbia
  unsure (1)..(489): unsure at all n locations
gccgcctgcngggaccggnccggcttcccaagcagcagccgccgccaccggcgggggggggagaaaacaccccncgggaggagcaacccccccggggagaatagaagaacacgacgggggcgccccccggtaagcagaagggcaaaggcccctctattcgggatganagaaaaaaaggggtctcttggggaaaacccccccggccggggggcgggaccccacagacagggaaacggcagaccagacaagagaggggcgggagaacccgncggaggcggaggggaccaaaagagagggccgcggccaaagcgccggggaagccaggggaagagagcaggccaaagagggcaggcccggggccaagggggggggcaccagggggggccgaggacgggaaaaagcgcgcaaaggggggggggagcccccgaaccaaaaaggggggccgggagaagcggggcccggaggggaacgcgggggaagacgccgaag

SEQ ID NO: 121314 - DNA, 520 bp, Arabidopsis thaliana columbia
  unsure (1)..(520): unsure at all n locations
acgcacgcgtgcgnaagcnggggacccctcagaggggccggccaaacccgtggaacangngggcggcgggggggggggggngacaaaaaaaaaaaaccnnagaaaccaaaaaccaaaagaaacccacccagggaagaagaagggaaagcacgccacccccaaaagaaacgaagccccctccccaccaggcggagagggaacaanagcccccaacacgaaaaaaaaacacccaaagggggggggggggngccagccaaaggagcgggccaccagccagaaagggaaaagaaaagaagccacgcaacaaaaaaaggcggaaaccccggacaaaggagcaaccgaaagaaaaaagagcaccccccagagaaaaaaagagacaacnaggcccacgccccgcgacccccaaaaagcgggaaccacccgcataccggaagacccccgccccaggagaaagcgaaaaagaagaccggcgagaggggccaggggggagaccagaggcccctcgaggcaaaaaacagag

SEQ ID NO: 121315 - DNA, 572 bp, Arabidopsis thaliana columbia
  unsure (1)..(572): unsure at all n locations
gcctgcagggaccggnccggccttccgnnggcnagcgagcccggcgcccacgcggncggggacgcggggggggagaacaaacannnaaagcgncnnacccaaagaggcncgncnncagagagcgcaaaaagagcgagaggcggcncgaagcacccgccacaaaggggnccccctccctgaccggggggagggggagaaaaggaggcgtagaggggaaaaggacccccatcacgggggggaggagggcccccccagggggagcccggggggcngggaaaaccaaaaaccggcggcgagaagccaccagagaagggagggcgggcggggagacaagagccaccgggggggggggggaacgcgccacccggaaacgccgcaggggggaagggaaanaccctcgaagggccgaggtncggggaccacggcagggcgggaggagggaccaggggagaccacaagcgccggaaagcgggggggggaggggggggccccgccgggccccggacaagtcgcagagaaacccagccccgcgagaaggggccaaagggggcggggcccgaacgggaaaaccg

SEQ ID NO: 121316 - DNA, 467 bp, Arabidopsis thaliana columbia
  unsure (1)..(467): unsure at all n locations
aaagaaaaaagacaaggggnnnnannaagaaaaggccaaagaagaggggccaaaagagnacatattaacagaggcaatgagagaaaagaatcattcttgcaaaatgcccaaaggctctcctctactttgagtgaagagcaaancttngcggggttggtccggaaaagaccccgcaccaggagggggggccacccccaaacccaagccaacaccggcaccaaaagaagacccgggtgtgggggggaaccatcccaagggcaccttgcaacaaccaagtgatgcctcccgccaaagaacacccacgaccaaaaaaaagaaactcccatggggaacctccgaagggaggcccgccccacataaccctcccaaaggagagagggagagaagcaaagaagaagaaccacctgggagaccacaaaggcgagacggcgacgctggggggaaaaaaaagcccaaaacggaaaaaa

SEQ ID NO: 121317 - DNA, 576 bp, Arabidopsis thaliana columbia
  unsure (1)..(576): unsure at all n locations
gggcgcctgcagggaccgggccggcttcccgaggaacggagcagccgcngancagaagaagaacagaggagcngangngaaagcanggagaccacancccgggcgacaanagataagggagcaaaacaagggggctagaggaaaaagccacgggtggggaacaggccctcctngccgnggctgtaggggnaaaaaaagggaggggtttccgggagaaaagacccccgccgccccggcgggggggggcccccccccagaaaggcgaacccccaccaaaaaaaggagaaagagaacgcggcggtggcaaccccagcgcgggaaacaaaagccgcccaagccaaggcggggaaaaaaaaaaaaggggaacacccaaggggcgagcaacaaccaaacagggaaagcaccgcaccggagccaacataaatgcccgagccgcggccggagagcgcggcaaaaaaaagacccagagcaaagaagacccggggggagacagggcggaagacgctccgagaggggcgggccgaacccccggagaacaccggcggggagaaggggagaaacaaaaccccaggagag

SEQ ID NO: 121318 - DNA, 438 bp, Arabidopsis thaliana columbia
  unsure (1)..(438): unsure at all n locations
caggcacgcggcgtaagctgggaccctctnagacggccgcccaccccgtttggtttattaaagtttattttgagggggttgttgggaaaaaccaatgcccgaggagggacaccggggcccaaccaccgggaggggcccgggagaaacaaaaggggggaacaaaaaaaaaccccccccaaaaaaagaagcggaaaaaaaaaggcccaccccacaaaaaaagccccccagcgcggggggggcggccccccccagaaggacccgcccagccggggacccggcaaaaaccccgcggggggcgaaaaaaaaaaacagcacacgggggcgggccaaagggggcccagcagggggaggccccacgggcccagaacccaagccacccgggaaaaggccaaagaccccccccccgggggggaccccccacagggggggcggggaaag

SEQ ID NO: 121319 - DNA, 517 bp, Arabidopsis thaliana columbia
  unsure (1)..(517): unsure at all n locations
ggacgcctgcagggaccgggccgctaaccggggcgggcatcacgaccgggacaagaaaaaggaccataacgcgggggccaacgcagacaaacgaagcgaaaaggagaaagcggcgacctcagcaaacgagaagaacagaacgacatggaaaacnaaggaagagacgaaaatcctcccctcgcgggggggagaggacganggaagggaacgccgccggaaaaagaggccagagcgacgaagagacagacgccccaggggagaccggaaaggaaaaaacccgacgagaggccggggggccccacgaagcgggaacaggagggaaagaaagagagggcccagancgaccgaggggcccgaaccaaaaaaacggaggggagaccaccccggaggaggaacagaacgggaggagggcacggacaaaaaagaggggggacagcggaaaagaaagggggcaagaaccacgggccaaaaaagggggaaacgggnaaggaggaagaaaaaggaaaaaaaagggccc

SEQ ID NO: 121320 - DNA, 492 bp, Arabidopsis thaliana columbia
  unsure (1)..(492): unsure at all n locations
caggcacgcgtacgtaagctgggaccctctagagcgggcgacatcancgttcgaccacgcgnncgnccangcgggggggnccncaaaaagaggccaagggggaaaaacaaacagaagcggctccaaggaccgggaaacacacaccgggaaacccaggaggaccccaaagccactcctcgaggaaaaaggggggggnagannaaaggggggcccaaaacaaaaacacgagccgcgaaagagagggcacaccagaaaaaaaacaccccaagccccccaacccccgagaaggggagcnggagccacacagaaaacaccgggggggaaagcccccacccggaaaccgcaagagggaggnnggcacaacncccccaagcccaggaaagagcgagggagggaagnccnnaacccaagggggcaccccggcggccgccaacaaaaggcccggaacgcngcggaacccaaccgaaggaacccacaggggccccccccaaa

SEQ ID NO: 121321 - DNA, 513 bp, Arabidopsis thaliana columbia
  unsure (1)..(513): unsure at all n locations
ctgggacgcctgcagggaccggtccgctantccgggggggtcatccgcgtccgcccacgcgtccgcccacgcgggcggtcctcttaacaggcgggtatacagcggctgacaaaactccaggaaaggcaaagacacagagagaaacaaaaaaagaagaagaagattcctccgaagaagagggggggaaggctttagcagcaacaaacagaaacatcaagccagccgcgaggcggcgtggcctggattctaagctcgagaaaagtcttcccatccccttccgagaaaacaagggggaatgtaccacaccgaaagacgagggtacactagcaccatggggggggtgcagagcccaacacgacaaggcaagagggcccaggaaggggggaacaaaaaccatccggagggggacccggaagaagtgaacccacgggcccagccaaggaaagggaaaacggcggggccaaaaccccacgggggaccaaagggggggcgggtgggacccagcggcccagg

SEQ ID NO: 121322 - DNA, 477 bp, Arabidopsis thaliana columbia
  unsure (1)..(477): unsure at all n locations
gaaagaaaaaagagggacaggaggggggaaacttgtgtgaatattaaaaaataaaagaaaacgcaatgacaccgggggtttgcgggcctcgctcttgcttgnagggagggnaaaaaaacggcaaaaaaaaagggaaaaatcccccctacaaggggggagggggaagacacgcagtaaaacggaagggggggttaaccagaaaggaaaacgggagaaaaaaaaaaaaacctaatgatcgccttggggcaggggggacactaaagaaaaggggaaaaaaaaaaagccgcgggaggaactcacaaaaaaaagccctaagaggcggggggaaggagataagaaaggggcccgggtccgaaaaaataagagctaagggagggggagggaggcggggagaaaaaacaatagggggcgggggaaacaacgcgggcgaccaaaaaacaaaggggggggggggaaaaggaaaggcggggaaaagaa

SEQ ID NO: 121323 - DNA, 427 bp, Arabidopsis thaliana columbia
  unsure (1)..(427): unsure at all n locations
aaacccnaaccgccgcaaacggcgctctttttactgtccaccccttcgagatttggagcgaagatggngcgtgcaaaaaatcctgctgctttggttgtaggccnnnnnnnaggtncgggattgggaaaaacaccgcaatcggggggggggggagcgccttgtaaagggaattccgggncagcaacagagacgaggggggctaggggaaaccatgcgcatagcttgcatcaccgggctgggccagggggggcagaaaggtcaaggactatgaaaaagggggaccaagggacagccctgcaaagaggggggagggccctttcatatggaagggggagatgcgaggaagcaggggaggcaaacaaggggggaaaaaacagggaggggacccctagcggcgctttggaagaaaccggaggagagaggagaa

SEQ ID NO: 121324 - DNA, 358 bp, Arabidopsis thaliana columbia
  unsure (1)..(358): unsure at all n locations
ccccccgnnnngcccgccgacgagccggcggcaacctattttcgngagcgggggggcgagggcgggtgcccgacaacaaacgacccacgcagagaagagtcggggggagttgggacgtgaggagggggagcggcccaggcgaatgtggggggcgagccgcgcaggagggagacaacgtgaatacagtctaggaggggtggggcagcgagaccggaggaggattaatcgctgcgactccccggccccccaatattatattttgggggggggggcgccagcgaccgcgagcgacacgcgaaatatgaaaaagagataccagcagatcggagcgcggcggcgaagtaaacgcgaatagaga

SEQ ID NO: 121325 - DNA, 514 bp, Arabidopsis thaliana columbia
  unsure (1)..(514): unsure at all n locations
gatcctctagatctttcgcgggggggggagggccgttttaaccaatataacgggcgcagcggggtgacttatatgtaagggcagggcgtcattgaaaacctgcacagaaaacggcgttgttgtgagtgggggggacaggaagggggcggaaaatgcacacgacaagagaggtttactaaatggcacgatgggggnggaaaaccaaccccggaggcacaaaaggaggccccccgggagagcggggcggggaccggcgccctaaaaacgcggggaccgcggggaggaggaacgccacaagggggggcgccgaagagaggcacagagcgccgcaaggaaaaacacgggcggggggggggggcgccgggaaagcgcaagcgcgggcgcaggaagggcggcggcaccccacacgaacagaagagcgagggacgcggagagcgcgccaaaaagcgggagaaccacgaaacggaccggcaaanaagagcgggccagacgcgggaggaggacccagggagga

SEQ ID NO: 121326 - DNA, 498 bp, Arabidopsis thaliana columbia
cacgcctacgtaagctgggatcctctagagcgttcgcgcggggggaaagggctttttatataatactaccaaacaagcctatattttccagtatatgctcaaggattcacactttaatatctgctagggcgcaacttcaaaagttgtccagctttaagctatcagatgatcaaagggcatggggaaaccccttcttactttggtgggagaacaccaggacgcaccctttgctaaaaagaaaacactatggataacaagcggaccacgcctataaataacactagaaactacccttccatttttttttaggagaaacttttctttaattcccccccacccccaacttgcaaaaagggggtctaccgcctccctttctttgccatattcggactcttgcacatcccaaaccagaaggggggaaccccccacaactcaatctccttaaaggattccaaagcacgccccccctaactatatggtgaggggggggacaaaaac

SEQ ID NO: 121327 - DNA, 182 bp, Arabidopsis thaliana columbia
  unsure (1)..(182): unsure at all n locations
ctgcaggnaccggnccggaattcccggttcgacccaggggtaagtgcggctgaaagaagacaacagaagggggaccttgggccggngatattagcacccgcgatctaggttcgctgggtgcctttgaagatggaacatcaacatcatatgccctggcgagtgcgcaggagagagggcaaaag

SEQ ID NO: 121328 - DNA, 495 bp, Arabidopsis thaliana columbia
  unsure (1)..(495): unsure at all n locations
cacgcgtacgtaagctgggatcctctagagcgtccgcgcgagggggtagggctttttttttttcttccgaacacttgtttgtgttattaaggggcgtgcgaattaaaccccaaacaaatcaagtaatggggcaataactcaatatgatgtaactgatgactctccctttccaaaaggtggatggaaaaccttcctcatttaggggtggcagggccntngcatgcgacttatttagcttagcctccgccttttccttggccgggacctttcttagcggctagctaagctggaatcctagcaactgcagaagctgtagcttcttctctctttttctaaagaccccctttccgaaggtggaggaatctctctgtggttcttaaaatcttgaagccgggctctctctatagaacactgccaacactagcccctttcctcggcgcacaagcaaccaattccccctggaaaataaagttgataaggggggatgcggggagg

SEQ ID NO: 121329 - DNA, 494 bp, Arabidopsis thaliana columbia
  unsure (1)..(494): unsure at all n locations
gtaagctggggatcctctagagcggtcgcccgacgggtagaggcctttttttttccacgcgaaagaaagatctgccttttgtaaatgagttatattcgctcttctcatcagaagaagatactgtgtatagaaataagagagacagacaccgtgcgagaataaaagaagaatgagaagccnagctcttcctcctctggggaggaaaaagagctnnaaacacttctacaggaacggagctaccaagaaatatcggagaacgctcatgggtcttctccgggacaaggcctaacgccctttttttttccgtaaaggccctgacctccgggtggctccatcaaaaaacaagctggggaaaaccttaatacaggacccggcatttttccattgggggcttttctttggcaagccgggaccaagaaagatccccccataaaggagtgggccgaggaacattagctcccataccttcctaacggaatttaaaaaactttggg

SEQ ID NO: 121330 - DNA, 396 bp, Arabidopsis thaliana columbia
  unsure (1)..(396): unsure at all n locations
aacaaaagggggaggcaaaccccaccgggggggcggggaaaaacaaaaaaaagaataagaggggggcacccggggaaccccgcacccgacgggaggggaggaccaaaacattttttttttggaagttaggaaacaaaccgtcganaaacctccaaaaaaaataccccccttttcttaggcacatgggtttcggcctaaaaaaacgcgctgcaaggctagaaaaaaggggggggttggggcaaagcaaatggcactcccgggggaaaaaacacttggggggaacaaccaaaaaaaacccggcggcgcccccctaaggaagttcctcaccacccgtttgggcggacgcggggagaaacccctcgcttcttgccgacagaaaaaaaaaagaaagccccc

SEQ ID NO: 121331 - DNA, 530 bp, Arabidopsis thaliana columbia
  unsure (1)..(530): unsure at all n locations
aaaaaaaaanaccccccccacaggggggagaaaaaaacaaaaaaacacgacacagaggcaaacagaacacgccccggcgaaggaaaatttaccaacagaagccacgacacacaccagcaacacacgaaagacgaggaacaggacgagaaccacgcaccacaaaataaaaagggcaagtaaaggggcnacaaccagggcgagggggggaccgaagaaaaaaaagacccccccccctgagaggggggggggagggaaaaaacaccaaaaaaaaacaacacccgccacacgacccgagggcgagaaaaagagcgaggggggaggaaaaagacacgcagagccaggaacagaaggaaggagagagcgaaggagaagggagaaacaggacgaagcgggcacgacagggcaaagaaacggagccagaagcagagcggcggccgaagaaacaacgacagccagaagaaaaaaagaaaaggaagccaagcagaggggaaaaagaggcacaacagagaaccaaggcgggggcaaggaac

SEQ ID NO: 121332 - DNA, 446 bp, Arabidopsis thaliana columbia
  unsure (1)..(446): unsure at all n locations
cgaagcagggatccttaattttcgcgggggggaaggcgttttttctatataaagagcattacgttatttccaccctcattatcacagagaagcaaccctcgctatgcttatcacatagagagataaaggctcctacactcaagccagccccttaaggaaggggagattcctcttcggccgtgggggaaggacccgggccaagcaaaaaaaaacaaccccacccgggagaacgggaacggcccctcgggaacaaccacaggccacaccncaccacacgaaaaagaggggggaaaggccccaccaaccccccccccagagggaggcacacccacggcaaacccccaggagggcgcgaacacccccagncaaaggccaccaacccaccccccccngccaaaagaaaccccaaaacgggcgcaaacaacacaacgccagagggcgggaaa

SEQ ID NO: 121333 - DNA, 464 bp, Arabidopsis thaliana columbia
  unsure (1)..(464): unsure at all n locations
cccccgcggaccgggccggaaacccttttcggcgacggggtacgcggacgcgaccgaccagccgccgcccacgcgggcgaacggcngcgagaagacgacagaaggggcccnnagacaaaaccaggggcacgtcngaaaaaagaacgcaccgcnggcaacaaccaccgccacaacgccccggcgccttcctaattacaccgtgggggccaccacggcggcgcgcacaacaaaaggagcggcccaccaaagggacgggaggagacccccaacacgcgggcccaccagccgccaagaagagccggagaaggcgcgggagcccccaaaagcgcccaccggcgggcaacggcacggcggaagccnccaancccacagagaagaagggggggcggaaaagcgacaccgggggagccgacggccagaggccggaggagaacccaggngggccccgagaacaaggaagacca

SEQ ID NO: 121334 - DNA, 410 bp, Arabidopsis thaliana columbia
  unsure (1)..(410): unsure at all n locations
aaaaaaanacccaaaggggcggcggacgaaccaaccagaccaaacgagnacaggaaaaaaggggaagcgacggaaaaatgaggaccctgacccaccaggaaagccccacggaaaaaagcggcggggaaacaatcctctttgggagttgcccccaaaaaaaagaaggggccccagaaaagaaaccgcgaaaccgggcgaggggccaaccccgggaccaccccggagggggaacacggggggccacggcccccccccgagcgaacccccgggggaacccaggccgggcaacccggcaccccgcaaaaacacccgaccggccccaggccccccccaccccaaaaagagcaccgacagaagggaaggggcccccaacaagcgcgaacagaacacaaaaacgggggaggcggcca

SEQ ID NO: 121335 - DNA, 458 bp, Arabidopsis thaliana columbia
  unsure (1)..(458): unsure at all n locations
ccccgcagggaccgggccggaagncccggttcnaccgaggggtggaggcggcagcaaaaananacacaaggggacgagagagagcaacgaacagcgaagggganancgggcncgcggccacccccacgccctcttttatctcttacctacatcctccgaagagcattacatataacaagaaaaaccatctctcttttggacgatggggaacaaccggagaaaggcgaaaaaagaaaaccccccagcccggggagaagaccaaagagggcnaccacggggggaaaaaaccggcccaaccacacccaccccccaaaaaaagcccccaagcggaaacaagcgcacggggcccgccccccgcgcaggggaaacccggcgccgcccgggggccccccaccacaaacaccgcagccaaccaacacacccccccggagaaccccgggccggaaaaccgcccccac

SEQ ID NO: 121336 - DNA, 524 bp, Arabidopsis thaliana columbia
  unsure (1)..(524): unsure at all n locations
gcggagcnggaccactaacgtcgccaggggagagggccnntaaanaanaaacccaaaaagcggggcaaaaagggatatatagaacaaaggcgaatcaaaaccaattatgaacgtggggggaagaaaacggaaacactaatagccccaaagaccggaacaacgaggaagggcgcaccaccactcctcctgggggtagcgggaaagnccccaacgcgganaaacaacgagagaaccacccccaggggcgggaagcagacccaaaccccaccaggaggcgagaagggcccccggagaaggaaaccacacgaccccnggcgccaacaccccccggggaagggccccaccccacagaggaaaaccaacccgccccggcaaggaaaaagagccggaaaaccccgcccaaaaaaaaaaggaccccaaacggcccaaaacaacnnagaagggccggggggggccggaaacccccacacaaaaagaaaccacaaaggggggcggcaacaaacccgaacaccgacgaaggggcc

SEQ ID NO: 121337 - DNA, 320 bp, Arabidopsis thaliana columbia
ggcccaagggaaaggccgcagcgaaccacaggcaagcccaacgaggccgagggcacgaacccagcgacagacgacggacaaggaaacggcgcacgaacgcgaggagaacaggagacaaaacccgagcaggccacccagccagcgcgcggcgagagagcggggcgggcgccccgagcagcccagccagaacgattatatttacgtgcgggggcggccgcagaaaggcgcgaggacaacgccgaaccagcagacgagaaagaagggggagccgagaacggaaggggcgagaaacgaggcgaagagcgagcggcgcgggagca

SEQ ID NO: 121338 - DNA, 480 bp, Arabidopsis thaliana columbia
ggtaaggcgggaatcttataaaaatatcgcccccgcggatacgtggggatagcaacaacataggaacagcgcaatcttataccattttagacgggcggggacaccagcggtattattcgcgcatgggaggctagtctggaccagcataattgtaaaccgcgccagacaccgcccccccccttttattattttgggggggggggccaccgccgccccggcagcgccgcgtctattcaatgccacaaccttcatacgccatatcgtggcggcgagtgcccggcctcgctgtgttgccattacgcgactctcactgtgaagcaacgagatgatgtgtgttgatatgagtgagcagctccctacccgtaccagagtcagaaattaactcgccacgagccgacgtagatatagccagcgctcacgcgcagcgccgtgaacatgcgattggtattgtgggcagcgtgtgatcactgtatgcggggc

SEQ ID NO: 121339 - DNA, 422 bp, Arabidopsis thaliana columbia
  unsure (1)..(422): unsure at all n locations
caaaaaaaaacagccgggggagggggacanagaacgaaagaaagaaaggggaacgggaccacggcgccaacaagcgctatgcccaacggagaccccccccaagccagaggcagacaacccccacgcgcgccccantttcttaggggttgggagaccaaacgggggaggcaaccacggaaaaacaccccccgcagggggcggggggagacccccccaaaagggaccgcccccccccccgcagaaaacacccgcggggangcgaaccacccccgcaggaaacccacaaggagaaaaagaccgcaccccacaggaacccaacgggcacgacacccacccacaaagaacaccaagaccgaggaaaacccgacgcacgccaccgcacacaggcaggggaggcccacagaaagacagccccaccacac

SEQ ID NO: 121340 - DNA, 525 bp, Arabidopsis thaliana columbia
  unsure (1)..(525): unsure at all n locations
gaccccctataattttcgcggggggggaaggcgcaataaacaaaaanacgcgcagaaaggcgggaacaataaagaggaacacgcgggggcaggaggaaaaacacggggaagagcagggcttttaaacacagcaaacaccccaccccatcacccgaagaacccgcgcccacccgcgcgggggaattttaatggggggagggcgcnagccccccaggcgccccgggacaaaaaaaaaccccccaccgggggggggggggacgcccccccaaaacaccaaaccccgcggggcgcggcacaaagcgacggggcgcccacaagcgcaagacgaacccaaaccgcggcgcgcaacaaccccaaccggcacccccacgcgcgcggcgcgaaaacgacggacccaccaacggggagcaagggaggagaggggcccaaaacccgggaacgaccgcgcgaaggcgaaacaaaccaccccgacaggaacacgaaccaaaacccccgcaggggcacccccgggaagaaacaaccaca

SEQ ID NO: 121341 - DNA, 163 bp, Arabidopsis thaliana columbia
  unsure (1)..(163): unsure at all n locations
cggaaaaccaattacgagggcgggggaggccagaagaccacaaaagggcaccgccgcgaggggacnacagaagggcacgcgccgngagaacacgacaaaaggcggacggaaagatgttaaggcccgcaacagaccccgcgcgctcccaacacgaaaacaacca

SEQ ID NO: 121342 - DNA, 490 bp, Arabidopsis thaliana columbia
  unsure (1)..(490): unsure at all n locations
cacgcgtacgtaagctnggatcctctagagcgtccgccccagggggaagtcctattattatttatttcaaacatccaatgaattctaatcaccacgctccaatataaaaagaatacaaactttcaaataaaacctaaattttcaatggacaatgttaatcccaaacacatcaaggggagcgaaagaaacaatcctccttgggagctgtgggncngggcaggcggcccactgggaaaaagcccaccccgaggaacaaaaaagaccccctcatgatgggancactacccccagatagagcgatgcacaaaaaaacccaaatgatatcattccccagatgacaccccagccacaaccggtacagaaaggacagatctctgcaaacttctaaacatccttgaatggacccttcgaaatacaaacctcatagagatcggaacctggaaataagcctttctccaccccaataaccagaaggcctaaccgggaattt

SEQ ID NO: 121343 - DNA, 343 bp, Arabidopsis thaliana columbia
  unsure (1)..(343): unsure at all n locations
acagaagggagccggagaggggggcgccaaaccgggaaccccgnggnggggggaaccggaancaaaanacccccctcttcaccancgggaggcnncaccacagncagcccncggcgacggaggacangacgattcctcctangaagaggcannacggcgngggggcacgaagcgaggcaagcccccgcnngcgagcggacagggggagacgcaaggagcggccccaccccaaccacgaggcnncaaacgaaccgaaaagggcagaggggacggaggcgaacgcaaacgaagggggncccaccacaacacgngggggcggcgagggggagagccgaccggcggg

SEQ ID NO: 121344 - DNA, 452 bp, Arabidopsis thaliana columbia
  unsure (1)..(452): unsure at all n locations
cgcgtacgtaagctgggatcctctagatcggtcgctgggggggttagggctttttttctttctnaaatcaaaattctacaatattgtatattctaactttccataacgagaaagtttatcggtgacaagcgttactaaccagaaatgcagggaagagagatcatacatagggaaaatcataaaaaggaatgcctcctgcgttgtgggaaaccaacacgaacatttgagaattcaactacttacacattgtctgttggtgctacccgagttaaaaagatttcattactctcctcactccccttttgggggttttcccaaacgtacggacgcgtgggcggacccgtggtccacccggaaatccggaccgtcctgcaggcgacactttcccttagggggcgaataaagctggggaacagggcatggtggtcctggggaaaagggatccgtccaat

SEQ ID NO: 121345 - DNA, 349 bp, Arabidopsis thaliana columbia
  unsure (1)..(349): unsure at all n locations
aaaaaaaaaanccccggnagggggaaaaaacagaccaccgccaggaacgaaaaacagaaaacacagccctcaaaaaaaaagccaccccccaacacaaccaagaacccaggaaggcggaacccctcaaganagatagggaannnncggggggccccccaaaaaaaaccccccccnnggagggggggggggggcaccccaacaaaccgaagcacccacgacggaaggaagacggaagggaggaggcgggacggagaagagggcgcagccagccaaacggagacggagacggccaaacaacacgacggaacgcggagacacgaaacagccaaagcgaacaaagagaagccga

SEQ ID NO: 121346 - DNA, 354 bp, Arabidopsis thaliana columbia
gccgagggcgggacacccgcaagacaaccgcccccccccgcccccccgcccttaataatttgggggggggcggacacccccccccccccgttacagaaaagacccccctcgcgggggggacgacacaccccaatctatgggcccggcccccccgcatgtaaacacctcggcgcgtgggcagagccggagaggagaacagcaggtgcagcgggggacagaataaatcgagacccctggggcagcaaatacaagtcataaacaacaatggaaacagacatgcctacatcacacgccccgagacagcccgaaaggaacgacgcgagacacggagaaggtagaaagtctagctcgcct

SEQ ID NO: 121347 - DNA, 446 bp, Arabidopsis thaliana columbia
agccgggggacggggctcttcgttctatagacgaagaggggggaggacatttgagtgaagggataggttgacacgaggaagttgaccttgctttttgcgagggatgattgcggaaacatatgacagtatgcgagttgagaaaagggtttcaataatttggggggggggcaaccacaaagccggccgcttttggaggggatgagctcccgccttctggacggtcacggaacacccctattcgatgcacgtcgcgaacccgccgaagggacgggcggagtgcggtggaaaaaacaataaaaggggacgactgagggagctgtccccggccaccgggagaaatggcattgtccaggcaagaggcggttacaggtccacgcggcggacgggtgagagtgatgtgatgataatggggtgtacgcaaccagcgagatgtgagccgagcagga

SEQ ID NO: 121348 - DNA, 417 bp, Arabidopsis thaliana columbia
  unsure (1)..(417): unsure at all n locations
tttttttcgtattgggaccaaagaagcagggatgcacaaggcgttctggagtaaaggtgactgggttcaggggatatagaaagatttgtcgcgctaacgggtaagggataagtgcattgacagggggggaaagcgccttaataattgggagggggaggcaacaagcggggagcgaggggagaggaacccccnacagggggggggggggcgaccccgaggaggggacacccagggacgaacaaaaacggggggggggagaacaaaaggaacccgggggcgggggcggggagccgacgacgcggaggggggaaaggaggaaaagcccccggggccgcgccacagagaggaaagaaaggggcggggggggaagccggcccaaggagacgcgagaggggcaagagaagggcaggaaaggag

SEQ ID NO: 121349 - DNA, 445 bp, Arabidopsis thaliana columbia
ccggaccggaaaaacaattcgagccaggggtaggcgacgcagacgaacggccgccacaacgagaggagggaaaagagggacaacagccaaaagggaagcgcaagacaaggggagcagcattacaaggccacgcgcacacccccagaacgccatcgacagcgaggaacacgccgcaaataatagggggtgggaggaacacccagagcccgacgcacaaaaaaaaccccccaaaggcggggggcggggccacccacaaagcagggcaccccccccgccgagggacagaaaccggagcaccgagaaccgggggcccccggcgccgccagcgcgcggaccgcgccccaccccccgccgcaacaacgcccgcccacggaagcccgcgaagggggaaacgggagcccagacggaccccacccggcgagggacacggggcggcccggaagcc

SEQ ID NO: 121350 - DNA, 476 bp, Arabidopsis thaliana columbia
ttaacaataatccacccacaaggggttgacttacatgattccaataacgtgatataaaaaggcattcccatatcccttttctgccaaaaaaaaaaagaaagggtataaaaaaaatttgacgcgcgaaaagaaagatttaataaatttggatgtgtgggaaaaacgcccggccccctcctatgtaaaaaaaatctcctccttgaacatttttgatggggtcgcctccaattcctaaaaaaaaaacaacttaggaataaccatatcaccgagatatcagaacaggacaaaaaatcataaaggcaacaccttaaaagaaaaatcaaactcctgttgaccttcagaaaatttttactcttctacctcattgactacacttctctaatttcaatgaattttaattaatcaacagccccatacataagccccactaaccctatttatcatttaacctcatctcccaaacaaaaccatttttt

SEQ ID NO: 121351 - DNA, 493 bp, Arabidopsis thaliana columbia
  unsure (1)..(493): unsure at all n locations
cggaacaccaatttcgggggggggggagggcgggacaaaaaggaaagaccagccaccacgggggccacnagggcgagcgaagaggcaacaggagacagaccggcgcgcaggaacaccattgaaagcacaagcagcggaccacggaccagaaagagaccgagggcggccgggggggtaatanacaggcgttggggcccgacgagggggcgacgaggcagaaaaacacccccccaagggggggggggggcaccccccaaaagaaggggccacccaagcaaagcaagagcccgcggccgccacgcagcgagccgccggagagaaaccccgagggcgggccacccccgagccgaaagaaggaacagagccgcacccgacgagccaccgacacacaagaccggcgcccgacacaccccgccccccaccccgggcggcacgccaagcgcgcacccagcggacgcaaccacccaacaacacacgccacgacaaaccaccc

SEQ ID NO: 121352 - DNA, 394 bp, Arabidopsis thaliana columbia
gaagacgacggaaagggacgccacacacaacgcacaagacagaaacaccccggccacgccggcaaccggcacgccgacacagacaccgaccaaacacagcacaacaccccgacggaccccctttttaaatggggtgggggggaaaaccggcaacgaaaacaacgaaaaacccccccccacaagggaggagggccaccaccccccaacggacccccccccacaccaccaccacaagaggcaaagcgagacaccaaagaaacacgaaccacagccgccccacacgccgcacaaagagagcaacccgcccagccaggaacggcagcaaaacccggcagcgacgcacacgaccaacaaccgcggggaccagcaccgaccaacaaaacgcccggaaaga

SEQ ID NO: 121353 - DNA, 325 bp, Arabidopsis thaliana columbia
caaaccccccccgggggacaaaacacagaaaaagcagaacaaccgggaacactaagagaaaagcgaccgaccagaaaaagacaggcacgcccctttagggggaggaacacaggggggcccggaaaagcccccaggggggggggggaccacccaaagggcccccaacgcaaaaaaagcgggcggggcacccagaagcggagagacgggagggggcaagacaggaggcgagaaggggcgagaagaacacaaaaaagcggacgcgaaccgcggagcacgccaaggaaccgcacagaaggagcggccggggaaagaaagagggaggcgg

SEQ ID NO: 121354 - DNA, 496 bp, Arabidopsis thaliana columbia
  unsure (1)..(496): unsure at all n locations
cgtaagctgggatcctctagagcggttgccccaggcgggagggtcttttttataatacgggattaatcacttcggctcaatcctttatttcttccctaatcataggtgctctctagtgaataagtaaagaaaatggctcaccctccctctgccaatcttcctgcttcccctctaagaacggggtttcttcctgggggggggaaaaaanaaagggggatcctaaggcaggaaaaccaaaggggncattcatcaaccaagcttctatttcaacaccaccatcggtctcctcctccgctgggttctccgacggggaggccccttctttaaaaattctcactccccaggagcttttcatatagcttcacggctggatcccctatctcattgaagttaaagcttccatctggactaggcatggaactggacgcccccccaaatcacccttgactagcttttggcgcgaccaggctcttcagaggagaaaaaggtttggccc

SEQ ID NO: 121355 - DNA, 350 bp, Arabidopsis thaliana columbia
  unsure (1)..(350): unsure at all n locations
acgcccgcggaccggccggaancccggctctacgggcgctgagcgngcgagagacacagaagggacggggcgaaaacacagaagggacggcnggagaagacgacaagggaaaaggcgctannacagccagagnnaaccacagnngcccggcccgagaacgncaaagcttctccggggggagaangacacccggagacaaaaccnaaccacnccccagagcacngggcgggcaagagccagncaagggngaannnggagggacgaacaggnccaggccnaggccaganggaaaccngaaccacaaagaganaggggaancagccgggaagccanaagaaaagcccacgggg

SEQ ID NO: 121356 - DNA, 503 bp, Arabidopsis thaliana columbia
  unsure (1)..(503): unsure at all n locations
agcnggganncnntagagcttttcggggggggggaaggcggnanaaaacancngnagcggaagagaagggaccaaaaacnnnggagaaaggcggacacaacgccgccgggagcaagcggcgcccaattcataagcgttatagaggcgtctgcagggccaagcattatgagggccaccccccgactttaaatcattcgggagtggggggacacggggggggaagccccgcgggggaagagngcccaaccgaggcgggggagagggggagcgcaccctacggaagggaggaggaacaaaaaaggccccagggggagccggacaaaaacggggggggaacgagacgcgggcgcagaaaggcgggggggggggaggcgagcagaaccgggggggggggccccacccacccgggaggacccggaaagggacagaaagggacgcgggaggaaagcgcagcgcgacagcggagaaaacagaaagggggggacggaagaccgcgcgaaaag

SEQ ID NO: 121357 - DNA, 441 bp, Arabidopsis thaliana columbia
  unsure (1)..(441): unsure at all n locations
ccccccagnaccggccggaacccgttcgccccggaagcgccaaaacacaaacgccaggcgagggacagaacccgaagccggcaacaccggaagcgaagagacggcgagcaagaatgaaagggccgagaagggcccagcccgaggaaaagaacccccaaccccaaataccgggggagaggagcccggggcgcaccacacaaaaaagccccagaaagggggggggggcccccaaaagagagggaaggagggccccaacaacccacgacggggaaacaaacagaccaagagacagaacccaagggaagcgacgcccccccaacgggccacaacggggggccggaaccaacaccaggcaagcgcggcacacacccccggcnggcggaaaacagcagcgccccgcagagaccagccgaccccaaagagaggccccaagacgccccc

SEQ ID NO: 121358 - DNA, 401 bp, Arabidopsis thaliana columbia
  unsure (1)..(401): unsure at all n locations
gttttttacaatatatattttgattgaggggttcacatggagcgcatatatacattaacaggacagaaaaggggcttagttcttattctctgcataggtgtttttacatcttaatttataaaagggccaggggcaggggttcatatttggacgtggggacaccagagaagaggccacacaagaaagggggaccccggggggtggggagaggcaacccctgaaggaggacacacaggggacacggcngcggggcccccggcgaaacccaaacgcagacccgggacaaaaagaggcgcgcgcaaggaagggccgcagggaaaagaggcgcaaggggcgggagggcggaaaccccggaaggggggggagcaaggggagagaccgaaccggagagagggagagcc

SEQ ID NO: 121359 - DNA, 472 bp, Arabidopsis thaliana columbia
  unsure (1)..(472): unsure at all n locations
ccgggccggaaacccggttcgccgcgggggacgcggatataagaganggcccgccccaacgggggggaagagccccgcccccccaaaaaggnacgnagaggaggcaaaggcggcaagttctactgtgagctatttctctcgaaatggacatcgacagcccccgcggcagcggataactcntctggaagtgggcccaagcacagcacggaccgagggaaaaaaggcccaccacggggggggggagccacccacccnacaggaaagcaccacccacagacaggaaagaggaggacgcgaggaccaacccggcggaccccggccccaaaaaggacaggccaccgagggacggaaggaccagccgccgccgcccgaaacgaccacccgcccaggcgcgggaaaccggcaacgcgccggagggaaaccacgcgcggcccggaggcaaacgccaaaccacacacgggacgacggcccc

SEQ ID NO: 121360 - DNA, 486 bp, Arabidopsis thaliana columbia
  unsure (1)..(486): unsure at all n locations
cacgcgtacgtaagcttggatcctctagagcggtcgccctgggggaaaggcttttaaaaaataactttccattttggggggttcaaaagcccttccgtttaaaccctaattcacttctgccggccaaagaggacattttgacgacgagagccacggcggcgaaacaaaaagaacaaggagacgcgcagaactccctccttgggaagtggggggccaaacgaggagggcaacaaaaaaaaaaacccccccagaaggggggcgcgcgaacaccaccagtacacccncccccaccccgcgcgagcgccgcccagggggagcccgacccggaaccgcacacagccccgccgcaagaggacaaccgggcggggcacgaaacaccgccaaacaaaacagaggccccggccacgacacgcaagagagccgcaacaacgcaaaagcgagaaagcaaccgcggggccgcccggggcccgccgaacaccagccccc

SEQ ID NO: 121361 - DNA, 489 bp, Arabidopsis thaliana columbia
  unsure (1)..(489): unsure at all n locations
ccgcaggnaccggnccggaanncccggttcgacccaggggnacggcctncaaaacaaaanacccncgannangagcgcgnccaaaaaccctnccgctnaaaccctaanncacctcgccggccatgncgacactcgaggatggatttccggcggataagctcttcgctcaaggatactctnacacctttctctcacagacgtctggcncncncactgcaggcgangncnccacagacgctgcccncnctatccacgcgccttagacggcgcgtgcctctctccataccttgcgtttcgtctccgatggatactcgtttcggaatctcacatggcttgctgctatggctttttcttggtgggatttggattcgtccactataactgtgggcatcgccgctcaagcctcgatttttcgccaagctaagtcccttaaacatccgattgcttcccgcccccggtgttaagttcccggcagtatgagattacctt

SEQ ID NO: 121362 - DNA, 495 bp, Arabidopsis thaliana columbia
  unsure (1)..(495): unsure at all n locations
aggggaagagaaaaactcctcgggggggggggaggcgcnaaaaaaaaaaaccaaacaaaggggggcacccagccgcgcggaaaaaacagcccggacagggccggggcgcccaccacaaacacagacccgcggacgcagccgaagagggaccgccgggcgaggaggagagcgacgagcggcggggctccctcaaaggaaagtaggggcaggccnacaagggggcgaccgaccgggaaaaggcccccccccggcgggggggggggggagggagacacacaacagaaaggcgaggcaactgcggagaaggaggaacgggagcggcgaagacgacacacgcagaagaggaaccagagagccggcccccgcggcacggagcgcgcggcagaaggacgacggcaacgggaaagggcgggggaggcggacaaaaacaagcgagcgaagcgcgcaagcggagagagagacgcacgcngagccaagcgcgacgccaccgcgagc

SEQ ID NO: 121363 - DNA, 554 bp, Arabidopsis thaliana columbia
  unsure (1)..(554): unsure at all n locations
caaaaaaaaaaaaaaccanccgcnanagggggggaanaaagaacagaaaaccacaacaacaccccacgcagaacacacgcgcacacggcgccaccaaagttaacagaggagcngagagacagagacacgacgagcccccggaggagagggggagcaacaacgaaaaacccctccaacagagaagaaaggggacacacccacggggggggcccccgccccaaaaaaaaagccccccccccanacgggcggaggggggggggagcacaccccaaacaaaaacgaacccccgcgcgcggcgagaaaaaagaggagaagcggagggccgccacgcagaggcaagaaaaagaaggcgacgagaaacacgaagaacggagaagaagcgcgaaaccaagaaagaaacgagagagagagcgagcgaggggggacgcagcacagcccgacaggcacgcgaggcggaacacgcccggccgcccgaggaccgcccggcgacacaaaccacaggacaagaaacgaacgaccaaagaagaaagggcaggcagaaagcaacacaccgg

SEQ ID NO: 121364 - DNA, 455 bp, Arabidopsis thaliana columbia
  unsure (1)..(455): unsure at all n locations
aaaacaaacttgagccactaaatggggatgaggcaagcagggaatcaaaagggcgggcagaacaaaaggccacacatatccttgggcttataacacaacaaggggagaaacaacaaaccaacgggttccttcttatcggcgacggcggacaccnngcggaaacaaggcgggacccccacccaagccagagcgggggagggggggccaaaacaaggggcggggaaaaaccacacccgagccccgggccaaaaaaccggggggaacccacggacccgcgggncggccggccccccctaaaaagaaggccgcacaaaagggggcgtggggccagggaaaagtccccccccctcaggggcgggaggcgaaggaaaaaaaggcacagcccaaaggggacccaccaaggagaagcggggaaacccgcgaacccgacccggaaagcgggggccccacccgca

SEQ ID NO: 121365 - DNA, 424 bp, Arabidopsis thaliana columbia
  unsure (1)..(424): unsure at all n locations
ccgggccggaanncccgggtcgacccacgggaaagggcgggcaaaaagaacngaaaacgcagnnncgcgagnnacaaaaggggcagaacataaaagagccgagggggaggggaaaccaagggagaacagagaccaggggaggcaaacagaaccagcggaaaagaggcaccgcaagggacctcgtccgcggtggggaaccccgggagcaaaaaggggaaaaaaaacccccccaagggaggggcggaaccaacacaagaagagggaaaccccgggcggaaaaaaaaccggggggagaaaccaaaangaaccagggcccaaggaagaggaaagaaaaaggacccccccgaccaaaaaaaaggaaggcgcccgacggnnaagggacagcaaaaaaaaccccccaccgaggggaanccgggcaacggga

SEQ ID NO: 121366 - DNA, 335 bp, Arabidopsis thaliana columbia
  unsure (1)..(335): unsure at all n locations
cacgcgtacgtaagcttggatcctctagagcggtcgcccttggggtaggggcgttttattgttattattcccgtagcacagggtaatgagcgaacgatttcttcatctggcggcggcagggctgacgcaaagcgatttttccccaggcgcgggccacgaggctgcaggggcggaagcgacaaagacaaaccaaatccctgctgggaagtggggccgaaaaagcgggggcgccccggggaaaggggccgccanccggggggggggggggcgcccccccgggaataaaccgcaaangaaggggcanagggagccgcgccgcgggggggaccaaagcc

SEQ ID NO: 121367 - DNA, 452 bp, Arabidopsis thaliana columbia
  unsure (1)..(452): unsure at all n locations
cgcctgcaggnaccggnccggaatncccgggtcgaccggggcgttcaagccaacaaaggcganaannccgcnagcacagctnaaagagctaacgannnctncatctncttcttcggttcttaccaaatcgatatcttctcattcgttgcatagtagctgcatttgcgcaagttctagaatcagncaatttctttttcgggggggtgtaaacgaagaagcgattcaacaaggtctaagtcgatgcgattgaggtgttccttctctccgatggaatctgggagaaataaggtgattggtgtcggtggtggtggtaacaatgcccgtaacccggaggattcaaggcggttacagaggggtggtttctatgccataaacacggattcgcaggctctggtacagtcttctggtgagacccccttcaaaatgggggaactttaacctcgggggcttgg

SEQ ID NO: 121368 - DNA, 322 bp, Arabidopsis thaliana columbia
  unsure (1)..(322): unsure at all n locations
gtcacaagaaaagatatttggagaatgctgggcaaactcgctcaggacgcgtagatgcgggtaacatattctaagcaaaaaacacccgccttaaacggttcaaaaaaaaacactttctgtggccaaaagaagtgatgtcgaagagcagaggctttaatanattagggggggggggcaagnaggcgcaaacacgtaaccaatacttacacgaaagaatcccgcaaacaagatggcgggtcgcgcgaggaggacggctccctgttggtgtgagctcagcaaacaggtcagcacgcacacacacgccaaggacaacatgccaccg

SEQ ID NO: 121369 - DNA, 383 bp, Arabidopsis thaliana columbia
  unsure (1)..(383): unsure at all n locations
atgaaatattgggcattctcggggaattacggatctcgtcattaaatcttcctgatagcacggttttccattttctggttgaaaaaacccaatcttcgccggtcattcccgagccacgcgcgcttatatattcggnggtggcgcccgcccgagggagaggccgggaggagggacccccaggacgggggggggaggaaagccccctcttgcgtgtcgccccacctccgttccgggcggggacaagggatgctgtgctgacgaacgatccactccccatggagggaagcctcgcgagggcccaccgcgttgcccgcccggccggaggggggggtccaacggccacccactcaccgcggcgcgccctgatcccggaccgctcaacc

SEQ ID NO: 121370 - DNA, 476 bp, Arabidopsis thaliana columbia
  unsure (1)..(476): unsure at all n locations
aaccggaccggaaaccattttcgggcagggtaagcgtgcgcccgggcggacgcgcggggaaaagggaagaaaagagcggganacccngccaaacgccggcaaggcccaggaaacggcacatacagccaacggccacgaacccggaaaccgggaccccccgcgcccagccccccctattatttgancgtgagcaccancccgaggcaacaagagagcagaaccccccccccaggggcgggggggacccaccccccaagggaccccccgcccaccaaagggggccaaacccggcggacagcccgaacaccccccaccccccgccgcacccccccccaaccaccacccaacggccccgcagcaggagcaaccgcaccacccgccacacccaccccacccccaccccccccccccgccacccccgccacccccccccccacccaccccaccccaaccacacccaccccccccaccccccc

SEQ ID NO: 121371 - DNA, 160 bp, Arabidopsis thaliana columbia
  unsure (1)..(160): unsure at all n locations
ggggggggaaaggcgggtttttgnggtaactggtggctatcaggggggcataatgggggaaccaaccacatgtcggatcaatataaaggcgaggaggtgaattttatgtcacgctgccagtggaggggggacaaaggtgccggagatgacaggggcagaa

SEQ ID NO: 121372 - DNA, 522 bp, Arabidopsis thaliana columbia
  unsure (1)..(522): unsure at all n locations
ccgcagggaccgggccggaaaaccatttccgggggggagcaggcggggagcccagaacngagcgcgaaaaggggggaagacgaggaagagccaaccacaaagaccagcaacaccacacacggacgccgctaaaggagcccccgacaacgggaaaacacagagaacaacggaggacgcaccccaagcacgcgttatanattgaggagacngggaccagccagcggggggaaaaggagggaaaaagacccgccccaggagccgggggggagggggagcaccccacgccccggagacccggaccgaaacaaaaaaaggggacggggggcagcaacagcgcggcacgcgccgcagccagacgagagagacgccagcacccgagggacaaagaaaagaggagggcgacagacacacgacccacagcgaaaagaacagaccccgagaagagaaaacggcggcacacgaccaagaacacagcgacgaccaccaaaacacccgacggccgacgacaacacacccccccgg

SEQ ID NO: 121373 - DNA, 448 bp, Arabidopsis thaliana columbia
  unsure (1)..(448): unsure at all n locations
ccggggcggaanacccctttcgggggcgggggaaagcgganggaaaaaaaaaacacccaacgggggggnaacgcccggacgggacccacgaggaacgggacccaaaccagcgagaaggcgcaagncgcccacaagagaacaaacccacaccnnaccgaaaaacgaacaacaacaccccttcaaaaaagcaggggcaacccacccccagcccgccaccagaagagaccccccaaaggggggggagggagaaccacacccgaaaacgaccccccgcgagacccaaagcaaagagcagggggaggggggaaaaaaaaccacaggcgccgccccgaaagaaccccggggaagaaacagaggacaaccgaaccaccgcccgcggcggaccaaaaaaggccggcacccgcaaccacaacgccccgccacgcaccgacccccgaacccccgcggg

SEQ ID NO: 121374 - DNA, 465 bp, Arabidopsis thaliana columbia
  unsure (1)..(465): unsure at all n locations
ctctagagcgtgtcgccgggggggaagggcgnacaccaccaaaccaaacaggggagcggggagaaacggacggggaanaggacaagaacccacggagcgggagaaagagacccaaaagagccnccgggcccacagaaaaagacacaagcgggggagccaaaagagggctttttctttgggagaacggacagacacccnncncnnccccgaagacagaagccggggggaacggcgaacaagacccccccaccaccccaancacagcccggggggggcacgggccgagaaggggacagggcaagaggacccaaggcggggccaggcagaaggaaggcggagagggcccgagccgcgcgccccggcggggggcggcccggcgggaagaacccgcaaaggggcgggccggcgaccgcaggggaggaggagcccccaagccccgggaccccagcggcgcacacacagaaa

SEQ ID NO: 121375 - DNA, 476 bp, Arabidopsis thaliana columbia
  unsure (1)..(476): unsure at all n locations
ccggaccggaanacccggtttcgcccagggggacaggcggagccaccaccgaagancaccccctggggggaanacgaagaagagctggaagacgangacgangancnctcgctctcggcagattccgatatcgctgaagctcttgattggctagacgggaaagacgacgacgagctccctccaggaacgctggacccccacgcgcggcgccccaaagcgcacggggcacacggngcacgggcgagcgcgagcgcaccacagccgagngcaaacaaggcccagaagcgaacaagccacgggcgggccgcccccccggagggangggaaggaagaagcaacaggggggaggcgcaacgccggggacaccgcgaccgcggggaagccgacagacccagaaagccggaggaagaggaaacccggcaaagcggacccggccacgggggacaggccccaggcccaggaccccgaaggaacgg

SEQ ID NO: 121376 - DNA, 453 bp, Arabidopsis thaliana columbia
  unsure (1)..(453): unsure at all n locations
gtaagctnggatcctctagatcggtcgccctgtgggtttgggctttttaactattaaacaaatttatttctccaaaattgtaaattgtgataatgatgtttcagtgccttttttttctaaatcaaatatcaaataaaatcggaaaaaaccattaattattacagataaatctatggataaaaatcctcatggagagtgaaaaaaccagggacgggagagagcacaagacagctccctcagagtaaggatgaataaaagcactgttcatttgccaaactggaaacgaccccgtacccggcgcaataagaacattatttgaacaaaaagagcttggctgctccaaagattgcaagtggtggaaaaactctggagtggatacatggtgttcccccctgggcgaatgcttttacattgaaggacccccaaaattcccaggggaggtcctccctttta

SEQ ID NO: 121377 - DNA, 185 bp, Arabidopsis thaliana columbia
  unsure (1)..(185): unsure at all n locations
gcctgcaggnaccgggccggaatncccgggtcgacccacggggacgggcgcgcgagggcggggaacccggnnctaggacctccgcccggnatcctccctaaggacttccgngacccaacgactgcatggaagacatcagaaggaaaatggcggatcacgattggttccaagctcaacaaaaccgg

SEQ ID NO: 121378 - DNA, 464 bp, Arabidopsis thaliana columbia
  unsure (1)..(464): unsure at all n locations
cgtaagctgggatcctctatatttgccgcccttggggtattgttttttatacaaacacatatcgaaactcggggtatcaaatccatagagaaggaaacactaatcaaaacaaactgaacgttgaagaatcaagaaaccaaatgctcatataagaaaaactgctccaagaaatcagaagaaaccctcatttgcagacggcgnatanagagattgagagcattaaacaaataggagaaacctctgattggtcaagtaccttcagaggacaagatttcgagctctgcccaccaaagaggagaggatcttggagtagctttctcaggaggtatgttgataacttggttcaggtgttccgctacatctttcattgaagggcggtgtctctgttctgttttcagacattcttttatcaccatcgaaatcacttcaagctcctcttgtttgaatggctttaacgattgatc

SEQ ID NO: 121379 - DNA, 416 bp, Arabidopsis thaliana columbia
  unsure (1)..(416): unsure at all n locations
cgagcgggaccacaacgtcgccagggaaggccanaaaaaaaaaacccanagaggaacccaaagccataanacaggccacaagcgcagaggaccacaagccccggcccacaaaggcgaaggcaaccccccaaccacaagaaaaaccctcttgggcgcggagaaacaagagacccccccccaaagaaaaccccaaaccaacgggagaaaaacgaggccccacccaccncaaaacccgaaaaacccccaaccgaagcgaaaccccaacccggaaaccccgggcccgacccggacccaaagccccacaccgccccgcgccccggaccccaaccacaccggggaagaaggcgccgagcaaaaaaccccaaggcccccgncccccaaccggggaacccccggggggacaagaacccaacccc

SEQ ID NO: 121380 - DNA, 463 bp, Arabidopsis thaliana columbia
  unsure (1)..(463): unsure at all n locations
aacccccgcacggagaaggccggagcccccaaaacaaaaaaccgagaacgcaccacggaagcgcgagcgaacagggaaccgacccacccacacacgcccataagggacacacgcaacaagancacacgccaagcaccgcgccacaacacgaacaacaaaccacacgcagacaacaccaccgagcgcacgcagccgaggaacgggagccccactatttttttagcggcggcggggaacccacacacaccaccccccgacagcccgccccacaagaaagagaacgcacacacacacggaccacgcacgacgacccccgcgcgaggccacgcaacagcacccacacgcagacgcagacgcacagagacgcaacagacaagaccagaaaccacaacacagagagatactcaagacaccctccacagcgccacacacgcaaaccacaccgacacccacgagagcccgc

SEQ ID NO: 121381 - DNA, 525 bp, Arabidopsis thaliana columbia
  unsure (1)..(525): unsure at all n locations
cgcctgggggnacgggnnggggattgtttttngagcggggggggggggcgcgtacaaaaacgcgcgggcgaagaaggacgagctcgcgataatggagtatgaggtggaggagggagtcggggggaggatgcggcagtggagacgggagcagccagccctcagactaacgaagcggggcgtcccgcgcgagcgccatttatttattggggcgtggggacacgaacccccgtccaccccgacctcacaacgccaccccccaatctagccgacctaatgtctccctctctcattgcggtgcgcgcgagcttgcgggggaggatggccgcgggagcggtgtagcaaagtctgaggccggcgcctatgggcgtcccgcgtcaggtaacccctctcacggtgcgtcggcgaggggtgtgagacaaacacccacccaactctacacacgccaccccccaaacacaacggcccgacccaccataaacacccgcggtatgggcgtcccgcgggaaacagacgaggtacgggcgc

SEQ ID NO: 121382 - DNA, 512 bp, Arabidopsis thaliana columbia
  unsure (1)..(512): unsure at all n locations
agctnggancctatagatttttcgccttggggagggggttaaaaaaataaggttgttgactgagtgttagacattacaaaggctctgggttttggttttatatggcgattaatagataaacactattagaggatataaggcgtaagttagctaaggagaagttaaggcgtgccgaaacgagacacccacataataatttgggcgttggggaagagagacaaaaggacccgagagagagagaacacccgaganaggggggggcggggcgagaaccacgagaacacggggggcaacacgcggcnacgggcgccgggggggggggcgcacgggcgaccgaaggcaggcgaaacagaggacggaggggggaacgaggggcggggagaagaacggggggaggggagaaaacgggcggaagcgggaggcagggacgaggacagacagcgacggccggggaggcggcgggggggaacgaagaggggacgcagcgcgggggcgagcggggaggaagcggg

SEQ ID NO: 121383 - DNA, 477 bp, Arabidopsis thaliana columbia
  unsure (1)..(477): unsure at all n locations
ccggnccggaanccaattcgagggggggtaaagcgacgcaaccaaccancgancgaccacgcgggcggcattgnganacatnnggaagggggaaaagggaagaccccgcgcgggatattaagcttgatggtggatctgcgtggggtaaacagatgcctaagcctgcggcgtttaataattcgttgtggggaacgcccgacgtgattgacgaataaaaaaacccgcgcacacaggtggggggggggcattctacttatgaggggggggctcgcgggtaaaggccctcctggtggttgggtcaaagctgatctaaggggaccaaaagaaggcggcagctgctattatggggggactctagcagtactggggccagcttacgggatctggggtgcgcggcagggggcaagtgaggggttgaggggggggtgtaaaatggcagttgacgaggggcagactgcggggaggaggtgcctgcgg

SEQ ID NO: 121384 - DNA, 493 bp, Arabidopsis thaliana columbia
  unsure (1)..(493): unsure at all n locations
agctgggancctntagagttttcgcccttggggtaagggcgtttgagaattttattcaatactcattaaggcatcccaaagggcattacataatttaggacagggttcatacagattggaatactttgcctggaaaaaaaacgaaggctctggcaaaaaaaaaaacccacaaaaaacgtttcataatatggnagtccgggaaaagccagaggaaacctcggagagaaccaaggcccgaaccaaaggcgagaccgcacagaaaagacaaaaacccggccggggaaaaccaaccccaacagagacaaacgacggggagaaaaaagagagcagggggggaaaaagaacccaaaggggcgagaaacagggagagggaaaacccaaaaagccgcggcaaccccggaaaaaagaaagaggaggcgacagacaacgccgccgggagcggaggagaggggagagggggccgggggaaaaagggaagcgggggaaaaaaaac

SEQ ID NO: 121385 - DNA, 438 bp, Arabidopsis thaliana columbia
  unsure (1)..(438): unsure at all n locations
cccccgcaggaccggccggaancccattcgggggaggggtacgcgggnaaagnacaaacccggncccggggaacggacgagcgccccacaccgggccccaaacggcggaacgggctaccagacagacaaggaccgcggagaggcggagggggggcccaaccagagaacctatacggagctagggccaaccaacaccgaaagggggagaaaaccaccccaaaagcggcgccaccggaccaacaaacacggaggccgccaagaagggacaagaggggcgaagccagggaagacccggcccaggccgaaggaggcgcgacaagaacagcccaaggggagagaacaggaaacgcggcagacagcgaacaccaccgcgcccgggaaaaacaaaagcacacacccaaaaagacacgacggagaaacagccggagagggaaaaaa

SEQ ID NO: 121386 - DNA, 470 bp, Arabidopsis thaliana columbia
  unsure (1)..(470): unsure at all n locations
cacgcgtacgtaagcttggatcctctagagcgtgccgcccgagggggaaggcgcaattatttaatataaagccttgtttgggggaagttaccggattcacccactcggggctgagagggaccgcgaacacggggcgggggtttgtacgagagcgggagcgaagaggggcgaggaacaaaacaggaggggcacaagaggagcggctcccctcaatgtgggacgcagggagcaaaaaccgggcgaagcgccccaccccgagagaaaaacccccgggaaggggggggaggggggggcacccccgggcggacaacacaaaaacacancccccaccgcggggganggcccccgacacacacacgaaaagagcagcacagaacccgaaagaagaaggacagccacgcagggcggccgcgcgaacagagaggcgcgaagggcacgaacagaaccggcccgaaaggagaaggggcgcc

SEQ ID NO: 121387 - DNA, 484 bp, Arabidopsis thaliana columbia
  unsure (1)..(484): unsure at all n locations
gcccgcaggnaccgggccggaanncccgtttcgacccaggcgaacgcgcnaactctctatnctctggctttctctgcgtgcaggtaccggattcctccactccggctagatctccccgttcaccgccgatgacagaacgaatcagagcaagaggacccagatcatcctctggtaactctgggcctctcatcnntgggtgtaggaccncaagggggaggccccattagaagcacgacccgggaaccgggggaacgaccnccggccggctttcctagacgaagaagcagattctggggatggccatgggaacattgctggaattgatggtttgacaaatgggcatttacgcggacaggctgctcctttggcctctgctcctttttatccctgagaagaagggcctttgcgtctgtgcaaagatgcttgcagggagttagttgatccttggaaagcaggttgatgggaggctcagtccactaaagag

SEQ ID NO: 121388 - DNA, 436 bp, Arabidopsis thaliana columbia
gcgtacgtagctggatcctctagagcggcgcctacggtagggccttttttttttttggttttttcggcaccctaaagacttgatatttccacaaaaaccctcggaagcagttgaagaaaaaagaagaggcctgggaaacaaactcagggaggggcgcgtccctcctgggggggggaacaaaaaagccaactatgaaaaaaccccacaaagacgggaggggggctaagaccaaaatacgggtatggccatgcaatctttcaaaaacaggggcggaggggaaaaggttaaccctacccccgtggggtgaccgaagcggcaaccggaaaaaaaaaaagggaggagacacccaaaggaaaacgcaagccaaccgacaaacgggcggccacccgatctaacaaagacggggacccgtaaagccggaatgtcaggggcgggg

SEQ ID NO: 121389 - DNA, 499 bp, Arabidopsis thaliana columbia
  unsure (1)..(499): unsure at all n locations
cacgcctgcgtaagctgggatcctctagatcggtcgcccttgggggtggggcgttttttcatgaatcatgccggaaccaaggcgcgtgattatatatcttaaaagataagcgtggtttacaaacatatgaaacaaaatcattagagatattgaagttatgggccaacctagacacacttgcaaaaaagaccaatttctccttatgggggggaganacaaggggccccacaccctacagagaccaaaccaaaagctgtgtggggttttgaaaaaccacaagctttctttatttaaaaacctttttttaaaaaccaaacgggcggcacaaattaaaggacttttaaattatgagcgtaattaaggggcttagaatcacgggctttttaagggggacttggaattcatggacaaggtgggtctccgggggcaggctcaacgcccgcgcttaataaatttctcccacaatagccccggtgtttggaccggggggttaattacc

SEQ ID NO: 121390 - DNA, 165 bp, Arabidopsis thaliana columbia
cctgcagggaccgggccggaattcccgggttgacccacgcgtccgagccttggcgcaagaatcaagcctacttcaatggtgagctacaatcacttgggaaacaacgatggaatgaatctctcagctccacagactttcagatctaaggagatctccaaaagcaat

SEQ ID NO: 121391 - DNA, 412 bp, Arabidopsis thaliana columbia
caaccagccgcggagcggcgagagccgcccgacataagatcggcaaactgcctaactcccgcgtccggcggcacaaaacccacgactcacccaattgcggcgtggagggggtccgccgggcggggcgcaagtttttttttgcgggggggcggccgaacgaccccacctccccatacaaaagacactcgtccgcgtcatggcgcacggacaacgcggataatatgatgtatcgaacaggcaaaagaagaaagaggaggcagacgctaaagtatcgcaagaagaacagccgtctaaatgattccaaagaacggaaggagcatagcgcgggcgcaagcagggtggaagggcttaagacgcagggagggcgcagggcagggagagagtggagcggacgagaagagatacagtccta

SEQ ID NO: 121392 - DNA, 489 bp, Arabidopsis thaliana columbia
  unsure (1)..(489): unsure at all n locations
gccgcctgcaggnaccgggccggaancccatttcgacgccaggggtaggcggggactctctcagaactatctctctgggtcatggcgaatccgacggagaacctcgacgcgaatccacaaatccgagaaccagattctgaagaagaagttgaagaactgaacggatacgaaggtgacgagggaggatttttatttgggnggtaggacgaccacaccgggtcgaaatctcaaacgcgccacagcggatccagggtagacagaatcaaggcggaatcgctattcctgcggatgcgagctgctcctgtgccggggcgggttcacgacgtgattatcggggggaacgagaagactaagggccatatcattgaagcggaaggggatgctgtgagagaggcgaccccgtttcaaggagctctcgaaggatctaggggggccaattcgaatcttccgggcggaggatatcttgtgttcccgcaacattacgcctgg

SEQ ID NO: 121393 - DNA, 450 bp, Arabidopsis thaliana columbia
  unsure (1)..(450): unsure at all n locations
gcggggagcctgtaaagttttcacctgggggtgaggcggtttttaaanaaaaaaagaccgagggggggggtcaattgacgttggtgcaatgtaccgccgggacgccacctattgaagcctttggggtccgaacgaagccgagccacctaagggggagcacgggcgggagcggctataataattgcatgtagggcccaaggccccggggcgggcgagagagaaagaaccccaaancccggggcgcggggggacaccccccgcgtgggcgcgccgggcggaggaccacgcgagtctggggggagcgtcgccataactgagcggcgccgccgcgaactgttaaagacccggggcgtagggatcggtacggaggcagcccccagggggcgtgggggggtgggtccctgccgagaaggggcgggactgcgtgttcgggccctctcgtagtaaaaa

SEQ ID NO: 121394 - DNA, 463 bp, Arabidopsis thaliana columbia
agctgggatcctctagagcttccgaccggggggaaagcgggttttactataatttctcgagaaccgaaggcgccttcgtttttatttatatacaaaccacacaggacaaaagcaagccacaataaaaaaaaatacagcgctgcgaatggtggcttcatcaacaccgaagccggggggttattattgggcggcggggaggcccccccccccgaaaacacccaaaaaaccccaaaggggggaagcggagcccccaccacaaagcaaccagcccgcggcaaaaacggggcaccaaaaccccaccaaccccccacaaagccgccccacgcggggagaaacaggacacggacaaacccccccaggcgcaccggccaaaccagacccgcccgaacaacaacaccggcccagaaaccgaacagggggaagggccccccccaagggggggcgcaaggagggaaagaaaaaa

SEQ ID NO: 121395 - DNA, 471 bp, Arabidopsis thaliana columbia
  unsure (1)..(471): unsure at all n locations
ccgggccggaattcccgtttcgacccacgggtacggcggaaaggaaagcaaatcccacacggcaaatggctcttttgccgctctcggacgaatcggctgtttccatttttcgggatataattcaaatagtgtattagtacgttgattctcttcaccacggcgtcgggacgagcgaatcaatatcgtgctgtaggcgccccacagagaccggngctgcaaaaaaaacaaccacccgggggcggcagagggagcccccccaacncccgaaccccaccccccaaggccccccccgccccgccccncaagccagacaccaaccacaccccgcgaaacaccggccggacaaagaccgccccccccccccagccccaaaaggggccgccaaccacccccacaggagacgggcccccaggcccccgccccgaaaccaccggggggcccaccccaacaacccacgcgacccaacaccgc

SEQ ID NO: 121396 - DNA, 422 bp, Arabidopsis thaliana columbia
  unsure (1)..(422): unsure at all n locations
ccaaaaaaaacaccggggggaaaaccggggcgaacgagggaagggcagggccacccggagaaaagaagacaccaacagcacgagtttttgcttaacatcgacctctccggacaaggtggtgaagaaagactatcccgacagaacaattcctaattaagatgtttgggaagcaaacacgacccaaagaatcgaaaagaaagccaacnactgggggttgggggcgtggcccgaataaattagaaaaccaaagtcaaaaagcaagggaaaggggtgtgccggaaaagtcgataatgggcagagaaatatctggtgaagatggacggagaatgggccaaaagaggaaaacaattgccaaagaaagaatgggaaaccaaccgccgaaaagaaaaagaccaagaagagcggggccatggggggtatcc

SEQ ID NO: 121397 - DNA, 563 bp, Arabidopsis thaliana columbia
  unsure (1)..(563): unsure at all n locations
gaaaggggggcaaaaggggggtgggggggggggctttttgtaaacgcgggcgagctcnaggcgngactngccgcgtacgtaagctgggatcctctagagcgtccgccctgggggtaagggttttttatttttttttttttttttttttgggggtggttttttttgtgtttgggacccctcaaaagccaccaacatttgtgttattgtgtggtttttagagccggggatagagaacacacacgcgagaaaaggggcctttactcttggggggagggggaaaaaacccgggggggggggggggggaaggggcccccacggggggagcgggggggggaaccctcgggaagaagaaggggcccccgggggaaaaaaggacggggnggggaaaaaacacagaggggggaaaccaaaagggggggggggggggaaaaaaaagagggagacccgggggaggggggaaagggggcgaccgagcgccaagaaagaaagggggggggcagcaaaggagagcgcggggggagaacagcaaccgcgaaacggaaaaaaaaagggaaaggggggcc

SEQ ID NO: 121398 - DNA, 475 bp, Arabidopsis thaliana columbia
  unsure (1)..(475): unsure at all n locations
ctgcaggnaccgggccggaanncccgggttttgagcagggggaagaggcccaaaaaaanaaccanacccacgcngaaaggggaannnncaaccaacgaagaagagagggnnccaagagcaacagacaagaagaagagaangaaggcgggaccaaanngaccagcngggggccgaggccacccaacggacgattctcttgggggggtgggccngngccggagaagggcttccgaaaaaagccccgccccggggaggggcgggagggacccccacaggggcaaccccggggagcccccaaaagaagcccgggacgggaaaaaaagagggggaccgccccccccccaaagagcgggaaaacccaaacggggcccgggccaaaccggggcaggcaggacccgggaaggggaaagcccccggagccaaaaaaaccgaggggggaacaccaaaaccggggggggaaaaaaaaagccccccc

SEQ ID NO: 121399 - DNA, 432 bp, Arabidopsis thaliana columbia
  unsure (1)..(432): unsure at all n locations
ccgcgtacgtaagcttggatcctctagagcggtcgcccttggggtttttgcttttttttaactaacaaagatggtttattggaaattttcaagaaagtaagaaactaacaaagccaatttgactcgagacataaaaaagacaacactgaaaaaaaaaaaaaagaagttcaggttcaaacactaacgagagttcgtaatatgggggcgcaaagacaaacatcttatactcataattaaggagacagatngagccatgcggagcagagctttgtaatttaaggtttaagctctttggggagatcggggaaaatcttattgaaaagctcctatttgagccatggtcctcctgaaaacaacttcaaggcaaaggaggtgaagccatcctgcataccttttcattaaaggcttaaggggcgggatttgaactgaacc

SEQ ID NO: 121400 - DNA, 389 bp, Arabidopsis thaliana columbia
  unsure (1)..(389): unsure at all n locations
tctctcctcgctctatttcactattccctcaccctccacccttttctctctctccctttccacctccccctccttcacaccattaatctctcttgcctcccctcccccttccctccccactctcttccctcccctatcgttctctactcttcctaactcctctttttctccctttctcccncaggcggcgcgggcggtgtttactctttctatcccgtatatctctctatccgtnagttcgttgtctgtctcctcatatcaataataacaactccctacttcccttctccctcttctctctccctcattcacaatctccacttctgccgccgtctcctgcccctcctcctctctctccgcccacctccatcttctccttatcccctgta

SEQ ID NO: 121401 - DNA, 320 bp, Arabidopsis thaliana columbia
tctccctcccctcccttttctctttcatttctccatccccccgttctggggctcttgttggcgctgtgtgtgcctctcgcgcgggtgcctgctgctcggtctgtgtgtttccctcccgcccgcgccccttttttttcgggggggggttgggcaccccccccaacccccattctctctttccaagaaaaaaacccgcctttcgctttctgccgcttttgtgttgtgtcgttgggtttcttttcgtgtcggcttcgccctcctggcttggtctctgtttgctctggccgcggtggctccccgcttccggggctcgctttcct

SEQ ID NO: 121402 - DNA, 777 bp, Arabidopsis thaliana columbia
  unsure (1)..(777): unsure at all n locations
ccagcctactcccncccgccgccccccccccccgggggggtaactcagttgtagtaaagaagcgccccctctcgcgattgtggggaccacccccgcgcccgcccccgcctcttcccccccacacccacccggcgctcctcttctccgccggggggtttcgtgtttcacaacaaccacaccctccctcgccccgctcctcccctctcccccctctcccccctcccccttcccgccgttctccctcgtcgccttgttacctttcgttccccctcctccctccctccctcgccccccgtcacgccacttgctcgctccgcctctgcctccctgcgccacccgcggccgctttttttttttcgcgggtggtggttcccccaccacccacccatcgccgcgcccctcaacacaacataaaatcctcctcttgccccatcacaccccctcctcccatcgtgtccctcaccgtcactccgttacttccgcgcccgattctcctctcttctacttccttccccctaccccgtcccctccgctcccccccctctttcctccccctctcctccccttcctctccccttaccgtacccttccctccgctctcccccctcctcgcctcaccttccttcctctgcgcgtgcgtcgccgctcccctctccccgtcccctctgccctctgttcctccctccctctctgcctccgctcccctctccgcgccctctcccaccctctcctcccgtccgctgtccactccacccccgctcctcccgccccccgctc

SEQ ID NO: 121403 - DNA, 512 bp, Arabidopsis thaliana columbia
ccgcctccccgcccctttccctccggttggtcggtgccctgccgcgcggcccgtcgcgcgggtttggccctcttgtttgtcccccgccggccgggcgcgccgtggcttggctcggcggtcgccgcccccgcgcgcccctttttttttgcgggggtgggggcccccccaccccccggggatccctaaaaaaaaagcactgggttccgccgtattgccgtcgggcggtcggtgcttgcgcgcggcggctctcggttcctcgccgggcggcggggggtacgggcgcggttgtgtctgcctggcgtggcgctctggccgtgcggctgcggccgggcgccgcctcgtgcgtggcgggcgttccctcccctcccgtcctccgtccgcgtgggagaccctgtgcgtctcttcgccgcccttcgtcgttccgcggctagtcgtggttggggtgtgttgggcgcggccgcgtctgttggtccctgttcccctcgccgtggtcggccgcgcgcggcggcgcg

SEQ ID NO: 121404 - DNA, 485 bp, Arabidopsis thaliana columbia
ttgggggtcgcctcgtgtccttcgcgcctgtcttctgctcttcgtctctcctcgcgcccgcgccgacctttcccgtgcggtgcccccccccgccgcggccgtgccgtgtgtcgtcccccgcgcgctcccgcggccctcgttgtctctttttttgggggggggtggcccctccgatcgggcgccttctcccaaaaagcgtgcggtcccgtgcgcgcctcgggtctctccggcgcgctcgcgtgcgcgctccgcgtgcctctcctgccgttcctcccctgccgtcgctgtcgtcttttccttgtcgcgggctcctggttcgctccgcctcctgtccggcgtcccgtcgggctcccgttctccccccctctcgggcgtgcgcgggggtgtgggcctgtcttccggcttgcggtgcgtcccggtcttcgttcgtcggtgttggctgctctcttcctgtcttccctcgccgccggtgtcccggttcgcgg

SEQ ID NO: 121405 - DNA, 633 bp, Arabidopsis thaliana columbia
  unsure (1)..(633): unsure at all n locations
gggggggcagcgcgccccccgggctgcgcgcgtctcgttgttttttttttttcttggagggggaggggggttttatactttaaaattttttctttttcttnttcttttttttttttccncctctcccttctctcctttccctcccttttctctttcctttccctttcctttctccctctccttcccctctctccctctcttccctcttttcctctctttctccctttcctcctctcctttttttttctggggggggggggttcttntcttttcccggcctgctttctataaaaaaaaaaatnctgcntttttttcctcccctccttcttttcgtttcccctacctgtctcgctgtctcctctgtttttttttgctcgctccgtcccccaccggcggtttggcgcctcgctctcctccccgtggtctgcgcgtccctgcggggtgccgcgcttgccggcggccgggcgcgcgctgttctttgctgcgtgcgggctgttgcctgctgcttctcctccggccggtgcgtcgctgcgccgcgcctcgcccgtctgggtgtttgctcttctgcggtctccgctccctccgctcggcctctcgtgctctgctcttcgttcgtcggctgcgctccgcgtg

SEQ ID NO: 121406 - DNA, 741 bp, Arabidopsis thaliana columbia
  unsure (1)..(741): unsure at all n locations
ggaggaggggggggggggggagaacctggctgcgggaccaccccccccccggcctggtggggggggggcgcccaccccccctccccttccccccggtactctatttttctttccttttctccccccggggggggggggcgngtttaaaattataatttttttncgccccgtgtggggggccggcgctcttttccccttcgtccgcctcctttctcgtgtctttcgcgcctgcctccccttcttcgtccttcctctcgtcttcgccgcgcccccgttctctgtcgtcctcgtcccctgctcgcctcttctcccgcttccgttttttttttttctttgggggggggggcgtctntcctctccccgcggctcttctttccaaaaaaacaaccatcctcccccttccctctctccttctttcttcccctcccctcctttcctcctcctcccttctcctcccatcttcctttctcctcctcctccctctcccctcatttcttcccncccgcacccctcgcccttctcctccctccccgcccctgccgcgtccccgtcccgcgccccgcgcctgtccccgcctcctctacgcctcctccccctctcccctctccgctctcctgcgctcggttcccgtccccccggtctcccgcgcgccttgctcccttcgtgtgtgtcggccgctcgctcctcgtcgctgcccgcctcgtccgctctcgccccttctgtctgtcgttcgcccttttc

SEQ ID NO: 121407 - DNA, 494 bp, Arabidopsis thaliana columbia
gggggggggggggggggaaaaactagcgcggtacttcttcgcccgacctgtggggggggggcgctcgcccccctcgctgttccctgtttcccatgttttcccttttttcctcccagaggcttaaggggttttatacttaaaaatttcttttccctcccttctccttttctttcttttttcttttttttccccctttctctcttcctccttttcttttttcccacaaaacaaaaacacccattcctctttctctaaatctaacaattcatcccttccctccatctttttcttttctttttttttttgggggggggggggttttcttatttggggggcttttttaaaaaaaaacgggtggtggcgggggtcgtctcttgtttttcttctcttctgctcgctgtcgcgtccgtcctgttctcctttggtgtctttccccgttcgcgggctgtgccttctcggcgggatcgcccttccctgcccttcggttccttttc

SEQ ID NO: 121408 - DNA, 536 bp, Arabidopsis thaliana columbia
  unsure (1)..(536): unsure at all n locations
cccccccccgagaaccagcgacaacccattttccccggggggaaggccgacaaaaaaaacccncnccccccgtccccgaccccccgccgcgacggccatacacgagacccggcgcaagaagcgcagagaggcctaatcggtacaggacggaaccacacgaatataaaaatccgataccacccacgcagacgttttttttttgggggggggggggacaaccccccggcgggccgcaaaaagaacaaaaacgtcgcatcgacacatcccattgcancacaactacacaaatacgtcaccgagaggacgaggagaatcggaattactccccaaagagtacctacacaaatacaaacaccacaatgctagaaacaaacagccaaagcgaacaagatcgaaaccccacacaggaacacactcacaagaggcgtcccgaccggaccgaatacaaccaaagtgaaaacaggtgcagagaagtatgaatgccacctccacacacctcagattacagtaaacatccaaccaataaactcaacctc

SEQ ID NO: 121409 - DNA, 452 bp, Arabidopsis thaliana columbia
aaaatttttttttctttttctttttctaatctattcgaaaccacaactcaactttcttcttctgcctcatctaaccattctaactacaattaccccacacaccctttctccaactctccataacctcttcaatcctctctactctttttttttcaagaggggcgtctttccccttatacactctctaaacaaaaaaaaactaccctccctcctcctctcttccttcctcctctcaccacaccctcccctccacactccttcccttcctacattattaatcttcctccccacccccctccctttacccacccatccccccaaccacccacaatccacaacaactctactcaccaaaaccccttatctcaacctctccactccatcccccctccttcttatcacctcactcttttttctatatatccatctactctacttacctcaccatctac

SEQ ID NO: 121410 - DNA, 590 bp, Arabidopsis thaliana columbia
  unsure (1)..(590): unsure at all n locations
ccgggccccccccccccccccgcggggggttgttggggggcttcggttgggcgcgccccccccccccccgccgccccttttaccgttcnnggttgtctggggggtttacccacccccccccccccccttttcccctcttttcccgctcctttttccccccccccccccctcttgcggctgtgttgctccctcccgctctctcgtgctccgtgcctgtgtcccccgcggggccttttttttttgggttgtggggcccccccccggggggggctctttaatcataaccctctttcctcccttcttcccttcttccctcctctctccgtctgcgccttctcccctcctcccctctcttgccgctcttcttccttggcgtcgtcgtttgggttccgtttcggttggcgcctgctcgggtcgcgggggtcgcgtgtgtgcggtcttccgtcgctcctgtcgtgttttgttgcgtgcttccttcctctgctgccccgtcgccccgctctcccccgtctgcngtctctgtccgcgttgtctcttccccttctccttgtcgcccgttgtcgcgcttggccccggccgcggccgcctgg

SEQ ID NO: 121411 - DNA, 710 bp, Arabidopsis thaliana columbia
  unsure (1)..(710): unsure at all n locations
tcccctccggggggnggggggggggggggggggggagagactagccttgatttatccccccccccccgccttggtgggagaagcctccggccccccccgttttctcttttccactttttcccttttcccccccgcgcgttagggcgctttaaaacattaattctttttctcctcccccctctctaccgtctcctctccccatctcccttccgtcttcctttcttctttcgtcccctccactcctctcattgtctcttccctcgcctcatcctctccttctctcgcctcctcttctctcctcctccttctctctctctcctcaactttcctctttttttctcggggcagcgcggtgcnctcttcccttgtgcggcctctctttctataaaaaaaaccttcgccctcctctctctcccctcctccttctccctccccccttccttccctcttccctgctctcccatcctccttcttcctctccttcctcccctctctccatccctcttccctcttcttcccatctctcccccgctcctcccccctttctcttccttcgtccctctcctcccttcctcttctcccctccttcctcctctcctccccttgcccctccctcctctccccccctgtcttctacccatccttctccctcacctgtcactctcccctccctctcctctctcttcgcttctatattcctgttcctctcc

SEQ ID NO: 121412 - DNA, 485 bp, Arabidopsis thaliana columbia
  unsure (1)..(485): unsure at all n locations
aaaaagaacgaacaacaccgacacgcgccgcagcgagacgacaaaagagagacgcaggacaggcgagaagacaagagaggcagaaccgaaggcacagaagggggggcgggaaggcgcgcacggacacaacacaaccaaacacacgcaaggacgacggccgaaacgaagaacgcgaccaaggcacncacgagagcgagagagcgggaaaagaccgccgcacgcaaccacaccccgcaacaacagacgcacccagccggagaggaagacacaagacacacgaacaaacagcaaaaaccagacgcagaaccaagagacaccgaacaagacagagacaagacaagaggaaccagaggggcggaagagacgaaaacggaacaagcagaggacagacaacggccaacaaagcgggagaggggcgagggagcgtcaagcaaagaacccgaacagggcagacaacgcgcgccgagagaagaaaaaacagagaa

SEQ ID NO: 121413 - DNA, 529 bp, Arabidopsis thaliana columbia
  unsure (1)..(529): unsure at all n locations
cccccgggggggggggttttaaataaaaactcctttttaggggaataaaaaatttttctgggggaaaacccgcctaagggggggtttttcccgagggtgttttaaactaaggggggggcgctccctagttctcctcccccctcccccctccccttgaatcaaggggaaacctttttcccttgggggggcccgggatccctttatcttaggggggggcgccccaaaaaaaaaaacattttcccggtgggggggggcccctggggtggcgtntattaaggctttcggcgcgcggcggaggttggaacccccggccccttgggtttttagagttctcccccctccgcgcgtgtggggaaggggattcctcctctccctccgacttcctcgttggttttggggggggagcggactccccgtaggggggaaatccccgcgggggagcccaccccccaccctttttttttgtggggggacgggccaccccgccgggggggaggaggaacaaatgtaaacccccccgtcgttggaa

SEQ ID NO: 121414 - DNA, 588 bp, Arabidopsis thaliana columbia
  unsure (1)..(588): unsure at all n locations
cccccccccaaaaaccccanagcccaaaataaccccctttccnccccccggggttaagggccggaaaaaaaaaaaaacanccccccaaaccttcncccccctttttataaccttatttcccccccccctccctcccccaccctcccacaactaaaaaacccctccccttaaatgatctcaataccacaccacaccgccccttctcttctttttactcttcccgaacaataccagacaccttttttctttccgacattgtttgtggaaaanaaacaaattgccgacgtgctctaaaactttatgctaattccccccccataacattttctcccctcccccctccccttcaccccaacacctctttctccttttttttaattcccaacccccctttttccacacccccctaccattccacttctctcaccctatcttccccccttcccatcacccttccccctcttaaaccactccctccttcatcacccccctcttcaccctccaccaccctcctccccctcttcccccataaaacttttcccctttcccccccacctcctccactcccgctccacccccatcccccct

SEQ ID NO: 121415 - DNA, 490 bp, Arabidopsis thaliana columbia
  unsure (1)..(490): unsure at all n locations
gtcgcatgcacgcgtcgtaagcttggatcctctaaagcgggcgccctttggggngggggggttttattaaatttttttctataaactattgttaatcaaaggtgtatataaaaccagattctaccatttgtaattttggaagaatttgggacaaattacacccgagttaagggaaattactcaaaggcttttctttgagtgccaacaagggggcgggggatcccttttgggctaccaaataaaaaagggttccaaggtttatgattctcccattaaaacacacagagatttaattccgccttttaactgggctcaggctgggagcaataaataaggtgggcctgtttttattaaaagggtcaccgcctttggactaacggttcttaacttgatcaagggactgggggcccattaaaaataagaggggggctttttaaaaaagaggggcttgggaactttttgcttggcccccgcaaaaaacctttttttc

SEQ ID NO: 121416 - DNA, 490 bp, Arabidopsis thaliana columbia
  unsure (1)..(490): unsure at all n locations
tcggaattcagctcgagctttttctctgtgtcaggctcccaatttctaacccggcgggaaaaccattgtccacttcggaaggtcangtccacccgatatcagcgacacctactcacttctcttgcttaacatcaccttccgtacgactgcttatgatctctatcctctattcccaaaatatggaaagaggggggatttntttattcccananatcgaaagactagtgatttccctggtttctcctttgttccgtctaaatataaaacacaaagcttacaaaacaatggaaaaggcttnatggaatattttttttatccccaaaaaataactttttcatttttgcaaaaattttgcccaaaatgcttaaaaaattttccaaaaggaagaagttttgagaacccccccccccaaatccacgaattatctaaaaaccccttattccctaacgcggaattcctatttcctaaggaaaagccctctacccccacc

SEQ ID NO: 121417 - DNA, 446 bp, Arabidopsis thaliana columbia
acctaagcttggatcctctagagcggccgccctttgggtttttttttcaaacaaaaaccaaaaaagaaaaacaccttaaaagttcaaaagatttgtcatacttttttttaacaaaaaccagaaaaggggattttaaaaagatcaattctcccacttcttgagctccatgccatctggtggagtgctctccactttcgggagggccaacttctttccagtttttcaacaaaaccaacccattcaactttgcaaatgatttgttcattgccccgcttatgtgtttatctgaactcaaatttatgtcgctaaaaaatttggtcaatagcgtaatctccaataagcttctcatccttgtcctgtttctttacttaaacttcccatctggtcccaattctttttctgggtttaaaagaatgggtccacttggtctttgcaaaaaggcctaa

SEQ ID NO: 121418 - DNA, 501 bp, Arabidopsis thaliana columbia
  unsure (1)..(501): unsure at all n locations
atgacgtcgcctgcacgcgtacgtaagcttggatcctctagagcggccgcccttgggggngggcgctntcatttaatattacattctttttgaccaaccctcttttgggggggggaaaattaggtgcttttttttttttacgaaccaaaattttaaccggggggccgggtcacttaaaattttttccaagaacatttgggcccggttcccttggggagtggggcaaaaacctagggggtgcgggtaaaaaaaacagagcccttttcaaagagggggcctttgaatgtttttttgggggtccaccctaccggggttccgtgatcaaggcttggaaaggtcccacagaccaagaaattcccccccccctaagcccaaacaggaacctaacccccccttttttgaaactgggccagggggggcccccacgggaaggcctttaaccccccccccaaagggggaacccttgcccaaaaatctttggacccaacccccggggggggc

SEQ ID NO: 121419 - DNA, 643 bp, Arabidopsis thaliana columbia
aaaaatcttttgacttgcccttccccccctccctaaaacttttgcttccctcttaaagcccgccccccccttaagcgtaaggggggggttttttaaataaaatttttttaaaaaaaagggtgttttttaaattcttatttttcaagaaaaggggttttatccactcaccccaaaaccgtccctttttaaaaaagctttttaattgcctcaaacacttcttgtttttgcccttttttttttgttttaatccattcctttcaaaccaccatttaacgccttttttttcccgggggtggaggggaaaataaaaattggggcctgttttccaaaaataaaaaaaaaaaaacctgggttaatttctccaaaccttacctttttctcttttaaaaaattttgaaaaccttaacctttaacttgaaaaccctttttcaccccccccacccccaaaagttttgaccccttttgatttgtctcttttcctcttccaccaaaaaaaaattcttctccccctacctttaagccgcaaaaattttttccccttttttttggcgccccgctaaaggaatttcactccccaaatgggtctttttctcctggggggggcctcccccccaaaacataggctcccttaaagggggtcccc

SEQ ID NO: 121420 - DNA, 458 bp, Arabidopsis thaliana columbia
  unsure (1)..(458): unsure at all n locations
ctcccccttggtgttggtttttttattaaaaacccttttctttttaaaaataaaacaaatttttcccaaataaaaaacaaggaccctcccaaaaaatcctttttttaccaccgccgtttcccttttccagaattatcttataagcccattttttttttagggggcgcgctttacctttcctcggttcccacacaaaaaaaaacnaaacttttttgataattcccattgccctatttttttgtttaaaaaaaaacaaacccccccccttttttctataaaatttcccctttagacggggttcgggaggtctcttctaacacaaaaataaatacatcctcaccccccgcccctttcttagattttttcacacccccgccttttttttanaaactcccttccaccctccactttcccccccttcaacttcgctttatcttctcttaaatccttctcaacac

SEQ ID NO: 121421 - DNA, 601 bp, Arabidopsis thaliana columbia
  unsure (1)..(601): unsure at all n locations
ggtggggggnggggggggtagctagtaggtccactttcaacactcttacttcctcccccccctccctaacctttgctcctctaaagcgggccccctttggggggggggggtgttaaaaaaaatttttttttatctccgcggtgatgtccgggtccggcgcgggcgtccgaagggcgcgcgggaccgcgcggaaccccgttttcgttgtggtgggcgggtcgggtggggcagtgggcgcatgatccccatagttttttttttttttgggggggaggcgttctccctttggggggttcttaaaaaaaaaattgatgcctggcggttgggtctttcctcgttacgctatctcggggctttgcaaagggtgtgcacacggcctggtgggtcgcgtgtaggggtgctctaacgtttatcgtccctctgtttgaaagttagggtttcgtggccctctaaggtgatcgtgtgttcgccgtttgtcgtgaggttcttggaatggcgtatgttttaggcttctttccccgcggagggtgcgttccggcggtggccgccggcgccattggggtttcttcgctgacaggcctctgatcgtgttggcttctat

SEQ ID NO: 121422 - DNA, 503 bp, Arabidopsis thaliana columbia
tgacgtcgcatgcacgcgtacctaagcttggatcctctagagcggcccccctttgggtttggggtttttttttttaactttaaaagtttgggggggattgaattcaaaattatgaccaaacatattacatttgagaagggaactctaggtgtcaggcgcatttgatgtacttttcggtggtggggttatcttaagggttctctcacattaaaaggggggggggaaccgtggtggggttcccccttaaaacaaatccagatgtctaaccaaattctaagctgttaaaagggggcaaatccaatcaagaaaaaaagacccattatttctaacatttttaaggtacaaccccagagacctttcccctagcttccaaccctagggaaagggtctaagcttttagggttagatcccaaagaagaagttttttttcctggaccctagggttgaacataccctgggggataatgtggatatgccagaaaaccccattaaaactttttcag

SEQ ID NO: 121423 - DNA, 443 bp, Arabidopsis thaliana columbia
  unsure (1)..(443): unsure at all n locations
ccccccccccttanggggagagccccggcccccctcccggggccccggccccaaattaatttccctnnntccagctgtgctaggtggggccaaanacaaacacttttttttttttttttttnggggggaaggagtgcgtgtggaattcccccacccccggagaaaatttccaattaaaaccccgagcctcaaaaggggctgtccacccgtaaataattttttccccaatgaccccttaaccccaaacccattttctttaggggtagttggcggnccccttttctggggggggttttaaaaggcacctaacccgaagggcgngtttttcctctcccgggggcgcccacctttcccctgccttaaatggataaaaccttccttcggtgcccagcccaagccgtgtttttttatttataccccccgaataactttccccgaggggg

SEQ ID NO: 121424 - DNA, 535 bp, Arabidopsis thaliana columbia
cctaaacctggaacctttaaaacggccccccttttggtttttgtttttttttttaaacaaaaaccaaggttaaaaaacccccccctttcttatttgggcctttttcccaaaaaaaacccaaaaaaaaatttgaaaagggggaatttataaaaaaaccctccccaaaaacttaattttaacaccctctcccaaaaaaacaaaaaaaacccatttttttttagggaggggggggcgttttcttgccgtgggtaaaagaaaataaaaaaaaaaaggggcacaatatgtgggagaaccccttaagacatcaacctctctttttggccccccacaccaccctgtgggaacccccccccaaaaaaataacagctaacttttttcccctccagaaaatcctagcggcttttataaataaaaaaaaaaataaccccccctcctctctctttgtaaaaaaacccatatagaaaaccaacacacgcccccccacacaaaaaaaaagaatcttttgtgttccctgcaaaacacacatcgacaaaaa

SEQ ID NO: 121425 - DNA, 637 bp, Arabidopsis thaliana columbia
  unsure (1)..(637): unsure at all n locations
gtacggtcgggaggcgagtggaaggggccatcgcacgcgatttaaggtgtcgcccacggggcggaccgagtttggcaacnaagaggagggggggggggaaaactcttctatattggagggggggaccacactccttcaagaaaanatttttttgaccgttcccatccccacccccttcccttaaaaccccttggattcccctttaaaaaagggggcccccgccctttttggggtttttggggttttttaaaaaaaaattataaaaaccctttcccctttttcttttttttaaaagggtgtgggggcccaaaattggttgtgaaaaaatgagaatatttgaagttctccccccggtgggggaaaacccctttccccactttttaaccccccaaaaagggccctcaccccccctcaaaaagaatttttcgcccccctttctcccccccccgaaggggggggaaaaaaaaaaaaatacaactccccgccggcggggagggggggggggagcaacttccccctcctccttttgagaaaagaaagacaccacctttttaaaaaaaaacacccgggtagagggagaggagaaacaaattactctagacccgccaccattatgtataggagagaggcacccccc

SEQ ID NO: 121426 - DNA, 346 bp, Arabidopsis thaliana columbia
ggggggggggttttaaaacaaaaccccccttctttaaaaaaaaaaaaaaatatgttttttgtataacttgccaagaggagatctccccccccctaaaaagtacttcccccttctcttcctccccggtaaaaaagacccgaacccaatccccgaccccttgtcgcggggctgttgttttcccttttttgaagcggaaagataacttctcctatggccccccccggggagaaaatttgaaaagtgcaaggggtttcttcaagaataaccccccccaggggcgccctctcaaaaaaaggccaaaagggttgtgtctctctcccccccccacgttttttatcgcggggtg

SEQ ID NO: 121427 - DNA, 286 bp, Arabidopsis thaliana columbia
  unsure (1)..(286): unsure at all n locations
gggaactcccccttcctagccttgatcctttaaacttgcccctttgggtggggggattaaaaaacttcatntttttcaagggggccaaaatttttttcctttttacaaaaaaaagtgtttagagggttgtcctccgcgtcgaaatacccccccctttttattttcgccttgttcctgtgttaccgggttctccagttcttgaaagccccgtctccatctctctttgtgggagaagaaagggggttctnttttattgggggagtttttttaaaaaaaaaaaaagagc

SEQ ID NO: 121428 - DNA, 225 bp, Arabidopsis thaliana columbia
ccttttttccgtatttatatcccccttaaacaattcgtttcttgccatctcaatctctctgtcttaattctcctacgacctgcttattatatcatcctttactacaacttctccaaataaactcccttatcatctatacatcctatggttgttcatctattctttattggatttactctacgtcatgtctattttcatctatatgtcttatacattcaagacaat

SEQ ID NO: 121429 - DNA, 369 bp, Arabidopsis thaliana columbia
  unsure (1)..(369): unsure at all n locations
agctggatcctctaacgtcccctcggggggggataaaaaaaatttccctctaaacaccaccccccacctcgcccccccgcaaaactatcctcttttactcaccccccccccacgccgaaacgaaaacacctcttttttttatntcccctccaggagaggggtgtcttgggggggactcaaaaaaaaaccttttgtttgagcccccccgcgcggcggggtcgggaccgctccttcaacgatgaccacccgtccctctcctttttttcgatggggtgtatgcacccgtcccctcttttggggtgtaccgacactcccctccttccccttttgggcacaagctcccggttcttctacgaacacccggcgcga

SEQ ID NO: 121430 - DNA, 505 bp, Arabidopsis thaliana columbia
gcttggatcctctatagcgggcgccctttggtgtttgggtttttttttttaaaaagaaaagagaagtgtcatttcaaagatacagagaggtttacaaaaggggggggaatcagatatttgtccttaattgccctaatcaaactggaaaataaaaggcgagaattaaaaaccaagcctttgccttatgcaaaggcgtgggtaaaagacttgggcgttctaaactttaaaagaacggggctaatatagagatctttaaagagggggttccagcccatgttgatggaacgatcaaacggggaattgtcttaattccaaggggggatggggctaccccaaaaacctatgaagatactgaaaatcccttggggttttgggaggggggggtttggccttgcaaatggggccccaaaaccctcgatgtttttttgttcggaaaaaaaaacgcgtttcggcctgatcccaacgcacaaagaccggaatgtggtcccgtgtttcccttttaaaa

SEQ ID NO: 121431 - DNA, 339 bp, Arabidopsis thaliana columbia
  unsure (1)..(339): unsure at all n locations
tttttnnttatatccattacattcttcttttngaattaaatccncatcaaacccacttttaaaatcaaaactccacaaaaaatncccaccctatttcatggtgtgaccatccacctttcaataaacatatttccaaggccttccngactcttaccaagcgtgttttcaccttctttttctttctaaacctttcctttcaacctctaagttccttcttaacccaaaattcctcctaatttcatttaacaccagaaaattttctcacctttaaaaaatcttcaatccttcttaacccttattcttttttaaacctatatacctttattgctcatcccaccc

SEQ ID NO: 121432 - DNA, 481 bp, Arabidopsis thaliana columbia
gtaagcttggatcctctagagcgggcggcctttggggggggggtttaaaaatctcacattttatttcacgggacttaatcaacaaatttcatatttatacctcacatgggaggataaaatcaatagaaagcaaaacaaatcttttggtattaaattttcaaaagagaaatttcaaacataaaacaataattccaggaggaggccctattccgactgttttctaaaaaaaacatgacttatccgacggggaccctgccttcttaggggggccggagtcatcggtaccccaccggatttaatttaaggggaaggagcaatcgggaaagcttggctctccaacatttgaccgggcaaaaaaccctggtgacaacataaacgggaaaagacgtttttgcctaaacaattggcaatcgggtttccaataaccaggaaaaccttgtgtggtttgttgggcgggaaattaacccctaaaccccggggg

SEQ ID NO: 121433 - DNA, 305 bp, Arabidopsis thaliana columbia
cctaaagcttgggatcctctataagcggcgcgccctttgggggagagggggtttttaaataaaatatacattttcacattagtcaccataaccataaaagaggctgtctagtcatattcgccgcaacaaaatcaaaggcttccactgtttgtgaaaaaaacggcggggggcgtacccactttctctcccaccgggcgagaagaaacgagaaaaaaaaaccctatttttttttctggggaaagactaggcctttcttatagggggggtttccaaaaaaaaaaaacacgggcgcaatctgttttttt

SEQ ID NO: 121434 - DNA, 498 bp, Arabidopsis thaliana columbia
  unsure (1)..(498): unsure at all n locations
aaatatatatcttttttcccccccgccaaacaatttcccaaacaccccccttttttttggctcaaaaacccccacctttaccttttcccttttcccaaacttaacaaatttaaatactccctccctctctaaattttaaaaaaaaacaaaatcctttcttttggccgatngggcccccaacccctgggcatttccaaaaaatcaattttgtcccttaacctggagaaaccttgacactttttttatccccccttcttttgttcaaaaaaaaaaaacaacaaaaaactctttccccatccccctctttcccctttataaactaaacaaccctcctctttttaccccccatttttttcccctttttttaaaaaccctcttggccccgttttctccttttttctatcaaaccactaattttactcaccgcgttccttcacttttttttgttaaaaaaaaaaaactccacaaccctctcctcccctcttcttcccccccccc

SEQ ID NO: 121435 - DNA, 745 bp, Arabidopsis thaliana columbia
  unsure (1)..(745): unsure at all n locations
ttttctccctctcgtacccgggccccccacccccccccccgaaaaaaaatcctttttcttccgctaccccccccaacttttgggggaacaacccccccccccccctccccttcccccccccccaatttttcccccttcccccccccccggggtccgagcccccctccacaaaaaaaatacaccccccttctcctccccctctaacctcttttccccaaccccctcttcccctcctcccctctccacaccctatccccaccccccccttcccctttctcccccgcaccatttctcctccccctttttccccccctataatccccccccccccaccgcttccctttttccccggtgttgtttgggcccccccaanncccccgccctctcctcaaaattcagtaacactccttcccttctcccaatctccctccccttccccccctctcccccttcccctcctctcctacaccctcttccttattcctctttttctcctcccctttcaaattacttctctcatatttccagatccacaccctccttcctcctctctcctccctcctaccccctccctccctttttcccctcctctcctctctctcactcatcaccccaccccccccacccccgttcacatacatcccacctcctcacatcctctcttttcaccctccttctctcctttaccctcaccccaccccttcctccttctcccctctctcccccctctcccctctcctctctc

SEQ ID NO: 121436 - DNA, 447 bp, Arabidopsis thaliana columbia
ttttatttaaatattttaaaaaatatcttttattctctttatgttgaaaagataaacccgcaaaaaaagaaaaaaagatatgtaaaggcgggtaaatacaatttttctattctatatcatattggtaaaccaaacccgggttatctaaaaccccccagctgggggagggacaagtgctgttcctgcccaaaaaaaaactatttttcttttggttttcccccggggaaccctttaacttgccctttctccataaacacttaccttaaaagtcgggaaactggctaactttatcggccctatcccgggggggaaaaaaccttccccccaaatattttgcccggggtgtttcctttaacccgggttttttcccgaggggagattttcggggagaaaaacaacccttccctttttttttaaccaatgttccgggagggcctcatctttaac

SEQ ID NO: 121437 - DNA, 479 bp, Arabidopsis thaliana columbia
  unsure (1)..(479): unsure at all n locations
aggtaccggtccggaattcccntttcnacccaggcgtgggggaaaagacataaaaaaaanaactttttttcttttcnttaaaggctccacctttctttcttcttaacacacaacacatgaaaatccctgcatcatctnctcaagacacgaccaacaacaacaacaacactaatggtactgatantaatcactgggggagggaccaacatntcatgccttcaataaattaggatcccatcataaaagaattggagccttatgaccattctcctcctaactcacttaaaaccggtttcaccacaaccacaacaaattctactatttttgcctctttaccccgggcaatcaaatctccctggctttcccaaacaattcaaccggcggatttcaaatcctcttccaatgttaatcctgggcaaaaccaaacaactgggtcccggttaattctcttaataggcccaccaatggagatttaattc

SEQ ID NO: 121438 - DNA, 458 bp, Arabidopsis thaliana columbia
ttggggggggggtttttttataaattttatatttaaaacacatctttcattaatttgggaccaagtttgaggcccaatttttccagtttcttaaattttctttccaaccaaaaacaacctttttttcttccgtattttatctggaaaaaggtctttcccggagggggcttttccttttttccccattcaaaaaaaaaatttggctaccaggggttcccaacacaaactttccaatttaaaaaaaaccattttttttttcccccgaacccccttttggggtgttacccttacccgcgcggattaaacctctcatgtttttccccccaaaactttccttcccctggggacaataaaacccgggtggggggtttttccttgtttctttcccattgtgcccccttttattgcccggaaataaaaccaaaatttttttgggcctcctaggatcaaaaaaaacc

SEQ ID NO: 121439 - DNA, 183 bp, Arabidopsis thaliana columbia
tcggcctattctaactttttttctccaaacaactattatttacccaattctataaaacttacaaaaaaaaaaaaaagggggttacctatcaaaaaattttcccatctcttacatttacaactacgcttttataccttctacgaacttatctacttcccacaaacaactcttactaactcagct

SEQ ID NO: 121440 - DNA, 482 bp, Arabidopsis thaliana columbia
ttctaacaaaaaaaaaattttgttgtgcgcgaatccaatctcgttcgagaggaaaccattattgtgcgtgtttgttaaaaatgggggaggttatcaccttttggaaaacgccagcgtgttgtttttattttgttgggggagagagggggcctcttgtgaaatttctctctcttcatttttgccgggggggggggggaaactattttataggggggggtaggatttaataagaacgttgggccgtttgggtttgggagcgtttctaaaagacggggtggtgagcccccttctccaagctctgggctaatggtgggggtgtgaacgtgggggtgttgtgtgggggcacacgggggtggggcgcgcgtgtgtttggttagccaatggcgtttttgggggaggaacgcggggtcttttgctttttagcgggggagcgcgtgcctcgcgttctttgttgctggggtggtggagggcgcccacccggc

SEQ ID NO: 121441 - DNA, 510 bp, Arabidopsis thaliana columbia
  unsure (1)..(510): unsure at all n locations
cgtaagcttggatcctctagagcgggccccctttggggagggggggtnctaataataaaaaaaagttctgtttgcccccgggaaacccttgtgtacacagtacaaaagacaatttttttttttggcataaggttggggaaagaattgacttttccatttaaaaaggggccaaaggactttcctggttgtttttcaaaggggagagggaataaancttcttctcgtggccctttaaccaaaagcttaaaggggggggtgtttttccttttggggaaaaaatattgaaagactggttttctttaagggggggtgcgggcggccacccccttttttttttttgaaaaaagggggggggtgggccccgcggagggcgcgacgcgcgttttttgggaaaaaatctccttcgcgcgggttattccctctatcttttgttcgaaacggggagggtgcccccgggggcattcttctcgggggtgtcccgggacaaaaaccgcgcgggggagcgctctg

SEQ ID NO: 121442 - DNA, 536 bp, Arabidopsis thaliana columbia
cttggcaacttaacataacatgaggatccctggtgcccaagaacaaacattaaacacgaccttgctggaaaaaaatgggtgaaatcccccccctccctaaaccccaaaataaactaaagaaaccctctttttttttttaagggaagaaggaggcccctttaccgggggtgttttaaaaaaaaaaaaagaggtggggcacacccttttgtaggggagggtgggccccccaccgttgagtttcctcacacgacccaaccgtgtttgatgtagatttaaacattaatatttctttttctctcttccatggggggggggcgtgtcccaggcggagaagacctccaccgccaaccgtggggggcgctgggtttttccaaagctcttttcccaatctttaaaggagaattttctgcttagcgaagaacaacctttggggtagcacacgatcttactcccttttaaaagcacacggcgaagggggttgcactcctccgagaaaaaaaacgtggagatcgttcctctcagtaagggtcgccaat

SEQ ID NO: 121443 - DNA, 377 bp, Arabidopsis thaliana columbia
  unsure (1)..(377): unsure at all n locations
ttttcggggggtggngggggggnnnnngnnggggggggggtaaccctaattggggggacccctcctctccaaaacttgcttgacgttgccactcgcccgcccctgcccttaggcctttgggatccctcttagaaggcgggccgccccctttgggggggggggggggtggataaaataaaaaattttgttttgccgcccggcgaaaaaaaaagcgctggggttttttctttggagaattccctccccggggcaccctttgcgcggagagtgacctttccactctcttcaacacgttttttccctcttatgggtgcggtgcgcaatctaactgttttctttaaaagcgggggaggagggggttcttcgaaggggggggg

SEQ ID NO: 121444 - DNA, 486 bp, Arabidopsis thaliana columbia
  unsure (1)..(486): unsure at all n locations
gcggggcccccttggggttgggggtttttttttttaaaaggggttttttcgggttttctcccatttttttttataaaataaacgtgtgggttttaacctgaggggagggggcgggaaaaaaagggggttaaaaggcgaaagcgcccggggtaaagggaacaaactttatcttacttaattttnggggaagaaggagaatttttcttggggattttaagaaaaaaatttttttcggtgcggggggccccccttaaacccctttttccaccaattttattgtttggggggccctttttttttcgaaaaaaaaaattcccccccgggaaaaaccctcccccgaaaaaccggagcagggtgggcccggagactttaggtgggggaaaatgtcccttattttttaaagggcccccccagagttttctcccgcgagagaggagacctcagaatcctcccgccgcgcggagggcgggcccaaaccttcgtttc

SEQ ID NO: 121445 - DNA, 450 bp, Arabidopsis thaliana columbia
acgtcccctgcccccttcctaagcttggtcctctagagcgggccccctttgggtttgtgggtttctgtaatttaaaaaacaaactaactgcgggcttgtgcactaaatttatatatatatcgtctccctaaacaacccctattatggcggagttggaaaacaaacctaatttggtgtttttctattaaattaaattatgaatcctctttttataattttttgtgggagaggggggcgaaaacctgggggagctttattaaaaaaaacctttaccagggccgggccacttttttttttttcaccaaaccccctcccatgaacctgggggttaatggtttgggctcaccgggttccttcggccctcgagggcccataaattgcggcccctcccccttagaaaaggggaatcgccccctcggtttgtggggggttgggtaaattcacctttct

SEQ ID NO: 121446 - DNA, 659 bp, Arabidopsis thaliana columbia
  unsure (1)..(659): unsure at all n locations
cccccccccttccctttaaaccttttnaaatccctcttanaaacctcttcccccccttttgaggttttgtggtgttgttaaaaaacaaaaaaaatataatttttttttaacacccccccattttatataaaaacaaaatttccccaacccccaacctcctcttttttattttcaaaaccctttatttcaaaaaacccccccccttccgaaatttccttttttcaccaaaaccttatttcaaaaaccttaaaacctttntttttttttttttattaagggagagagccctttttctccccccgcaacacccccttaaaaaaaaacaaaaattttgcttccttttaaataaattgctcccataatttgtaacatctttgtcataatttccccaccctcccccttaataaactatccttcttactttccctccccctcttccttcccnacaccatacaaataacataaaattcctctctctccccactttcaaaaacacccattttattattcccccccacctctccttctcctctctctttaccttcctaccaaaaaaccaaaataaaaaataatatcaccacatcctctacttctttctctctctcccatttaattatttcttactacatatcaccactctctaccatccctattatacc

SEQ ID NO: 121447 - DNA, 435 bp, Arabidopsis thaliana columbia
  unsure (1)..(435): unsure at all n locations
cccccttttggtttgtttttttttctttcatcaacaaaaccaatgtcttctatctagcaattttataagactgctagagagcatcatcattttctataagagttttaggcactagccgagccttttaacctaatcacaaaacctctgctccttttcactacatacaaatcgggcggggaaaaaanccntggaatgcccattaaaaaaaaaaaaatccaccaagtgtggccctaccaaaagcaaaccccccatttcacacctttttggttttcacatgagctacttggggtgcataccatacaaaaaccaaccctcccttttttaaaactggaaacgaatttgcttccaacccctccctttttttacaccaaagggcctggagtgattgtttataatgggccctggggcgcccctggaacccacctccttttttcc

SEQ ID NO: 121448 - DNA, 501 bp, Arabidopsis thaliana columbia
  unsure (1)..(501): unsure at all n locations
gggggaagaaagaagaagnnggagaataggctacatgtgtgtgacccacccctccccaagaacctctttggaccttgggccctcgcccccccttcccctataaccttgtattccctctttaaaaccctctcccgccttttgtgggttggtgtgtttttttacaacccaaaaaaattattaactccccttttctcttttcattgtttccaaaattacctccccttattaaataaaacctttctaaaacttttcttttttccccccccccgcccttttaaatttatttttttctatacccactctccctagggaggaatttttccaacccctcaccattttttttttcgcggggggcggtgcccctttttccccggggtttcttntaccaaaaaaaacacaacttttctcttttttttttctacaagagacctatccctctttcttttaataaagacccctcttattcttctcttctaacccctcaaagaatatctctttttt

SEQ ID NO: 121449 - DNA, 395 bp, Arabidopsis thaliana columbia
  unsure (1)..(395): unsure at all n locations
aaaaaaaaaattttaaccaaaacgtcttttcttcggtcccaaaagaaagtcttattaaaggcgcttaccaaaacctttcctccgggtccgtttttgggccacccagcccacttccgagggggggggtnaaaaaaggggtcctctaaaaaaaaaaggcggggggcgacgaccactttttaaaacgcttagtcgcacagctgcccgcggtgtatttttcaaccgctttgttgagaaggggtttggtcctccccccaagtaagtaaacaaaccgccgtctgtcttgtccacacggccgggtttcctcgctggcgttgagggcgctgcctcccccgccctgctagagggccacaaagtgtcgcgcgcggagcccgctacgcaagtacagcaagcgcgcc

SEQ ID NO: 121450 - DNA, 470 bp, Arabidopsis thaliana columbia
cctaagcttggatcctctaaagcgggcccctttgggtttgggttttttaacccaatcaattaacttgaaagggacaatacttaaaaccagaaaaagggtttcccgatctaaaaaacaagttatctgggccctgttggaaagtataataccaagccctttggacaatttctaacttcgggcggaggttctttaaagcacggggctaatataaaaaactgaattctcgcctggcctcgtttcttctcctttggtccataaaaatctccaaggggtgctgatacccctaaaaactctgcttgacctccggtttaccaaggcggtgtggggttaaagacaagctccccccggccttttttccaaaatggtcagaaccccaaattggccccaggaaacatcaccaagtgagaactggggagaccctgtctagcttccattttttgttattcttatccccctaagggattaagctc

SEQ ID NO: 121451 - DNA, 663 bp, Arabidopsis thaliana columbia
  unsure (1)..(663): unsure at all n locations
cctattaggttgnggggggaaaagaanagggggggaagccgatttaggtaaccactcctccaaaaactcctttaccttcgcccccccgcccttccttaacctttgaatccttctaaaacgttcccccctttggggttttgtttttccaaaaaaaactaacctatataaattttcctaaaaaacccgttttttcccctgtttcattaggtaaaattacccaatttaaccgtcaccaatttttttttatacctaggtttggaatcccaattcctctcaaaaggggtaaaatttttcttttaaaaggaggagggctcttntntttcttgggggcacccataaaaaaaacaaaaggggtggggggaaaaaacacccccccttttctcccatactctaaataaaaagagggcttaccatcccacaacatcttttgattgcctctttaaaaaggtaactctctggtaacacccctcttccttcccattaaaacaaaaacggcggggagaccccctaataaaactcccttcctttttcaccccaaaataccaaccctccacttctatataaaaacactacccttacttctccccaaaaaaccgtctcttatctttgggtctctccaactcctctaagagaaactccattcctcgtcgttatacaaaaaaa

SEQ ID NO: 121452 - DNA, 489 bp, Arabidopsis thaliana columbia
  unsure (1)..(489): unsure at all n locations
ccttagcttggatcctctagagcggccgccctttgtgttttgggttttaaaanaaaacaacttccattaccatatacatatgttatcttagaaaatggtggaaatgacaaaagattccttcttgttttacgtaatttatgcgttaaccccgaaatttttaaactctttcaaatccatccattnatatactatgggagggggggacttttttacaccaacccctaagaaaaaacaagtttgcccttctccaccccctttaacctcaccattaacttttttactgtttccaagggttattctgtaatttttcccggggaaacccacccctaacgtcatttctaacggtctcaacctcttataatcatgactaccacctcttaccccaagggttgtttttaacccaaacaaaccaaaaaccttttgcccctgtttatacggggggttgaacgggggttttaagggggaaactttgaaaaacctggggggggc

SEQ ID NO: 121453 - DNA, 378 bp, Arabidopsis thaliana columbia
  unsure (1)..(378): unsure at all n locations
ttcaaaaatcccattccatttacccaaaaaacggactcttataagacccccaacccatctgttcttttctgggggggggggggccccctctttgggtgtntccctaaacaccaaagcccccccttttctgttttcttaccacaccctcctttggataaaccctttctggaaaccccaaaaaacaaaccccccctgatttctaacaccccttctttcctccaaaaaaaaaagcggcaagggggcttttggtaaaaaaacctaaaaacccccaaggaaaccccccaaactgtctctttttcttcacgccccgtccttaaagtgttttaccaccctttcccttttgcgggggttgaaccacctccccaaatgtctctcccc

SEQ ID NO: 121454 - DNA, 473 bp, Arabidopsis thaliana columbia
ccccccctccctaaaccttggatccctctaaaacctttccgcctctggggttgggggttttaaaaaaaatttcaaataaatctaaaaaaccttttttttccaatattttttttttaaaaaaggggaagggacgttaaattttttcccctcccgggaaaaaccccccaccccttttctccaagaggaaggtaaatttttattccctgaggagcgggggccataattttagaagcggccccccaaaaaaaaaaaaaattagaggaccgttttttcgaacaataaaagacccttttccctccctccaataaatttgcaggggctttgagaaaccactctttatatttaacccacctttccttcccccccttaggccaaaatgcgtcttctttattaaaaaagaccaccccaaaatttttcttgggtgcgtcttttctctcttcttaaacaccccctcccgccctctcccctatttt

SEQ ID NO: 121455 - DNA, 489 bp, Arabidopsis thaliana columbia
tcctaacctttatcccctagaccttccccttgggtttttgtttttttcaaaaccaatctttattccctaattaaaaaaaaaaccccccccctccctttaatccacacaaaaccaaaaaccccactaagaaaccttttttaacacctaatcccaacacaaactttttttttttttttctgaggcggagggatttttctcttccaattctttaaaaaaaaaaaaattttctcctcaaacctctcccgaaattaaaaacccccttttctccccacttcaacaaaaactattctctcttcccctccccctctccattttaaacaaacaacacgcataaccctctccctcccataggctctgcatactcactctaccccctaaaccccctttcccttcctcaaacacaaaccgtaaaaatgttccttcaactttttcttttttctcaaccaatctagtcctagaattctcattatgcctaaccaccctacgccc

SEQ ID NO: 121456 - DNA, 302 bp, Arabidopsis thaliana columbia
ccccccccccttagccttgttcctttaaagcgggcccccttgggggtgggggtgttaaaaaaaaaaaaacccttttgtttaggtgtgcccaatccccttacgcccattttgttaagaagggaacaacttgtttccaagttttttcccccccttaatgggtgccttttactttcaaggcaaaggaagagtcctcgagaaattctttccaataaaaaaaaaacccgctcttttctttaagggggggggagggggccccttttttggggaccgcattggaaaaaaaataaagaaaactgtggggg

SEQ ID NO: 121457 - DNA, 427 bp, Arabidopsis thaliana columbia
cccctcctagcttgatcccctaaacgccccccttgggggtgggtttttttttaaacacaacggtagggtggttttcctttaaccccatttttttttttttttatccggggttaatccccgacctcccggggttttaaaaaaaaactttaattttagggcttcggaaaagattatctcccggggagagggggacccccccggggcggttttccccaaaaaaaaattgttttgttttacccgggaaaatttttccccctctgtgcccacccttcttaaaaggctgggggagccccccgggaaaacggcttctgaaaccctctgcctcttggccacgctggtctctgtagaaaaaaaacttcccccccagggggggtccggggcccttttcatgtgccccccacaagctttcccacggggcccagcgacc

SEQ ID NO: 121458 - DNA, 522 bp, Arabidopsis thaliana columbia
taaccttgatccccttaaccgtccccctttgggtttggttttaaaaaatatctaacccaaattagatatttataaaaagagggcgcctttcctttattttttggggggttaaatattaaaaagggggagaggtgttttattttttttccccctggaaaacacacccccaaacctttttgacttccaaattttaaaaatatttcttttggggaagaggggatcctttaaagggcccccccttttaaaaaaaaatgttcctaatttaaggggggttaattggaccccccttaaaaatcctccccccatttggggcaccaccccccgggggctttgcgtcgtgcttttccacaataaaaaaacccctacccttcgtgttgggggcctctcatccaccttgttaaacccttcccccaggacctggccaaaaccgcccctgtggcttttcacataaagacccaatgggatcttttcactggtgtgcaaattaaaaaaaccttataaccccgtgttctcgttttgccg

SEQ ID NO: 121459 - DNA, 130 bp, Arabidopsis thaliana columbia
caggtagaagtcgagagaggagagagcctatttttttaacattcccccccacattttttgagcccggatatcgggcggacccaggtgcgcctgatgcaaaactcgatagctacgtttctaactagagggg

SEQ ID NO: 121460 - DNA, 664 bp, Arabidopsis thaliana columbia
  unsure (1)..(664): unsure at all n locations
ggggggagangggggggggaggaagctgacttggggacaccccccccaaacctccttngggggggcccgcccccccctcccttaaacctttgattcccccttaaacacctcccccccccctgggggttaggggtgtttctttaaaaaaaaaaaaaaattcttaaccctccctttttttttttaaagttttttgcaaaaattctttgaaaatttaaaattcaacctcccccccctttgggaacctctcttccttttttttacctctcaaaacgccttcacccccttttttaattttctcgccttttctccttttgggggagggaggggcttccctactattcccgcggctctcaaaacaaaacacaaatttttttccccgttggtcctcacctcaccttaacttcacaccccctttaaattacacctgaaccccccacacacttttccgaaaaaacccccacacctttttttaacggggctttccccaaaaaaaaccattgcggcagcaccttaaacatttttctaaccccctccccgagcttctctttggtccctttcttccctttacaaaaacccctactttcccaacggcttctcttcctcataatctttttccttcacaataccccctccctatatatcccctccccacgcctccctccca

SEQ ID NO: 121461 - DNA, 499 bp, Arabidopsis thaliana columbia
  unsure (1)..(499): unsure at all n locations
tggggggtgacaaaacccaaaaaaaattcctaactcttgtgtagaacctttcacttcatcttttattcccacgggggttagccccaaacattttaacccccatttttgtttttccaattggaaatggcatccaaccgcctcaacagaatttcccacccctttttccccggggggggggccanaatccaagggggggtttaaacaaaaacaaaaagcgaatgggggggaggggggggaaaagcagacccctcttnccccnttttctccctggtttgttttctttttcagtttttctgcccggttgcgcgcccccccagggtgtctgctgtttccgtcctatgtggggggaggtgtatggcctcggttctgaagtttcgtttctgccgagttctctggtggtgcgtgcaagtacttttgcctggcgagcggttttcgccgccgcggccggcgggggtggtacatttctgtgcggcgcgcgcgttgccgcgggggcgcgggg

SEQ ID NO: 121462 - DNA, 478 bp, Arabidopsis thaliana columbia
  unsure (1)..(478): unsure at all n locations
aggggaaaaagggggggggaacctcttttgacaccctccgaacctagtacaaacaacccccccctcctaaccctaatcctctaacccttcccccttaggttggtgtttataaaacaaccactnaattactattgacaactttaaaaccatctccccctttcctccccacaaaaagttcctataaaaaacccccacttaaaccattccctgcgcattattctccactcaccaaaccccttttctccaagggggtatctacctcccgagttccttaaaaaaaaacccacccctttatttccatcacaccaacacactcacaccccccccccaaactacactacccacgccaacactcccctccttctcttctctacttctcatctactcccacaccacaccccaactaaccaaaaaacacaccatcccttacccaaaaaccacccccccctccacacaattcatccctaaaattatcaat

SEQ ID NO: 121463 - DNA, 543 bp, Arabidopsis thaliana columbia
  unsure (1)..(543): unsure at all n locations
aaaacaaaaacaaatttgtttttttctttgaattaaagaaaaccccagcccccctttccagggttttccctttaaactaaggttctttctctttttttacaccttgtttcccccccctaacctcttccagaacattgactttttttcccccccaaaattttttttccccgggaggggcggggnatagaaatttgtgccccttggttcataaaaaaacaaaatataggtatttccgcccagggcgcgagaccctgttggcgctcttttttcctgcttttacctagtaaaaagcctcttgtgcattgaaaaaaaaaaaatctctctccttttttcttgtttgggcagaggtaactatacaaccctcgaaactcccgcgcgcttccaatcctcccccctcgtgggttttttcccttcggggggacgaccacactggagttgtgttcttcgccctcgttgcctatacctttgtgccatagaaattctattctcgccttttgtgtaggcgcccgccgtgcgattaccatgccccacgttctgtgcttt

SEQ ID NO: 121464 - DNA, 390 bp, Arabidopsis thaliana columbia
  unsure (1)..(390): unsure at all n locations
catcntcactaattaattattgtgattaagaacaaatgctaaattgagtttcntcctcttctgcttctccttaaacttcttcatcatttagctccaaaggcggagctttcttctctctctgggttttaccatggtgtgggacaacnnccaccccacttaattaaaaaaaatctacaactattctttccctcacccctcttttttttaacccttccctcccctcttaatttccacataaaattatcccaatcccaccccctcatttcttcaaactcctccatttttncccaaaaactttcaaagacttcctttccctcctttcttccaaccttctcacccttccccctttntttttaaaacctcctccttttttaataaaaataccattac

SEQ ID NO: 121465 - DNA, 534 bp, Arabidopsis thaliana columbia
  unsure (1)..(534): unsure at all n locations
tttttggggggggagaggggggaaaagngggggggaaccctagttgggaacagccctcccaacctcgttgggggggaaccgccccccccttctttaaccttggttccctttaaacttttccctgggggggggggggcaaaaaaaatttttctttttctttattcttattatgttcctttatgtggcacatatatttctgcggccccacaccctttgtccaaaatttagatgtcataaaactacctttcctgttttaatttatttctcctttttggcctttttttttaagggagaggggggtncttttttgggggttttttttttaatcactaaaatttttctttgggcgcggcccctcgcttttttctttcgtgcgatttcgtgtaaaacccgtctttaatgtccgctgttttcttttctttcaaccctcctccgctttcctttttcacagcttctttctcatcgttttcctctggttgtcttctctttccaccttttttttatctcttctcccaatacctctcttttcttttt

SEQ ID NO: 121466 - DNA, 483 bp, Arabidopsis thaliana columbia
  unsure (1)..(483): unsure at all n locations
aaaaaatgattcgcgggccctccccgcgtcgtcctccctggtctgtgggtctcttttccactcccccgtgcgccctctggagtgcccagacagccctcctttccgctgctccgagtccacctcctcatctaagtggcatccatttttttttagggggggggggctgcaatcttcccgtacgcttctataaaaaaatcattgggctttggcctatgtaccgtccggtgctctttgcccttttgctacgtgttttgcccggctcggtactggccccccatctcctgccccatgccttttctgtcttctcctataccctcccttcgtcccttgcggctatcacgtgcacgagctcccgctcagccccccagactcctccgcggtgtatggcatttcctngtcatcgttgcctctgggaagctgcacttgccactcatgtctctatcgtctttgtgccgctatcagatatgtagatccgtaatcata

SEQ ID NO: 121467 - DNA, 470 bp, Arabidopsis thaliana columbia
  unsure (1)..(470): unsure at all n locations
gcgtttttaaaaaaaaaaaagagccgtttgagagaaaaattggaaatcctgtttccaccccatttttcgacgtgtggtggccggggttgtgttttgaccaaacgcctttttttttttttttttacacctcttttgtttttttttcccgcggggggggggggttttccccaggggggctnccaaaattcacntaagtggggcggccgcgcgtgtgcgtttttccccccccccgcgcgggggggggggagtcccccgcggttctctcccccctctcttttaatgtggtgggccctctttccccaaccgacgtggttgtgggcctgtattaaaccgcggcttccgcctgcggaagggcgggtcccaccgcccgccttctgcacccccgagttttttggtctgtgcccccgtcgcgggccccgtggggggacttcttctctggggcggccgtgcggctccccgccggcttattt

SEQ ID NO: 121468 - DNA, 557 bp, Arabidopsis thaliana columbia
tggtgccgtttccgtctttttctagttcgggggttttcctacagtacataatcttcccctcttcgcccgttgtgtatacgttaccacccgaccgttagagggacacgctgggctttaagatatcatgtgaccacgcgcataattacagagctgccgttatccgccacgttctttcgccctcgctcctgtcctttcgtcgttagaggcttttttttcttgtggtgtttttcggaaccacgacgcgctcgctatatgataaaaaagtaccgctttgtatgtcgtcaattgtgtcttcttttcttcttttggtgcgcattctcacgcttgttgttagatgctagtgaattcctgttcttatgttcctgctttcttttcatcttgtccgcttagagcctttgctccgagttaccggctttcccagttcacatccgcactctttatgtcgctagttaacggtactgttattcggcatgtaagctccctctcgactctggcgtctcttcacctcgttctcgttgctcgtttttgtcgtttgtgtgcggcgcgatactaggact

SEQ ID NO: 121469 - DNA, 284 bp, Arabidopsis thaliana columbia
  unsure (1)..(284): unsure at all n locations
cggggggttgagggcccccctaaaagaaacccagcccccnccaccccccgcttaccagatagatatgtcttcctctcgttggcggtaggcgcggcccgtgagggggagccgcgggggggcgggggacggcgccgggcgggtggggctgcgcgcaggtccgtgcgcccgctacgccgatacgggccggcctttttttacggattgtctggggccccgcccacccaaccggccgcgcgcgagaaaaaaaaaagcccgcccgggtgaggcccaagatgagtcgcctc

SEQ ID NO: 121470 - DNA, 389 bp, Arabidopsis thaliana columbia
cgggggggggatcggcaaaaaaaaacccggtcctctccccggtgtccctgcacacgcgagatagcgtaagacgagacgcgcaacagaatccaaagacccgcgaccgacctagctcaatatgcgacaagatcaccgccacgcccactccgatcacttttttttttggggggggcgccacaaccaaaaaccgtcagcgtaaaaaaaaaccaggccacagtgacgcggcatccctcgcctatgtagtcgcacgcctccacgcatcagagctgaagagtacgcccgacacatgaaccgctcattcaccattacaatgcacaacacaaggactaacttacgctgcagcatccaccgcacgcgcgccacaacacccgcctgccgggacggtttcg

SEQ ID NO: 121471 - DNA, 428 bp, Arabidopsis thaliana columbia
cccccatcggagcccaacaattcaggccgcccacacgccaccccccaggggtgcgagaggaatgcacagggaagactacgtagccgggcgagttgaagtcggagtctcgacacggaaggacatttttttcgggttgttgggcaccacaccaacgcacccagagaaaaaaaacacatagcctcatacaccgcctgccgcgcgcacatagcagcccccgcgatccgccgccctctatacaacgctcccggcgacgacacctgcctgacaggcgatatcctccgagcccagaccacgactacacggcccgcgatgccaccgtcacagcgcaaatgtcgcagccgcccaccgtggatcgtacacgacgcaccgcgcaccccccaggctgcgagcgtccaacaccgcacccccctcaccaccgcacgtacagg

SEQ ID NO: 121472 - DNA, 530 bp, Arabidopsis thaliana columbia
  unsure (1)..(530): unsure at all n locations
cccccccaatcccgccccaacccccccccccactatccagnacaactcccccattttaccccggggtaagcgcccaaaaaaacccaccccnccccccgaaactacatagaaaacccttcaacaccataacctccatatacacattacacaccccacaccttcttgccacacccgtctcacccattccaacccccccaacccaccgccacccctttttttttgggttgttggccccncccactcgccctccccaaaaaaaaaaatcacccgattgtctaacttccccctccttcttcatctttctctcacacaccccgatcctcccaacaacattaacctcacaactactaactatacacctcactactactcccgcacccactcaaccgtcctactcctgctctccactcctaatgagcttatctacaactgccacccactctaccaattaccgaaagtacgccaacacccaacaacccaaacaacacgtcacacctatatagaacaaacttgatcacaccacccgcccc

SEQ ID NO: 121473 - DNA, 471 bp, Arabidopsis thaliana columbia
  unsure (1)..(471): unsure at all n locations
caccccccccaccccctccttcccttttagcccgaccctccactctctctccccccctctttctctccccctaagtcgccccgcgtccctcgtcccttctcattttcgttcgcccaccgcctcctcacccaccacccggcactccccagcagctttttttttcggggttgttttggcgcaccnccaccggggcggcgctccctccaaaaaaaaaccccctccaccccggcgcccgtcccttctcctgtctctttctctcttctccgcacccccccccattccgactcccgtcccgcattagtctcctctgcctcgttgctgcccgcatcttttgcacacatgtcacatcacgccccctctctgcttgcccctctactgctccctccatctcccttcccctccttctcttacgccactccccccctccctcccccccccttctcggtgatcgcgccgcccccctcgctcccc

SEQ ID NO: 121474 - DNA, 516 bp, Arabidopsis thaliana columbia
  unsure (1)..(516): unsure at all n locations
gggcggtgtctcgtcgcgttgcccccgctcgcctagcgcacgttcctccgcgctctggcgatggcggcggctaccccgcctgttctcgttcgcgggtcgcttggtcttgcatgtctgcacctctccctcctcgccacccgcggcctctttttttttggcgttcgtatgggnacccaacccgcgtctcggtccttcgctgctacaaaaaaatctccgcgcctgttctccgcgacttccccgctcgggccgcgccgtcgtcttccgcctcctcccgggctttggcgccccgcgccttgtgtccgtgggcggcggcggctcgcgccgcgcgtccctccgctctcgctccttggcgtcccggatcgtgcctcttatctgcctccgcggctcctccctcgctccactctcccgcccaccgcctttccgccgcggcctccccctgtgcttgctcctcggcgccagtcctccccccgcgccgacgcctctcccgtcccgttcccctccttcccggcgctgcgc

SEQ ID NO: 121475 - DNA, 425 bp, Arabidopsis thaliana columbia
  unsure (1)..(425): unsure at all n locations
gggggaaccgggccccccgtcttggggcgccccgggcggcgccccctttcttccccgccatgttgtggtgttttacttaccaaaattccccccccccctcccctcgtcggtgttttcccctctcgcttggctgtgcggctcgtgtcgtcgtctgtgtcccggtcgcgtcgttctgctttcgggttgtgccgcttctgcgtttcgtgctcctgccccgtctgcgtgcgcgccgcgnaagccgcggcggctttttttttttgcggctttgtttttggggnccccnccccccgggcgcggccgcgccgcggcacaaaaaaacgcgccgccgcgcgcgccgcggtgcccgtccgctccggtcttgtccgcctcccgcttcttctcctctcccgctcgttgtgtgccgcctgtctcccctgctccgtttc

SEQ ID NO: 121476 - DNA, 376 bp, Arabidopsis thaliana columbia
gggccgggcgcgggggcgttgaatcatttggggacgggggggcggcgcttttggcacgcggacacccgcaccgcggggtgcgccgacggacggccgcccagctttttcccgcgcggggggtttgttgcggcccaaaaaaacaccccccccgcgcgaccggggctcggcgttgtccttgtcgagtcatggcgccttcgccggctggcgccttgcttgtggctcgccttccggcgcgtaccccgacgggcgtctgagccggcgctcgccttgcgccacgtcccggcgggcggcccagttcttttttttggggttgttgtgtgccccaccccgtgccgggcgcccccgcgagaaaaaaaaggtccccccgctcctgctg

SEQ ID NO: 121477 - DNA, 538 bp, Arabidopsis thaliana columbia
cccccccccccttttgttgtaaaaaatgggagggtagaattctctgggtactcccccccaaaatttagggaagaccgggccccccccctgccagtctattatcacatatttttactccttacgtttctctcgtatccacttaccgaagcttgtagtctcttggaacccaggcgccacgccaccacggtcatctggccagcggctgctggatatgtctccgaagcaggcctgcggcgcttgcccgaggaccaccgggccgcgcggacaatggttgtgagagtattttttaactgtgttataggtggggaccccgggccaccgcgtccccacaccccatcgcacggtatatccccattccctcgcggacggctcgtcatattttgtcctccccgacggtacttcaatctccctttgtactcttcttaatcccatgtcactctcgtacataccacatcgtcatttccccctccccatccacctattattcttctctgctctatttctacgctaccaccccacaggtcagcgccacctctcc

SEQ ID NO: 121478 - DNA, 538 bp, Arabidopsis thaliana columbia
ggtgacactatacaagactatgacgtcgcatcgcacgcgtacgtaagcttggatcctctagagcggccgccctttggggttggggttttttacaaaaataataaacaatttttatggacttttctaaaaaaaatttttctcatcccaaccaatttacgcccataagatatatgcaaaatgggaacagttatcgcaaccttttatagaaagaaaaaaaaacatttttctttttttacgggggggtttttctcaagaaggccccccaaagaaaagaatcttaaattattggggggccgcaggtatttttacccccgcagggtgtatcaaaacacccctctttttttttttaaacaaattttttttcccccggggcgggcccagaaaaaaaaaaaaatgtttttttttttcttttttcctcccccccaacacccacattgggggcaaagaaaaaaattttatacaccagagggttttttccccgggcaaaaaaaaaaaaaggggggggggtgtttttttctcaaaaaaataaaaaattttt

SEQ ID NO: 121479 - DNA, 328 bp, Arabidopsis thaliana columbia
  unsure (1)..(328): unsure at all n locations
cccccccccgaagctggcaggaaggatgagatctgagtttttcaccccgggggggagggggtgcctgcaacaataaaacnacccccctcccccgcctcgggggcgctataggatagccacgcgggggcgtatcctgattgagggacacgcgacgagtatctggaatcaaccggcgctcttcggctgtcggcgtcagtgactcactcacggtcaccgccccgaacggagccggcgccacaagtaaaagcattttttttttttccgggggggtggggcgcgggcggtacgcccgccgtgtcctcagcgagaaaaaaataccggttgctat

SEQ ID NO: 121480 - DNA, 457 bp, Arabidopsis thaliana columbia
  unsure (1)..(457): unsure at all n locations
gacgtcgcacgcacgcgtacgtaagctcggaattcggctcgaggaaaaaagaggggttggggttttgggcttttagagagagaaaaaggccaaggcgtttttcttctctcgggcctccattttctacagagagatatatcaaaaattccattttctccananagagagagagagagagagagagagagaggggccaaatattaatcatcgggggggggggttcaatncgggaaaaaatccatgaaaaaaaactgggggatgggatggggaatcaaaggggtttgggtagtgggggaagacnccgatcttctaattcgattcggggaataaaaggagtgggggaggctcacatcctaaggggtgggatnccaaaatggggggggggttatcctaaccccaaaggccaaaaaaaaaaaaagggagcggggggggaccaatgccccttactggggggccc

SEQ ID NO: 121481 - DNA, 576 bp, Arabidopsis thaliana columbia
  unsure (1)..(576): unsure at all n locations
ccccccccaacttcgnagggccgaaaccccccgccgcgacaagggccgggagcggccggggggttttcggggcggagggggaaacgcggcgcaacacgcagtgaggggacgtggcgaccctctaaaagagggacacacccgaacacagagcagaaaagaacacacgacaagagaccggaccaggaacacacaacagaaggaaaaaaaaccaagacgaaggggaacggaagaaagaagaaagcagggaggacattttttagcgcaagaggggacggagggacgcatacacacgcccccaaggggagaaaaaacgagaacaaccgcgggcgagcgcaacaaagcgcaacaccccgtccccaagtcgggcacagacccctccattccggtaaaaggagacagcggcccgcacaaaatggcggcatacacaggagataaacgtgcgcaccgcacacacacgagacaggggcagagcggccacagcaccgacagacgatggcgcaactcgcgcgaggctaaaccatccaccatccacaaagcaggcgataacatacgtacacaagcaagaaagcccgcccc

SEQ ID NO: 121482 - DNA, 514 bp, Arabidopsis thaliana columbia
ccccccccaaaagaagaagaattagcggacgcctcttggcaccccccccccatttccgacgaagcgacacctacgattcaacggaccggaccctttcgcccgtcatcgacccgcgccgcccgctcccgcgtccatcgcttaagtaccgcggagtgcctcccattttagggtggggcaccaggagtacacagcaggaagaccaccgaagggcccacaaagcgcggaacagcccgtagtgaaattataaaaaagaataataaatgaacaaaaccacagcccccacaccaccctacaataaaacaaaaaacccatctatccacatatcaaaacctacataagttaatactaccaaaatatatcacacaacctcgactagaacactcaaaaccacactgccaccccacctccatctaaataaaatattaacacaagaaacacaacaagacactaccacaccacccccacccaacccaaaacataaaatgtcacccatctcaatctaccccccccatac

SEQ ID NO: 121483 - DNA, 285 bp, Arabidopsis thaliana columbia
gggggggaacgcgcgcacggggacgcagcggagcggaagagctcggtttggcgggcggagtgcgtcgcctagtggcgacgctcacgcccgcgacagttcgaggaggcaaggaaacctctacgcaaagcgacacgcgatacgacaccagggtcgtcagccactgctctatcaccagaacagtaccaagatctgcggagagtcaagaacaaagtgaggcaggcagggattttttttttagaggtagtgataaagtagatagtgtggaggactgcggggggcgccggg

SEQ ID NO: 121484 - DNA, 502 bp, Arabidopsis thaliana columbia
gggaaaacaaggagggaggggaggaggggaagggggggcgttttgagggagggggggtgatcggggtagggtcgagcctcgctcattgtgctggccgtcgcgagggcaggggtggcacggatgcagtcacgtgcgatagaataggaggctgaactcgtgcgcggggtggccgggcgcgagtgtggagacggaggtggaaaagagggttttttgggggcggggggtaagaaataggcgaggggggcaggaagtgggaggaagtatggaggtgtgttggtgaaagggcggtgggtgcggacggctgagtttcagggcgctttgggcgtttgatcgacggatgactggggatagggacgggcctgtcttgcggctaagtgtgtatctcgaaggaggcaagcaggattatgtccaagtagttggggcttaacccgggggttgaggcgcgggggtcagcagtttctacgcgctcagcgacgcgagggcgttgtgttagaaaaggggt

SEQ ID NO: 121485 - DNA, 528 bp, Arabidopsis thaliana columbia
aggtgacacttagaagagctatgacgtcgcatgcacgcgtacgtaagctcggaattcggctcgaggtttcagctaatggtcaccctggtgctgggaatttcatgtccaaccaacaaagtttaggggctcagcttgcccagcttggcagggatgcttcagcggctggggcggctcgtcgttttaccactcagaagaagagtattgtagaaattgaatcagttggtgttgctggtaaaactgatacccgtgttaagaaattctttcgtctagagtttcttgctaaagaacaagaacacacagatgaagatttggatgtcaaggctctagaagatggtttcgtttccgtgactccattttctctccttccaaaaacggattcagaaactcaagccgcagcatcagaatggatctccaaagcccttaactctgatcaatgaaaaaggtcatactcgtaaattatgttacatgatttggccaaaactctcccacaaatctgatttactggatttctgcattggttgttcttgg

SEQ ID NO: 121486 - DNA, 538 bp, Arabidopsis thaliana columbia
  unsure (1)..(538): unsure at all n locations
nnnnnnnnnnnnnnnnnnnnnnnnnnnnnnnnnnnnnnnnnnnnnnnnnnnnnnnnnnnnnnnnnnnnnnnnnnnnnnnnnnnnnnnnnncctttttttttttttttttttttttttttttttttttttttttttttttttttttttttttttaagggaaaaaaacgttcttttcaatcaaaagggttaccaattgtctgaattccaaataaaaaaaaccccttcccaccttttttcccattaccaagggtaaaacagcttgggacaaacaaataagcccacaagagccccccaaacttgtggggggatccaattaattaaataaaccaaggggtttagatgacccccagacccccagaaccaacaaattggcgaatcccgtaaatcaaatttgttgggagagttttggcccaatcatgtaacataatttacgagtttgacctttttcattgatcaaagttaagggctttggaaaaccattctgatgctgggggttggggttttgaatccctttttggaaggagagaaatggggtccc

SEQ ID NO: 121487 - DNA, 286 bp, Arabidopsis thaliana columbia
  unsure (1)..(286): unsure at all n locations
ggcccgagaacaaaaaacgggaaaaaagcaccggcggagggagaaagaaaagaagacccccgcccgaaggcaaggggagaaagcggccacgaanaaggaagagacccgccacggcgggcaaacgcagaaagcggacacaacgagcaaggcgagaagcggacaaagggcaggagagaaaagaaaaaattttaatatttctcgcgggggggggggagagacgcgacacgggagagaacagcgccgccgcggaaacaaaaagcagagaccacacgcgccgcgccggcag

SEQ ID NO: 121488 - DNA, 391 bp, Arabidopsis thaliana columbia
  unsure (1)..(391): unsure at all n locations
cggggtttaaggggggggagaacgaggaggagggangggggaaagaggaggaggggatattaattgttttagttgggggagtgcggagacgatggggtcaacctacgtgtgtggaatggtatggtaatgaggtgcgcatgcgttcggtggatatccgcgggatgattgtcggttctggagtggtgtaagcggcggtagtcggagggggaggggaggacaagttggggggactaaattttttgggggtgggcgtagggggagtggtgaatgcaaggcgaaggcaacggccctttactactatttgagcctcgggggtaaaaggtgagagggtggcttaagggttaggtagtaggaaggcgtgtgaacatcggcgccaaggatcgctgcttag

SEQ ID NO: 121489 - DNA, 580 bp, Arabidopsis thaliana columbia
gggggggggcgggagcgagaggcggcggggggggggcccttttttggaaacaacccccccgagggtttgaggggggaagggccggggcgcggggaaggaaaaggggggggaaaccgcaggttgcggaccagggggggcgggggcagaacgaaacaggagagcggcggaggcagaccactaaaagcaggacgcgccacgagcaaacagcaacggagagcgcaaagaaagaacggggaacagagcgaaacggagacggggaaacacaacaagcgaaacccgcgcgggaacaggtagaaaaaaaagaaggaagtttttggacgggagagggggagagagagcgagagaaaagaggggcaccgggggagcacgccgaaagcaggggggggagggaggaacagggagagaggggagagaacgagggaggggggggggacggggacggcgcagacgcgcgaggccgcggcgggcccgcccgagctcgggcagtgcggagagaaaaagacgcgccggaggaggagcgcggcgggcggggggcgggccgggcgcggcgcgggggagggcgggccgaggaggggcggga

SEQ ID NO: 121490 - DNA, 527 bp, Arabidopsis thaliana columbia
  unsure (1)..(527): unsure at all n locations
taggtgcaacttagaagatctatgacgtcgcctgcacgcgtacgtaagctcggaattcggctcgagcgccggagtcctcctcgtagtcaatcctccagatcttcttctcctcctgtagcgccgccgcttcctcctcctcgtgcggctgtctctgctttcgttccaaagggaacccttaagaagagtcttagcaataccgttgccgttagccaggtgagaatccttaagcgcggcgaagaaatccccaaggagacttcagatctggttgtggaaatgtcagatctgggatctactcgtcggattggaccagatccgggtttgattccgggtcagatccgtttatctggccgcaaatcgaaatcagcaccgttttacgccggtcctgtgaccatgacctcgccgcctcctagcgatgtcccgcttccagctttcttcacgaagaaggcaacanatgatctcatcaggatccttcgcctagacatcggctgacggtgtctgtcaccgatcatttttgattttttaaaaat

SEQ ID NO: 121491 - DNA, 596 bp, Arabidopsis thaliana columbia
  unsure (1)..(596): unsure at all n locations
gttgttttccccccctcccggaggaacccctccccccgcgggtgatattatatatattaatagggggggcgggagaaaaaatttttattattagggggggggcctttctccccaaanttgtttttatatttttatttttttctttgctggcagccacacctctagtttttttttttttttttttctcccccccattaaaagaaaaaaaaaatttttaagggggggggtttttttttttttttttttgttgccgcccccccccccccccccctctcggtggtggtaaaaaacaaaaacaaataataaggacgctcctgtttttctctccccctccttttcggtggggtgggggaggctgttttttctttcttctcttcttctctctacaaaagaaaaaatgaaataatgtatggcgccccccccccccccgccccccccggggggcgttgttttttttttttctactaatacgagagacggtatgggntgagagattattttttctctttttctttctcctcccacttattaaacatatgctctcttttttctccttaggaataaaaaaagaccacccaccctccctttcttgtttt

SEQ ID NO: 121492 - DNA, 471 bp, Arabidopsis thaliana columbia
  unsure (1)..(471): unsure at all n locations
nnnnnnnnnnnnnnnnnnnnnnnnnnnnnnnnnnnnnnnnnnnnnnnnnnnnnnnnnnnnnnnnnnnnnnnnnnnnnnnnnnnnnnnnnnnnnnnnnnnncctttttttttttttttttttttttttttttttttaaaggtaactttttttttttggagggagaaacttttgatccatggtttaaaaagtgcacttacaaaaaagcggccacaacagtatgggaccatttggctaactattactacggcattttacgaaaaattgagtgaacaaaaaggaaaaaagaatccggtttcggagataattacaaactgaaggtttttcgaataaaacaaggaaccaaagcattttcaaaaattgggtggaaccattgataccgctgactttttatattgggatatagagacaaccaccgggagggatcaagttatacaaaaaaacctgcatctaaaatttacccttgggcccct

SEQ ID NO: 121493 - DNA, 282 bp, Arabidopsis thaliana columbia
acgcggaaaccacgcccccaagagcacggcaaacgaggacagagcttaaacccaggggagaagaaccgccgacagaaaaaaaaccagcccagacaaggcggccgcgcgagggaaaagaagaccaggaagcgcgaggaagaaccccgaagccgaaggaacggacgcgaacccgcccacgaacgcgcgcaggaacgcacgcggcacaagcaacagacagaagaagaagaaaagatatttttttataggggggggggagcgcagcaggccagaggggaggaggag

SEQ ID NO: 121494 - DNA, 438 bp, Arabidopsis thaliana columbia
  unsure (1)..(438): unsure at all n locations
atgatactgccagctgnnnnnnnnnnnnnnnnnnnnnnnnnnnnnnnnnnnnnnnnnnnnnnnnnnnnnnnnnnnnnnnnnnnnnnnnnnnnnnnnnnnnnnnnnnnnnccttttttttttttttttttttttttttttttttttttttttttttttttttttttttttttttttttttggggagaaaaacgggttttttgtttaatgaaaaaaatccaaggttttgcaaattttacatttaaacaagctttttttttcctttcaccctcccgaagcaaagactggagcaaaatacagataaaacttggctcactttccgggaacaaagttgggggcaaaggcccatgcgttgttgttaactggatcggccaaatggtcaacaaggttttttatgggccccttttcgagccgaattccgagctttcgtacgggggcat

SEQ ID NO: 121495 - DNA, 559 bp, Arabidopsis thaliana columbia
  unsure (1)..(559): unsure at all n locations
atgattctccagctacnnnnnnnnnnnnnnnnnnnnnnnnnnnnnnnnnnnnnnnnnnnnnnnnnnnnnnnnnnnnnnnnnnnnnnnnnnnnnnnnnnnnnnnnnnncctttttttttttttttttttttttttttttttagaaaatcagtagtctaaaatggttgggttacttctcctatcttgagaaaagagatacaatcggatatatatatatagatagatagatacacacacaaacttacatatatctaaagcccttcttgctttctctctctctctctctggttttttcttttatggtctcttctttggtcattcctcttcttctcctctctctttcttcacaacagattagtcgactgtcattggttgcgtcatgcaacatctgaaacgggcttttctcacattcgtcattatctcagtttccgccgcctccagaagattgacaatctctgcaaaacaaggacggacttcagggtccgcatcccagcaacgtgtcatgatctctccaagcacaggaagacaatctgctgggactgttggacggactcctctgt

SEQ ID NO: 121496 - DNA, 528 bp, Arabidopsis thaliana columbia
  unsure (1)..(528): unsure at all n locations
atgattctccagctacnnnnnnnnnnnnnnnnnnnnnnnnnnnnnnnnnnnnnnnnnnnnnnnnnnnnnnnnnnnnnnnnnnnnnnnnnnnnnnnnnnnnnnnnnnncctttttttttttttttgagaaaaattgtttgccattaaaaaaccctgaaaatttcatcctgattccgtttgttcacacctctacatgaaagtaacaaaaaactacttatcagctccaagggcaataaattacacaaaatttgacatcactactacaacagtgaagactggactggtcatttgtttctgctcttctctttctatctaattttgntgatgtatgagctcaactttaagaatgtggttgaaggagcaaagatgcgtagataagatggttccaaacatcgggaactcccggcaggcaccagtggctgcaatcctgtcgccttgtcgacactttcttacccatccgtgttggttttaccgtagattgatgggatgtcgtctttgcgggaattagtcagctttgtcacgtttagaa

SEQ ID NO: 121497 - DNA, 243 bp, Arabidopsis thaliana columbia
agaaccggccgccaggaggaacggggcagcagagcagtttagacggggggggggagcggagagaaacaggaggcgcagaagcgcacgcgccacaaagaggccggcgacaacgaagacaacaagacaacctccggaaacacgaggaggggccgaaatgataataagagaagaacaccgccaacaccggcagagagaaaaaaaggagaatttttattataaagggggggaccgagaaagagcaac

SEQ ID NO: 121498 - DNA, 511 bp, Arabidopsis thaliana columbia
ccccccccaaagaaaaaaaaaggtttttgtcacccccgccgttcgggggaacgggccgggggggggggcagcaacggtttacagagggacacccagggggcccccggcccgcagcgaaagaaagcggggagacgggcaacggagggcggaggaaggcacagacggcagacagacgcaacaacacgcacaccagcgaccaggaggaacgcacaagatttttagagagggaacaaagacggagacaggcggggaccgggcgcccgcggaccaaccccaaagaggaagccaacaacaccggggccccgccgcccgcaaccagcaggcgaccgagcccgccacagaaagagacgccccggcaacaccacgccgacagaagaagcacacacccacgagagaggagaagaagaaggcgacgcggccgacgaaaagcgacaggcgcggagacaacccgaacgagacccagaacaaacacacaaacagcgcaacacgcacacaaccaggcagcgacgga

SEQ ID NO: 121499 - DNA, 397 bp, Arabidopsis thaliana columbia
tttcaaaaggcggggggggaggcgccgaagaaacaaaaaaaggagagaagcgagcgagcgcggggggggaggcaccagcaacgcaacaaagaggaacaagcaagcggacagccacgacgagcaagcgcagacgaacagaagcgagacgacaagaacggaacgcgctagcgcacacaaccgccacgacggaggagaggaagaagagaagagaagaaaaaaagatttttttttcgggggggggggggaaagagagagaaaaggaacaaagaagaagcgagaaaaacaccagcgagccgcagaggaccacgggccaggacgaccggcacacgccaagagaagaaagacaggaggcgaagcacaaggccgggaagaacgagaagaaggagaggagcgcgcc

SEQ ID NO: 121500 - DNA, 472 bp, Arabidopsis thaliana columbia
  unsure (1)..(472): unsure at all n locations
taggtgcactctagaagagttatgacgtcgcacgcacgcgtacgtaagctcggaattcggctcgaggtcggtttcgggtcaggtacccttttgttgaaggtcattcaagcttttcctgggagtatagcatgggttacttcagcgccgtagcgcctggtactcgaacattggctcggggcattttctctaccccttcttaccctgaaaaaacagggacaccttgcgttcttgaacggggggcgcatntttngggtaacctacccttctacaggcctcgggaccaagaaggggtattacaggaatattccactggttgcccatcactacgcctttcggctgatcttaggccctgactcaccctccggggaccaaccttggggaggaaccctgggttttccgggcattggatctaacccatgttggcgttactcaaggccaaattcttggttccgtttgggacaccggcggtcgg

SEQ ID NO: 121501 - DNA, 531 bp, Arabidopsis thaliana columbia
  unsure (1)..(531): unsure at all n locations
cagctannnnnnnnnnnnnnnnnnnnnnnnnnnnnnnnnnnnnnnnnnnnnnnnnnnnnnnnnnnnnnnnnnnnnnnnnnnnnnnnnnnnnnnnnnnnnngcgatctnnnnnnnnnnnnnnnnnnnnnnnnnnnnnnnnnnnnnnnnnnnnnnnnnnnnnnnnnnnnnnnnnnnnnnnnnnnnnnnnnnnnnnnnnnnnnnnnnnnnnnnnnnnnnnnnnnnnnnnnnnnnnnnnnnnnnnnnnnnnnnnnnnnnnnnnnnnnnnnnnnnnnnnnnnnnnnnnnnnnnnnnnnnnnnnnnnnnnnnnnnnnnnnnnnnnnnnnnnnnnnnnnnnnnnnnnnnnnnnnnnnnnnnnnnnnnnnnnnnnnnnnnnnnnnnnnnnnnnnnnnnnnnnnnnnnnnnnnnnnnnnnnnnnnnnnnnnnntgcgttgaggcgcagcagttgactggacatctaggggtaaagcactgtttcggtgcgggccgcgagagcggtaccaaatcgaggcaaactctgaatactagatatga

SEQ ID NO: 121502 - DNA, 509 bp, Arabidopsis thaliana columbia
  unsure (1)..(509): unsure at all n locations
tgatactgccnnnnnnnnnnnnnnnnnnnnnnnnnnnnnnnnnnnnnnnnnnnnnnnnnnnnnnnnnnnnnnnnnnnnnnnnnnnnnnnnnnnnnnnnnnnnnnnnncctttttttttttttttttttttaaatttaaataaaacgaaaactttagttacatattttcttgtatacaaacatatatgatatctcatataataattttatacataataatttatttcaatcattttatcccgcacattatacaggttcttatctagtctattatatataaatgaaaacaatttaataaatatataggatgatggtgatggtggttgtgatgatggtggtggctcccacacacttaaccttatgggacgggacttattagaagaactataccatggggagtccaagaatatgttgggttgtgaatatctcaaatagctcgtatctctactaggggcacaccctgcccctgcttggttatgccgaaatgcctgtcaggcctctgcttctgcg

SEQ ID NO: 121503 - DNA, 513 bp, Arabidopsis thaliana columbia
  unsure (1)..(513): unsure at all n locations
gacgtcgcacgcacgcgtacgtaagctcggaattcggctcgagttttttttttttgtttttttaaaagcacacaacaaaagttcagatctccggttatgtaataatatgtacataacgatccatgtcagctaaaattatatttttctctctcagatttaatctgttttttctttctaaaaactggtaataaatttagactgagatatttagagagggggggctatganaaaacgaattttcacagctcaaaaagaagaagaaacgcatgcgcttcgaattgaaacgacaccggtaaaagctcaagcctgttcccatggaggaggcaaattaagatctagatctaacaggtgagatcttttcttcatcccaccttccaaaatcaaccaccgactacaaaatcaaagtcggtttgggcaccacaaggcctttttctgcccaacatgcccccaccggcggatctaaaccgccggtgtgagcacgagggggctgcaccacagtccacctttcccgcc

SEQ ID NO: 121504 - DNA, 296 bp, Arabidopsis thaliana columbia
agacccccagaagggaggatgaaggcaggtagggttttttgcgggggggggcgggggccgaaggaactaccgtggcggtagaggaagggtgcgagggagaggagggggctgttacgttgtagattccgctagcgatatatgggccatacgtccgcatggcaagaggctggtgcgatagccggctgcatgctagggggggaggagccagaaagggatgagtatttttttttgtggggggggggaaccaagcaccagaaagcgagagcagtggcgagcgagcgggtgagcgtgaatac

SEQ ID NO: 121505 - DNA, 506 bp, Arabidopsis thaliana columbia
cccccccccggctagtaaggtaagggggagggttttttggggaccgccccccgggggtgaggggggggaccgagcgagggcgaacaccaggagagcgaacgggggtagcaagtagggcacgcagccgaggcgtgacgccgcaccaccgcagatgaacatcatacggccgacgcagtcagggacggaggcagagcgccacgcccaccgactgaacgttcgagcggcgccagaggagggcctcgccgccgagagaaactaaggagagtcgagaggggaagttttatttaaggaagtgcaaccgagaatcgaggcaatgggtgagcgccggcgctcccccgccgcaacacgaggccgagagtacattagacggccgccgtgccgccgcgcacccaccgagatggccccccgccgagcgaccatcgccaacgtaagctgtggagggatatcgggccggacacgcacccacgaaggaggaccgagaaaacgatcgccacacgcgcggcgct

SEQ ID NO: 121506 - DNA, 321 bp, Arabidopsis thaliana columbia
  unsure (1)..(321): unsure at all n locations
ggtgaccttaaaagttgacgcgatgccgcgtantaagctcggaattcgtcaggggctgtcggtctcatcaggaggacaaacaacggtacggtacacccggcaccaacacaacaagtccggagcattgcgccgcaatatacagctatgtacctatctgtgggaggcatggacactggtttgttgggggcaagcanaccaggcaatgccgtttgaccacattgaccttgtgtacatttggacaatagcanagtgatggtgaaggagagagacttgcctctgggacttcatgacttattgtgatgccgcttatgctctactggg

SEQ ID NO: 121507 - DNA, 397 bp, Arabidopsis thaliana columbia
  unsure (1)..(397): unsure at all n locations
aaccgcccggcggggggggcgggcgggattattttggaaacacccccccccggatttaaggggagggaaacggggcccgcgggaaggaggtggggaaggcaaggaggaagatttttcagccggggggggtgaaagcccgcacacaaaaggacggaggagcgcaaaccaagcggaacaaccagggcgcacacggcgaccgcgcaagagcgagagaaggagcaaaccgcgacgaacaccgccgcgcaacggcaagaagagcgccaggaagcggaggagggcgggagaccgccagggagaagaggaaaaaaatttttttatgagggggggggagggggaggacgcccgcaggnagggcgccgacccgaccagaaccgcacggacaccaccgaacgcgacc

SEQ ID NO: 121508 - DNA, 116 bp, Arabidopsis thaliana columbia
ctcggaattcgtcagacaattaggttggtggcttataaaaatctttcttaatgaaatgggatcttatgttccaggggtggagctctgaactctaattctttggattaaccaccagt

SEQ ID NO: 121509 - DNA, 510 bp, Arabidopsis thaliana columbia
  unsure (1)..(510): unsure at all n locations
aggtaccctctccaaaattatgacgtngccctgccgcctacctaagctcggaattcgggttgagttcactacccgggaagcggacgcttnaacttatccccatttttttgaaaaccctaacaaatcctcctcttgttccgccactgcccgccgccggtactaaggggggggaattttctatacgcggcagttcgatccctttttttatcgacatcctacacaaattccatatggggggcncgccctgctttcctcccaaaccttctaaaaaaacccaggggtgggtttaattaacaaagcggcttccgcgctcttccggaagaaatacaaccccaatcacttcaaatgggaagaatcggttttctaaagggccaaccccctaacgggggggccagaaaaaacccctccccttctaacccctggcggggggattcctaaatcgacgagctttaaaaaaattcgtgtctttcttttttcccgcgcgtgagaacagaggaaaaaccccccccc

SEQ ID NO: 121510 - DNA, 525 bp, Arabidopsis thaliana columbia
  unsure (1)..(525): unsure at all n locations
nnnnnnnnnnnnnnnnnnnnnnnnnnnnnnnnnnnnnnnnnnnnnnnnnnnnnnnnnnnnnnnnnnnnnnnnnnnnnnnnnnnnnnnnnnnnnnnnccttttttttttttttttttttttttttttttttttttttctgcaaagatgtattattaaaaaaaggcttgtttttattgttccaacgggattaacaacaaccaatgggatccatccagaaaagagatgtttaatttacaacagcgcgggggacaaccactgcgcccgaaaagggaaagaaaaaaaaaaaagagccccgctaaggtcccaaaaaactcacaaatttaccccaaagagcctttttaaaacttgatcagcatatgcattttccttaccaaagcatttaaatcccgaggtttctcaagaactccccccattttggagaatcccccccaaaattgtaggtcaaaggtgaaacttatacccccatgcctccggccgctctaagttgtttacaaagtcgtatagggcctttttgggccccaaatc

SEQ ID NO: 121511 - DNA, 547 bp, Arabidopsis thaliana columbia
  unsure (1)..(547): unsure at all n locations
aggtgcactatagaagagcttgacgtcgcatcgcacgcgtacgtaagctcggaattcggctcgaggttctagatcgcgggcgggcgccctaannntnnctttttttttttttttttttttntnaacactaaaactgattcttatattggtcataaaggtatatcatacatgaacaatcccacaatataggatccggggagtaaattttactgtatattantcttaaaaaaaaagaaggagggggcaaaatggccacaagcccattaattttgctctcaccaaccacattctccactggaatctcccacaaaaaccctaactccattttatttcatgggccttcgtcccctccggtaagggggtttctcctccggcctaccaaaactataaacccccggggaaaaaaccctccttcggttggggaagaagctgactaacccctttccatcggattaaggcttaagaaagggttcttcttctttctgggcggtgtgttttttttacttccaaaagagaaccgttaaaaaccgggttttcccgagaaaaa

SEQ ID NO: 121512 - DNA, 495 bp, Arabidopsis thaliana columbia
  unsure (1)..(495): unsure at all n locations
tacgactcactatagggaaagctggcacgcctgccggtaacgggcccgaattaattcccgggtcgacgagcggcctattcggggggcgcccttttttttttttttttaccataaagggcctcttaaaaaacacccgcccaccccacatttgtgaaaagggggaacaaaaaccatttgggaaaaagaggggccccattttttaccaacaaccacccacaacccggcggagaggaaactccccncccggggggccgcccttcgcttgtctgtggcccaccacccatacaacatactcccccattcccttccccgcagccggggggggccttcgtgaacccaccccccccccccgggaaggctgggtggccgcccccctccgcgtgggggaagtcccgtagggtggtctggccacgctgggtgggcgccggccagcagccgcccgccccggcgcgcggaggggtggtggcgcggacgcgcgcgcgcagccgcggcggc

SEQ ID NO: 121513 - DNA, 400 bp, Arabidopsis thaliana columbia
  unsure (1)..(400): unsure at all n locations
gaacaccccccaaagcaggaggaaggaagaaaaaagattttcgccccggggggggaggggccggacaaaaaaaccncaaaaaacgaaaaccaagcggcgaaaacggagacgatactcgccgcaccacaacgaacagaaccaaacacgactaagaaacagcagcaggccgcacagaaaaacaaacagaaagcgacgccgaagngaagcgggaaggaaccgaaattttttattcgagggggggggggaggaaggcccangagcgcgctgaacagagaaaaaacagcaccacataaagacacaccatgaccgcgcccgccaaacacacaaaaggataaggaagccgacacacgacgaacccgcgccaaccgaccgacagccgagtcagagacacaactgacga

SEQ ID NO: 121514 - DNA, 224 bp, Arabidopsis thaliana columbia
tctacaagagctttgacgtcgcatcgcacgcgtacgtaagctcggaattcggctcgaggcgcgttcttgggtctgtgtctcatctctcaatcaaccaaaagcttcccatctcaaatccctcagtttgattttctaggcaaacaatcatctgccaccatgtttatgaatcgggtattcgggaaacccaaacaggagactagtactctccaaacgttagacaatct

SEQ ID NO: 121515 - DNA, 516 bp, Arabidopsis thaliana columbia
  unsure (1)..(516): unsure at all n locations
nnnnnnnnnnnnnnnnnnnnnnnnnnnnnnnnnnnnnnnnnnnnnnnnnnnnnnnnnnnnnnnnnnnnnnnnnnnnnnnnnnnnnnnnnnccttttttttttttttttttttttttatataaccaagtcaaaacagcaaaagtgagaagcaaggagaaaaagaacagaaagtgccaagtcgtaacccacaagaaagtgtcataaagagttgacaaaaatgtaatttaaacattcaaatgcagtttaataagttaattatattgaaaaagaaaaaaaaaatcttccgatcaattagactcggatccttatatacataaaatcttttctttctgtttttagataatgcacacacaaatctccccacttaatcgaaatcttccaaggctagcttcagcttagagagccatctcagcttgtaaggcagcgagttcatcttcctcagcagtaggttgcttctgagctggagcacgagcaggcttgtttccttgaggcacatggattggaacaggctgaaaa

SEQ ID NO: 121516 - DNA, 648 bp, Arabidopsis thaliana columbia
  unsure (1)..(648): unsure at all n locations
ccccccccccccccattatataatgaaatgatagacactttggggggcccccggccgcgccccccccggggagcgagagggcgcccgcgcaccggcaccgcggccaaagtaggtatttcgcgcgggctgctaataccggacctcacttttagggggaaaagctcggttcccccccgggcgaggacccccgggccccggaaaataaattcccgcggggcgaaacaagctcacctatagcgcggggggcccggcccttttttttttttttttttgggaaaaaaaagaaacactttgtttttttttttttttttcagaaaaaaagaggtgccccccaaaatttggggcgcgcgctctttttgaaaagaaaaaaaactttctcaccaaaaaaaaaaaaaatctttggggggggggccccccttttgggtgggcaccaaccccgcgttgggggggggggggggggggnaaaaattttttttttaaaaccaccacccccccccgcgttcttttttttttttataaaaaaaaagaggggggggggggcaagctcccttctacccacccccctcccataaaaaaagggggggggtgagggtgttgttttctttttcataactaacaaacacaaaaaacaaaagaatagaaccgagt

SEQ ID NO: 121517 - DNA, 601 bp, Arabidopsis thaliana columbia
tggtatgggaaggggggggggggggggtcttgtggtacacccccggcgattaaggggggaacggccggccatgggggattgaaaaaggggtgttttatggatgggggaaggtcttgacaataaagaagtggagttcaatgtgtcagcagtgggggggagtattgggctaatgagagagttatagatgtctggtctaggagaacggtccgctcattgaaaaggagttaagtaggcgtgtcgagagggggaattaaagaaatttttttttggggggggggggagataagatatgtttatttatgtagaaaaagtgagttggtaaaggacagtagatgactgtgtagatagttataagaagtgtgtatgtatgaggtttaggtgcaggaaaggtaatgagtagtaatattaagtgacgggagccagattacaagacaattaatggattcatgaatggcgcttgtatagaagaagaagtaactgcgagtacggaagcgcaagttaagtaagagtgtgagttgtgggctgcatagaaaacagatgcgggcgtgtgagagaagtttagagatttaattcttacacgcgtacgcggcatttgagtatt

SEQ ID NO: 121518 - DNA, 281 bp, Arabidopsis thaliana columbia
ggggggaaccgccgccgggtgggcggcacgaggaccttttttagacgggggggggggccgccagatagacaggccggtccgcaccacggcccggacggtacgcctggatgtagtagtgacctaggggccgactgacagtttgttagtgtatcgctgactggtccccgccgcacgcacgcactagtgagacacggggggcgagaaatgttttttttttctcgggggggggggcgcacccgtccgacgccgggcgccagcgaaagaagagtagtcggcgtttg

SEQ ID NO: 121519 - DNA, 535 bp, Arabidopsis thaliana columbia
  unsure (1)..(535): unsure at all n locations
nnnnnnnnnnnnnnnnnnnnnnnnnnnnnnnnnnnnnnnnnnnnnnnnnnnnnnnnnnnnnnnnnnnnnnnnnctttttttttttttttttttcaaaaccaaccgtatatatcattaaaaaaaatgtaggaaagaaacaaaaaatccttatataattgacatttcacaccaatcaaatcaatttaaacagattcacaagtgcattacttttgcgacaaggctgaggaaccatgaccttttgttcatgatcatttctcgttaccacttggatgctttggttatttcttccatttgggttattattttgatgatccaattcgtcaagaacaactctttgcttttgaaaatgttcccatttgtcttgatatagatagaagaagacaagacaagtgacttgaactgtgaacaagattgtccaaagacttgagtctctacttaatgatgtcttcttttgataagcttgtatgcctgtgtatatgtttactatgccaactattgacactattgttccaagtatcccatgcaataagaacca

SEQ ID NO: 121520 - DNA, 549 bp, Arabidopsis thaliana columbia
  unsure (1)..(549): unsure at all n locations
agctacnnnnnnnnnnnnnnnnnnnnnnnnnnnnnnnnnnnnnnnnnnnnnnnnnnnnnnnnnnnnnnnnnccacgcgttcgcccacgcgtgcggatcattcgactcttattagtactgctacttgcatctgagtttatgaattgggacaatggatctgcagattgtgtgtgatctgatgaaaccattgttgtgtttttttgtttcatctcaagaaactagctaaagagatctgttactgggnccaaacttacgagggcccccaactttttcagtttcagtgtcaatatcaatctgctcacaacagagggtttgtggaagtccattgtttgttccttattgtaccccccacgggctatataaaaccaccttccatgcttccttttacatgccttaattggcgagacaaaccttggagggggcccttcctttggtccccaaggggagaatgaatccttgtgtttccaccaccctatggggaagattcgaaaagccttggtgtggggacattcaattctgttactcttgctggcgtgatattcccccccct

SEQ ID NO: 121521 - DNA, 556 bp, Arabidopsis thaliana columbia
  unsure (1)..(556): unsure at all n locations
gaatgtnnnnnnnnnnnnnnnnnnnnnnnnnnnnnnnnnnnnnnnnnnnnnnnnnnnnnnnnnnnnnnnnnnnnnnnnnncttttttttttttttttgcggaactgcatatttattgtgcggagttatgattacaccaaaaccatatagcatagaagatagccaaataggtttaaaaagaacaccaaattgatgtttgttttcacaaaaaggaaaaatttagacataacataacacattgagaaaagtacacaagttctattgaaaaagaatagacatgaagagctatacaaaccaaaaggcgaagaagaagaatgagaagaaaaaacaattagctcatcttaggaaaatgaaaccacaccctccaagcatcaccatcctaaccgtaataactcggagacccanaagaaaaattntaatgagaattaaaaggaaagaaaataacactacaaccaccaccaaacgaacccaccagcaagatcacattntttccagattcatgaaaaatatttaatgaacccaaactaggatgttggtgatgatgatgatgatgactc

SEQ ID NO: 121522 - DNA, 493 bp, Arabidopsis thaliana columbia
  unsure (1)..(493): unsure at all n locations
nnnnnnnnnnnnnnnnnnnnnnnnnnnnnnnnnnnnnnnnnnnnnnnnnnnnnnnnnnnnnnnnnnnnnnnnnnnnnnnnnnnccacgcgtccgcccacgcgtccgcaggttatagttgagaaatctgctgctcaaggtttacctgaaggatggatcaagaaacttgaaataacaaatagatcaggccgtaaaaccagaagagatccattcttcattgaccctaaaagtgagtatatctttcaatcctgcaaagacgcattacggtatgttgagactggcaatattggacattatcacgtaaattgaaagaaagtgatttcgaaaatgatgattccggaaaatggaaaaactgtctttcttctggagtatgtgaccaaaaaacttgaaataattgtttggaaaaagaaaaaaccatttttgttttccaaagaaattaaacgggaaaaacttattttttttttggtgaaaatttccaaaaattggaaaaagaat

SEQ ID NO: 121523 - DNA, 535 bp, Arabidopsis thaliana columbia
cagctacaatacgactcacttagggaaagctgctacgcctgcaggtaccggtccggaattcccgggtcgacccacgcgttcgcccacgcgtgcggatcattcgactctcattagtactgctacttgcatctgagtttatgaattgggacaatggatctgcagattgtgtgtgatctgatgaaaccattgttgtgtttttttgtttcatctcaagaaactagctaaagagatctgttactggctaccacaccttagaaaggccacgaacttttccagtttcagtgtcaatatcaaacctcgaaaaacacggttttggaggaaatacaggccttgttctctttgtcccaccagtgctttataaaacccgctccaatgttttcttttacattccttattggccacccaaacccttaaggggcccttttctttgcggctcattttaaaaagagccctgtgttttcgacacgccttggagagattcgaaagcttcggtgggtgccaatgcaatttggttttttttctcggctagatatta

SEQ ID NO: 121524 - DNA, 505 bp, Arabidopsis thaliana columbia
  unsure (1)..(505): unsure at all n locations
cccccccngaatttaggggaacgaccgagaggaaagaaagatagtggaaagaggagaagattttgagaatgggagaaagtgggcggacttagagcacagtaaaggcgctaaagagcgacgaagcacctgtgcacggtcaaccgacataagggagcgacgcctagcgtctacgcccgctcgcgctgcggtagaacgcgcgaattcgcggttgttcatggggccaactggcgctgccgcacagccggatattttttttcacccgcggcccgcccccangtcacgatgttgtgattatatggacggccggtacggctatgagaggaacaagcggacgggaggacgatccttcgtcttgcgtctcattgcgccctcggctcggtgccagtgcctacgacgatatcataattggtcgatctataagagagaccaccacgcccgggtggacgcgatgatacgtgtatctccgcgcccggtcggggcacatcgtacacctccatcgtgaggc

SEQ ID NO: 121525 - DNA, 378 bp, Arabidopsis thaliana columbia
  unsure (1)..(378): unsure at all n locations
cnnnnnnnnnnnnnnnnnnnnnnnnnnnnnnnnnnnnnnnnnnnnnnnnnnnnnnnnnnnnnnnnnnnnnnnnnnnnnnnnnnnnnnnnnnnnnnncgccctttttttttttnnnttttttagcgaaaatcattcatactcagtaaatttttccttacaaaacnaaaaatcagaatttccttttaactctgtcttgaaaaggtatctaccgggatatttccttcagtacttttttttacaaaaatataactttgacccatcttccataatggagtttggacccttttggaataccaaccaaataacttcttgggccttggtctaacctttattttgggggggtaaagaaaaaaccctctaggggtttttaagtccaaa

SEQ ID NO: 121526 - DNA, 583 bp, Arabidopsis thaliana columbia
ccaattaaggggaagacccacccccagcagccggcgccagacaaccacattcaaaacgggggaaagaccccaccaccacgaaaggcaagccaaagagtcgccacccccaccgcccgcaccgaacagaacacaagaggccgagcagaccgaaaaagacacaaaatagggaagaaggagggcccccccacccacacgccagacacaaaagggttttttttaagggagggaaaaaaaacccccggcccggcaaaaccggaaagaaagagaggaaagcgggagacatcggccgcccacccaaagagtacgagcgagaggagagcagagaaagagagaagaaggagagggcagcccacgcgcggagacactaacgcagagagatgagagaagggcgaacacccgccgccgcacagagggaaatgaaagaaaggatagacgccccccgagcggccgaacggcggtgaggacaaggggagggaaagataaggcgaggaaggggcggagaagaaaaacgagcgaggaaaacgagcaactaccgaagcgcggcagaggccctacgcaaggacgcatcgaggcccggacagcg

SEQ ID NO: 121527 - DNA, 587 bp, Arabidopsis thaliana columbia
ccccccccaatccggggggggaaccacaagcggcgaagcggaggaggcgcgcgaggcttttgcacggggacggattccctcgaatgacctaagcaggaagggagtcgtccatgggtctacgcgagagaccaagttaaactgtgatgcggagcgtacgggcgcgcaaaaaggtgtaccgcccaagcctacagcacgtgcggcatgccggcatactcgaggtgaacaacagacccccgaagcgggcttttttttgcgggcgtgcgcggcgggggagaatgttatagaacaaataatagaaagagtggaggtgggtagtagaaggggagcgccgcgacggcggtgaggggaccgtgtggcggcgatggacggagaatacagaagccggcagcgacaaaaataaacatacacgcagggggagacggccggcgcgacgagctccttagtttttagaaatatctcatcagaactatatcaacagcaatgagagtattagagaagcaacggatatagggcgagaaggaacctctaaatcgtatcagtacagggtgaggagactggtatattgaaagagagacacagaactgtgg

SEQ ID NO: 121528 - DNA, 433 bp, Arabidopsis thaliana columbia
  unsure (1)..(433): unsure at all n locations
cccccgccccaccacacccctttcctcgggtgagccttaaaccgactgccaatcttttcgtcctcacacctgcgcccagaacgacagaaagtggccacccccatacccccctgatcacccccaccaaacctcaccaccttgcacaccccacacagctttttttctggggggggcgcgataattatatcttttaataagaagttatatgcanatagcactcgaggcctattttaacacgtaccacgtctctaccctcgcaaccagttgtcagaatcgtctgaagccgtcccccaccccaccagagtggagatagccccattcaaaaatatacattataaataacacataaactaccccacactattacaatatactaaagaccaaacgcagaacaataagtataattgtaataaaaatataacgataaaaagac

SEQ ID NO: 121529 - DNA, 529 bp, Arabidopsis thaliana columbia
  unsure (1)..(529): unsure at all n locations
nnnnnnnnnnnnnnnnnnnnnnnnnnnnnnnnnnnnnnnnnnnnnnnnnnnnnnnnnnnnnnnnnnnnnnnnnnnnnnnnnnnnnnnnnnncctttttttttttttttttttttttgtataaagaacaattgcttgaaaagaactgacaagtagcccaagaagtacaaacatgttctaaagtttaaatccagtgctacgcaccacacttgaaccactctcatattcaccaatgggatggataagaacctctcttaaaagactctctctaatcttaccatacacgtgtccatcaccacctttgtgaacaatctcctcacctaacttaatggggggtttaaccgtctccgccggactaccatacgccgaataaacaatccccatcttaacacccacattccgcgtaacttttggcgccgtaaactaacatcccttttggccggcggggaaccaatcttacccctaataacagccataaaccacccccggaactatcaactcaatatccaattcacttatatacaaaaaacc

SEQ ID NO: 121530 - DNA, 536 bp, Arabidopsis thaliana columbia
taggtccactatagaagagctatgacgtcgcatgcacgcgtacgtaagctcggaattcggctcgagtcctcaggggaacacgtgatgaagcagccaaatccggttgaaccggtaatggatcatgctgggctagaagcttggattgagcaaatgcagctcgatcagcttgtggctcagcagaattgagagacctaaccaaagaatcacatgttcttgtctggtctctctatgtggtagataaaaacctcttttttacaggtggtggtggtagaagggtaacaagattaacaaagaagagaagagaagaaagaagatttctttgtttttggtcaattaattttcacaaaaaacagttttttttttttttatttagagaagagaagggaacaattcaagaaaaaggcttatgggaagaaaggagatgaaacaaaaccttcttgggtttctttctcccattttcaatttttttttaggggtttctttctcccattatcattattattattgttattaaaaatattatttttaatatattc

SEQ ID NO: 121531 - DNA, 528 bp, Arabidopsis thaliana columbia
  unsure (1)..(528): unsure at all n locations
cactatagaagactaggacgtggcatcgcacgcgtacgtaagcttggatcctctagagcggtcgccctttttttttttttttactgaggactaaatttctgatttaacacttgagacaaaagtgggaacatgatagtacaacaacaaagagagaaacagagttggatcacaaatcatagaggaagtgtcttaaatcacctgaaacacacataaatagacaacatctttatctaaagagatctgttactggatanaatnngaacatctttncaaggagcaccagggtgcatcaatgattcaatcttgactggagtgcaatgtggggaagggttagaaagcttcttttttgtgtcacgttggacaatgcaccaactgttggtcgaatgtccatataatttgacatgatcggcattcatattttagcgggaaaatcattcaaacattcgagattggcgaataaatcttgaacaccactccgacctcttggaaaaatggaatcatttggcttattcaaaatattgatcatcc

SEQ ID NO: 121532 - DNA, 381 bp, Arabidopsis thaliana columbia
ccccgagggggaggaaagattgcggggaaaaccagaaaaaaaaaacacagggggaacacgggacaaaagagggagggaggcgccgcgaagacgcccacacggacgcacaacgggaagaaacagaccacaaaccctttttcccggggccccccccgccaaaaaaagaagcgcccgcgcgacaaaagcgagagcccgccgaaaaaaacaccacggcaccgaggcagcacaaaacaacaaaacgaagacacgccccaccgccacaaaagaaaggaaaacgaacaaaagggcaagagagaccaagccacgccacgggaagaaccaggcagccccgccagcgaagagcaaaaaacaaggggagaacagaacacccgcgcgcagaga

SEQ ID NO: 121533 - DNA, 640 bp, Arabidopsis thaliana columbia
ccccccccattaagcggggcggacccggcgccccgggggggcggggtagcgggcggcgggggtttttggtgaccgggcggcggcccgcgtcgcggagggaggagagagcgggggtcggccggccggttgcccgtcggagcgaagagagaagttaccgagagagaatgcatcaccgatagctggagtgaggtatatcgcgggagctaagacccccccgacgaccacctagacaacacgagtgcgcccgtagattttttttgggtgggggtggtggagctggagatacggcgcgaggtgttggatgtcggttttgtacggattagtggcggccccgaccgcggcccgccgcgggggcactgatggtagggaggagagagggttatcggtaataggtgagtccccgcgccacgctacagagggcggttatcgaacgagagggctggtgactgaagcgcctgccctctcgcacgcgcagagagattgttagaagtgataggcgacacacgaggcgtggaggcgacgtcgacgtcacaggagctgaatgcgacacacggagagaatagggggggcctctaccacgtgggtccgagagctcggcgtagtacagaacacgcgggctgacacgtggggatcgtgcggg

SEQ ID NO: 121534 - DNA, 623 bp, Arabidopsis thaliana columbia
  unsure (1)..(623): unsure at all n locations
caagatacaattgccagaacataagagggacgcgaggaggggttctttttgttgacgcccccccangattttggggggagaaacacacaccgcgaggaagggggaggcgagaggaacgaggttttcgcgagagaggggaagacccccagaagggagaggggggcggggaacggaggcagcgagaacgaacaagaaagccggaaggggggcaaaacagggcggagggagcatcgaccggaggcccaagggggtgatgtggcgagggaggcgcgaggagagcgggacgtgtttttttttggggggggaggggtggataaagggggagagtacgaggagaggggggagaggaggagaagagagggaagggacacgagtggcgaggcggaatagaagcgagagcgtagaggatctaggggaagaagtgtgcggagggccgcggcacggaaacgagaagcgggaggtggcgggggggacagagaacagggcgaaagggaagcgaaaccggcaggagcgcggagacggnaatgaaaaggagcggaaagcgcaggagggcggtctcggatgatggtacgaagcgccaatttggaagggtgagggcgggcggggacggcggcggcggccac

SEQ ID NO: 121535 - DNA, 517 bp, Arabidopsis thaliana columbia
  unsure (1)..(517): unsure at all n locations
nnnnnnnnnnnnnnnnnnnnnnnnnnnnnnnnnnnnnnnnnnnnnnnnnnnnnnnnnnnnnnnnnnnnnnnnnnnnnnnnnnnnnnnnncctttttttttttttttttttttttttttttttttttttttttttttttttttttggggggaaaactttttgtccctttttttaaaaggggaatttccaaaaaggggcccccacaggttggggccctttaggttacttttaggacggggttccaccaaaaattggggggaccaaaagggaaaaaaaattcagtttccggggaaattaccaattggggggtttttgttttaaaccagggaacaaatcctttttaaaaatgggggtgaacccttggttttggcggctttttatatttntaaaaaaaaaaaaactgagggggggggcaaaagttaccaaaaaacccgggcctttaaaaaaatccttggggtcttttttttaccccaccaaaatttttgccttttttacaaaaaaccaacttaggttgtttt

SEQ ID NO: 121536 - DNA, 547 bp, Arabidopsis thaliana columbia
  unsure (1)..(547): unsure at all n locations
nnnnnnnnnnnnnnnnnnnnnnnnnnnnnnnnnnnnnnnnnnnnnnnnnnnnnnnnnnnnnnnnnnnnnnnnnnnnnnnnnnnnnnnnnnnnnnnnnnnnnnnnnnnnncctttttttttttttttttttttttttttttttttttttttttttttttttttttttttttttttttttttnacagaaaaactattttaagggatttttgttttgcccctttacacatacagaaaattttcctattaaaatgggagacccccaattccttcccaccttttttagttagaaaacggttttttttttatacaaaaaagggtttaaagtcccaaagttttttttttggtttaaaaattttttttttaaaaaaaaatttccccctggggaacttttcttccggggggggggggttgcccttttccaaggaaaggccattttttaaaccaaccccaagccttatttttggttaagaaagggcccttaaaaacaccctaaggttgggggtttggcctaaggggtaaacagggcttttggatttaacctttggga

SEQ ID NO: 121537 - DNA, 538 bp, Arabidopsis thaliana columbia
  unsure (1)..(538): unsure at all n locations
tgattattccaagcgtccnnnnnnnnnnnnnnnnnnnnnnnnnnnnnnnnnnnnnnnnnnnnnnnnnnnnnnnnnnnnnnnnnnnnnnnnnnnnnnnnnnnnnnnnnncctttttttttttttttaacttattgattattattaatatacaaaaccacccggaaaaaaaagtatatgacacaaatggttcacacaaactgtcctaatttggaactcttttctctcttaattagtcaacgatcatttcacataaacttttatcgagctactttcttggatttttcttctcatcgcatgggaagaaaaatccaagaaacttgggaaataaggaaccaaaccgtgaagagactgaagagaagaagctggtgatgatgctgtaagaaatagagattgactagatgaatgtgggaatgaaatattagtaaacggtggtaatggccaatttaacgccggaattagcggcgatggcctcatgtgattcgccggatttaggccgtgagccaagccattgccgcaagatgtggttgtgcaattcaaa

SEQ ID NO: 121538 - DNA, 526 bp, Arabidopsis thaliana columbia
  unsure (1)..(526): unsure at all n locations
nnnnnnnnnnnnnnnnnnnnnnnnnnnnnnnnnnnnnnnnnnnnnnnnnnnnnnnnnnnnnnnnnnnnnnnnnnnnnnnnnnnnnnnnnnnnnnncctttttttttttttttttttttttttttttggcctcaatagctcattatcattctcaaaagaatctaaggtagagtttattgcattctgatggccactatctaacagtagaaggctgtacagaaagaagctatagaaggggcggaacatgtgaatttttatgtttgaatctaataaattctgctgagcttaaaaaacgggacagcctttggctttgattccaggagccggggaacaggaggcaagagggcactgggtctacttaagtgccccaccatttgaggccgcgtccaacattctgtagggcgaaaaacaagacccccccatgaacgcggtccttgttttagcgttgaaaaaaaacataattgccttttgcccccatttttgggggaattgaccccaaagttctgaagatggttcctgtccccacc

SEQ ID NO: 121539 - DNA, 541 bp, Arabidopsis thaliana columbia
ttaggtgcactatagaagagctatgacgtcgcatgcacgcgtacgtaagctcggaattcggctcgagggcattcgtcagcgtaggaaggcccaccgagcgaagctctttcttttttttggccgtgccgaaaatttgatcgtatgttagttagagaggttggcgaactactacgatcaatagattccccatctatatccaatcccaacggggaatagaagcgagtcgcttccggctggcttatagtcctagtcttttagcttatgtaatggtcggccttcctacacgcacgcgcccgccggaatgcctccttgttttagttttggacgaagccaagccgatacatacaatatacgataggcgaaggaaagacccccatttattgaatagcgcctgggcaagtttgatcgaggattggagaggtactttagtaactcgactgaagggagaagtgggaagaaaaggcttgggatggatttaggagtctttgtgcgagccgtatgcggtgagagtcgcacgtacgggtacgaggggggttcgcgt

SEQ ID NO: 121540 - DNA, 541 bp, Arabidopsis thaliana columbia
  unsure (1)..(541): unsure at all n locations
cagctcnnnnnnnnnnnnnnnnnnnnnnnnnnnnnnnnnnnnnnnnnnnnnnnnnnnnnnnnnnnnnnnnnnnnnnnnnnnnnnnnnnnnnnnnnnnnncctttttttttttttttcattgttcccagggattttttgggtaatctgctcccatgctgcaaacagtcaaatctgaactcaaccttgtcgctcttctttctttcctcgcgggcaggaagcacaccagcagcgtgcggggcgggattctactgggttttttgcacttgactgggtggacagttgaccggaagagaacttcgattcgcccggccagcaggcgggcgacgtgcttatcttgtgtgacaacactacagagcgagtgactcttctaggcgggcagctgtgtgacaacactacaagggttttttttcctcgggaaacatgctatggcctcaatgcccttacgaggaagggatgagtttaactcgctctaagcccggcccgccgcggttaggaagattggcccgaatctgagcgggaccacccaccctaccctaccact

SEQ ID NO: 121541 - DNA, 434 bp, Arabidopsis thaliana columbia
ctatagaagagctatgacgtcgcacgcacgcgtacgtaagctcggaattcggctcgagcatatcgatcgagccatgtggaaacgcctactggctcatttcatcgtctcaaataccactacctctctttttcaattcttttggggaactgggtttcaaggggaccaatggtttcaaaaggcccaacaaaaaaaatttaaatattccccctttgtttttaaaaaaaaagggggtgggggaaaaaaattttgggaaaaccaatatggggggggggggagagataaacaaaaagggggtttgggccccccgtaagaaggggttttttttaaacgcgggggattttttggggggggggttttttttttttttttggggggggggggagaaagaccacttattaggccctctctttttttttctaacagaaggggggggt

SEQ ID NO: 121542 - DNA, 512 bp, Arabidopsis thaliana columbia
  unsure (1)..(512): unsure at all n locations
nnnnnnnnnnnnnnnnnnnnnnnnnnnnnnnnnnnnnnnnnnnnnnnnnnnnnnnnnnnnnnnnnnnnnnnnnnnnnnnnnnnnnnnnnncttttttttttttttttttttttttcatcgagaaggcatttttcattatttagtatccaacggcccggaaacaaagatccacctcaatattactataacaaaggcaaacgccttacaaacttataaaaactccattgatttaagggatttcgttcaacaaccatccccatataaaggttcaaggacatttggattttccaccacatgacttaatgttggcgtaacaagatcttgaaccaaattccaagcttaccgaccccgtgatgccacgtcatagttattttatagtgccacctaaattcaatttcctgggccgaaattttacaacgcccgggactgggaaaacccttgcttaacccaactaaatcctcttgcagaaaaaccccttttcccacctggccgaaaaacaaaaagggcccccc

SEQ ID NO: 121543 - DNA, 546 bp, Arabidopsis thaliana columbia
  unsure (1)..(546): unsure at all n locations
taggtgcactatagaagagctatgacgtcgcatgcacgcgtacgtaagctcggaattcggctcgaggaacatgaagatgagtacatgatcagtgaaaaggagcttcttgttaacaggttcatttcgattccaaaagacatgggaacattcaactgcggagcgtttgttgctggcatagtgaagggagttctggataacgcagggtttcctgctgtggtaacggctcattttgtacccattgaaggacaacaacgtcctcgaactactattttgatcaagtttgctgatgaggtgcttaagagagaggcacggctaagccaatgagagtactatggtcacgagtttccacgatctggaaactattggctttatgtgaactgcttgtgcaaatctgctatctgtttttggatgactatantacattttgaattgagctgcanagccattgacccgtgcattgatgtaaacaacatacatatcctcttgttacaattgcagcttatgatacaacacttttactaaaaaaacaaaaaaaagggcggccgc

SEQ ID NO: 121544 - DNA, 551 bp, Arabidopsis thaliana columbia
  unsure (1)..(551): unsure at all n locations
atgatactgccagctannnnnnnnnnnnnnnnnnnnnnnnnnnnnnnnnnnnnnnnnnnnnnnnnnnnnnnnnnnnnnnnnnnnnnnnnnnnnnnnnnnnnnnnnnnnnccttttttttttttttttttttttttttttttttggaacaggagaaattattacattatgttgtagaaacttgtggtacaaatatctgtaacgggaaaaggtgaggattctacaaccagaggaacagtagttttactttgatttgacccaacaatgtaacatcgaaaccgcattcgagcagataaaaagggtcagaactatctaaagctattaactaacatcatttctattttaagaatggtgtggagctccgtaatacattatccctggtggctggaaagttggaccttgttgagattgctgagctgagttcgactgaggaatttgaggctgttgattacctatcaaatgtggtggtggtggtggtggcggaaccccaggtggcattaacggaatgttgccaaaggcgtaagggttattcattaccggtggttttaggaac

SEQ ID NO: 121545 - DNA, 511 bp, Arabidopsis thaliana columbia
  unsure (1)..(511): unsure at all n locations
nnnnnnnnnnnnnnnnnnnnnnnnnnnnnnnnnnnnnnnnnnnnnnnnnnnnnnnnnnnnnnnnnnnnnnnnnnnnnnnnnnnnnnnnnnncctttttttttttttttgagaaaatgaatctttttgttactcatgtgttaaagtagctcaagtgtattaacactcttcattcttcaacaatcaaatcaacaaacaaataaacaataatacaattatcaatttatcactaagaagaactgtcgctttgagcaaacttatcataacattcgatttcgcatcttttctttttctttccctcatatccggttatcccaaaagagaatcctaaccctcgcgtggggcccttcccccgtatcatgaacaccaaccgccccaccgggggttttagccatttgctgaagttgcgccatcaaaacagggaatcccttataaaacatgtcctcctggttaaacatccgcccatctcagaaaaatgtggtaaggcgccccctttttctaacaaaaaaaaaa

SEQ ID NO: 121546 - DNA, 516 bp, Arabidopsis thaliana columbia
  unsure (1)..(516): unsure at all n locations
nnnnnnnnnnnnnnnnnnnnnnnnnnnnnnnnnnnnnnnnnnnnnnnnnnnnnnnnnnnnnnnnnnnnnnnnnnnnnnnnnnnnnnnnnnnnnnnnnccttttttttttttttttttttttttttttttttttttttttttttttttttttttttttttttttttttgggcccaaactttttttttttggaaaaaaattttaatcagtttcccattgaaaatagaaattgggcccccggggggggtttcccccccaaaaaaagggcccccaggggggggttttggtttttaaaaaagggcaaaaaaaaaaagtgtcctacaaaaatttttctttaaagagggggccaaaacccaattttcgttcaaaaaaaaaagttatcccttttttgaataaccaaagtttttttttttctggggcataaactccgggttaaactttttgaggctttccatgatccccgggtttttattttttggtgggagaattgttggctcaaaaggaacaccccttttttt

SEQ ID NO: 121547 - DNA, 553 bp, Arabidopsis thaliana columbia
taggtgcaactatagaagagctatgacgtcgcatgcacgcgtacgtaagctcggaattcggctcgaggccagtcgctgagcgatgctaacataggagagatcattgcagttctgctgtaacgacgatactgcgctttctgggagacgaggagattcaccagaacaggtaccaggacgagcgctcctttagcagctacaagaaggttcatgatgactacgggctagccgcataccacagaagagactccagtctcttgaaacacagcttataccgtatcttgaccggactgaaaacagcctggctcatactcggagatgaccactcttccttaaacgggagtctacgcgatatccaaaggagcgtacattcgtctgacacgtaacgttactgagcaaaaatcaacggttcatacggagaatcctccatagcctgctgacgttggataaggccagcctttctgacttatcatggagatgtctcgaatctgtctctacgactagctctgttcatgacagacggtgttaacgagatggctgacgatctagagcattg

SEQ ID NO: 121548 - DNA, 520 bp, Arabidopsis thaliana columbia
  unsure (1)..(520): unsure at all n locations
cagctannnnnnnnnnnnnnnnnnnnnnnnnnnnnnnnnnnnnnnnnnnnnnnnnnnnnnnnnnnnnnnnnnnnnnnnnnnnnnnnnnnnnnnnnnnnccttttttttttttttttttttttttttttaancttcaaactgaagcaaatacattttttattttacaacacggaaaaagtttcgtttatgtcgcaaatatgattaatcaatccccactcgaaatgatcaaaagaaacccgggggggggttgccacccaaataactgctcccacaggtggtttttttgctaatgcaacacccttaacaaagctagctttcaattctaccttaagagcttagagggctttctgaccaaactcaggcaaaccatgaaagggtgactcattttcagtttccaaaccgttttttcctttcttaacccgggctgccaagaaaggtatatcagtctaagcctatttcccagactagcacttttagacgtcgccgtctccatcaagaaaagaaaaaatttttttttttt

SEQ ID NO: 121549 - DNA, 553 bp, Arabidopsis thaliana columbia
ttaggtagcactatagaagagctatgacgtcgcatgcacgcgtacgtaagctcggaattcggctcgagctcgaaagagatgaagtatttgtcccaaagcagaaatcagcaatcaagtggtacgggaaatacctcaacaaccctcttggacgcatcatgatgttaaccgtccagtttgtcctcgggtggcccttgtacttagcctttaacgtctctggcagaccgtatgacgggttcgcttgccatttcttccccaacgctcccatctacaatgaccgagaacgcctccagatatacctctctgatgcgggtattctagccgtctgttttggtctttaccgttacgctgctgcacaagggatggcctcgatgatctgcctctacggagtaccgcttctgatagtgaatgcgttcctcgtcttgatcacttacttgcagcacactcatccctcgttgcctcactacgattcatcagagtgggactggctcaggggagctttggctaccgtagacagagactacggaatcttgaacaaggtgttccacaacattac

SEQ ID NO: 121550 - DNA, 527 bp, Arabidopsis thaliana columbia
  unsure (1)..(527): unsure at all n locations
nnnnnnnnnnnnnnnnnnnnnnnnnnnnnnnnnnnnnnnnnnnnnnnnnnnnnnnnnnnnnnnnnnnnnnnnnnnnnnnnnnnnnnnnnnnnnnnnnnnncctttttttttttttttgaaaaggggaaaaaaaaagagaggtgtgttccaatcttgatacaaagtaatgggtacaaacgaataaattttggataggcggatatacaataagtgaatacttgtggggtggattattacaggggggggtgaaatactccacccccacagtcacaggattttctttttttgatgggggattggatatctcccctctcccctcgagccaaatttcgaattttccgcccgcccgcgcgcgaactttatactcttttttaagcgcaccctaaaacacactgccggggcccctgtttttataacggtgcgaacttagaaaaacccttgacttctcccaatattaacggtctgagaacccaaactcctcttctcccccgtggggaataaacaaaaaccccccgctcctttttctt

SEQ ID NO: 121551 - DNA, 561 bp, Arabidopsis thaliana columbia
gggggagaacaagacgcccgctgggggaggtatggagattacacccctttgtgctggggggagggggcccctcaagaaaaaagaaaagagaaatagatggacggccggacgccgacaaggagagaagccaagggacgagagacgtggacgagggagaagaaggaatgagaaggacttgagacgccgtccacgggggtagagcgggcggagtatttttaagggggggggagagaaacggaccggcgcctcggtaaagaaaaatagagtgtaaattttggcctccccgaacgccaacgagaagggagggccccgacgccgaaagaggaatgagtgaaaggggaaggcttggcgataacatgacgggattaggcaggagagataggaatagccagagctacaaaagaaattaatgttttatttacggtcggtgccggcggtggtacaggaggaagggagactgatgtatgacgaatagtcagacgcatcgagaagtgagagtaaaagagtcgacgcagggggaacgtgggaaagaacagataaaagaggagaacaacttacccc

SEQ ID NO: 121552 - DNA, 542 bp, Arabidopsis thaliana columbia
  unsure (1)..(542): unsure at all n locations
nnnnnnnnnnnnnnnnnnnnnnnnnnnnnnnnnnnnnnnnnnnnnnnnnnnnnnnnnnnnnnnnnnnnnnnnnnnnnnnnnnnnnnnnnncctttttttttttttttttttttttttttttttttttttttttttttttttttttttgggccacacaacctttgtaccaccaaggacttgatggcctgtaatattgactgctagtaaatatgggtggggtttttacatcaggggccaagattcgagacgaaagacaaatttttagaaataatacactgatccacagggtataagaagcagtaagtaacatttaatgctggaaaaaggggggtgtgattttccaatgggaccaaacttttggcagaaaggaaaaatgccccttcattttataaaaggggctttttttggtttgggattcaaaattcccccgtttattttttggcggcttttttgagaagggaaaattgaaatagggtcttgttttttttttttggaggtttctttttgagattcgctttttcggggaagggggggcccatttt

SEQ ID NO: 121553 - DNA, 344 bp, Arabidopsis thaliana columbia
ggggggggggtagggattttttggtgactgcgcccccgaaaataagggggaggaaccgcgcccggatggaagaagggagagactaactttttctaggggggtggggggcccggagaaataatattaatgttttatgtgtggagccggccgacttatctgcgtggtcgtacataaattcagcggtgttgccggtgaatattaattatatatttttggagtgtggcaagggccctgcacgggagattcacggggcagcggtttttttttgggggggggggcagggccgaggtgaaaccgcaggagaaaaaagagttcttgatgtgttgttgaccccggcgcaggcc

SEQ ID NO: 121554 - DNA, 546 bp, Arabidopsis thaliana columbia
ttaggtgccactatagaagagctatgacgtcgcatgcacgcgtacgtaagctcggaattcggctcgagtgcagaggcatttgcttgcattgagagagagttggatttgtcgctagagaccattttctcgtctgtatctcctgagccaatcgcagcagctagtcttggccaggtttacaaagctcagctgaggtattcaggtcaggttgttgctgtcaaagttcaacgccctgggatcgaagaagccattggccttgatttttaccttattagaggagttgggaaactcattaacaagtatgtagacttcatcactaccgatgtccttacccttatcgatgagttcgcctgcagagtttatcaggagctaaactatgtccaggaggcccaaaatgccagaaggtttaaaaaattgtatgcagataaagcagatgttcttgtgcctgatatattctgggattacacgagccgcaaggtgctaacaatggaatgggttgagggaactaaactgaatgagcaacttgccattgagagtcagggattgaag

SEQ ID NO: 121555 - DNA, 469 bp, Arabidopsis thaliana columbia
  unsure (1)..(469): unsure at all n locations
ggggtagtatttgccaggtannnnnnnnnnnnnnnnnnnnnnnnnnnnnnnnnnnnnnnnnnnnnnnnnnnnnnnnnnnnnnnnnnnnnnnnnnnnnnnnnnnnnnnnnnnnnccttttttttttttttttagctaaaactttcaagcttaaaatggagaggacaactaaaattacaaaaggaaaaaacaaaaacccactaaaaaagaacacgaaatagttagaaagtcccacaactacaaaaaaaataacgtgggggatttgattgcctataagactcatgaattttatatataatacatacaggttcactacttgggccttcaactctccataaatgggtaaactcctgccaccaagaaaatgaacctagcggggagagctggctcaggcttctatattcaagtccttaaagaatcgcgccatgtgttggaatatggggaggaccgtgtgtcttcacaaaccaattg

SEQ ID NO: 121556 - DNA, 501 bp, Arabidopsis thaliana columbia
  unsure (1)..(501): unsure at all n locations
ccccctcccccaacttttaacgaacgatagagcctcctccattccacctcccgcaccctcctcttcctcccctctcactctttctcccccccacacccctcggggcgggagtagcttccacttatcctacaataaaaaacaccacttctcaatcacctgtgttcgccgcgtccctctccctctccactctcttctctgtttattttaatatattaccctccaccacctcactcaacaacaccaactgttatcattatactactttccccctcccccacccccctccctccctcccagtctttcttttactatttctaccctccactttttccctccgcgggggggtatagtatataaattttttttctctcaccctgccccccccaccaacattttatcattactttntcctctctacctccctccatctctcctcctactcctcttcctctctctactccccccacccctcccctgctccctccccgtcctcccatcgcc

SEQ ID NO: 121557 - DNA, 541 bp, Arabidopsis thaliana columbia
ttaggtgccactatagaagagctatgacgtcgcatgcacgcgtacgtaagctcggaattcggctcgaggctttggattccatcacagaggttgtgcaaactataagacatcgtaagtctcaagttcaggaatccgtgagcaatgacactatggtaaagcctgatagttctactacacctacacctggtagacaaacaagacagtcagatgaggcttcaaagtctttcaggacacctggacgtgtttctactccaacggggtcaaagctcaaaagctcgaataacaggcatgaagatcttttacgtatggaacccgaagaattgatgttgagcacagaagtaatagggcagagggacagttgggacctatcggatagagaaagggatatacgccaagggattgatctagctaccactcttgagcgcatagagaagaatttcgtcatcagtgatcctcgtctccctgataatcccattatctttgcatcagacagctttcttgaattgacagagtattcacgcgaggaaatattggggagaaa

SEQ ID NO: 121558 - DNA, 548 bp, Arabidopsis thaliana columbia
  unsure (1)..(548): unsure at all n locations
tagtatttnnnnnnnnnnnnnnnnnnnnnnnnnnnnnnnnnnnnnnnnnnnnnnnnnnnnnnnnnnnnnnnnnnnnnnnnnnnnnnnnnnnnnnnnnnnnnnnnnnnnnncctttnttttttttttttttttttttttttattggaaagcaagcttttatataattgaagaatattcatatatacaacgtttcagactaattacaaattacaaattacaaatcacacgctattttgaacactttattcagggggacacactaaaaagggaccaaagccgtttattttttacaaatcagcataatgcatctttaaatcaaaatgcattttacattacacgggtaattattattgggttatatcataatatatacaagaggcgttacaagtttaccgagtggtttgttttggttaaatgtggggcatgagcttgatcaccctgggccattaactttgaatggaacaaaaactacaaaacaaggggttaaacttttttttaaaactttttttttaaatgctgcccctcttccttttttttaatgtggggtg

SEQ ID NO: 121559 - DNA, 526 bp, Arabidopsis thaliana columbia
ttaggagcactatagaagatctatgacgtcgcctgcacgcgtacgtaagctcggaattcggctcgagtccacatcagaacccatttgtctttgagtgagagaatcagctttcagagaaaaaagtatacctacagagagagttatggcggagagtggtggacgaaggatcggagtggcggtggatttctcggactgcagtaagaaggctctgagctgggcgatcgataacgtggttcgggagggagatcatctgatcctaatcactattgctcacgatatgaattacgaggaaggcgagatgcagctctgggagaccgttggatcaccttttattcctatgagtgaattctctgacgctgctgtgatgaaaaagtatgcattgaagccagatgctgaaacccttgacattgtcaatactgccgctaggaagaaaacgattacagggggtgatgaagatatattggggagatcctccggagaagatttgggcagcagctgaacagattcctcttttaagccttgggat

SEQ ID NO: 121560 - DNA, 139 bp, Arabidopsis thaliana columbia
cccccgcccaaggggaagaaagcagaaaagggatttttaagggcgggcgccgaaaaccccactgccgcaacccgccttagcacccatatgcgtcaagcactaacccgtcaccctgcgagctcccgttcctttgacactc

SEQ ID NO: 121561 - DNA, 506 bp, Arabidopsis thaliana columbia
taggtgacactatagaagagctatgacgtcgcatcgcacgcgtacgtaagctcggaattcggctcgagatcggatccactttcttcatcctccagccttctctctctcgtttaggcgccgctgagtccacctcgttaatcaccagatctgtttcctacgccgtcaccgattccccgccttccaggtcgacttttaattccggaggcggcggaggtagaaccggtcgtgttcccgtcggtgtgggacggaagagactgaggattgttgtcaccggtggagctggtttcggcggtagtcatcttgttgataagcttatcggtaggggagatgaagtgatcgtgattgataccttctttactgggaggaaggagaattgggttcatctattctcgaatcctaggtttgagctaattcgacacgatgttgttgagccatcctccttgaggcgatcagattaccatttacctggccaggttcactgtttattaaagtttatccagccagac

SEQ ID NO: 121562 - DNA, 545 bp, Arabidopsis thaliana columbia
  unsure (1)..(545): unsure at all n locations
atgatactgccagctannnnnnnnnnnnnnnnnnnnnnnnnnnnnnnnnnnnnnnnnnnnnnnnnnnnnnnnnnnnnnnnnnnnnnnnnnnnnnnnnnnnnnnnnnnnnncctttttttttttttttttttttttttttttttttttttttttttttttttttttttttttttgggggggaaccgggcgaaattttttttcaatcccttcccaataatattgagcctaggggggaagggttttttaaagggggccaagaaaaaaactttggtttatataaaaagaattctgggttttggggatagacccaaaaaaaaaaaacggggggaacaaggggtttttccgggctttttgaaaaagaactttttctttttttaaattcaaggggaaggagggtttttccttttttttttgggggagctgcttaaaaaaactttactctttgttttgtaaaaaattggggcggaggagtatatactgtggggggggggcctcttctttaaaaattttttgtgttcccaaaaaaaaaggttctttttgttttt

SEQ ID NO: 121563 - DNA, 288 bp, Arabidopsis thaliana columbia
gcggggggaaaccagcccaccacagggagcgggccggacgggaggaggggttttttaccgcgggcgcgagggcgcccgtgcgtcgagaaaggtgggagaacgcgaaaaaagcgaagtgaaagctatataccgcgactcggacacgcagccccggcagaagccgcacatacagcaggaattagagcgcgcgccccccgcgccatccacggcgctagcatatagtgaaagaacgtctgccggccaccccccacgagcaccttttttttgactggggggggtagcagcgac

SEQ ID NO: 121564 - DNA, 540 bp, Arabidopsis thaliana columbia
ttaggtgccactatagaagagctatgacgtcgcatgcacgcgtacgtaagctcggaattcggctcgagatcagttcatcttcttcttcttcttctgatcaaccatggctgctgctataagtgctgcagtctctttaccttcctccaagtcatcctctctcctcaccaaaatctcctctgtatcccctcaaaggattttcctcaagaagagcacagtgtgttacagaagagttgtgtcagtgagaggctcaggtgacaacagatactaccgaggcaccaccagttaaagtagtcaaggagtctaagaaacaggaagaagggattgttgtcaacaaattcaaacctaagaacccttacactggtcgctgccttttgaacaccaagatcaccggtgatgacgctcccggtgagacttggcacattgtcttcaccaccgaaggtgaggttccgtatagagaaggacaatcgataggagtgattccagagggaatagacaagaacgggaagccgcacaagctcaggctttactctatcgcgagtg

SEQ ID NO: 121565 - DNA, 673 bp, Arabidopsis thaliana columbia
cacgctctctcacatacaaaccaaccgccgaagaggcagcttcttagggaccgaacgaacaacattttaaacataaaaccaacagggcgaacagagaggctacggaggccactttattcgcaaagggggagagacaacaccgccagcaatattggatagtgtgattagtttatacgagtcaaccctctatgcctccaggcccaacccagcatcacgttataagggtagccagatagaccatagatagccacagccggagggacgccagtcctgaccatacccgtcgcacgcgacaaccccgggcgccgtgttttctggtaggggagcacgaaaccagcattcgtgaaccgcgatcattgcagaacgggcacgcagcgtagcgagtatctcatacatccgcatgcccagaacaccagatacggacatactgcagcgccatgtctcccctatgtcccacaaaaggatcgccggataacaacccgaccgaagatgtatgccctaccgtgatagcaggttaccttgagccgcgcggcatgtaaaacgacctctcgtccgatccccgactcgctctatctccatttcccccccgctcacacaatacccaccgcaagatagtacgtacccgcatgctcccgccgactatgcccatacaattgtacattattgtatgcag

SEQ ID NO: 121566 - DNA, 374 bp, Arabidopsis thaliana columbia
  unsure (1)..(374): unsure at all n locations
gaaggtttgaggaagattgagaactgtcgatcggtctcaggcaacgcgactatagtactcttttccccacaaaggccgtaagcccaacgaagtgagtgagggacgaggtgggatgagttgggagggagtcaacgagccgcgcgccgcgacgactgccacaaatatagaatagaagttggcgcgcgcctcgtcgccacccagagtaaaatggagtatgatgacagggggacgcgctcaaagaactcctaggacattatgtttttatgtgtgtgagatcagaccccgcgccccgncacccgtgggtgtgtgagtaattgtgtgagtgataacgagatactcgtgctgctcccaatatagttattaatttaggggta

SEQ ID NO: 121567 - DNA, 543 bp, Arabidopsis thaliana columbia
ggtgcaactatagaagactatgacgtcgcatgcacgcgtacgtaagctcggaattcggctcgaggttctccaactcgtccaggctgatgtcgaacaagaagagatatgagaagataatcttttttagcttttgaaatagccaagattctccaaggagagttcaatgatgagagaacctatcgcttctcttctcatatcccttattgaaaaccaactcgtccaaactgatttcttggggggagagaacaaaaagggctactcaaaaaacattaattgtggtaatgactgtatggcacggttctggcttttttggaggccaaattgtttccccaaagcgttcgcgtactagctgatccgtggccctttttgcgcatcagttaacatcctgatctttctataagggccatttggtacgtttccctggcgctcggcgggggtaccccgcaattgtcattttgagaactcccgcttctatccggggggagtaaagggcccctgtcgcgtggtaaccgtcaattttggggaaataattggaccaattta

SEQ ID NO: 121568 - DNA, 533 bp, Arabidopsis thaliana columbia
  unsure (1)..(533): unsure at all n locations
ccnnnnnnnnnnnnnnnnnnnnnnnnnnnnnnnnnnnnnnnnnnnnnnnnnnnnnnnnnnnnnnnnnnnnnnnnnnnnnnnnnnnnnnnnnnnnnnncctttttttttttttttttttttttttttttttttttttttttttttttttttttagaaaaactttggagacaaacaaaaaaccccgttaaacaacataggagcccccaaaattagcgaaaaaaggttttgaaaaaagggggggaaaaaattatttacccattttaaaaggaaacttaaaacggggacaaaacccccctgaacaccgtgccaaaaagaggggggaaaaaaaggattttaaaaaaaactttgggaaaggagaaacggcaaggaagaccacccttgaggaaaaaaatcgaagaaacaaccggaaccaactcaaaaccacaaggcaaaactcgtccttttcacggggggtttagggaccacattaaggggcccccttgggagggcccatttgggaaaacctctgtttgaaaacgtgggggggaaaacac

SEQ ID NO: 121569 - DNA, 336 bp, Arabidopsis thaliana columbia
aggccacgaaggagagaagcagggcacaagcacgaacttttagaacgggggggagggggcccggagaaaaatgaggagggaggtggagaaagagaggagcaggcgaggggtggagggagcagggagtcgcggccacgcgagcccgaggaaagagaaaggatgggcgggcgcgcgccggggggcgagcgtctgagggaagaagagtgagaggcagacgagacggaacgcgcttttttttacgagggggggggaaagtaagcggaagggacatgggcgagaagggaaacacaggaggtgatagacgggttcgagcgagaccgcgaccacgcggcgcca

SEQ ID NO: 121570 - DNA, 404 bp, Arabidopsis thaliana columbia
ggaggaagggagaaagagagggaacaggagggagggaggaaagagagggacaggcggacagcagaccgaggaagaaggagaaggaggcagggaggagaaagaaaaagaggcagcgagacgaacgacgcggcaccaggcaaaaagaacggcgcgcggagacggaggagggaggacagcggaggaggggcgagaaaggcgaggcgggggggggaagaagaaaacggtacagagagcgccagggggcagaggagagggcggaagggcgttacaaggcgaagagagcggacacaaggacaaccgagcgcgaagcaaaacaacgacagacagagaggagagagacggcgagagcgagaacacgaagcagaagaacgagcagacagcggaccagacgccccgaccagcgg

SEQ ID NO: 121571 - DNA, 228 bp, Arabidopsis thaliana columbia
cccgagaatttataggcgggggggcatagtggcagataatagaggcgcatgtctggcaggggatgtgttttgtgagcagggggcggggggcccgtgtgtatgagggatggaatagtgagtgagttgatgctgacaggattgtgtgaggagtaacgacccgccgcgccaccgcgcccgcgcgcttcacgaatgttgtatatatggctctgcggcgacgttcaggggcac

SEQ ID NO: 121572 - DNA, 508 bp, Arabidopsis thaliana columbia
ccagacaccgaaaccactagggccctacggggacagaccagacagcggaaagagaggcggagggcgccgaagcaggatatcagcgctcaaggacgcggaacgagacagaaaataccacaggaggagcaggatagaagcgcagaagacattttttcgggaggacgagcaggacgcagacggactgacccccgaacaaagaaggcaagcataaaaatgaggtcggacaggacaagcatagcgctcacagagccccccaccggatagcccgaaagggacgccgggtccgcgccagagacggcaccgcagtcgcccggacgcgacgcgcacaaaccgatcccgcccccggagagccgacgcgcaatcgcagcgacgaaccaccagaaaaaacaaagcacgccgaaaggaaccccagaggcaccgcgacacaacaggcgacgatactcgaagggagggcgcgcggcgcgaggaccgaacactaataggacacgcgcgctagctagcgggccac

SEQ ID NO: 121573 - DNA, 501 bp, Arabidopsis thaliana columbia
  unsure (1)..(501): unsure at all n locations
nnnnnnnnnnnnnnnnnnnnnnnnnnnnnnnnnnnnnnnnnnnnnnnnnnnnnnnnnnnnnnnnnnnnnnnnnnnnnnnnnnnnnnnnnnnnnnnnnnnnnnnnnnncctttttttttttttttttttctgaaaaaaaattcctcttacttagccaaaaacataggagatttttctttttctcatctactaaagaaaacattaattattttccggcaatgtaaaatacaaattatgaaaagaagaaaaaaatctaaacgtccaccaccggtggagctaggttaagatccaggtttagttctcttctcggttcaacttttacggtttctcgaataccaatactcaactcgatattaaccggatcaaaccgaaccggacaaacccgagaaagctctgcttttaacgaagcagctcttgacggatcgaagaaaaaaccagcagaagcatacccaccgacgactttacgctcccgggggcatgcaaacggaaatctctgacgcgt

SEQ ID NO: 121574 - DNA, 174 bp, Arabidopsis thaliana columbia
ttgggaactcaccccccaggaggattctagacgaagagaaacatgagctcagagtcgaggcgccggcggcggcggaggagctagattttctcggcacgcctaccgaaacaccgcagaggcgtctgggatgagagagaggacgttgatcgagcgccgagaagggaccacggggga

SEQ ID NO: 121575 - DNA, 536 bp, Arabidopsis thaliana columbia
  unsure (1)..(536): unsure at all n locations
ttttccagctacnnnnnnnnnnnnnnnnnnnnnnnnnnnnnnnnnnnnnnnnnnnnnnnnnnnnnnnnnnnnnnnnnnnnnnnnnnnnnnnnnnnnnnnnnnnccttttttttttttttttttttttattatttcgagttctttaatttttttctttgggcccaaaaataggcaacttttttttttcccttgcccagaatttttcctacaaagaggatttactcaaaaaaaatttttttccggaggagctttaaggtttatggctcccataactaaaagaatttgcttcaaaaaataagagctttttcaccaaaccggatggtttttccaacaccccccctaaaaaaacctccccacactagtattacaatttaaaaaaaaaggggcccaaaaggaaaacctccccctcccaaggggaaaacctttctttcccaaagaaattggtggttccccccaaaaaaatccaaaaatttttattcttttttgaaaaaatttttttttcatttttgtaacccccttggagtggggggggggag

SEQ ID NO: 121576 - DNA, 523 bp, Arabidopsis thaliana columbia
  unsure (1)..(523): unsure at all n locations
gctcnnnnnnnnnnnnnnnnnnnnnnnnnnnnnnnnnnnnnnnnnnnnnnnnnnnnnnnnnnnnnnnnnnnnnnnnnnnnnnnnnnnnnnnnnnnnncctttttttttttttttagtaatattgaatttatatctaacggaaaaaaagaatcgaacaatttctgataagttttaaaataaaaatgataagtcgcaatgcataacttcagacgtttgcggaatattaccataaaaagagaggaagtttgtttggaaaaactaaagagctccttaagctgagagacttgtatcaccaacagagttgttatccatcttaatcttcttaggtggagggtcggattcttcttcttcttcttcagaaatgtttgatgactccgcaacttcagcctcttcctcactctttttaaaattctctattatctccatcatttctcttgtcacctgcgggttttggagaaactcggagagatcggttgcccagaagggccaggtcatgatgtttttctttgcacgagtttacccc

SEQ ID NO: 121577 - DNA, 509 bp, Arabidopsis thaliana columbia
  unsure (1)..(509): unsure at all n locations
nnnnnnnnnnnnnnnnnnnnnnnnnnnnnnnnnnnnnnnnnnnnnnnnnnnnnnnnnnnnnnnnnnnnnnnnnnnnnnnnnnnnnnnnnnnnnnnnccttttttttttttttttttttgctgaaggagatcaaagagattatccttctaccgatgtacgttgagcgcatcgaaaatgatacaaaagaagctgcacgtcgcaagcatggaaaccgtaaaggctaaggagtgatacagggatttggttttggtatctaacagtaatcaaaattctctttggtttaaactttaaagaaagttatttggatttagagttcgatatttcccgactatctactactgctaaatccgttgcgttttgggggccaaacatttgttacttgggatcaagttttaagattcttaacgcgaaaaaatgagttaaatttggccgggccttttgcttggattctttcctactgcacttgcacccaggaaaaaactttggggctgcgaaacgcttttcccttt

SEQ ID NO: 121578 - DNA, 402 bp, Arabidopsis thaliana columbia
aagggagaagaggaaagaacagaccagccgccgaaagagagggaggcgccgcgccgcaggcacgcgaaagaacagaagagaaacgagaagagccgacccgaagaggcggggggagagaagacacgcgcgccccggccttttttcggggggggagaaaaaggaaggcccgcccccccaaccggagagagaaaaaaggccgaaaacccaaccggccggcgagaaggaaaaaaagggacgaaacaccgggcagcccacagaaacgccccgcaggacccgaacaaacgcgcgcagagcccgagcagcgcacaccaagagggaacccacggcccgcagggcagacgcaagaaagataacccacgccacaccacagaacccggccgcagaacgaaaaaggagcgcggc

SEQ ID NO: 121579 - DNA, 540 bp, Arabidopsis thaliana columbia
  unsure (1)..(540): unsure at all n locations
nnnnnnnnnnnnnnnnnnnnnnnnnnnnnnnnnnnnnnnnnnnnnnnnnnnnnnnnnnnnnnnnnnnnnnnnnnnnnnnnnnnnnnnnnnncctttttttttttttttttttttttttttaatcataaaagagaatctttgaaattagaaaagattgattttgctcacccccaaaaaccaccattaaagtttttacaggtttcaaatgcatgacatttttgttctaaaaggggggcccaccctgttatgtaattttacaaactagaaaacaaattattttccaaagatgaagtttcctccacacacaccgggggttcactggccaaagttttttccgctatctgttttcttgacaattttcaaaagccccttgtttgtccgggttgaacaaaaaattttcatttgtaaccccctgggagaaaaaaaaacccactttttccaatcccccttaaaaaaccggccaattttgtctatgccgggagaaaatttacggatccccaaaaatcttctttccccggaaaacccccaaccattattact

SEQ ID NO: 121580 - DNA, 474 bp, Arabidopsis thaliana columbia
  unsure (1)..(474): unsure at all n locations
nnnnnnnnnnnnnnnnnnnnnnnnnnnnnnnnnnnnnnnnnnnnnnnnnnnnnnnnnnnnnnnnnnnnnnnnnnnnnnnnnnnnnnnnnnnnnnnnnnnncctttttttttttttttttttttggactaaccataaacaactgaaccatacagctataaatcagcaactgacaaaaatcaattggacaagacatgggtttatgttcggtttacagagaaagaatcagtcagcttcttgaaggccatccaaaacaacagaaccaaccaacaaaacaacccctgtaagcgcaagagcaccggccaaaaccgcctgagcaaccactagagtagttgagtcatccgggatcaacaccacggntacaatagcagccgtgagagctggtaatgcacncgaggctaaaaccgcaggcgatgttccagctaagttctcaaggagactgagaagaccaaggcctttgttttggaaaaaattta

SEQ ID NO: 121581 - DNA, 551 bp, Arabidopsis thaliana columbia
ttaggtgcactatagaagagcttgacgtcgcatcgccgcgtacgtaagctcggaattcggctcgaggtgattccaccagcagggacatacacttactgggcagacaattacacactctttgttctcgagatggctctgatgggattcgctgagcaccggaggttacaggactggtacaacccaggatctatgggaaaacagtacttcttggggttagagaagggtttggccggttcaggtgacccggcttaccccggtggacctttcttcaaccctcttgggtttgggaaagatgagaagtcactgaaggagttgaaactcaaggaggtcaagaacggtagactggctatgctcgccatccttggttactttatccaaggactagtgaccggtgtgggaccttatcagaacctgcttgatcactggggtgatcccggaaacaaccacgtcttgaccagcctcaagttccactgaggtgatcataatctcatggggttatatggctcttgcatcgaacaatatttccaattttcgctaccattgggcttttt

SEQ ID NO: 121582 - DNA, 599 bp, Arabidopsis thaliana columbia
  unsure (1)..(599): unsure at all n locations
gccgggggggggttttttttgtaacccggccccnggggtttnggggggggaaacaaacccgcacacgcgagcagaggaggggaaaggggagtttcgagggggggacgaaaaaccccccaagcgacaacaaaggcgaggaaagaagaggagaaggaagcaagcagagccacccacgcaccaccgccgacccgcgggaaccgagacagcgaagaacacaaggcgcgagcacgagaggccgagacagaagcgaggagaacgcgagcagaaagaacaacatttttttattaaagggggcgaaaagaacgaaagaacaaacggagggaccaagagaagagaagaccaggagcgacagaccaagagagacgggagaaagggcccgggagcaggcagcggaaccggacccgaaccaggcgaaccgcagccgagaaccagagagacaagacacaagagacgccacgcagagcgaaccacaaccccagcgcacagaacagagccaagacagcacgcaaaacaaacgccccgagcgccagagggaggagaccggcaggaaagagagagagagcaggcgcgaggacagacacacaaaaaaaaagcaaaca

SEQ ID NO: 121583 - DNA, 507 bp, Arabidopsis thaliana columbia
  unsure (1)..(507): unsure at all n locations
catannnnnnnnnnnnnnnnnnnnnnnnnnnnnnnnnnnnnnnnnnnnnnnnnnnnnnnnnnnnnnnnnnnnnnnnnnnnnnnnnnnnnnnnnnnnncctttttttttttttttgaaacaactaaataagccatttattaatataaaaatctacagagaaattatatgaaaagaagaaacaagtttctgtgtccaaacctatggttataacatgatacattgagtgatttttgagaaaagaaagatacagttccacagtagtataaaaaggccgtatagaaggaaaaaaaaaactccctaagtctgtctccttgtgacccaagaaatcgagtgtaagcttcttggagtcttcttgccagtaatgttatcagagaggaggatgatcttcttctggtgtctgtggtggaaccggtttccaaccaggtttctcgtcccaatacatatcgaantaaatgtggcctggagtcttgttctcctcacaacaccatattcccacatatcttttta

SEQ ID NO: 121584 - DNA, 501 bp, Arabidopsis thaliana columbia
  unsure (1)..(501): unsure at all n locations
nnnnnnnnnnnnnnnnnnnnnnnnnnnnnnnnnnnnnnnnnnnnnnnnnnnnnnnnnnnnnnnnnnnnnnnnnnnnnnnnnnnnnnnnnncctttttttttttggtatattttttatggtttttgacctttttatttgccaccaagaaggcttgtttgtttgtttttttaattgactcacacaacatttttaaacacaaccaataataccaagcttagcatttctccggactttttttttgaagcagcaacttgtcaaggaggagaagaaaaaagaactaaagggtttttatttattcgtttaaaaaccaaccgggggtttttttcctacaaaattttgtggcacatccacttgtgtcccttgcgggggcacaaggggtgtgaactccgggtctgtggagaggtgttctcaggtggaagcttttcggcagaaaaaccatatgggttaactgtgggaggggggggccaattcattggggggaactgggcttggccaatgggg

SEQ ID NO: 121585 - DNA, 536 bp, Arabidopsis thaliana columbia
  unsure (1)..(536): unsure at all n locations
atgatttgccnnnnnnnnnnnnnnnnnnnnnnnnnnnnnnnnnnnnnnnnnnnnnnnnnnnnnnnnnnnnnnnnnnnnnnnnnnnnnnnnnnnnnnnnnnnnnnnnccttttttttttttttttttttttttttttttttttttttttaaaaaacagaacagtccacgttgtttaggaaatgcaagtctgaaatttatatacaacacatcacttatatacaacaaagcatagataaggtaacattatccatcgacgaggagagggtaacatataatatatttacacagaaaatgtaactaggaaagtgttgattggagttaggctgcaccaaaaacatcaaagtgtttttgttctaagttaagggggaaaatggattttacccgacctttgttgggtggccccttgggaggttccttttggacattttcattccaaaggcagagccccgagggcttgggattgggattccaaaggggtaggaaatcccccctttgttatggggggaaattgttctttttttttttaccaatttttt

SEQ ID NO: 121586 - DNA, 535 bp, Arabidopsis thaliana columbia
gggggtggggggaaaccccccccacctacaaacaaactcatgtgggtgttatccttcaccgcctactttcctatcacagatccgaagacggacagattcgtgaaacctattctagaggacgggcaagctcaacgtcccatacgcagggcaaacccacgggaacgacaccacgcgctttcttccatttggggggtggggacaccatcactgctgtgatcataatgcaaaaaaaaaacagccttacacaggaaaacgagtgcgagcaacaggaaccaccccccccctcatacaatcgagaaatcaacacgaatacgagagcagaaaagcagcttataccatcacgacgtaatgcctgtcgaccgccacatctcaagtccagatatccattgccacatatacccaatactttgcaatcaacaaatagacatagctcatttgccccggtaggatgatatcccataatatagtgacaatataaccgcgtgagccgacgcgccgaaaccatcatattttcaataagcataatacgcatgat

SEQ ID NO: 121587 - DNA, 503 bp, Arabidopsis thaliana columbia
  unsure (1)..(503): unsure at all n locations
gatttttccagctannnnnnnnnnnnnnnnnnnnnnnnnnnnnnnnnnnnnnnnnnnnnnnnnnnnnnnnnnnnnnnnnnnnnnnnnnnnnnnnnnnnnnnnnnnnncctttnttttttttttttttttttttttttttttttttttttttttggcccaaaatcaaagacttaaaaaacaaaatgagagacataaacgggtgaccagggtgtactttttgacaaacttggaacggctccaacaaaaaagaacagtcgccgaaacaagaaaccgaagatggtaaataaatcccccaacactttaagaccctttttttaaaacccaaaaaacagtggtgttttttgaacccacccccttttaaaattttttttagggggggccgaaaaaaaaacaggggtttttcgatttttttatcggaaaaggggggaggcatttccccttttttaggcgggggggttctccacccctgtgggaattttttttttttttagggaagctttttt

SEQ ID NO: 121588 - DNA, 489 bp, Arabidopsis thaliana columbia
  unsure (1)..(489): unsure at all n locations
ttaggtacactatagaagagctatgacgtcgcacgcacgcgtacgtaagctcggaattcggctcgagcaaaagaacacctgtgggctaccaaacagggacgatgtgaaggccggggttatagcatacaagatcgccgctcatgcagcttggattctagncccaaaaaaaggatatccccattggcttcaagggcttggggaaaaacaacgcccccttgaaaaaaaaaaagggcggggttttggggggttttaaaaagggggggggggccattttttttttggggggggggggggggaccccccccccaaggagggcgggggttgagttcttttaaaaaaaaaaagaaaaaaacaatcttttccttccccccctgagtggggggcgccacaaggggtggttaaaacccttcttttttcttctctcgtggggggggggacacaaaaaaaaaaaaatgtttttttttatatataaagaaaaaaaaaaaaaaa

SEQ ID NO: 121589 - DNA, 550 bp, Arabidopsis thaliana columbia
ttttaggtgcactatagaagagctatgacgtcgcatgcacgcgtacgtaagctcggaattcggctcgaggttcctcacagaaacagcgaaacctcggtggttgcgggatacactgtgcctaaagactccaagattttcatcaacgtttgggcgattcatagagatcctaagaattgggatgaaccaaacgatttcaaacctgagaggtttttggagaattcgcttgatttcaatggaggtgattttaagtacttgccttttgggtcaggaaggaggatttgtgcggcgattaacatggctgagagacttgttctgttcaacattgcttcacttcttcactcttttgattggaaagcacctcaaggacagaagtttgaggttgaagagaagtttggtcttgttcttaagttgaagtctccacttgtggctattcctgttccaaggttgtccgatccaaaactctatacagcttaagtaagtaagaaggaaatttggttttgacctaatgagaggaagttgaattgagttttcttgttaaaagttatttttt

SEQ ID NO: 121590 - DNA, 377 bp, Arabidopsis thaliana columbia
aagaacaggtatgcctaggacgcgggaaggggggggttatgtgggaactaggcgggggaggttagtgagggagtgaacaggacaggaggaggatgggattgtaaggcaaagtaacattttggggtgggagagaggaagacagagtacgaagctcaagttaaggaggtgtaatgtatgataaatgaaagaacggtagataagtctacatgggatcgggttgtgagatgttaggtgagaatggggcaactccccccgcgcggaaggaggagatgacggcgcagaatgtcgaatagagggacaaaagacgaggggggagggcggtttttatgggagagcggcgaggagcggagagggactgtcactgatatggaaagatg

SEQ ID NO: 121591 - DNA, 479 bp, Arabidopsis thaliana columbia
gaccactctacaagatcatgacgtcgcctgcacgcctacgtaagctcggaattcggctcgaggcgataaaaaggtgggtggagaagagagatcacgttatgtttaaaaaagaggggaagaagtagttggtgctggttctctcttcgtccttaaatccaaagggacatgggggcgctgctgattccacttgacgacctcctataggggcgcctgccctactgaattttccggaggggggggagctcttaagaggggctcacggaatatattgtctgggcggaggagcaccccatcctttctactggaacatttttttttcttttactcttaaacacccacgctttttcgggaaccgttcccttccgttccgggacgtgggtcatccccttcctcggcccaaagggggaagggccttccctctcacccctacaaatgggtggggcttttggtgggggttttcccccccccctcttgggagg

SEQ ID NO: 121592 - DNA, 543 bp, Arabidopsis thaliana columbia
  unsure (1)..(543): unsure at all n locations
actcctttatggaaagctacgtccgcctgcgggacccgaccggaataattccctgctcgacgagctcagtagtcggcggccgcccttttttttttttttttttttaaaaaaaaaaggggtgtttcttaaatatagaaaaaacagcctccctcgtgtctggcgggggcttttatcccccccgcaaccaacctatgcggggggcggcatccattataattttttttgggcggggggttccatgatccagccccccgaaaacaaaaaaaaaccagggggatccccagggntggacacaaaaacagagatctttttttagcgcgggttcagaaccaaagtccaaaaaaccctaccgcgagcaagttgcgcttggggttctaatcccccaccctcctccacaaggcccctccccctttacacacgagagccccctcgccccaggtagtggtgtcccgccgcaggcaaggcgcgccacaagcactgcggcggggcggacacgaggcaaaaaaaccactttttcgtgcggcgaggccgcttcgaccccgc

SEQ ID NO: 121593 - DNA, 548 bp, Arabidopsis thaliana columbia
taggtgcactatagaagagctatgacgtcgcatgcacgcgtacgtaagctcggaattcggctcgagggcttgtggatgtatcccgatctggaaccttgacatatgaagctgttttccaaacaactgcagtgggtctaggccaatctacttgtgtaggaatcggtggggatccttttaacgggacaaactttgtcgactgcttggagaaattctttgttgatcctcaaacagaaggtatcggtctcattggagaaatcggaggcactgcagaagaagatgctgcagcattgataaaggcaagtggtactgagaagcctgttgttgcttttattgctggacttactgcaccaccgggtcgtcgaatgggtcatgccggagccattgtttccggtggtaaaggtacggctcaggacaaaattaagagtttgaatgatgctggagtgaaggttgttgaatctccggctaagattggatcagcgatgtatgagctctttcaagaaagaggtcttttgaagcagtgaagtgaatttcactagctttcgcttttt

SEQ ID NO: 121594 - DNA, 455 bp, Arabidopsis thaliana columbia
  unsure (1)..(455): unsure at all n locations
agatttttnnnnnnnnnnnnnnnnnnnnnnnnnnnnnnnnnnnnnnnnnnnnnnnnnnnnnnnnnnnnnnnnnnnnnnnnnnnnnnnnnnnnnnnnnnnnnnnnnnnncctttnttttttttttttttttttttttttccaaacaaatatttcccttcatacaaaaaaaaaatgaaacacctacaattttaatatccatataaattccaatatgaacacctggtttttttttcagcacatgcaaaaagcacccatacataacatttgatatattaatcagaaatgtataatccatctatatatatttctggtcatatatcaaacttatattgagactgtttgaaactatattgcaatgcaaagtttaaacttagtaaaccccattcaaaacaaatatttttctgaaaaattgtttaaaaattaaaacaaaagatttggagaggtaaaatttttaa

SEQ ID NO: 121595 - DNA, 384 bp, Arabidopsis thaliana columbia
ccccgcgaggattcatgaggggggggaaccgcgcctccttgatggaagtgtgccgcagagatgtgcttagagttttatcgcgcgggggcggcgggagcggggtgagcctacgaaggtgtatgagaggggcaggtcgctcgacgtccgtcataatattgtggccgcgcgctcaccgcaccccgaggggtaatcaacattcattataatgttacggccgcagccgctgtaagatggatataattatgatacatgtaggatcacgctggcgtgaggccccacgacacaatgttttcttcgaggtggggtgaatagaaagatgagagcggatcacgcgccgcttagcggtattaagtagtttatttggtagtgagggcgaaggcggta

SEQ ID NO: 121596 - DNA, 569 bp, Arabidopsis thaliana columbia
  unsure (1)..(569): unsure at all n locations
gccnnnnnnnnnnnnnnnnnnnnnnnnnnnnnnnnnnnnnnnnnnnnnnnnnnnnnnnnnnnnnnnnnnnnnnnnnnnnnnnnnnnnnnnnnnnnnnnnccctttttttttttttttttttttttttttttacccaaacgacgcgaagggacnnnnnnaggggggcacatatgcagccgggggaggcgggctgtttcgggctggctggggttggcgtcggggggggctacggcgcagttttggggagggggggggagctttacatatgtgtgtgggtgaagatgagaacgccgggtaaacacccgtagctggggggttcggcgcggcgctccgtagtgggactgggtgcgtagcgtctcccccgggtatcggcgcggggggcgcgtttcgtgcggcgcggtgcctgtggacgcccgcgggtgctggcgcggtgcgcggggcctgtggcccggtggcgtggggcgctgggaggggggggcaggggtgcggccgggtgtggttgggggccggtcggtgtgtggggcgtggcgggggtgggggcgtgttagggggggggggggggcgggggg

SEQ ID NO: 121597 - DNA, 426 bp, Arabidopsis thaliana columbia
  unsure (1)..(426): unsure at all n locations
nnnnnnnnnnnnnnnnnnnnnnnnnnnnnnnnnnnnnnnnnnnnnnnnnnnnnnnnnnnnnnnnnnnnnnnnnnnnnnnnnnnnnnnnnnnnnnnnnnnncctttttttttttttttgtacagcaatgtaattaaatatagctttcagtgcattgctacaaagacataacaacaaaatattgcttaccctttgggactagatagatagattatatccctcacattgtttccattactagggggtttttttcctccctttaaagctatatcttaactaggggtctccctcctgggcagcctcgagccnnnnnnnnnnnnnnnnnnnnnnnnnnnnnnnnnnnnnnnnnnnnnnnnnnnnnnnnnnnnnnnnnnnnnnnnnnnnnnnnnnnnnnnnnnnnnnnnnnnnnnnnnnnnnnnnnnnnnnnn

SEQ ID NO: 121598 - DNA, 518 bp, Arabidopsis thaliana columbia
  unsure (1)..(518): unsure at all n locations
cnnnnnnnnnnnnnnnnnnnnnnnnnnnnnnnnnnnnnnnnnnnnnnnnnnnnnnnnnnnnnnnnnnnnnnnnnnnnnnnnnnnnnnnnnnnnnnnnnccttttttttttttttttaatttgaagaggatctcttaagtatactctgtgtgttgttcttgttacactgtaaaagtctttataataggaaacaatatgtatgtatacatgaagaaacagaatgtaatcaagaatcagtggggtcaacaggaagtgaagttgttcttttcagacactttggtaccaatctttctccaaacatctctttcaccgtatcttcttctcttcctaacccggaaaccgaacccaagaacccgtctttcggagaaatttccaccttttctccggattccggccaccgggtttttagttgctcatcctgaatatctctaagctcaattgggcatttggctttaagccatctcaactcttggtggacctgattttcggtttttcggatggctcaatccagtttttaaa

SEQ ID NO: 121599 - DNA, 472 bp, Arabidopsis thaliana columbia
  unsure (1)..(472): unsure at all n locations
ttccnnnnnnnnnnnnnnnnnnnnnnnnnnnnnnnnnnnnnnnnnnnnnnnnnnnnnnnnnnnnnnnnnnnnnnnnnnnnnnnnnnnnnnnnnnnnnnnnnccttttttttttttttttttttttttttttttttnnaaacagcgggactacatatttatatatttagagctcatcaagggcctcacttggtttttgggaaagagcttgttttcttactggttttttttatatctagggggggggtgatgagtcaattatttgacaataactgaaaagtcccttggagggcatgttttgagcttacacggagcctcactaccttgtggggggagagagtnattttccttaaagaaccattttgttttagctttgaaaactaaaaaacgggttgtttatgagggcccggggggtacctatcagggggaggggaaaaatttggtgattttttccggaaatttggaaagttttgg

SEQ ID NO: 121600 - DNA, 541 bp, Arabidopsis thaliana columbia
  unsure (1)..(541): unsure at all n locations
cnnnnnnnnnnnnnnnnnnnnnnnnnnnnnnnnnnnnnnnnnnnnnnnnnnnnnnnnnnnnnnnnnnnnnnnnnnnnnnnnnnnnnnnnnnnnnnnnnccttttttttttttttttttttttttttttttttttttttttnnnnnnnnnccccgggctntaaagggtcgacccaagtccaaacaataaatttttagacccccggggtttattaaagggtataaaccattttttttgggggcggggataacctcttaccccccccaatttttttttccacgtttttgagcaaaggttttggggctcccccaaaaccatttgggggaaaaaaacctcgcgaaacaacccccccccctttattataaaccctagcgccccggctattgtgtccggaaataagaggccccaaaggttaattttcccctcgcaccctgcttttaagagtgccctcttttcagatttcctccccaaagggcccactctactttccctccaaaaaactctttttgcccttttaacagcttttctagaaattcgaatct

SEQ ID NO: 121601 - DNA, 537 bp, Arabidopsis thaliana columbia
  unsure (1)..(537): unsure at all n locations
cagctcnnnnnnnnnnnnnnnnnnnnnnnnnnnnnnnnnnnnnnnnnnnnnnnnnnnnnnnnnnnnnnnnnnnnnnnnnnnnnnnnnnnnnnnnnnnnncctttntttttttttttttttttttttttttttttttttttttttttttttttttttttnnnnnnggaaaantgaaaggattttgatttgggagagggattccttttttaccgggaagaaaagtgttttttttttttagggggcgaattttacaatcggggagggtgtcttttttttttgtttaaggaatttgcaaaccccgtctgcccatttttggaccaaaaaccccgggctttggggccccactccattttttgttttaaccttgaagttcccagggaaagctgttcccttacaccctttttcgcttttttaaccgcatttttatccccccaggggacttaggggttctttcccccccttagggataaaaagccccgggcccccccctttggtttggccccgggaaaaaaccttggaggtggggcggggtttttt

SEQ ID NO: 121602 - DNA, 532 bp, Arabidopsis thaliana columbia
  unsure (1)..(532): unsure at all n locations
ccnnnnnnnnnnnnnnnnnnnnnnnnnnnnnnnnnnnnnnnnnnnnnnnnnnnnnnnnnnnnnnnnnnnnnnnnnnnnnnnnnnnnnnnnnnnnnnnnnccttttttttttttttttgatcactacagacattcattggcatagcctacagatatatacacataatacgattcaaatcaaaacaaacaacacaaagaaataaacaattcaacagtcaaagatgagaacaataacaagttaggtccttcacagagaatgatcacagcagaaacatcaaagatgaagagaactcacttcatcaaccttccagtctccttcctcatacttggaccatctcacaatcccttcatcgtttacagtcctctgacacatcacacacgtnttgtgatccatgcaagtcaagaatttctttagccttgctgttttctccattatcgncttatcgagctctataacaatcaccttctgctgaggctgccaacccgtgactncactaggtgagagtgtgatatgttgagcacttcaaggctgg

SEQ ID NO: 121603 - DNA, 537 bp, Arabidopsis thaliana columbia
  unsure (1)..(537): unsure at all n locations
ggagtctccggctctaatcccactcatttagggaaagctctaccctgcggtaccggccggattaattcttgtcgacggctactcctcggcggccgccctttnttttttttttttgttttgtgtggaaggggaaagcaagcttttatataatggaagaatattcatatatacaacgggttcagactaattacaaattccaatttccaaatccccacgcttttttggaaccttctattgggttgtagggacacttaaaagggggcccaaggcctttaaaagttttacaaatcagctgtgggggcttttcaaaccaaaggggcgttttcactttacccgggggagtttttttggggctgatcgcagagacttgtccgggggggctatcctgggtcccccgaggggcgtgggtttcgctaaaaggggggggatggcgctcccccacaccggggacactgagggtgcgtgggccccgacgcacaccacggggggtcgggggcggttataaatccctttttctcacccggccccggctacgat

SEQ ID NO: 121604 - DNA, 505 bp, Arabidopsis thaliana columbia
ttaggacaactatagaagattatgacgtcgcctgcacgcgtacgtaagctcggaattcggctcgagattacctttctctgtatttgcacacaatcacactcaaattttatttagtcttaataaactaaagacagaccaaacccttttgacagtcactgagtcatattaaacaaacatccctaaccggtccattacaatatatactcgcttttcactgatccatgatggattatcttaattcgagaacctttctatggacgattgaaatctaggtgcttttttatcgctcactttgaaaaaaaaatgtatatgttcaaaccagtgaatacgataaactaaacttcagaataccttaaaaaggtttttttattgtatggaacatacatatcaatattcatggatcatccctttcattacactttcaggacctattttactagcagatggacttctccttttttcgaccagaacaaaaaacctttccccgcatgaggactttccctta

SEQ ID NO: 121605 - DNA, 570 bp, Arabidopsis thaliana columbia
  unsure (1)..(570): unsure at all n locations
ccnnnnnnnnnnnnnnnnnnnnnnnnnnnnnnnnnnnnnnnnnnnnnnnnnnnnnnnnnnnnnnnnnnnnnnnnnnnnnnnnnnnnnnnnnnnnnnnnccttttttttttttttttttaccccataaagagagccaataaagggaggcacttttttttccactgtaattcagaaaatatgtcttaaaatgaccttcaaaaggtgataaataaacccgaaacataaaatttttttgggacgagggggaccaaacaaggctttttttggaaaaaaatggctaaaacacccaccttgtggtgagggattcccatttttggaaccaaaaccgaggggggggggggggatccccctaagagagggagtggtgcgcttataaaaaagggcggtttttttgaaaccggaatattgtgtggcacaacccccccaataaaaaccattcttccgcggtttttatggggcgaaaaatccaccacgtttgcggttagaaggaaataaaagggagggggccgcaatgccaaaataacctccaccgttttgtgatagatagggccgcgtgcacacacgcgagaa

SEQ ID NO: 121606 - DNA, 518 bp, Arabidopsis thaliana columbia
gccgcgtacgtaagctcggaattcaggctcgaggttgtttatagtagtttctcccaaactttcaaagagcttagaaaaatgagtacagctactttcgttgatattattatcgccatcctcattgcctccacatcaggtgtcttttcctcagattttgtgttgcggggttagagttattggatatgtttgggttttgacactacttgtttttatgggggggatcatatccgccatttttgtcctcaccaaatgatttaccatcttttatcatctccttgaacagctggtccccccgggtctcctatttttgtgactgaatcaacgggtgctttttctttcttcagagggcttatgtttcaaagtatttacccaatcatcaccgggggggtgggcattgctaataaaatggtgggtcggattaaaaaaaaaaaagcttgcttcccccttgggggaaaattttaaaaaatttatttgtgtctttccagtataaaacaacataaaaaaagaaggggcggccc

SEQ ID NO: 121607 - DNA, 605 bp, Arabidopsis thaliana columbia
ccccccaggagagagaggccgaccccacgccttacccaggggggaagggcgcgggaaaacaagcgaggcgccgacacgcgagagcgcgagcaacgaagcccccggccggcgccaccagagaccccaccacaccaaccgccgcgcgtcgacgcgcgaagaacaggacggcgagcccgaacgccgacccggccgcgccgagagcccaagaccgtcttttcttcggggggggggggacacccagagccgcgcgagagccccgcacgaacagaaaaaaaaaggagcgcggcggagcgccagaccgcaacagagccaccggcaggacaaggcgcgacaagaccccgcaacaccagtcgcggcggcggcgcgtgagcggaggcgcgcggaccgcgaggcccacagcgggccacaccggaggcaagccccacgaaaaccccgtcacgcgcgccgagagaacacgcacacatccgcgcgcgataaagaagagaccatgccaaaacgagcacacagcacagcacagaacagacgagacggcaagaacaggaaaacagcgcgcccggacggcggagtcgggagaagacacgcaaacagagcaagagaaggggcag

SEQ ID NO: 121608 - DNA, 460 bp, Arabidopsis thaliana columbia
caccgacgaaaaagagggggggggggggtttagggagacgaccccaagagttagggggagaaccgccccgccggaccggaggaacggcgaacgctttcagcggggggcaaaacccgaagagccgagagaggaccggccggccgcagcaggaagaggaacgggaccgcacaggagagagacggagggcgggcggagcgcgcacgcagcagaggagagacggcgagacgaggcaagaggagcgcggacacggagccccgccgcctacgagatggggggcgcggcgcgacaaggcgagaacgaagcgaagagacaacaaagcagacgagagagacgacgctcgcgcagcacaagagagccgacgggaaaaaacgacgacagcaactagacggaacgacccggccaacgacggagaagagcagcggagagcgacgcgagagaaagggcgagcagggcggagcgg

SEQ ID NO: 121609 - DNA, 548 bp, Arabidopsis thaliana columbia
  unsure (1)..(548): unsure at all n locations
nnnnnnnnnnnnnnnnnnnnnnnnnnnnnnnnnnnnnnnnnnnnnnnnnnnnnnnnnnnnnnnnnnnnnnnnnnnnnnnnnnnnnnnnnnnnnnnccttnnttttttttttttttttctttttttttttttttgcgcttgttctcgctggtccccccaaaggggcgcccatttttttttaaaataacgggcgttcctttttttccttgacccccgtgagaggctaaacccccccccttgggtggtgctgcccnccggtggaagctcaaacccccccccttgtgggaggggagagaggcgtttcctttctggggggggggaaggggggccccttaagggcaccccccccctctgttggcggcgccccttccccggttgcgcccccccttacccccctacccccaaaatccccccctggcttaacgggccctcttgacccccacctgagggggcccgccccctctctcccccgggcacccgctctccccaccgcggaaacaccctccgcccccctgaaccccccccttctctcccaccccccggtcacgt

SEQ ID NO: 121610 - DNA, 557 bp, Arabidopsis thaliana columbia
  unsure (1)..(557): unsure at all n locations
nnnnnnnnnnnnnnnnnnnnnnnnnnnnnnnnnnnnnnnnnnnnnnnnnnnnnnnnnnnnnnnnnnnnnnnnnnnnnnnnnnnnnnnncctttttttttttttttttttttttttttttttttttttttttttgcctttattatggacagggaccatccagggccaacgcggccaacaccaagcgggagccaccacagaagaccaaaaaccagacacactttttttaagaggggggggaacccccacggggagcagaaaaaaaaaacaaccgcccgcgccacagcgggtgtggtccagccccccgaaaccaggggaatagggccatagaaaagccacagcgggcacaacacaaaacgaacaaacaccacgcgggagaacacaaaggcgcggcgaaacgcccggagaccccaatcagcggaacccaaaagaggcgggggcaggaaggccacaccagaagcgccacccggggggcgaaaaaacacacgcaccaaaaccacgcagaaccccaacacacgaaaaaagggaaccgagccccaccgcgccgggggaccgccgc

SEQ ID NO: 121611 - DNA, 523 bp, Arabidopsis thaliana columbia
  unsure (1)..(523): unsure at all n locations
annnnnnnnnnnnnnnnnnnnnnnnnnnnnnnnnnnnnnnnnnnnnnnnnnnnnnnnnnnnnnnnnnnnnnnnnnnnnnnnnnnnnnnnnnnncctttntttttttttttttttttttttttttttttttttgctcaaaatcagaacatgaacttacaaaggggccacttcgaggacaaatatataatgttttgctaaagagccacccaatattttggggtaatttttttaggggggggtgaaaaatacccgttttgatcacacaaaaagagagggagaaagaccccgtccttggatcgccctatttttaataacttcgacatcaacagattacaaccggaggttttttttcttttacccgggtttggcaagaacttgttcaaactccagacaggttctggtgataactttctagcatcgtggttttttttttgtctttccccattaaccccaacttgccaagtgttttgaaaaatcttttgggggagaatccttaaagggtttgttttttttctttagctca

SEQ ID NO: 121612 - DNA, 481 bp, Arabidopsis thaliana columbia
aacccccaggaagagaaggtgcagagccccgcttttctaaagcggggcaagcgcccccgcagaaaccgacccgggggccgcgcaggccccgcgccgccacgcgcgcgccccgccgccgcccccccaccgccccaacgcggcccaccgccgcggcggcggccgcgccacccaccacccggacccgttccccgtccgcccgctctccacaagccaccttttttttttccccggggggtggcaccccacccgtgcgtcccactcgtgcgtctaacacaacgcgtcccttgcgtgcgtccccgtcaccccctgtcacccccaagtaatcttacgaatccgatccgtatagacttaccccgccgcccccctcgtcgcttcgctctccactctccaatcgaggtcccctcttcctccgccgtcctcccctcccgcgcgcccgactttcgctcctccgccgtcccgtcagtctgtatgccgtcccgct

SEQ ID NO: 121613 - DNA, 230 bp, Arabidopsis thaliana columbia
  unsure (1)..(230): unsure at all n locations
gggggggggggcgcaaaaaacaaaaaaanaanaaaacaaaaagggcggcgaagagaacggcaccaacaacccgccgcaaagcgaggggacgagaccagcagatcggaccgcggacacgggagcgggcacgccgcggtagcagccggccccaacggcgaacgacatttttttttgggttgttttgganaacaacacaacaccccacggccaacgaaaaaaatacctcccct

SEQ ID NO: 121614 - DNA, 417 bp, Arabidopsis thaliana columbia
  unsure (1)..(417): unsure at all n locations
ccccgagagaagaatgagagagggggacgaacgacttttttagaancgggggcgggggctctctcaaaaaacaccttgatcgtttcgcgacgctacgaggtgtattaattacaccagagtagtgacgacactggattgcaatcttattggaagagagcagtgaatttaatacagggccatattcaaatgctagagtacgacacggagcagtggacgataaccacgagagaagaaatgtttttttcgagggggggggacgggaatatcgtcggtactttgcgcatggagaaaaaattgtgtcatatagtacgtaggtattttctgtcgtctgttcagtgtcagctagcgtcctgttagttccgcgcaatcggagggcgtgtgtacggcgatgagacggatgttgacgtagaattgtct

SEQ ID NO: 121615 - DNA, 525 bp, Arabidopsis thaliana columbia
  unsure (1)..(525): unsure at all n locations
nnnnnnnnnnnnnnnnnnnnnnnnnnnnnnnnnnnnnnnnnnnnnnnnnnnnnnnnnnnnnnnnnnnnnnnnnnnnnnnnnnnnnnnnnnccttttttttttttttttttttttcatttcacatataattttttattttcttcttcacagaaagaaaaaaagatgaattttgttacaccatgaatgaaagaaagggaagctgtacattaatacaaaaaaatttttgggggtgtggttgaaactcaccaccttaaaacgtaatttttctttttttatcttcttcctctgggtctctggcaacaaattttatgaacttattgacaaaaaaaattccaaattccaatcggatggggaccctcaggcccttctctttttgtttcgaccgcttccgccttccccaccaccattgttatttcactataatcacccacggtaatccgagggggcccgggcatccccctcttttatgctcccccgggggaagcaagcagaaggagacctttgggtttcttgccaagggctcgg

SEQ ID NO: 121616 - DNA, 508 bp, Arabidopsis thaliana columbia
  unsure (1)..(508): unsure at all n locations
aaggaggcggaggtgatgtggtatcgcgcttgggccgtggatgcgggagtagggatgggaggaattgaaagatgcaagaagcaagtgaacttagagttttgttagaactatataacaatatacgaagaggatttttttttggaggggggagaggccaagagattgnctatggatagagaaacgaagaaggatgnggaagtgaaaagaggagacaatacagattattccaaagaatatactaggatttgaatcagagtatgcgttagcggagattcaaatagggaagaaacatggaatatgatagtgaagcagtgagaacggtaaaatatacaaaatcgcaaaaagtaacgcccggagtcgcgacagacattaattgcacgtgatacgtgattagatatattatattagttatgagttgtacgcggatggagaaggtaaatgaatagaggacgggcatttaatatcgaaatagatattgaaggtggggaatcaggaagaaggtgtagca

SEQ ID NO: 121617 - DNA, 535 bp, Arabidopsis thaliana columbia
  unsure (1)..(535): unsure at all n locations
nnnnnnnnnnnnnnnnnnnnnnnnnnnnnnnnnnnnnnnnnnnnnnnnnnnnnnnnnnnnnnnnnnnnnnnnnnnnnnnnnnnnnnnnnnnncctttttttttttttttttttttttttttttttttttttttttttttttttgcgaagaactaaaaaataaataattttggtcccaagttgcaaacaacacaaaaatcattgtgtggtgcacagctttggctttttttatgggggggtgagccctcaaaaaaaaggaaaaaccgaaattttttccgacaaaaagagctttgtcataagctcaggggttggctttttggaaagaaaaaaggtccgttttgttcttcactgggggcaaaaacattttttcccggggggggtttttggtgggcgggaaaaatctttttacaaactttacaaaaaaaagagctcgcccgcgtattttttaataaaaccgggggaaaaaaaagaaaaaaaggaggtgggggggcattggaagaaaagggttggctccaggggacaaagggttttttttt

SEQ ID NO: 121618 - DNA, 474 bp, Arabidopsis thaliana columbia
ggcccccgaacgaggcgcaagcacaagaaccttttcccagggggggaggccgcgcccagacgcggaggagagacgcgacaaggccgcgcaaggagcgccaccccgcggccgccaacgacccagggcagcgaaggcgaatagaacgacacgaggcaacgcgcagacgagacccgggcccaagccacaaagaagagaaattttttataggggggggaggacggaaggcgcggacgacgcaccaaacggagccgcgcgggccgcacgcaacccacagaacgcgcaggaacgcggcgcaaaaccgaacgacacaacagccgacaacacatgacacggcaagccaagaccagactaacccgagcaacgagggcccacggaagccggacaggaccgcgccagacggaccacacaagccgagaaaggaaccacagacggcgccgccaccccggaaaggacagggccgcagcaaccaggaaa

SEQ ID NO: 121619 - DNA, 518 bp, Arabidopsis thaliana columbia
  unsure (1)..(518): unsure at all n locations
ccgnnnnnnnnnnnnnnnnnnnnnnnnnnnnnnnnnnnnnnnnnnnnnnnnnnnnnnnnnnnnnnnnnnnnnnnnnnnnnnnnnnnnnnnnnnnnnnnncctttttttttttttttttttttttttttttttttttttttttttttttttttaaaaacaaccaaaggatttttttttttataaattatgaaaagatccaatggcggttccaaatttttccaataaaacattaaacgggggtggaccgataccaaagcaggggaatgaaaaaaagtttaaccgataccacagaggccggagttgtttttccgttttttcggggaattcaggaacaagagattttaagcccgttttaaacctaccctgaagataccacccacggttatcccaaacagaaacggggggtttttgaacaacggggggttcttggttttccctttttgggggggggggtctaccccaaaaaggtccccgaggtggggaaactcttttttcacaacccaaacagttttttattt

SEQ ID NO: 121620 - DNA, 545 bp, Arabidopsis thaliana columbia
  unsure (1)..(545): unsure at all n locations
nnnnnnnnnnnnnnnnnnnnnnnnnnnnnnnnnnnnnnnnnnnnnnnnnnnnnnnnnnnnnnnnnnnnnnnnnnnnnnnnnnnnnnnnnccttttttttttttttttattctattttttttttttttgggcccataagttttattaaacatcatcatattatacaagagcttaaacaaaagctccaactttggaattacataaagcccaaaaaaggccctttttttaacggggtgcaaaaaaaattttattcggaacttcatccaggggtgggacgtggtatactcgaagcccnnnnnnnnnnnnnnnnnnnnnnnnnnnnnnnnnnnnnnnnnnnnnnnnnnnnnnnnnnnnnnnnnnnnnnnnnnnnnnnnnnnnnnnnnnnnnnnnnnnnnnnnnnnnnnnnnnnnnnnnnnnnnnnnnnnnnnnnnnnnnnnnnnnnnnnnnnnnnnnggaaaaataaaaagaggggccaacctattggcctttccaaacatttgcccctttttaatggggaaatgggacccccccttgtaaaggccaatt

SEQ ID NO: 121621 - DNA, 507 bp, Arabidopsis thaliana columbia
  unsure (1)..(507): unsure at all n locations
actcatttagggaaagaacgtacgcctgcaggtaccggtccggaattaattcctgggtcgacgagctcactcctcggcggccgccctttntttttttttttttttttttttttctataaaatcttgaataaatcgagaatattggtttggggatacatattaaagtgacaaacgttatggataaaaacatctgaaatttgattggttactcataatgattagggggggtctcaaccttatcatccaaattaagaccaaccttggtttcacctaaaccacaggtcacctccgccaacaccgggcgggtctttataattcgtaaccgcctgaacaatagccttagccctcttcccgggatttcccctcttgaaaacacccgacccacaaaacactccttcacatcccaatttgtttattaaccgcccgattccgccggggtcgcctttcctcccgcaggagacttgaccccccggaacccttcccagttctttagtttccacaaccaaa

SEQ ID NO: 121622 - DNA, 526 bp, Arabidopsis thaliana columbia
  unsure (1)..(526): unsure at all n locations
nnnnnnnnnnnnnnnnnnnnnnnnnnnnnnnnnnnnnnnnnnnnnnnnnnnnnnnnnnnnnnnnnnnnnnnnnnnnnnnnnnnnnnnnnnccttttttttttttttttttttttttttggtccataaaaactggctctgggcattaatttttgattgggttacatttctacttggtgatacataaatattatagattttttggcctatctacttattgggtttcttatggggggcgcctagagagggggaaagagaccctttgaggagtttggcttgaaaggtctgaggtttgccgctcctgctgttgttgttcttgagaggactgcccaggatctgtcatttcttcatcgccctcggtttcttcaggttctggtgaaaccgactttttcgtataacgagttgataatttgggcttaaaaatgggtcctgttagggggggaggggaacaccgggtccctgtttctgttttggaagaggtttttgtttcctacttgcaggacgcttaagcaaactcttttttggggg

SEQ ID NO: 121623 - DNA, 256 bp, Arabidopsis thaliana columbia
gacgagcacgagagcacaacggttttttacaagagggggggaaaggccccgcacaacacaaaaaacaaacacagaacagaccgcgggcgaagtcagagcaccaccaaggccaccggccgcgcgggaacgcgcacgcacgccgacagcctaccgttgcgttaccgagaccccacaggctccgtagcggacccgacgcgcacccgcgcagccaaaggcgccaaagcagctttttttttgttggggggtggggccccac

SEQ ID NO: 121624 - DNA, 209 bp, Arabidopsis thaliana columbia
accaccgtagagcggagacgaaagcgcaaccgcaggaccgcgagcccggacgaggaagaagaacggaagccgcccatacacggacaaacgcaggagagcgacgcagggccgaggaccgcagaacgcagaagaggcggggcgttttttttttgaggggggccacgagaagcgaggagacaagagcgaaaaaaagaagaacaccacgcaac

SEQ ID NO: 121625 - DNA, 488 bp, Arabidopsis thaliana columbia
  unsure (1)..(488): unsure at all n locations
aaaanaaaacccnccaggagggaaggaaaagagcgcaagacgagcgccaggaccaccccaaccagacacagacaagcgcaccgagagaactacggaaggccggacacaagcgaaacgaagcagacggccagcaagcccaaaggagaaattttttttggaggtaggggccgacggcaccccagcaagaaaaaaaaaaccccccaccgagaaagaagagaggaaagccccccacaaaaagcacgcggaacggaaagcgggccaaggcgccggcaaggaggaacaacgcaacagcacacaggaagcccacacagccaacacaaccaaaaagggagagggaggcaggaccggaacgagacgcacacaaaaggagaagagacgagaacggcgcgagacaccccgagcacagaaagacgaggccgaaaaggacaagacgagccgcgccacagcacccgaggacgacaggccgaggagaacgcggaaggagcgcg

SEQ ID NO: 121626 - DNA, 272 bp, Arabidopsis thaliana columbia
  unsure (1)..(272): unsure at all n locations
ccgggggtttgggggggggagaccaagccccccggaggggggagggaggagagagaaagatttttnaaggggggggagaaaaggcccaaaacaaacaaacacggagggaacgagaacagcaaggggcgcgcgggcaagaagcgccaacgaccacgaggcgccggcaggaaccgcggaggacaggaccaccctcagggcagacagggaagacgaaagcacaagagaaggcgagacaagcaacggaaccgcgaaagcgggaggtcttttttttt

SEQ ID NO: 121627 - DNA, 539 bp, Arabidopsis thaliana columbia
  unsure (1)..(539): unsure at all n locations
ccaaaaaaaaaaaaancccaacaaaagggggggagagaaacagaaaaaacacgcacgccccccaggcggcacgacgaacacaaaacaaacaaggaaacgcaaaaccacaacgcgcagacgaaagccacgcgagacgaacacgacgacagcacgcgaaaacagaacaaacgacaccanntttaaaaaggcaagaagggcggggagacagacgcgacgcgacgtcacaaagaaaaaaacccccccacacaggagggggcggggaggcggccacccacaaaaaaacgaaagcgcgaaaccacgcacacgggacagcgagacgaaccaaaggaaagcgaaaacgagagggacgaccgaccacaacggcccaagcccgacagaaacagccgacgcggacaacaacgcgaagcccgagcacgcccggcagaaaaaacgcacaacgacggaccgagcgcaagcgagacaaaaacaacccgcgagccagccaaacaaaaagagaacgcgaaagagaaaagaaacaacaaaaccgaccacgaagccaa

SEQ ID NO: 121628 - DNA, 493 bp, Arabidopsis thaliana columbia
  unsure (1)..(493): unsure at all n locations
ccccccggggggggggggggaaaaatttttgggggggggcgaagcccccaaaaacaaaaacaaaaaanaggggggaagaaagggaacacaaacaaaacgggcgccccgcggcgggaccaacggattcacacgacaggagaacacggaagcggcaccggggcccgaacccgagcgggggctnttacaaggaaagtggggggcacaccagagggcgcacgaaaaaaaaaaccccccccccgggggggggggggcgcaccccaacaaaaaaaaagaccggccccgaacacaaagcggggggggggacacgaaaccagacacacagaacacccccccagcacacgaaagccccgcgaccggccgaagcgaacccacagaaacgagcgagagcagcgccgccgaggccccgagcgaaggagcagacgaggaccgacgggagaagagacagggcgccggcaccangagaggagaggcgacaagacgaagaaagcacgca

SEQ ID NO: 121629 - DNA, 535 bp, Arabidopsis thaliana columbia
ttaggacaactatagaagatcttgacgtcgcctgcacgcgtacgtaagctcggaattcggctcgagatttgagtccagctcaagagctactgagtgagttttgcagtcttggagtaaaggaaagcgatgaagaagtgatgatgatgaagcataagaagaagcaaaagggtaaacaacaagaagagtgggacacaagtcaccacagcaacaatgatcaacatgaccaatctgcgactacttcttcaaagaaacatgttccaccacttcactctcttgagttcatggaacttcagaaaagaaaagccaagttgctctccatgctcgaagagcttaaaagaagatatggacattaccgagagcaaatgagagttgcggcggcagcctttgaagcggcggttggactaggaggggcagagatatacactgcgttagcgtcaagggcaatgtcaagacactttcggtgtttaaaagacggacttgtgggacagattcaagcacaagtcaagctttgggagagagagaagaggataatcgt

SEQ ID NO: 121630 - DNA, 543 bp, Arabidopsis thaliana columbia
  unsure (1)..(543): unsure at all n locations
nnnnnnnnnnnnnnnnnnnnnnnnnnnnnnnnnnnnnnnnnnnnnnnnnnnnnnnnnnnnnnnnnnnnnnnnnnnnnnnnnnnnnnnnnnnncctttntttttttttttttttttttttttttttttttttttttttttttttttttntttggcgggaagcaaaatttgtttttttccccctcaaaatttatctgattggaaaacttgtttcattttccaacaaatttttttaaggggggaaaatccttttttaatgaaatcgcgttaaaaaatccgtttttttcccaaaaaaggtgaacaacgccaggccccaaaaactacttctttttttaggggtcctcaagcctttttttttaaataaaacccctctttttaaaaatgggagctttcccaagacaaaggagccccccccaggggttgggttttatttttttttttgggggggggggaggggtttctttccaaaaattttgggggttttaaagagaacccttttttttaaagaccatggttgcatttttcatttttttgtttaaaagatt

SEQ ID NO: 121631 - DNA, 526 bp, Arabidopsis thaliana columbia
  unsure (1)..(526): unsure at all n locations
nnnnnnnnnnnnnnnnnnnnnnnnnnnnnnnnnnnnnnnnnnnnnnnnnnnnnnnnnnnnnnnnnnnnnnnnnnnnnnnnnnnnnnnnnnnncctttnttttttttttttttttttttcccactcaatactatacattagacagagggatacaacaaaatccagagttgttgttagttccacacacagaagagaacaggaagactataaacaaaacaccatctttttgaaggggggaaagtatgtgtgtaagtgtatattaaaccggtttccacacagacaaaacctctggaaaatctccagcatcagttctcgatcaggttgcctgaaaaaactgctgatttcttcttctgacatcataaatctttccgaaatcaaacaaatcatcaaaccccctttttttaagtttctacaaggtaataaagcaaattttttggacccctttggagcacataaatgggggttatttttccattagggttttctggagggggttttaaaacccgtaaggcgaccttggttggagg

SEQ ID NO: 121632 - DNA, 433 bp, Arabidopsis thaliana columbia
tttaaagggggggggggggacccacaaaaaacaaaaaataaatagggggacgttgcaaagtaagtacgcgatgataaggagttaataatagacgatcacatcaatcatagtagaatagggaatgtacagtgttacgcagggcaccgacagaacactttttttttggctagtaaggacaccaacacgggaagatttccaaaaaaagaagtacaccaacaattcgcagaaaattaaactctccccattgtatacaagcatagctatacatgaaaaaagaaaaaaatatagactcatatcatatggcaagaatacgtacgaaggcaataaattcccggctatcagtagataaggtggttaagtcgactggaatcgtatgactatccacttcaaattgcaataaaccctctaaccccctcaaattcaaatagtcaaa

SEQ ID NO: 121633 - DNA, 547 bp, Arabidopsis thaliana columbia
  unsure (1)..(547): unsure at all n locations
atgatatgccnnnnnnnnnnnnnnnnnnnnnnnnnnnnnnnnnnnnnnnnnnnnnnnnnnnnnnnnnnnnnnnnnnnnnnnnnnnnnnnnnnnnnnnnnnnnnnnnccttttttttttttttttttttaggggcaaaccaaattgttggtggatgcaataacatatgtagatttttcttctttttacatgaaaaaataattgccagtcccagtatcagaatttgggacgaatacaagcaatttctttgtgtatcaaccaaaataatattaggatagtcctgaaacatcccgtacccaagatattccacctggaaacgctctatgaactctgcttcttcccgctgcagtgacttttgttttttcccccatcaccataatttctttcgccataaccggcttgtgtattacatttgcatcctctttgccttccggaagaaaccgcagaccagagagagaagtattagtggatggttttccatcaataggtaatctctcaccaacatcctgaaatactttagtacttgggctggctttaacgcctgcaact

SEQ ID NO: 121634 - DNA, 533 bp, Arabidopsis thaliana columbia
actatagaagattatgacgtcgcctgcacgcgtacgtaagctcggaattcggctcgaggagagttttgtgaactcaagaaaataaaaaaagttatagttaatgggattcggcttagagagtatcaaatcaatctccggcctgatggggcgcggcggcgcgttcctgtgacgcttgtaaatcagttaccgccgccgtgttctgtcgagttgactcagctttcttatgcataggatgtgacacaagaatccattccttcactcgccacgagcgcgtgtgggtttgtgaagtttgtgaacaagctcccgccgccgtcacttgcaaagccgacgccgccgctctttgcgtcagttgtgatgccgatattcactctgctaatcctctcgctagccgtcacgaacgtgtccccgtcgaaacttttttcgactcagccgaaaccggccgcgccaaatctcagcttcttcgacttttgggatccttggctcatccaccaccggtggattaacccgctgttcccggtatggggtgatgatcc

SEQ ID NO: 121635 - DNA, 553 bp, Arabidopsis thaliana columbia
  unsure (1)..(553): unsure at all n locations
atgatcttgccagagctannnnnnnnnnnnnnnnnnnnnnnnnnnnnnnnnnnnnnnnnnnnnnnnnnnnnnnnnnnnnnnnnnnnnnnnnnnnnnnnnnnnnnnnnnnnnccttttttttttttttttttttgatttcataacattttctaaataaaaataagcatacatatatanggaagaaaaaaaaaaagagttacaggggcagtgagagcgcgtaaaaaaaaagtaattaaaacggttttgaggatggggggtttggctacgggaagactcactatacttattatacaccgactgtaaatcaacgggggaagatatgaagtcttcaggctgattgtttatccacgcggagatttcaatcaaaaacgttggtacgacaccggactgggcgggggctggtgaagcataaacatggctaaggaaaatggcgccgttttctggctctggtcttttcacaaaccgggctttgatccttgggcgggactcttgaaaggttttcctggagcggaacaaatcggttcctaaatgccgggtttttttttttttctga

SEQ ID NO: 121636 - DNA, 560 bp, Arabidopsis thaliana columbia
  unsure (1)..(560): unsure at all n locations
nnnnnnnnnnnnnnnnnnnnnnnnnnnnnnnnnnnnnnnnnnnnnnnnnnnnnnnnnnnnnnnnnnnnnnnnnnnnnnnnnnnnnnnnnnnnnnnnnnnnnnnnnnnnnncctttttttttttttttgttctcaaagagtatctgtatatattccaaccatataacaaaagagagttaaaaaaataacaagaagttttccctcatgtattgtactatcgntatgatttattcatctagaacgcatttaggggggataatggttatttggagtactgtgttataanttggcccttagctaggggccttgggcaaaaggccttattgtcattagacttttccggacattacagaagttaattcacaccccccttctctcttaaacacaggggggtgctcccatttcccgaacctatacacattgacactacccccaaaacgacaggtttttaccacgggtttttattttaaggcaggaggggcacaaacacatctgggcttctggggcgcccaaggggaggcccaatggctatggctccccctgtgaattgaatttttccgg

SEQ ID NO: 121637 - DNA, 528 bp, Arabidopsis thaliana columbia
  unsure (1)..(528): unsure at all n locations
nnnnnnnnnnnnnnnnnnnnnnnnnnnnnnnnnnnnnnnnnnnnnnnnnnnnnnnnnnnnnnnnnnnnnnnnnnnnnnnnnnnnnnnnnnnccttttttttttttttttttttaaaggactatccacagtacattgaaaaattggaactgataatagttgggtccatggtactaaaacaacgcacaacatttactttcaccagcaagaaaatctttggatcatatttttgtggggaccagacctttgaaaaagtcaaaactattgccatcagggggaagctcatacatttgattggcatctccaacagccagcaaatatccaaaagaagtcaaaccctggatagccacaacatttttgaacaactggggcctttactttggcttaaacaatcactctttgctcggtgggaaccctggtcctgtaaaaagctcttcaggagattaaaaccttgggccatgaatagatcgaagaatttttcaatttaataaaaaagggcccaagggtttccttctttaaggagggtggga

SEQ ID NO: 121638 - DNA, 546 bp, Arabidopsis thaliana columbia
  unsure (1)..(546): unsure at all n locations
atgatttnnnnnnnnnnnnnnnnnnnnnnnnnnnnnnnnnnnnnnnnnnnnnnnnnnnnnnnnnnnnnnnnnnnnnnnnnnnnnnnnnnnnnnnnnnnnnnnnnnnnccttttttttttttttttttttttgcgtgagtcactcatcattacaacattacatacaacaaactatatatatattcttcttggcctacggccaaatgttttgtctagagaactaaaatttaccaaaaacttaagggggtgggggttattgggacaaggatatagtacagccgagttcccgagcccgagtgtcaaaaaactgaccaggcatagttggggagagcaagctgggacctcccaatttaaacaggtttggatatcggctttccaatctattgaggcggggttaaagaatcgataggacggactattcattcccgtccttctttgtgtgtggcaagttgggaggtccttggaggggtagggaggctttggctcatgaatcaccgaatacctggccggcctttaaaggacctacctggggccctttggtggaaaa

SEQ ID NO: 121639 - DNA, 545 bp, Arabidopsis thaliana columbia
  unsure (1)..(545): unsure at all n locations
taggaacactatagaagactatgacgtcgtatcgccgcgtacgtaagctcggaattcggctcgagatgtttggcgttgatcggttcgatgctattctaccccctggaacaggagcgattatggctgtcggagcatctcaaccttcagtggttgcaactaaagacggccgcattggcatgaaaaaccagatgcaggtgaatgtgacggcagatcatcgtgtcatctatggtgctgatcttgcacagttcttgcaaacattggcaagcattattgaggacccaaaggaccttacattctaggccaaattactgctnttcgcatcccagtcttctctgcttttgattccatgggagcttgtatttctgcggtaatcagtttctttgatagaacaaaccttttaagattaaacataatcatttctttgtttgagatatatcttctgcaacattttctgcatggaaagcccgtccacatgattttgctactgaaaaaaaaaaaaaaaaaaaaaaagggccggccggcgactagtgacctcgtcgacccgg

SEQ ID NO: 121640 - DNA, 545 bp, Arabidopsis thaliana columbia
  unsure (1)..(545): unsure at all n locations
nnnnnnnnnnnnnnnnnnnnnnnnnnnnnnnnnnnnnnnnnnnnnnnnnnnnnnnnnnnnnnnnnnnnnnnnnnnnnnnnnnnnnnnnnccttttttttttttttttttttttttcagtagcaaaatcatgtgggacggcctttccatgcaaaaaatgttgcaaaagatatatctcaaacaaagaaatgattatgtttaatcttaaaaggtttgttctatcaaagaaacgggggaccgcaaaaatacacgctcccatggaatcaaaagcagaaaagactgggatccaaaaagccccaccttggcctaaaatggaaggccctttgggccctcaataatgcctggcaatggttggcaaaacctggccaaaaccaccccccataaataaccacatgatctgcccgcaacatcaccctgcatgggggttttaatggccaagggggccgtttttatgtgccacccctggagggtggagaacccccaacagccataattcctcctgtcccaggggggtaaataacataaacccgatcaccgccaacctttt

SEQ ID NO: 121641 - DNA, 542 bp, Arabidopsis thaliana columbia
  unsure (1)..(542): unsure at all n locations
nnnnnnnnnnnnnnnnnnnnnnnnnnnnnnnnnnnnnnnnnnnnnnnnnnnnnnnnnnnnnnnnnnnnnnnnnnnnnnnnnnnnnncctttttttttttttttttttttttttgtttttttttttttttatnannannnnnaaagaaccaccaagcccacaaatgggacagacaacaaccggcccaaccacgcgcggggccccccccaaaaacccctttttgttgggggggtggggcaccccaccgggggacccccggagaaaaagaggccccccccagaacaagcgaggggccccccaaggggggagaccccacaccccccggggcaggttttcgccccaaatccacccaacacccaagccccgaaaggggagagaacggcgttctccgccccccccggagccgcggggtggtgagggactattgaaacgcggccccccccccccttggagctctaaacgaggaacaccaaaaggggcccaaaaggaggcgaaaagagcccaccgaaaagcccgaaagggaacccggagggaagcaaccgc

SEQ ID NO: 121642 - DNA, 522 bp, Arabidopsis thaliana columbia
  unsure (1)..(522): unsure at all n locations
nnnnnnnnnnnnnnnnnnnnnnnnnnnnnnnnnnnnnnnnnnnnnnnnnnnnnnnnnnnnnnnnnnnnnnnnnnnnnnnnnnnnnnnnnnnnnncctttttttttttttttttttttttagttcaaaataacattggatataagaagaacgacgctattaccaagtcttaaaaacaaagatcagaaatcaaattaatacactccaaaaccacacaaggggggttttataacagaggggattacacgggactcggtttttgttttattgccacataccaaaagcactcaagagctgagctcccattggattttgagtctttagagccctttctagcaaaacagtttaggtagtacgatttgatacgcctctcccctggccacgtccaccatacccgtagccaccggcgccgccggcaggggcaccataaccggcataaccacgccctccataaccaccacggggagtaaccgggggtttnggccataacccacacgccctcttcgacctcctgggaatctcga

SEQ ID NO: 121643 - DNA, 541 bp, Arabidopsis thaliana columbia
  unsure (1)..(541): unsure at all n locations
ttaggtcgcactatagaagagttatgacgtcgcatgcacgcgtacgtaagctcggaattcggtcgaggttttgcctctggaagatcaggatgaaaagaagactccacaagtgttcaatgagctgagtttcgggaaccatgggggctgttgtgcaatttgcttggatactatacctcttcaagaaacagctatggttaaaggctgtgagcatgcttactgtgtgacgtgcatactccggtgggcaagttacaaggagaaacctacctgcccacaatgtaagcttccatttgattttctcaatgtccaccgcgctctcgatggaagcgttgaagatttcatgttcgaggagagtgtatgcctcctcctgagggcatcatggttccagccactggaagcagtggagcgggtttcagacaatgacaatttcaactatgatttcgactttccacctgagtatgaggaggaggatgaggacgacnatgaccttgacgagtttatatgcagggttcaagtcttcgattaggaaaccggaggtggggtg

SEQ ID NO: 121644 - DNA, 528 bp, Arabidopsis thaliana columbia
  unsure (1)..(528): unsure at all n locations
nnnnnnnnnnnnnnnnnnnnnnnnnnnnnnnnnnnnnnnnnnnnnnnnnnnnnnnnnnnnnnnnnnnnnnnnnnnnnnnnnnnnnnnnnnnccttttttttttttttttttttttttttttttttttttttggtttaccataaccacttaattttcattccatatgagcaattcccacatcataggggagagtgttttttactctttaagcaagggatcatttttgttggggtggataaatcaaatctagcacaaaggattttaacgacaggggttaaaaaagttctaccattattaaattttactgggggacaaattttcaagtttcaaagtcaaaggagtttggtcttttggggttggggggggttgatttaattccaggaaaaaccccgagtttttttttccaacctaaccaaggggttctttgcttttgcacttttacttgttccgaagtttttttgcaattttacttttatttcttttttttgccggtcttgttttttggggttgtgtgcttttttttgggga

SEQ ID NO: 121645 - DNA, 548 bp, Arabidopsis thaliana columbia
  unsure (1)..(548): unsure at all n locations
nnnnnnnnnnnnnnnnnnnnnnnnnnnnnnnnnnnnnnnnnnnnnnnnnnnnnnnnnnnnnnnnnnnnnnnnnnnnnnnnnnnnnnnnnnncctttttttttttttttaaacattggaaccttctgaattatataatgtgcgtttacaagcaaaaatttatttcatgaaatacatattgggtggaagaagaggaaacatgacactatacattttcatagtcttctgtggggggtgggagaagttattggggtttacatttatagctcttaagcgggtataaggtgggggtgagcacactgctgctgaacctaacaggacagccttccactggtttactaaccaccagaatggccaaggccggcaaagcccctgccgggggaaagaggatatttttcccagacctaaaagatttgatcacattggtggaggttttaaaatgaaaaattatgggcagaagccccggttaaccaattgggggggggtcaataatcccaattccccttttttggggggaaaagaaacaaaaaaagcttgcaaagagcccctg

SEQ ID NO: 121646 - DNA, 542 bp, Arabidopsis thaliana columbia
gaatgtattaggtgaactatagaagagctatgacgtcgcatgcacgcgtacgtaagctcggaattcggctcgaggtccaacgagacaaaggctttggtttcgtgagatataacactcatcccgaagctgctcttgctattcagatgggtaacactcagccttacctctttaacagacagataaagtgctcatggggaaacaagccaactccaccaggtacagcctcaaacccacttcccccacctgcgccagctccagttcctggtctatctgcagctgatctcctaaactatgagaggcaattggcacttagcaagatggcaagtgtgaatgcgttaatgcatcaacagggtcaacaccctctaaggcaggctcatggaataaatgccgctggagcaactgcagccatgtatgatggtggctttcagaatgtagccggcgcacagcaactcatgtactatcagtaataaacctcagttcgtggcgccgatctcaagtttcaatcctctttggcttttctcttttttttttgggttggctag

SEQ ID NO: 121647 - DNA, 563 bp, Arabidopsis thaliana columbia
  unsure (1)..(563): unsure at all n locations
ccgnnnnnnnnnnnnnnnnnnnnnnnnnnnnnnnnnnnnnnnnnnnnnnnnnnnnnnnnnnnnnnnnnnnnnnnnnnnnnnnnnnnnnnnnnnnnnnnncctttnttttttttttttttttttttttttttttccccctctccggacacgggtggaaggccaaccgggtccacggggtcgcccgaccccgcccgggncaaaaaaaaaaaaagaagggacccccctttttttctttaaggtccgcgggccccttttcgggtgtgggggcaaaaaaaaacccccccctttttttttttgggggtttcccccccccccgccggtttttaaggggggggtggtccccccctcccaaaaaagccccacgggggggtccacaaagttggggttcccccgggacctggacacctccccccccgaaaagcggggcggcctcgtcccggggtttgtgtctttcgcgggggtccaccccagtttttttttttttccccacctcttggagtgggggggcaggacggcgcgctccttctcgccccgccgcgttgtaaggcccccccctcgtttgg

SEQ ID NO: 121648 - DNA, 538 bp, Arabidopsis thaliana columbia
taggtaccactatagaagagttatgaggtcgatacgcacgcgtacgtaagctcggaattcggctcgagataaaaaaaaaaagcaagtccaagcattaaattgagaaaacaaaagtacattatccgtaccggctccggtcagatctaattattaagcgcatcctcctggagcaaacccgacccgggaactcgctaagtcgtatacaacccggaaaccctgttgctggatattcccaattatggatagtccgcccatcgtaccggcaaacgcaaaacagaacttgccgttggtatccacagggatcaggtaattcgtcgccggaagtgatacgtcagctccacggaaatgtaaaaccaccgtcggtactttaacctcgttcatattggagagatcgaaacacgtgtcgaagagtgagaaatccggagctcttttcaatgtcttagctccgacccggaacgcgtctctcatagcaatataagctggtcggatcaaccgggtcacagacgtacccgaatcgataataactccaccgttaccg

SEQ ID NO: 121649 - DNA, 528 bp, Arabidopsis thaliana columbia
  unsure (1)..(528): unsure at all n locations
cnnnnnnnnnnnnnnnnnnnnnnnnnnnnnnnnnnnnnnnnnnnnnnnnnnnnnnnnnnnnnnnnnnnnnnnnnnnnnnnnnnnnnnnnnnnnnnnnnccttttttttttttttttaaaagtataattcaaacatttattattattattataggaattgaaagaaaattaaattttcaaaaagaccgcttacttgtttattatatacacaggagaagagaacaggctctctctccagtttgtctcgagaaaaccaaaaaaaaagatggtaagaaaaaaaaaagctttactcttttctctgtgccccttcttcctctctcttccttccttctcttcccttccatccttccaaaccctattgcccaattctcattcccttccttgggcttctcccggataattccaacccgactccgactccgagtgattggtaaaatccgaatttgagtccggaccccactccgagtcttctttttccattaatataacctcgaccacatgggtgttctctcctccaaaaaacacccga

SEQ ID NO: 121650 - DNA, 457 bp, Arabidopsis thaliana columbia
  unsure (1)..(457): unsure at all n locations
nnnnnnnnnnnnnnnnnnnnnnnnnnnnnnnnnnnnnnnnnnnnnnnnnnnnnnnnnnnnnnnnnnnnnnnnnnnnnnnnnnnnnnnnnnccttttttttttttttttttgtttctttttcaacggatttttttttaaaaaaacagagctcactcaaattacataaaagtgggagacccagagattatcaaaaccatgacctcataagctctcaaaagtatttatcacgggggtgcgaaaaacccacagggggtggtattactatattgcgtcataccaccgctctgttttctactcctcgacgacaaagaagaaaaagacgacgaaattgattgggaggaggaggaagagggaaactatgccaccttcaaaaaaaaaaaaaatttcttcttccctcaaggacggtttctgagggagtgttttctctctgaggttatccccgggaactctccataat

SEQ ID NO: 121651 - DNA, 534 bp, Arabidopsis thaliana columbia
  unsure (1)..(534): unsure at all n locations
nnnnnnnnnnnnnnnnnnnnnnnnnnnnnnnnnnnnnnnnnnnnnnnnnnnnnnnnnnnnnnnnnnnnnnnnnnnnnnnnnnnnnnnnnnccttttttttttttttttaaaacaatcaaacttttttactttaggaagaagagtatttgcttacaaagtttacatagcacaacgaaatcattttttttactgttttacacaacaatcacaaaacccaaaggtttatgtggggagggatcactataaaaggggtatcaacccgaaaagctgcattacacgggaaccgccacagccccattaacggggactccttcaccgataccgccgttgcattttccgtaaagagaaaccacgtttttgtttttctcgagccaaattccgagtttacgtacgcgggcatgcgaagttatagtttttctataggggccacctaaattcaatgcgcgggggcggggttcaacaagggggggggaggtggaaaaacccctggcgttacccccaacttaactcgcgctgtgcggaaacacccccttt

SEQ ID NO: 121652 - DNA, 454 bp, Arabidopsis thaliana columbia
ccccacgaagcccaacactgataggaatcttttaacagaggggggagggcggagaaaaaaaaacagtcagatcacatagcaacgacactctgcaaattatgagtccacgggcattaagggaatgtaaacatgttcccgcaataagcaagagacgtcaatgcgatacagatcggaatgtcctgacccggcccaaagcattttttttttggggggagagagtaaccgaacagggcccccgaaaaaaacagacgcccagatctagctaacagctactgacctcctgcaggtgcaaagcgatcacaggtgtgacgataggcactctggggcgagcatagaacaattttgaacgcgcattaaggtgatgtagaagcacaagcttgagtactcacagttggaccgacggagaccgcaacgctagcaaggccgaactgagacgtcaagtacgcagcgggga

SEQ ID NO: 121653 - DNA, 570 bp, Arabidopsis thaliana columbia
  unsure (1)..(570): unsure at all n locations
cggcagcgcgcgcacgccccccccncccggaagtattaggtacactctacaagattatgacgtcgcacgcacgcgtacgtaagcttggatcctctagagcggtcgcccttttttttttttttttttttaacaaccaaaaatcttaatctctaattaaccaaatcactcactggtacagaacttgttaagattcaatccatgaacagtttacaaaactagcttcatttggctttcttctagcttaattcacgtgaacaagaactgttttttggggggactcatcagagctctaaaagatgaaaaaaaaattctagattttttatttagaatcatgagtggtccaaatgtatttggtacaaagatgggggttgtttgatctatcttaagaaaaaaacgaaccccagatctgggtttttcttccggtaaaacaagcggacgcaacaggtcatgggggggcggggcttcttgttcttgggctttaagattacctattaatataaaaataataatactcttacatttccttccagaagaacccctaaacaggtcagggtgttgaagttaatacca

SEQ ID NO: 121654 - DNA, 541 bp, Arabidopsis thaliana columbia
gccgcctacgtaagcttggatcctctagagcggttcgcctttgggtttttttttttttttttaccactaaaggggcaactcaaagaccaatgggtataaggtggcccaaacccgtcaaaaaaaatcatatcaggggaaaatttcccgggaaacaaattaaaccagaccttgtgtttgcctttttgccaggggaaaaccttttttttttggaaagttgcggaaacttggattggggaaacatttataataaaggaggccaaacatttaccaaagaaagttaaagggatctggcccttggaccttgggtaaagaaaagaaaaaaaaaatgctttggggagcgggagcgagggaaaatccccttttgggagaacagacgagatggaaaaattgttttgatgccccgccgtttcccaacctggggaagggggaggtccaaacctttttgtttttttttatttgggaacgcattgcggggccaaagaaacgctatcctttacacgggggcttgcggttctaagaatcgggggggacccccgtctct

SEQ ID NO: 121655 - DNA, 360 bp, Arabidopsis thaliana columbia
ccatacaaaggcctaacttctaaagagaggccaacccaaaccaaacctttattgtccccaacctaggttaaaagggagattttttggggcggattacttgggggggttctataaaaaggttcctggacttgttaccccaacggaccccctttgggtttggcccaccccaccgtgagacggggtttttcccccaaaaggggggggtccttagggtggcctggccaaatcttttaaaaacccttttggggaaaggcccctaaaggagaggttatgttttccggcccaaaacccaattttttggcggggcccactggcctttagcgcctaggttttctaaaaaccccaggggcgttacccaaa

SEQ ID NO: 121656 - DNA, 486 bp, Arabidopsis thaliana columbia
cgagcgggaggcgaggcagcgccgaacgaaggcgccaggagcccagcggaccacgccacccacgacagcagcgcgaccgacgccgcgcgagccccgcgagacacaggagaccgccgcccgagcacgcgcgtctttttttaagaagggggggggacaggcccgacagcgcgcacgcacaaaaaaagaacccgcaacccgccgacgccagccgggcgacacgagagggcgccgccagcacggcaggcacgacaaaacgcaggaggccagcgacatgcagagacagagagcaagccacgagcaaaaagcgacagaccgagcaagagggggcgcgaagcagcgccgaggccgcgaacacacagcgacgcaccgaaggcgcccgcagccccgcgcacgacagcgagaagaccgaagccgcaggagacgcgcccgaagcgaccgaggcgcaccagccgccacaacgccgagcgaaacacagtcacaaccaga

SEQ ID NO: 121657 - DNA, 503 bp, Arabidopsis thaliana columbia
atgacgtcaactgcacgcgtacgtaagcttggatcctctagagcggtcgcccttcggtttctttccttatctttaatttccccatcatcctcgtttcatctggttcacttcctttttggcgcccactcaaacttttataagatcctcttctttcaacagggttctctccccttacaaaccaaaaatttttttacctcccaggctttcttcattggggggggaaaataaagtttctttgacccaaaaaaaaaactttcaaacccacaaacatgaaaaagagcaactttttccaggttcctgagttgggggaaaaaccaagacttctaaaaataaaaatcacaagggccgtgtccgaaaaaccggaccccctaatggacaacccttctaaggaccacccctcaaaaagacctccctgggagactcttctcctttgaccccccgaaaaaaacttagcccatcctcaatggcgggttccacaaaaaagaaaacaaaatttcccccca

SEQ ID NO: 121658 - DNA, 470 bp, Arabidopsis thaliana columbia
ctatagaagagttatgacgtcgcacgcacgcgtacgtaagcttggatcctctagagcggccgcccttggggttttttttttttttttttttttttttttttcggggaagaagaattttttttggaaaagggatattttccactttacatctgaaaccgtcaaaattcaggggggggctacaaagaaatttctccaacactcccttggacagagaattttttttttaggggggagataccagcccagactgggccaaaattatccttctcccccaaaggggaacctttaatccctctttagccagaagccccccaatttatgggccccccctcccaccaaattcgtgagtgaatacttcccccttgggaaggaaaaatgttctcccgtggaacaacttccttcctggaggggcaacaaacatatttgagggtttccgccactgggcctttaaaactcccctggttcttttt

SEQ ID NO: 121659 - DNA, 571 bp, Arabidopsis thaliana columbia
  unsure (1)..(571): unsure at all n locations
cccggggggccggggctcaataaaaaacccctaaaaattttccaccccccctttaacctcttaaaattacctaaaaggggccctcaaaaaaaaaaataaattttccccccccctaacctcttaaaaaaaaatggccaaccctttctctcccgggggtgtgggggncacaacccccgggcgcccgcaaaaacaataaccccccaactctggtctccccccaccacacccccaaaaaaacaaaccctttttttttttactaccccagagtggccgggcgccgcccctccaaatttctttccttttcgccccacgcgcccgccctcaatccgccttaaaaagaggaaaagcgctcctccctctcccgaaacaatgcccgccggaaacccccctcccccccccctctacgggcgccctccttaccttcgcccccccacaaccccccccattttcgtttccccagatcttctccctctcaaaagcgcgcgcgcccctctccccaaccgaccgctcgccccccaaaacacctccttgccttcgttgcgcgccgccggccactaactaaacaaaaaaa

SEQ ID NO: 121660 - DNA, 490 bp, Arabidopsis thaliana columbia
ccgcgtacgtaagcttggatcctctagagcgttcgccctttggttttggttttttttttgctagctcaggtcttgatcttattcgaacatgaaggtgtcatacataatgagtcacaaataaacatggaacctttccttcttatctcatttgaagcatcagcagctccggtttctcgacatactctttccactttttttagaagggagggaccggtgccccatttagaactctatgagccccagcaatgttacccatcattatcggtgcggggatagacgggtcctttttttgagaattgtggaactttgtcgattcttccaagagcgaggattgggacttccggggaggttaaaagagggggatccgatttaccaccaatggggccaatggtgcttagaggtatgggtcaccaaacacatgctgggggttaagtttgggtgttgccggccgcggggtgcaccccggaaatgcgggccggtacctgcgggc

SEQ ID NO: 121661 - DNA, 541 bp, Arabidopsis thaliana columbia
  unsure (1)..(541): unsure at all n locations
cccccccctcccgagtgcccggtgccctttttcccgcggggagcgcggggtcaaaaaaaataaaaaaatcttacccccccccggatggggctggggcgcaaaccatctacctccctacataaaaacttgcggagccacgtgcggcgggaaaaatcccggctccccctctcctttaaaaccttcccgcgaagactccaccaccccccccccctcctttaaaaggggggcgtatggngcccccaaaatctgggcgacaccaaaaaaagattaaacccccccctcccccccccacctcccgcgncccccccacctccgctgcgcacatcatacaatcccctcaaaggggggccacccgcggcttcccctttttctcctcccccacaccaaaaacttctttccacaaaaaccccgctcgccctcccccccccaaaaataaaaacaaaaagcgaaacggcccctccctcttctctccaaactcccccacgcacaaaacccctctccccaccacaaacaaaaaagaacgcccggcgcgccaaacaac

SEQ ID NO: 121662 - DNA, 352 bp, Arabidopsis thaliana columbia
acggggggggagagggcgggaccaaaaaaaaatacgaaacaggcggggcgcgacagggccggagagaggcaactagcagcaccgcaccgaccccggcgtaaacgtcagcacgggcgactacggaaacaatatgcaacgaataggagcagcggcgcaccaggagggagagggaaatttttttaaaacaagggaggggggacaaaacagaaaatttctgcccgacgcaaaaaaaaacaagaccgagacgcgggtgtaaatggccagagggccacgacacaattccgtccgcacgcaccgagtgcccgcgagacatcgccatgcggacaggaaggagtcggaggcgtcaggcgag

SEQ ID NO: 121663 - DNA, 473 bp, Arabidopsis thaliana columbia
  unsure (1)..(473): unsure at all n locations
aagtacccctcccttattccccgtggaccccgcctacaaaaactttttatttctccctttactttttttataaacgcaaaaacaaatttcaatagttcttgtaagccccaacttttaataaaaaacataccaccatttgggagggttttgttttgcataatatttttcccccctggtgaagaaaaanaacttaagcccaccctaaaaaataaatttaaaaacccntctcaaataaaaaccaccctttttttttaaccccatcccccccccatgggttttttcaaaaaaaaaaaatcccttacccccctttttccgccaatccctttaaacttaaaccccatccccccaaatcttataaaggggccctccctttttattatgcaaaaccaatcgctaaaaaaattttcaaaaaaccaccgccaaatttaaaaagataaatttttcccctttccccaaatacccccccctttttt

SEQ ID NO: 121664 - DNA, 523 bp, Arabidopsis thaliana columbia
gcacgcctccgtaagcttggatcctctaaagcggtgcgcccttgggggcggggttttttttatttatttttttttaacggtggtgggctttattttcacgccgagagattttgttccccgcccccccaaagaaagggggtttttaaaaaaaaaataaaacattttcaatgtcctttgggggcccccaaaaaaaaaaattttttttggccgtgagagaaccccccgcggggggccacataaaaaatattagggcgcggaagaaaaaaatttcccctttccccggggggttgttataaaaggggcttttcttttttaagaggaaaaacaaagaggcgggggagatataaaaggcgggggcggacagttggttgctcggtgggaacagtctcttagaaagggccgcctctttataaaacaacaccgggggggtggggggggccgcctgtatgtgggttttttaccccgacctccgccccaaagaaatatagcgcggggggggaaaagcggaggatttttttctttt

SEQ ID NO: 121665 - DNA, 521 bp, Arabidopsis thaliana columbia
  unsure (1)..(521): unsure at all n locations
gtacccgtcccgaattccccggtggacccacgcgtccccataaaattnntcttcttcttcttcaacgttcctctccaaaatcctcagaccaagaaatcataatggccctcaatctaatccctttcccctaaaatanatgatcaaaccgctattcaaaaaaccttttttctccaagggtgagaggggatnaaaacattctgatcccttaaaataaataacccccccaaacaaaaacacaacttccccctgttccaaaatcactaacttcccctttttataatcaaaacccttttttttttctttaaccctactggcccccctcngttaaaaccccacccggatccacccactttctctccccatttaaaaaactccaaagccaaatccttaaaacatcccacccccagcctcccctatagaaaacacccctcacatcccccctaaattccccctccccacccctaaggaaaacccttcttctcttttaaccaaatctttttccacccaaaattaaaaacccc

SEQ ID NO: 121666 - DNA, 422 bp, Arabidopsis thaliana columbia
cggagcctccaaactttccccctggggaggccttttttaaagtgcaggaacgggaaacaaacagatcccaaggggggagacaacacacaggccaaagggcaacctgggccgaaaaaacggcgggaagaagtcggccaaccaccaaccgttttttcgggggaggaaaaaaaaagggcggggacaaaaaaacgcagcaggcgaacccggaattaaactaggaaaagggggggggggggtgagttaaacagggagcgggtaaagaacggaagacaggaagcacgccctccacggagggcggcagcatcccgcgccgcccgatgacaccgccacccgaagatagccagacagcggccagaacaccgaggcccgcgggcagccacgacgcagacagcgactagagcgcgagggcaacccacggaaga

SEQ ID NO: 121667 - DNA, 411 bp, Arabidopsis thaliana columbia
  unsure (1)..(411): unsure at all n locations
cccttcaggtacccgtcccaattcccggaggaacagcggttctctcaactttccngcaccccattgcctcaaaatatatattctctctctctctaaagctattatcaagaaccctcctttctatattcttaaaagggtaaaaaatttatccatcccaaaaccattttatactgcgggggggctaaatccacaatnaaaccataaaaacccgacctcacttccccgaaaatcaaataaaaaacgggtcttgactcccaaaaactattttccccacccaaccccggacaagatccacacatccctccccgtntttccccccccctaaaaaaccgggggnntcttccccacccctttttcttagcggggaaaacttacacccacccccccccccccgggggggacgcccttttt

SEQ ID NO: 121668 - DNA, 511 bp, Arabidopsis thaliana columbia
tgacgtcgaccgcacgcgtacgtaagcttggatcctctagagcggtccgccctttgggtgtggccttcttttttttttttttttttttttctttttttttttctttttttttttttattttttgtttcttttttgggccacgggttatataatccaactgcccttgggaaaaaattccttaaaaaacacccccctccaaaacctttttttttagagggggggggtttttttccccaaaaggcggttttaaaaaaaggttaaaaaaaaaatttcccccttaccccccacaaatttttccacccaggggggggttttttcccacttttttccccaaaaaaattttgggcaactaattaaacttctttggagaaaaaccccccgccttataaaattggggccgatttttttccccttatttatttttttgccaaagggggtatttaaaaaaaaaaagtggtgttttttatataaacccccacctccgtgggtatttctttatgggggcgggggg

SEQ ID NO: 121669 - DNA, 520 bp, Arabidopsis thaliana columbia
  unsure (1)..(520): unsure at all n locations
ttcccctcgtccctcccaattcccgtggaccaccctccacaaacttccggaaccctgtttacactttaagcaatcctctataattttattaccctcacaggctgaaaacttttattaacctcccatttaaaaaattncaattnaccccctttttttaaaggacctttctttcttaaaaattccaatataaatttcacccctccaatctgttttcttaaataattcaaaacctttcaccccccaatttatttttcattcccgaacaaaaaaattttttttaaacccaatccttaacgcccaacctaaaaaaaaacttncccagaatcccatttncctctttttcccccccataaaacccccctatttttttgaagaaaacaccctttttaaaaaatccctttctttaaataactccccaaacccctttttttgttaaaaacaagtaaaacaccccatgtttataggncccttttttttctttacaaatatttcccccttaggaaaaataaaaaatccttct

SEQ ID NO: 121670 - DNA, 558 bp, Arabidopsis thaliana columbia
gggccccccccgcgaaggggcgcagggacaaacgattttttaacacgggggggggggggggcgcaaaacaaaaacccccgcggcagagccgggggcgagccggggaagcatcgaaagagcgcaagcggtacccgccgcagacgcggcagaggaggcgcaggtgaggcagagcagaccggcgaagcggcgggaggagaagcgaggggggagggcgcgcgagccgagaccttttcttcttttgggaggtgggagaaagaagcggcacagagggaggcggaaagaaaagaacaggggaggggccagcagcaggaagagggagaggggagatatggcgtcgccgtggagcggagtgcgagcaaggaagttgcagacccggggcggaggggagagaccgcgaggaggcgcgcgtgaagacggcggtccagcggcgcacaagagagagagcgaacgccgcaagccatgggcgcgagccgcgcgccggggccgagaaagccgcacccggcgcgtggaaaaatgagtagcgagagcgagcggcgaaagaggacggcgggagatgga

SEQ ID NO: 121671 - DNA, 518 bp, Arabidopsis thaliana columbia
aggaaaacgccccccgggggaaggcgaacagagaattttcgcaagggagagagcggccaaaaaaagacgcagcgcgggcgccgcggggccacggcggagccagcggcagtgcaacgcggggagcgggaggaggcgagcgcgacgcaccgacccccggaagcgcgaggaagaagaaggaggggaacgccgcgagagggcgttttttttaacggggggggaaagagaacagagaccgcgggggagcgggaaagaagaggaggagaaggacgaccgccaaacggagcgacgcggacgaagacgcacacgccgaggccgcgccgcacccccccagcgcaagcagaccgaggccgcggccgccgaggagagggcagctgaagctaacaaccccaggagagagcagcggcgagcaccggccccttgggcggacgaacggccggacgcacaacgagagcgcagacgcgcgagcgaatgggcagcgccggcaagggccagacggaaagaaagcgggcgcacgacaa

SEQ ID NO: 121672 - DNA, 174 bp, Arabidopsis thaliana columbia
gcccgggcccgattatcccggggggcgccgggcgggccataaaaacaattttaacccctaactcccaaatccctttcctctttaaaaatttttccccaaataaaacgccttctttgtccgggacctagatttcaaaatggtctcccctctcccggaaaaaatttctcccggggg

SEQ ID NO: 121673 - DNA, 500 bp, Arabidopsis thaliana columbia
aagagtatgacgtcgaacgcacgcgtacgtaagcttggatcctctagagcggtcgccctcggggtgggggccttttttttttaattatcatttttttaagagatgctttttttttttttttaccacaccgcccggccctcgggggaggccacagagtaaaaacccaaacccccccctttaaaccggcggaccttaaaacccccccccctcatagtagggggggtggcccaacgggggaaaaaaccaaaaaaagggtccacaatttttaaaaaccttttcttggccttttgggggggaaagggccccccagggttaaaaaaaccctctttttggtaaagagggggacaaagccgcccttttccccccaccctgggaaaccccgggaaaaaaaaacgcggggggggttttcgggacgaccccaaccccggtttaccccccaaccgggtttttgtttgggggcggggcggggttttcctcgggaaaaggatttccaaaagggg

SEQ ID NO: 121674 - DNA, 483 bp, Arabidopsis thaliana columbia
cgtaagcttggatcctctagagcggtcgccctttggttttgttttttaacagaccaaaaccaacacatttaaaaaaaccttaatatatacatccaaaatattaaccattagacccagaatctcaattttttcaaagggttgataaccatttacatgtgtatatcatctcaaaaacaaaaattgaattttatgggagagtgggtctggttctttgtgggggcaaaataaactaccttggaccagataggtccatggcgaatgaatctaacgctgggatatcatcttcatcttcaaaacctgaggagccaaacaaatgtttggtttggttggtgccatcaaaagaagggaataatgcctggaagacaatgttggcattgggaaaaataggaaatggtcatggtgaagcagcccattttttaagtaatccaattccttcaagcatggtgaactactttaaacattttgggtctgggagggggaaaa

SEQ ID NO: 121675 - DNA, 528 bp, Arabidopsis thaliana columbia
  unsure (1)..(528): unsure at all n locations
ctaatacgattcactatatggaaagctggtacgcctgcaggtaccggtcccgaattcccgggggggcccgcggcgtgccggaaatctactcaaccacgaggattcacatgtgacaacccgcggttagaggaactgttggtcacattgcacctgagtatctctccaccggtcagtcttctgagaaaaccgatgtctttggggtctgtatacttgggcgaaggctcatcacaggaatgagagctctaaaatttggcaaggctgttaaccaaaagggacctatgctagaaggggggaggaacctccaccgggaattggagggtgggggagcctttaaaccggagacggggggaccacctacaataaattgaaaggtgggaagaatgcctcaaggggccctgctctgcacttaatttctttccagcttaacaaacccaaatggggtggaagantccaagtgccttgagggattggttttacttgaaagatgggttgtttaaatggaccttttaattttctccattgccaact

SEQ ID NO: 121676 - DNA, 424 bp, Arabidopsis thaliana columbia
atataaaagagggcgcgcagcgggtgccgacacgagcggacagagagagccgccgtccacgcatgagccgcgggaccacatacatgccaagctgcgcaatgcaaagagagcacggagaggcggggactttttcacgagggaggggtagacacaagcataaatagatcgaacaaataaatggagcaaccaaggagaagggagtcggacgggctgcaggccagacgcgcggaggcaccaaaatcagcaaagggcaaggccgttcgtccgctactgccgcgcggagccttccaacagcacccaagcacaaccctgaagagagcgaatcgacgccaaccgctcgaatcccgtgcgagcgccccccccgtcggagatgcgagagctatcggggaagcacgacgcgaggccgggtagcgcgggtcgcccg

SEQ ID NO: 121677 - DNA, 526 bp, Arabidopsis thaliana columbia
  unsure (1)..(526): unsure at all n locations
gctggtacccctgcaggtacccgtccggaattccccggtgggcccaggcgtccgattttgggatttagggtttcccgatttggaagccgattcatggggagtttctttgtttttggttccaaaattcccagagaagattctgggtctcctatngattcaatggacttgggccgatttcatttttctccaaatttgaaccagaggggggggtgggggcccagaataacctttcaaccccttggagcaattttgaaggcattgggcctttttggaatggattccctcttattccccccagggaagaaggggtggcccccactcgccaaaaatggcttggggtttggagggtgtccacgcgaaaaaatgggtttttggttttgccaacattccccttttttttctgctaagagcgcgttgttgggggccccttaaagaggcggccaaaagggggagaaaaaccttccccggccctcttcccccgcggggagtttgctggggggcttctcataaaaagggccgcgcccat

SEQ ID NO: 121678 - DNA, 529 bp, Arabidopsis thaliana columbia
  unsure (1)..(529): unsure at all n locations
agttttatagccggagacggcccgcctacgtaagcttggatcctctatagcgtgccccctttggttttttttttatacaacaaaatgagaatttttttctacactcatttaaaccatttcaaaggggcattacataattttactcacaaagtatcataacaaatctgagaatacaggggcctcggaaaacaaaatagggtggctttgtgccaaaaaacaaacacccaatattttattttggtggggggggagnttgtcccaacgaagaagcctcaaagaaaaattcagtgtgacaacccagggcggctaaaacagacccgtggcaccgcgtacttttttattaaaaacccccttttccaacaaagacccactcccacacgacgtacaaccgagaggtggaataacataaattattgtgattccgcacaactaatcaccgcaccgccactgaaccaccgagtatgcttacccacctctaaccattaccgtattcccagggagagtttttgctatgcacgctataactact

SEQ ID NO: 121679 - DNA, 568 bp, Arabidopsis thaliana columbia
ctatagggaacagctggtacgcctgcaggtaccggtccggaattcccgggtcgggccacgcgtccccggacacgtgggttttaccctatccatagggttttcttcgctctctatctcctcgatcttcatgggcatctctctctttggtataaccggagctaattccggtccgttccttcttcatcctccgcttatccctctggtgtgcgctttcccccggggtttcccttgagaaatcaagccttttccgtttttcctgggagtcttgagctcaaatcatggcctcaaatctttaatttctgcccggggaaaataatttttacccggcggcgcgccatataccccaaacccaaaggaggctagctctcttggtaccccttgggaagttcccctcatgtttatcccccccccaaccaagaaaacaccgggtggttgcccccacaatcttcaaggcttccaaaaaaaacccctctccctggtggcctccccaaaaaagggtttttgaaatcttaagcgcttccctccccacaaaaaagaaggctctcccctttgcctccaaccagggctc

SEQ ID NO: 121680 - DNA, 157 bp, Arabidopsis thaliana columbia
tatagggacagctggtacccctgcaggtaccgcgcccgaattccccgggggggcggggcgtgcgatctttatggaagaagacgggtcttattggggcgggtgtggcttcaagagatacttcatccaaccatcaattttcaagggggttaccgattcc

SEQ ID NO: 121681 - DNA, 530 bp, Arabidopsis thaliana columbia
acgcacgcctacgtaagcttggatcctctagagcggtcgccctttgggggggggctttttttttatttttttttttggcttaggaaagggaaaaattactggtgcctggtaaattaaatccgggggggaaccttttaaaaaaaccaaaaaaaaacttttataaacttcaacaaagttttttttaaagggggggaaatttttaagggggggcgcgtataaaaagaaagatctttttgaagaattctttagcatattttagcccttcttggctttggtcgtccgagcttccgggagaaaaggtttttttaaatagacctgggcaatttgaaaaatgggttggaaaacaattttgaaacttaaccccgggctttggggttttaactgggaatcttttcccgttaattttggtttgtaaacccccgcacaaagacccaattttttgttgttttttcaacacaaaatttaagatttggggatgggctccaaggggaaaaatccttccttccatttatccccaaaacagagcaaag

SEQ ID NO: 121682 - DNA, 173 bp, Arabidopsis thaliana columbia
  unsure (1)..(173): unsure at all n locations
cccacgatttatatagggacagctggtacgcctgcaggtaccgggccggaattcccgggggggccgggggtccggaacctgtgtctgacaagggcattgaggaggtanaagaaaaatttactagcgaatcagactctattggagactcctctaaattaaaatctggggatacc

SEQ ID NO: 121683 - DNA, 491 bp, Arabidopsis thaliana columbia
cgtaagcttggatcctctaaagcggtcgccctttggtttttttttttaagcaaaaaaacttgtgaatcatattaatatcaccattaaacaccaccaccaattttaaatatgggggggcttcaaatatctgactataataatatagagcgattgagcggtttttaataatacaagggaaaaacattttttttagggcgagggggagttaccggcccgaaaacttttttaaacaaggctccttaggggccccgttttttttgaaaaaccaattacctggttgggttgggggaaacggagccagaaaaagggcggtttattttcttaagacccccggagaagtcaccacaatgtttttttttggagcctccgaaccatatgtggaacccaacccggtggaaattgggaaaaagaggtttattaaacgcccgcgcgctatccaaatttttggtttttcttcacccccccaaccatttgtagaggagtgtggttgg

SEQ ID NO: 121684 - DNA, 176 bp, Arabidopsis thaliana columbia
  unsure (1)..(176): unsure at all n locations
aggacagctggtacgcctgcaggtaccgggcccgaattccccggtgcgagaggggcgtcccatcaaaaactattttatggtgggggagctggcatgattggaaatgataattttggggtcgggtaacccctaatgcctgacagaaagaggcacntccagggaaggggcgtgggggg

SEQ ID NO: 121685 - DNA, 484 bp, Arabidopsis thaliana columbia
accccccacggcccaaaacagggagcgccacagccacacaagcgcacccccccgcggggagaaaagcgaccgtttaataaacaaccaccacccaccacgcgagaagacgagggcgcctacacgaaagagagacggacaagatacaggggagcgccgccccaacgcgccacatgaagcgacgacacgaaaaagacagggagggcagcccgagggccaagcacccgacaacagagacaggagagaagaagacacgccgcggaggggagagaggtctctttttgaggggggggggggggcgcgcacccagactgagcggggaccgcgaacggaagaaaaaacaaaggaggcgcgcgcacacagcgagcagaggcgcaaacgaacagacaccaccgaagaggagcagggacacagcaaacccgaccagagagagcgcgaggaagacccaagacacgccgacaacgcgagcagagggcccagccaagca

SEQ ID NO: 121686 - DNA, 594 bp, Arabidopsis thaliana columbia
gccccccggaagtattaggtacacttagaagactatgacgtggaacgcacgcgtacgtaagcttggatcctctagaggggcggccttttgggtttttttttcagacaaaatagaataattccttaacaaacgtgttgaaatcaacccaccagagatttccatatcaaagaaaaaaaattttatgaacaaaaaaagagagtggtcttcaaaaaaaacaaacaatatttgggcaaaccgggtgctttcttttagggggggggccaccccacaaaaacaaaacccacgaaaaacatggaatgtgggtttggggcttcacaaaatccttcaacgatgggaggccttcgaaaaggagaaaaggactttccttccttcggtcatggcaggaggggggggagaataaccttctttcccgccaagaggagaaaaaaaagcccggtatatattggcccactgggggctccccggggggctgccgcccatttccttccccccgccagggactgtgtgggggcgcccacacggtgttggggtgatttttgaatgcgccccaacttaaaagttggttttttggggcgaaccccacccgcgaaaaaa

SEQ ID NO: 121687 - DNA, 545 bp, Arabidopsis thaliana columbia
taggtacactctagaagactatgacgtcgcacgcacgcgtacgtaagcttggatcctctagagcggtctgcccttttgtgtttttttttttttccataaaaatgatgatgtattacttcaacaacacaaaataaatctcactcgaaacagagaacagtgtacacaaaagcttattccacaaagcgatgaccaaataaatgggttttttctataatcaacgatgcctaaattatttcacggagggggggcaaagaaacaaaaggaatcataaaaaaaaattttgaagctccgagggcaatgcttaaaaaaaaaaaagaaggtgaaagtgcccatggccgataaaagaactctcacaaagggccactgggggcttcctccggccgagtgagcggggagcccccccccccaacggagggggaaaaagggcggggtttgaataaaactgtggtgcctaagccccccgaattggcctctgaaacaatagggttccctttttggcccgggaaactttatgggcccaatatgaaaacagggccaaaaagaca

SEQ ID NO: 121688 - DNA, 573 bp, Arabidopsis thaliana columbia
  unsure (1)..(573): unsure at all n locations
agggcaagctggtacgcctgcaggtaccggtccgctatattccccgggtgagccgagcgcgtccaattatatgggctctataacccacagtagcagcaatggaccttccccctcctctgattgttggaacttcgcttgagggcctttcaccaccggagggaatgggatggccttttgcctaattggcactggtttcttgcccctttgaggatggcctatnaacccggacaacccgttgtaaaaaattcccccggggccttgtaacattgcccttaaacccccttttttaattgcccaagccaatttttgtctccagcctgctggttcctgggaccttgcttgctaattttgaaacccttggtatgttctcagaaacccaaaaacggatcccattgttcccaaacccaactgcggggagttaaaaaccccaaagtcttgttaacaaccccacctttttaccaccttcgcgggggaggggggactctccaccttagacggaggggggaagcccccggcgcacctttttgaaatttctttatccccctacgccattttaacttttttttttttttt

SEQ ID NO: 121689 - DNA, 244 bp, Arabidopsis thaliana columbia
  unsure (1)..(244): unsure at all n locations
ggggggggnaaaccgccgccccccccgnngnggggggngggcggcacgggggcattttttcnnggagcgggggaggagggcgcgccaaacaacaaagaggaccagaaagaggggacgggtgcacagcgaatcgttgcgtcgaggggcagcccaacagggacccggtccggaggggagatgagggaggtgatcaccgactatgaccagagtaaggatggcactgtgtgagaggacggcagagccc

SEQ ID NO: 121690 - DNA, 497 bp, Arabidopsis thaliana columbia
ccgcgtacgtaagcttggatcctctagagcggtcgccctttgtttttttttttttaacaagaataaattagtaaactcaaagcatgtagtaataatcaaatgaaaacaacaacaaagagtgtggagtctaatacatacacattacattaaaactattgttcagattccaaatttcttcttcttgtccaatctttttttctacggggggagagagagaatggtcttaatagaagaaaaacagtccaagagaattatcatcttggcaaatcttcaaatatctaaatcctccaactgaatggtggtcttaagagggacataatctccaagatacccaccaagttgattcataccaagcggtcttataaataggggggggatgataactcttacaaacatagaaaacacacttttgacccaccaaacccacgagattaacccttaccagaacaaccaactaacaatccaccaaccaaagtcctaggaaaagttcatacttt

SEQ ID NO: 121691 - DNA, 559 bp, Arabidopsis thaliana columbia
  unsure (1)..(559): unsure at all n locations
nnnnnnnnnnnnnnnnnnnnnnnnnnnnnnnnnnnnnnnnnnnnnnnnnnnnnnnnnnnnnnnnnnnccacgcgtccgcgaaattgacccgacggngattcttaatctctcctctctgttcttctccgaacaaacctcattccaaagaaacaaaccatggatctccaaccagaagagcttcaattctttgacaatacctcaacttcttaaagaggcgtgctcaataaagaaacggtctccaaaaaacttctacctaataaccctttcctttatccttccctcttttctttggtatgcctggctaactcacttcttaactcagccaatcttagcccaaactcgacaaatcccgccccccaaactaaaatcggtcacgtaatgatgggactggtcttctaatcttccaggtaaagtacttgatctttcctctttgccttcttttttctttaaaccggtggttgggggtttaacccggggtttttttttacacgggaaaaggcggtttctttctaggaaacttttttttggatccccaagttttttaaacacctttttttac

SEQ ID NO: 121692 - DNA, 362 bp, Arabidopsis thaliana columbia
ccccgcacgcaaacttggatcctatagaacggttcgccctttgtgtttggtccttatataacaactctagtgtttcaaggacaggacctctttaaaagaacaaaaagagagtcacagcgagggcggagagaccggacagcaccatattgccaccccgggcccgcgcgacgaccgcgcgatggggggtcagcagaggacacgacaaacaccatttttttagggggggggggggggaacagaccgaacacgacaaaaaaaaaaaatagagaacacacctcgagtggcaagacgaacagacagacccgcgcgaggagcgcgcgcccgaccgcggacaatcaataacgagcgacgcgccaaggaga

SEQ ID NO: 121693 - DNA, 515 bp, Arabidopsis thaliana columbia
  unsure (1)..(515): unsure at all n locations
tttttttttaaataaaaaaaaatcacatataaaaatcccgccacctcttcttcttctctctcgtccccctcaacccaccttcaaattccacccccacaataaaaacacacttttattaaccacggtttgatagcaccnccccacgggcttttctataagataaaccccccttctccccttcctctttgaacaccccccacacaacatccactctaaaaatctctaaattttccccacacaacaaatcattttcaccccccgcgcgcccaaactcacccaaacgccacacaacacccctctattccccaaacactctaacacccaccccctccgcctactttccctccaaataaaaatacacatttttccacacccccaaccactctccacacgccctaaaaaaaaaaccaccttccaacacaaaattcccacacaaacaagtttttcttaaacaatttctagacatacccacaaaaaaaaaaaataaaaaaccaactctcttccatcaacaacca

SEQ ID NO: 121694 - DNA, 556 bp, Arabidopsis thaliana columbia
gcgcgggcaacgggccggccccgcccggaactattgggtacaatctaaaagattatgacgaaaactgcacgcgtacgtgagcttggatcctctagagcggtcgccctttgggttttttttttttaaaattcaacaatatcatatgcaacgaaacatttacatcaacagataaataaatttggtcacaacccaaaaacaactggttaaagctaatcacaaactgaaatctggcaaaatccaacacgcacactacacttgttttttttacggagagagccctccctgggatgttgaactgaaaaaaagaatctctcaaacgcgggggggttcctatatgacggggagccgaggggtttacctttgattgaaatctttcctgcctcaacaccagtttaacacccagcacaaccccattatccagggggggcctgtggactctcatcactttctttggggatacaaaataagcaacttgggttcacagggggggaagcgcttttagggaccctggcagagtttatataaactttaaaccggggctcaacttgtccccggt

SEQ ID NO: 121695 - DNA, 445 bp, Arabidopsis thaliana columbia
  unsure (1)..(445): unsure at all n locations
ctaaagggggggtatcaatttggaagggcgaggggagggggatatagggcaggcacctgggaatctaacaaggtctatattcaaggttgtttgggagaattcattgggggggttttttggatgggtgttggccccnanatggaacntatttaaaaaaaaacccccacctattatggcaagctgctgggcgcttttgggggggcccttaccatggggggatttaggggggacaacaaggtggctgggctaaattcctgaaacccggtgggggtttttcggggcccggatatccataggaaaatttttaggggccttccaaataagacccngatggggggggcccaaacctgcccattttaaaaaaattaaaaaaaccggggggggttaaatgagttgaactgtggccccccagcgcgtgaaattttggaaaagggacttttttggg

SEQ ID NO: 121696 - DNA, 432 bp, Arabidopsis thaliana columbia
  unsure (1)..(432): unsure at all n locations
acctgcgcgcctacgtaagcttggatcctctaaagcggtcgccctggggggagggctttttttttttttttttttttcaaaaaacaaaccggtctttggattcaaatttttaaaagctaacccgggtatgaaattaccggtttttacaaaggcatttacaccccaccgagggttgtttggaagaaattaatcatttgattattttcttggaagaggggggngagggacaaaaaatttccctatttaggattcccccacgcgagattgttgggttttgttcttagaagggggggggaccaaaccgcagggccacgggggttaaaccgcagcacaacaattggtgctttcgaccacatgcccttcctaatgagcgccggcgtgttttttggggggaaaccctgttatgtttacacaggagaggggtgtgttttg

SEQ ID NO: 121697 - DNA, 422 bp, Arabidopsis thaliana columbia
  unsure (1)..(422): unsure at all n locations
aagctggtacgcctgcaggtacccggcccgtattcccgggtggacccacgcgtccggacaatctttcttctttcttactgnctcagaaccgccattgttacttcttcagttcttcttcttcaacaacaacaagaagtaataattgaggggtgagaaacttcgaattcccaaacaacaatatttacgtactaggtgaggccatcttcttttcttaatttcatcaaaactgggggtacctcaatagggccacgctcaaaactggcttantctctgggtttaaaagcctcttttagattctttccacatgccaaccaaaaaaaaaattccgccccgaatcacttagggcaggggttcaacacccctttaaacaaattggaaaatctaaaaaactccagttcccgaggggttaaaaaaggaaaacc

SEQ ID NO: 121698 - DNA, 476 bp, Arabidopsis thaliana columbia
tgacgtcgactgcacgcgtacgtaagcttggatcctctagagcggtcgccctttggtttttttttttgcaaatttcaagagttgaatatagtagagttgttcaacgaaagtgcgtagatttgtatttcgtctgtgataatcaaagtctccaacaaaagggatctttaaacaaaacattaaaacattccgaaatcaaaatcaaaccattttctcggggggggtttcaaaaactcttacactccagggaaggcctttttaccaagggcagatgcacccgctggaatcaccttcaggacattgaaccctaaccggtttcaacaacgggcctgcttgggccaatgatgacatgggcacccttccttggccacgaaaccccggtaagacatgggccaggggatgttggaatgtctttttctcatattcggtggtcctctcttcaccagagggggggggaatttcctacaaaacatgggggg

SEQ ID NO: 121699 - DNA, 159 bp, Arabidopsis thaliana columbia
  unsure (1)..(159): unsure at all n locations
acccttcaggtacccgtcccctatatcccggtggacccacccctccaaaaaatcctctcataaatccctaacctttccttagaagttggattaaacctcctaagggtgtccttctgtatngacctcccggtacttgaaaaactctactacctagggcta

SEQ ID NO: 121700 - DNA, 202 bp, Arabidopsis thaliana columbia
ccccccgcgagcccgggacctataaagcgttccccccgtggttgtggccttcaactaaccccccccctctatttaggaaaagcaaccaccccaaagggcggggagcgccgcggttagtcacaaaaacaaaaagaatcaacacggcgcaatgaaccacaccttgagactagaactcgacaaccaaaaggcattttttttcggg

SEQ ID NO: 121701 - DNA, 604 bp, Arabidopsis thaliana columbia
  unsure (1)..(604): unsure at all n locations
cctcccccccaaggaccccgcccctattccccggggggccgggggccgaaacaaaacctnccaaaaaaaaaaaaaatattaaaaggggcaacaactttcctccaaaagattggcgccctaaaccacaaaacaagcctccaagcgcccccccgctttctactcaacccctcacccccacccatattattatccgggggtgtgcggccccttctcncggggcctcaaataaattaataacccccccccccccaactccccnnccccatccccatnccactccccccccctctcaaaaaacctctcctccctccccccttaaacacaacaccaaatcaatcctcacccctcccccctccacacacaccncctccctctccctccctctcccttctccaacccccttcctccctaaacacaacacccaccccctncacccctcttctctcaaccccccactctctctcaaacaccaaaacccctctctttatcaacaacaacccccctcccacaaaaaaccaacacacacccctcccccactctccccactccccaacaaacccctcactccccacaccccacatatacctccaaaacaccccccccc

SEQ ID NO: 121702 - DNA, 533 bp, Arabidopsis thaliana columbia
  unsure (1)..(533): unsure at all n locations
ctatagggcaagctggtacgcctgcaggtaccggtcccgtattcccgggggggcccacgcgtgcaatctttctcctctgtttcatcaaactcttcatcagtgcttcttaattttcttcaaaggcgttaaaatcttcttctttcttcctctcttgcaagtggcaaaatccgaaagaaaatcttctacagggccaaatattttcttctaagaggggggggggtnccttttccagagctggagaccctcaccccccaaaaaccctcctttaccgggaaaggggatcattcggggcaaaaagataacttgggcttccaaggcataacacccgtacaaccctaaatcctccagaaaccaccatctttttctaacaaagaattctgcccccaaaccccacaaaaccaaaccagtgagatcccccgcaaaatcatcgaaccccccaaaaatcatctgtctcccaaggaatatccattccccccggctcttcaaaaaccgaggaggcaggaactttcccctctaagggggttttgggaaac

SEQ ID NO: 121703 - DNA, 518 bp, Arabidopsis thaliana columbia
gacgtcgaacgcacgcgtacgtaagcttggatcctctatagcggtcgccctctggggtggggcttttttttttaatttttttttttttaaaagcaaaggggtttccttttttgggggtcaaaatgaaatataaaagggggtttaaacacaccccccaggggtcataaaaaaaaatgaccacctttataggagggtgcccctttttcaaaggggcgggaaaactttggggcctccttaacaaaaaaatgggaaagggttcctctaaaaagttggtggattattcttataaaaaaagaaaaccgcaaaaaaaaaaaacactttttttttacaaaaatgatggtggggtgggagaaggggggtaaccccctttttttcctaggcggcccttaaaattctcctagaaaagccagtttgatttaaaaacctcttctggggaaagaaaagcctgcgtctttttgttaaccccctttctcccacaggattcccataaaaagacccccccctttagaggtgccccg

SEQ ID NO: 121704 - DNA, 172 bp, Arabidopsis thaliana columbia
ctaaaaaaaacctttcccaggctttctaaaaactgcccggtttccccttcaaagtaaatggggaatcaccctatccacccctccacttattaggttataaaccaacattcttcatactctaaaaaccctcatcaaggcccctcctctaaatactaaatccccccctcccccc

SEQ ID NO: 121705 - DNA, 325 bp, Arabidopsis thaliana columbia
  unsure (1)..(325): unsure at all n locations
cgcgccgaggaagttattgggtacaactataggaanattatgacggcgcctgcccccgtacgtaagcttggatcctctagagcggtcgcccttttgtttttttttttgcgaaaggtatgaaacttataccatggcacgaggtatttttggaagagaaactataccaggagataagtaaactaggtaatgttactggagaacttgttttattagtctttgagataggggaagggaccagaaaactgaacgagttttttcttttgtgggggggcgcgtgccggctgagcttgcaactaaaagaaaaagaggtggactagaaccgaac

SEQ ID NO: 121706 - DNA, 564 bp, Arabidopsis thaliana columbia
ctcttccccttccagcatccccgcgcgaaattcccccggggggggaggggtccattaaagtgaaattctcgttaccacacctagttttttggtaatattaatattaagcccaattttgtctcctaggacaactttttaccacgggataaaagacaattgaaactccaataggttttttttaacagggggggggggcccactttgtttctgaaaaaaaaaaacaacgcacgttaagtatttacatctcaaccgataccttaacctcccaaaagcgttcccttcccacctgttttcattggtacaaaggagtgttttttctaatctcttcatctaaacagttaaatttaattttctcggaaacctttgtcaaaaacgcgcgtctatatccaatcacttattgtgccacagtgatgctgtttcaacaatacctttcaaactctaagccaacgacctaccgcactggcaaacagtgagaaccaccagcgttaaatatattttatcctctgaccgctccaaaacatctagcgacttctttacacgcgtctcatctcctgagcctacgga

SEQ ID NO: 121707 - DNA, 516 bp, Arabidopsis thaliana columbia
gacgtcgcctgccgcgtacgtaagcttggatcctctagagcggtcgccctccggggttggtttttttttttttttttttttttttttttttttttttttttttttttttagcacccggaaccacccggggccccccacaccaggggcgtcccccccaacaagaataaaaccggaaaaagaaaaccaaaaccccccgaaaatttttttttttttggggggggggaccgaaaaaaaggagaccccaaaaatttttttggttctgttttgtttggggaaaggtggaaaaaggggaaaacttttttttccctcccattttccattaaagacccacctaatccccaacttttttagaagtttcacaagggggccccggtgtagaaaattcccctttattattactttccccccccccccaaaggcaaagggggtttaagggccctctttatatcttttaggccgaaatgcgggggggccctgtggacaaccgttatgtgtggctgggaagggcctacgact

SEQ ID NO: 121708 - DNA, 407 bp, Arabidopsis thaliana columbia
  unsure (1)..(407): unsure at all n locations
ggaaagctggtacgcctgcaggtaccggtccggaattcccgggtgggagccaggcgtgcgccattatatgctgtcatcttatgcaccagtcatctcagccgccaaggcttaccacgagcaggtatcagtccctgagatcaccaatgccgtttttgagccagctagcatgatggcaaagtgtgaccctaaacacggggggggcatggcctgttgtttgatgtaccaaaaaagatgttnttcccaaaaatgttaatgctgcttttggcaccataaaaacaaagaggactgttanttttgttgactggcgcccaacctgggttacaatggggaatcacccaccaaccctccaacaggttttccaggggggggacctctctataggttcaaaaaggcttttttttttaatc

SEQ ID NO: 121709 - DNA, 602 bp, Arabidopsis thaliana columbia
gggaacagctggtacgcctgcaggtaccgggcccgaatttcccggtgcggccgggcgtccgtatatatatagaaagagatttgagaaatatatgtgtaggggttagggttttcattacttgggaattggggctggggcattgaatagaggggttcggggttttctccctttggtaaaggatgaaggtttctctaggggaggacggtaaatggccttctaaccccatctggagaaaggggatggaagtggtaaaaggggctaaaaaccacttattttgggttacgggattggaattggattccgcttgggggcctttacccgggggaggggatttaagattgggaagcaaagcctcgcgtacaataaattttttttggaagaagaccttctcttttgttcgttgttggggggcggggaaaaaaaagctcacaaaacagcccccttcccctctcctcgcactcagcgcggacgccacgccccctcgtacgggtgcgcgaaccgcctcatgttttgtcccgcgccgtgccggggaccgcgcgccgccacggccactgcgcgccgcgccgcgccgtcccgcatccaccccgccgccgcgccggccg

SEQ ID NO: 121710 - DNA, 532 bp, Arabidopsis thaliana columbia
ccccccggaacaagagggagagggagagtttttaggaaggggggaggaggcggagacaaaaaggcggagaggcggacaaggagcagggacgggaggaggaaaagaggaagcgagcgcggttacagcaggaaattgtatgttaagactgatgagtggttattataaaggtgtttgcttgcggaatagggatagcgcagggtttttttttcagggggggtgagaaggagggaagaggggagggagaagagaagggtgggtgagaaaacgttggattttgcgcggtacggtgaggtgcttaggccggatagtgtcttgatattagggttgcgggagagttggggttttgtacggggaatcatagctcggagtatggtttattagtgatagattgtttggttttaggtgttattggccttaatagttttataaaatgtagtcggattgatgcgctatatgggccaattctcgtaatgttatgtccatatcgacatttaggagatatatttcacggtggttaagagttgaggtgata

SEQ ID NO: 121711 - DNA, 292 bp, Arabidopsis thaliana columbia
gcggacaaaaaaaaattccaccacctttttttcccccccattaacctcttgttcccgctccaaaaagaaaccttccttaccacggggaacgaggagaaaaaccgcaaaccaaaaaattccgcgccacaattttcttctaaaaacaaagatgcaaacccctttcccaaaccccaaaaaaaaatctccggaagggaaagaaaaaaaactaccccccccctaaaattacaatttcccccccccaaaaagacgaggctttccctggcggcgaaaacccgcccaaaccgcccccaaa

SEQ ID NO: 121712 - DNA, 323 bp, Arabidopsis thaliana columbia
  unsure (1)..(323): unsure at all n locations
tatagggacagctggtacgcctgcaggtaccggtccggaattcccgggtggggccgcgcgtgcggaaaatatgtgaagcttttggggccaatcgttatcctttcagggaggaccttggaagacaagctcagatgataaccgaggtttctggtcgattatccgagcttaaaaccaccatagatgctgttttaggtcagggtgacgggcttttncaaaccattggaaataaaaaaaaactttggaacctcaaggtacccaaagaaaaactttttatcatacattgaacatgcttaatcttgagtggacaaaaaatgcctcgggcc

SEQ ID NO: 121713 - DNA, 492 bp, Arabidopsis thaliana columbia
ggggggagcgagcgcgagcacacacaaaatggaggtattgccgggtgggagcgcgaccgcgctgtttccggcgagggcacacccgcacgcacatctgcgacaaggcgagacgatagtgctcgcactagcattaccacagttaagaaacggtatgaggtccgcgcaccacggtttttttttgagggggaagatataaggcgccagggagcgcagaaaacaaacagaagctatcccgaacgggattctaggggtaccgaggtgtgtgcgatggcgggaaagcgcacgattaactcaacgcgacagagaacgtatgtaaagcaaggagtcagagcgcgacgcgaagcaccgagcgacgcacgacctgcgcacgcacctaccaccacggcaacgagcgtggaaaaacgttatttaccgatcagagagcggaagcgacgaaaggagccaccgcacaatcggttcatacagcagggcgggtgcagagggagaacaagg

SEQ ID NO: 121714 - DNA, 529 bp, Arabidopsis thaliana columbia
  unsure (1)..(529): unsure at all n locations
caggcgcgggagagcagccactcccacgcgggggagccgcgaaacaaacagagagagccgccgcggccggacgcccaacgcgcgagcgcgaagccccccgcgcgccgccaagcgaacacccaccccagccacaccagacgcacggaccccgcagcagcctttaaacaacgggggcaagggcagccaaaacgcaccgaggagagagccccccgaccgcgaccgcccggaccacaacgcgaaccgcgcacgcgcccgcaacccgagagccggcggacccccgcacagacaaccgacagcacgcagcgaagcgccgccacgcgcgacagagcccacccgagccncgccgcgcacaccgcgacgcgcccgagcacgcggcgcgcgggccacacccgaggagcacaccgccggcaaacaagcgcgggccacgcgcccgcgccaaccacacgacccgaagggcacagcaccgcgagcaaacagccaaagcggcacgcccggcaccgccccagcaacgccaccaagcacgaagagg

SEQ ID NO: 121715 - DNA, 486 bp, Arabidopsis thaliana columbia
gccgcgtacgtaagcttggatcctctagagcgttcgcccttgggttttgtttttgagaaaaacaaccaccaggggttgggttgtatacatatataacttgagggggggtgacaacttaaaacatcatttgcacatcctaaaaaatttacagggacagatggggttttggggggctcttctttatccactcaagttttttttttgggtgtggggttacccaatctgaggtgggggttgggaaaccacacggaccttggagccatgggggcggcttttccaaaaagagggggaggcgttttgttatggggcttcaaggttgggatttttcggaaataaagttttaaagatttcagtcgggtgaaaacagtttgaaaggtggctaaccgggcaacccgatgaacctcagccgatactgttttctgacgcctttttttcccccgaggcccctcgggtgattttttatcttgttttggttggccaaagagg

SEQ ID NO: 121716 - DNA, 536 bp, Arabidopsis thaliana columbia
  unsure (1)..(536): unsure at all n locations
ctatagggacagctggtacgcctgcaggtaccggtccggaattcccgggggggcccgggcgtgcggaatactccactgcttctggtagtcttccttcctatgactctccttctgtgagcattacactctggccggagcccgttttctcctcagggctctcagtcttgcatctgggatctccatcattctcttgacaacggggggggggtcaccctttgaggggggngtcatctattgcctatgatgaagctggagtcaagagtaagattcgggaacttgaggtctccctgctgagtggggatacaaaaggtgaagaatctctagtgtttaccccccctcgtggaaagccgggaaccgggataacctttggttttaccccacagtggacctaaaaaagggctggggaggctgctcccccatcccttatgggattccctacagcggaggattccttatgcctagaacaaaagggggaatctaagggatccccacccaccgggtgggctctactgggaaaggggtaaacgcgggttggg

SEQ ID NO: 121717 - DNA, 472 bp, Arabidopsis thaliana columbia
gagctgggatcctctagagcgtccgcccttggggttgtgtcttttaggcaaggacgaaacaaaaagagcccaaacgaagatattctcccaggattgtggagcacagtgtatagttagggacacatacacacaagggtcggtccccagttttattttttaaagggttgaattaaaaacccccgatcgttttttttaggggggggggattaccctaggggggcggtttttggggaagagagaggagatgagaaaacaccgagctgtggggaaggccggacacccaccgggggggagggcggaggtgggggggaggcgggataggcttctagacacacgagggggcgagtttgtgcggaaccccataaatgggcaggagggcggggttaagcgaagaggtgcggtccgacaacacaaaggggagagcggattcgggggactcgcggggagaggggggcggtgcatcaaatggtcg

SEQ ID NO: 121718 - DNA, 533 bp, Arabidopsis thaliana columbia
  unsure (1)..(533): unsure at all n locations
gctggtacgcctgcaggtaccggtcccgaattcccgggtggggccacgcgtccaaaaatttaaaaaatgcgtgatctcggattcatgatttttgttctgtgctaaaaaatgagggaaaggcaggtcaggacacctctattgagggagatngattttgtttgacctgattgagggcttttcttttacgttgggaggtgggttaangcgcggaataaaagttaaaaaaattttccttcnaaattttgcaatggccttcaaccaggcgatggacccaaaagtgtaatttttaggggttctaccttcctctctgagggtgaaacctctaagtccacaatgcgttaaacaagngtggcattacccccaagaggagggttgtgaaataaaaattcctcctcagagaattttttaaaatggggttgggccccccagcggcgccgggggttccttttgataaaaacacagagttccgggggttcaactccaattccccactttccgggaattgaagaaccctggtcccaaaaaaaaaaaga

SEQ ID NO: 121719 - DNA, 154 bp, Arabidopsis thaliana columbia
cttagttgacccgcaggttcgtgccggataggacgcccggttataggaagcacaggggtacggatactccgattcgctagcgtgtgcgtgtagtgtgcggaggatagtccgaagtaacgctgcattgtgagcgataaccgagaacgactttttt

SEQ ID NO: 121720 - DNA, 538 bp, Arabidopsis thaliana columbia
agaagattatgacgtcgaacgcacgcgtacgtaagcttggatcctctagagcggtcgccctttggttttttttttttaccttgaaacactatgatggattcaacgctacccaaccgaaattcactgtatttttccaaccacaacggagatgaattacaccaccgactctaagggaaatcatttttttaaaccaccaaaattcacccaatgacaccattttttttggggggagagagaaaaaaaaagcctattctgaaaaacaaaccaattccaagctattaatccccttattgaaccgagggggaaaaaatgtcctaaatagcatctaccccaaaaggcccacctttagaaaggggttgggcctccccttgctttaaactatttgggggcctaaagcctaaaacaggacataactaatcgggctggtacttcaacccggatcaaaccgggttgagacaaaaatttgttgaaagcggaggctttatgtgggaaggctttcctttttttgttacgaaccaaaaggggtgttttttccccc

SEQ ID NO: 121721 - DNA, 195 bp, Arabidopsis thaliana columbia
cactattaggacctctccctcagtccgcccattccgggggccgctcataaaaaacctatttttctttgtgccccaaccaataatctcaacccctttccttttggggcggtccgccgaccggaagcccttttttttagggggggccttgggcattttttaacaaagggctctctttttgggctaatcaaaatttaa

SEQ ID NO: 121722 - DNA, 525 bp, Arabidopsis thaliana columbia
  unsure (1)..(525): unsure at all n locations
ctatagaagattatgacgtcgaacgcacgcgtacgtaagcttggatcctctagagcggtcgccctctggggnggttcttttttaatattacttttttttttttctttgaaaaaaaaaccacgaaaaatattttccgccggggcctttaatattgggggtttaacccataacaagttttacatttaaaaaacttttgccccttttgattttcacggttagttttttttccacgcgggggttttaattaacggggagctccaaatcggaaaatgggggggggggggaattcaattttaagccaaccgggccggggaaaaacccccaaaggcccccaaaggggggtttttttttaaccccgccggtcgcagagacattaaacttttttttatgtgggaacaccccgttttgatttgaccctccctacaattccccccggaaaaaagaaggtgcaggggttttgggtggaaaaccatgggaacccccctttccccctactcgttggaaccaagcgggggccaaagaaaa

SEQ ID NO: 121723 - DNA, 486 bp, Arabidopsis thaliana columbia
  unsure (1)..(486): unsure at all n locations
cccccgggganttttnggggggggggaacagcccccccccccggcgggaccgcgagacgcgccgaggcttttttcagcgcggggggaagaggccctcctcacaaaaaaaacacacccgccgaccggcacgcgacgcggattattgtcggcatctatacgcgccccgacccacgccgcgcgcttatcttgagcgagcagcgccgcgccgcccggccccaccgcgcgatggccgattgcgaggatatacctcgtcgtggcccgcacagagcgcgcgccgcgcacacgacacactcttttttttttttagggagagtttgggccggcaagccagcacgagacgtaagcgcgactcaaaaaaataaaacaccacccccgagcgacgccaaccgaagaaatgagatgagagggccaggagacgcgcgcgcgcctccacgcgggatagacggccaggcaccgcgcgggagcggcgacatgctgctgcgcgtt

SEQ ID NO: 121724 - DNA, 541 bp, Arabidopsis thaliana columbia
  unsure (1)..(541): unsure at all n locations
ggtcaaaaaaaaaaaaaaaaaacctcccccacaactcaaaacaaccccccccccggcaacaaaaataaaaccccaggcgcacggcgccccccaccatcgaactctccaacccacgggcgcgcgccaacataaataaacccgnccaccccttcttcttttctcgggggttcgtcgcggaccccccaaacacagcgcgacccccgaaaaactactcaaaccccgcgcgggcggcgaaaaaaagcggccccctccaaacctaaccgacaaaaccaccccccgatagagaagaatcttcttaacctaccgggccggaaaacgattgtccccctcctttctacacctcaccgcgaacaaaaagggcccgggccacacacacatatcccttaacgctatcccgcctgtccaggagaagcacctccccaccacaccctggaaaaaaaaagacccccgccccaaacgcggcgctgttccctcgacacaaaaagaagagcccacacaccatccccgccctccatacataacagaaatagcgaaacccaag

SEQ ID NO: 121725 - DNA, 384 bp, Arabidopsis thaliana columbia
tagggacagctggtacccctgcaggtaccgggcccgaattccccggtgggcccgcgggtgcggtcaactggaaaaaaaaaagacctccatggtgattattaagaagatgaaaaattcactctttgttcctcggcggacgcctcttctctttatctgggtttgggccttcaacccaccccggggagatttttaccccctgggggggagaccaatccgggggggttataaaaaaaaaaaacccttcaatcggagctatggccctcctatgggcgggccgcttggcagttaaaaaggggcctttgctcgacccccccagaggggcagggaatcgctcggatttttttcccttccaataacaaaggaaactgtcctaaagggaaccgg

SEQ ID NO: 121726 - DNA, 500 bp, Arabidopsis thaliana columbia
  unsure (1)..(500): unsure at all n locations
ctaagcttggatcctctagagcggtcgccctttgggtttttgtttttttttaaatagagaaaccatgaattataatctcaagggtgtataatacaacaacggggagctaataaactgaacaaagattccttttttggctatttctctccctcggaacaggctgggaccaaaattaatagtntttatttttcaggacgaggggtcataagggggggaaatcgatttatacaccgcggggctcctgcttttttggagttcaagaaaatcccggggattaagacaatcctgggcacttgaggacaacctttttgaaaagggcggggcaaacttttcaagggggctttggtaaagttgaaagcattttctggggggaaaccaaagctccgagaggttttggttgcaaccttttttactaccggggggggattaccccgccaccggccaaaatgcgcaaggtttcaataaattggcaaatgttaaatttgcgcgggggtttattt

SEQ ID NO: 121727 - DNA, 304 bp, Arabidopsis thaliana columbia
gccagctggaatccaaaatttcccttggggtaggccgtcacagataccccctccgaaaaaaatttggccactattgaaagggagggccaccgataatccgaacacacattcaataattcttcttcacccgaccatacaaaaaagggggtggtggcgtgtctgttcccctactccccctttttttttttaagggggtgtgggaggaaattcattgcgcacaaaaacaaaaaaaatttgcaccctacgacattttctcgcagtttgacctctctgagtctataggccggcgtcgcacacgcccacg

SEQ ID NO: 121728 - DNA, 372 bp, Arabidopsis thaliana columbia
  unsure (1)..(372): unsure at all n locations
tacccgtcccgaattaattnnctgggtccacgagctcactaaaccctnngncncacttttttttttttttcttgagtagaatcctataaatcccaacccatttaagattcaaattaacccgacactcaaaaggtcttttcaaaccctaattaattctgtgcccatttttactaaactgggggggccaaccggaaaacaaaaataccccaaaaactcnctttctataatgccccttacgaaaaaccaaaaaattcctcaccagggtccccccttcccgtttcctaaattttaaaaaccctatccccctcccttcccaaaccggggttttaaataaaatcaccccgtttatatttttaaaaaaaagctttaaaa

SEQ ID NO: 121729 - DNA, 545 bp, Arabidopsis thaliana columbia
ctaagcttggatcctcctaaagcgttcgcccttggtttttttctttctttacaaactccattgctttcggccgggcctactcttttcgtccacccattgggtttttgagcaccttctcgcactttgtttcccttgaggagaaccctagaaaaccccccgccatccttaaagatgttttggtgggcactccccaaacattttttttggggtgttgggggttccctctcccctaaacccgcaaaaaaaattttccctcctccctttttgttcactcggggacacccacaaccgggccttggggggaaaatgcctctcccagaaggggcctttgcccccccccccccccgtttttctacccccctcgctgggcggggagataaggccccccggccctcttcaaagagaaggccactcttccccccgcggcaccccaaaaaagctactcgtgcccggtgccgccccagaacctttcttggggggcccacacgccacccccgtgcgagccggccccctcttgtatcgccccgacacgcccccctccatgg

SEQ ID NO: 121730 - DNA, 350 bp, Arabidopsis thaliana columbia
gcggccagagagcggccgccaaaaccaaaccagggccacccgcacgcagagaagacaaagagggcccaagagaaaccgagaggagagaaagacgaacccgcctttttttcggggggagaaaagacagccccgcaggggaaaaaagaacgagcccccccacaagacgagaaggaaaaagaagggagccccccacccgcacgaagacaacgcagacgccaccagaacccacaacagcaagcacacacccagaacacaaccgaaggaaacacacaaggacgacaggcaaagccgacaacaagacgaaagaccaaaccagacgagaaccaaaaaaaacaaccgccagcccacaa

SEQ ID NO: 121731 - DNA, 538 bp, Arabidopsis thaliana columbia
  unsure (1)..(538): unsure at all n locations
cccccccccccccccccggaacttattgggtacaactctccnaagagttatgacgtcgcactgccgcgtacgtaagcttggatcctctagagcgggcgcccttcggggtggggctttttttttttttttgtcttttttttttttgcctcccccgcggaaaaaactatcgcgtttgatttacccctaaaaaagagtggcctttttttttttccaccgcctttgttagggggtttaacggggggggttttaccccccaaacccatttttttggggggtggggcacccctttttttggggggggggtgaaaattttccgctttgggtgtgggtgaaaggggtttctcccgggggccctaaacccttttcctttggccgggaaatatcactccctccgcgcttgaaaagggggggggcacaccccaattggggggccccttgggggggtacacttccctaaaacgtgcccctctggggggggggttctctggggctctcctttgggggggaaagggggttttgtctctccaggggggggggt

SEQ ID NO: 121732 - DNA, 528 bp, Arabidopsis thaliana columbia
  unsure (1)..(528): unsure at all n locations
atattagaatttccctatccctccattccgtgccacctcctctaacaaaagagaatttttaccccactcttaaaccatcctttttcctcatattttaccaaaatcaatctatattcaatttaaggaccttttcactatggggggtgacccaatttaggttattcccaaaaaaaatttacaagcccgaattaaatcttttcttcaaccttaaccaaggaaacatgttttaaggtttttttcggaaaaaataccatttaatccaaactcccaagcctgaagctttcaacttcctcctaaaaaacttgaaccccatttctctactccctttggttttggggtttaaaccccctttgttataacctataacataggcatttaataaataaatagcccacttttttttatagctaataaaaaaaaattttctttttcaaaaaaaaaaaacaacccaaaacaacaaccaataccactcaccccaanacaaaaagagggcccccctttttaaaaagaaccaacctttcccccccg

SEQ ID NO: 121733 - DNA, 534 bp, Arabidopsis thaliana columbia
gacgtcgcacgcacgcgtacgtaagcttggatcctctagagcggtcgccccccggggtttggtttttttttttttttttttcaaccataagaaaacgaaatctttccaaaaaataaaagacaggggtaccataaaactgggttgggtaaaaccaaaaaaagggggggccccatactaaaaacaaagcaccacttataatccccgttttattgggggggggttaaccacgcaaatttacttttaataaaaaaaaccaaaatcacctccataggcttctttggcgggacttttttcttctcctctcccttaagcagagtgggggcccccccaccttgtattaagaacacccccgaagtttacttgaaacaacagaaaactggggttggaatccttaaaaggattccttggccccttttctgggtggggggggagggtgtcctcagcgggcccctggggtgccccccctgaaaattccggaccgggtcccgtgggggcgaaccattttcctttatgggggggtcttttaagggttgg

SEQ ID NO: 121734 - DNA, 423 bp, Arabidopsis thaliana columbia
  unsure (1)..(423): unsure at all n locations
ccctcagtccctcctattccgtgaccacctcataaacaccttctaacaaaatcagaaacttaagatccaacatttcttttctttataactccgtttctcctaatcagtggtgtcccccacttctctttttaaaaaaagggagaacccccaaaaaactttaaaaaattccttttttcaaaaaaaaaaatttttccaaaaaatttactttttgccaaattataattttttttttttaaatgtaaacctaatttcttttttaaccaacccattatacctaccacttcttttattttaaaaaaaattctttttttttgctaaaaaaacaaaaaaaanatatgtgggcgcccccttaaaaaaaacaaattaacatccttatatacaaaaaaattttttataggccaaaaaataattaatgcccttttt

SEQ ID NO: 121735 - DNA, 547 bp, Arabidopsis thaliana columbia
atgacgtcgactgcacgcgtacgtaagcttggatcctctagagcggccgcccttggggttggcccttttttttttttttttttttattttttaattcgtcttttcgtttcttttttctgtttctctttgtcggtcgccaaaaaaccttttatactctttgaaaacccccccaacgaacaccagggggtgcaacccccagacaaaaatttttttaggagagaggggagaaaattcggcggggctcacaaaaaaaagaagggggggggataataagactggtgggttggaccaccctatacgttaggcgggcggattcctttggaaaactaaaggaaacagacctgcttttttaaatagaggggggggggcccgcaaaagcaaggggggttctacaccttaaccggctttcgcgcaacccggggccgtgtttgggaaaaaaggcacgcctaaacagtggtttctcggcggctgttaaacggaagccctatttctctccccagagggccgcttaaggtgtattaagagagaaaaaataaccacagctacg

SEQ ID NO: 121736 - DNA, 497 bp, Arabidopsis thaliana columbia
taggacgcactatagaagattatgacgtcgactgcacgcgtacgtaagcttggatcctctagagtgtgtcgccctttttttttttttttaaaatgtacgcttcgtgattaaaaattaaccagtgactcatttacatgcatatagatcgcaaacacatgcatgtgtctcatatataaatagatatcttataagttattgtaataataaagcaaaggaacattaaatatttttttgtgggggggggaacatcacaaaaactacccaatatattaaaagctcagcacccaaccaactcttctccttccatccattactcttgactgggtcgggttttcctccccctggccctctttatgaaatttgcgaggagatgtggaggtggcgtggcttaatccttcctaaggtctcaaactctttacccacgttgggtgtcgagggtgtgcggaacccaaaacaggcgggggtgttgggagccgtgattgaccaaccgggggaag

SEQ ID NO: 121737 - DNA, 431 bp, Arabidopsis thaliana columbia
  unsure (1)..(431): unsure at all n locations
tctatacgactcatatagggacagctggtacgcctgcaggtaccggtccggaattcccgggtcgacccacgcgtccgcaagattaacgcaaccctagccgctcatcttccctccggttgtatatcacggctcctaacatcactgactgtatttcgattctgcatctacctcgtaactcaacattggctaanagagtttgtaacttaggaagggtgggaagacactacaactccacatttcctaaacatattcataaaagatgggacgggaggaggcaaagcccaacccgttaataataatgggatggaaggagaaaagttggttggtgctcgacctttaaatatatgtgcaagtttcccccatccttttttaaacacctcccttctctttaaggggcccttggcttaaatatcaacaaaacttaaaaaaaa

SEQ ID NO: 121738 - DNA, 276 bp, Arabidopsis thaliana columbia
  unsure (1)..(276): unsure at all n locations
cccccgaaagtttaaacaaggagaaaccgccccccccataacagggagagacggatgagtgaaaattttttcgacncggggggaaaggggccacaaaacaaaaaacacagaagaaggagaagtagtatacacgaactgaccgtttgctgtgtagagtcacgcagcccacgccacccgcttgccaacgtgagtaaacggtaagtatcacagtaccaccgcctcctccgacacagcagtggattcagcgcgtcgcgacaccggacgaggctttttttt

SEQ ID NO: 121739 - DNA, 601 bp, Arabidopsis thaliana columbia
caacacgggggggaagccccagcacaacaaaacaccgaagccggaacgaaccgcagcccgacgacacaggaggcggagagggcaaggagtacccacgccaaccagcgcccgagtacgcacacccacccacaagccgcaggccacagccgccgcagacacccccacgcagttttttttatacgcagggggtgggcacaggcaggaccagagaggcccccgcgcaagaaaaaggacagagcgacgcggtgcccacaccggacggcactacgcagcagcaagacacaccacacccccaccacacaagcagccagcaagacaaccacccgtacgcccaacacaactcacgaacgaccagcagaaccagagacaaacacacgacagacgacgcgcgagccacacccccagacagcaacccggcccccgcacgcgaagaacacaagcacgcgcatccgccaccaccgccgaccgcacccgccacgcaaccccacccccagacgaaggcccaacgaacgaacggctacacagacgacaaaaccaccacactcgcacaaaccacacgcaacaccacacgcacccccgacaagcaccgcagtaacaccaa

SEQ ID NO: 121740 - DNA, 572 bp, Arabidopsis thaliana columbia
  unsure (1)..(572): unsure at all n locations
ccccccccgcagcgacgaaagccacagaacaaactaattttttaccccgagggggaaaaggagccccgcaaaaccataaacccacacgtgtacgcagagcgcgaacaacagaccgacaacaaaacaacaccgtagaaaggnccacacggcgtcggcgggcgcgagatagactaaggagatccagcgccgagacgacagagtcaaacagatagctataaagagaagaacggcaacccgaggttccttctctggggggggggggaaaaaagtagaagagaacccccaagaaaaaaaaaaaagacgcagggacagagccgacccagcaccgaacacatcctcgagaaaaggatcagcccaccgccaccgcctgctgggtgaacagcgcacccaccgcccacaccacgttaggcgggaggcgcgcacggaccacaaagacgttcttccgcgaacaaaagacgcaccgcacgaaaccacacaccaatcgcccgcgcgatcacaacgtcaccccgcaaccatactacaaaatcggtgtgtcacgcacccagaacagagagacaacgaagagcaattcg

SEQ ID NO: 121741 - DNA, 543 bp, Arabidopsis thaliana columbia
taggtacaactatagaagagctatgacgtcgcacgcacgcgtacgtaagcttggatcctctagagcggtcgccctttttttttttttttgatgaataaaatttaacattcattataaaaataaaagccactcgtgccctattggtactatttctttagttacataaggactgacccgtaattaagatgacttgggggagacacaatacatgtttgatagagagattcgagttcattgaggggggccttacttcgacaaacgggaagaaagctaaggaaagaaaggaaaacaaagtggaaacaaagataaaagacgtctgattcatttgcttatggaagctcttcagaaaggaaacattcatcccttctcgaagtcactccacagtttggctgatgcgagaattcataatcgtttcttgaaaggttgttagaaggtgctttttttaggccattctccttatcccggggggggatttaactacttttggcggagagaaatcatcactattgggtgggggatacactaaaagaaaggccccattta

SEQ ID NO: 121742 - DNA, 491 bp, Arabidopsis thaliana columbia
  unsure (1)..(491): unsure at all n locations
ctatagaagagnatgacgtcgcacgcacgcgtacgtaagcttggatcctctagagcggtcgcccttgggggtttgtttttttttttttttttttnnnnccttttaacaaaaaatggtccaaaaatttcctttgggtactttcattctgaaccgcgtggcatatctcaaaccttaattttgggagagatttataattctgagaaaacgttaaactaccctctttttaacagggggagggacacccaaggttcttgtttttatgaaaaacacccagcacaccatcctaagatgggggcgaccaacaaaaatttttcatggactaacaagccattggggaacaaataactggccaaagaaaaaccctcctacacttatatttgcggaaacaagaatggggcctcaccgggaaaacttgtgccctagcgtgggagggggaagggttctttaaaccttaagggtgttgggttggagaattctgcaaaaaaggccgg

SEQ ID NO: 121743 - DNA, 481 bp, Arabidopsis thaliana columbia
  unsure (1)..(481): unsure at all n locations
tgacgtcaactgccgcgtacgtaagcttggatcctctagagcggtcgcccttggggtttgttcttttttttttttttttttttnggccatcaaaaacaaagtccaaaatgtaacaaacacacaaaaacgtgtttatacaaattcgggggtttaacatcaaataaagctacattacatataatcttggaaagctgaatgaaacatattcttggagggtggagtaaacgttccataaaattacacttgaaaaatttcccacccaccacatttttttttgaaaaaactctttttcaatggctgggataaggaaattttaaaagcttggtccaactcaagaaatcccacctgaagggttgaaaaaatattgcacttccggggaaatttttaacaaaaaagggaccaaaccccaccgttgttttcgtaccatagaaaggatttgttgcccctttacaaaaaacttttgggggggttgagaaaaaaa

SEQ ID NO: 121744 - DNA, 478 bp, Arabidopsis thaliana columbia
ctatagaagagttatgacgtcgcacgcacgcgtacgtaagcttggatcctctagagcggtcgccctttgtttttgtctttttttttattttttttttttttttttttttttttaaacaaaagctgattcatatcatcactgtttataacatactagttttggagacagacaatctcaaagcctcaaccttaacttgggagctagaacccacaaaattgggctttgaaggggtgtggggtttggcccttaatattgccctctccttgccgaataactaaaggggaggctacattttggatgggttgggggccaacccgaaaccgaatgggtacaatgggtcttaatgccaatctccaacattaatggggaggtggttcaccgatttaaaccacgtccgggccaattttcctgtgaacccgtaatcaccaaacagagcatcagcccctccttgaccttttgttcccggaagccaaccccc

SEQ ID NO: 121745 - DNA, 515 bp, Arabidopsis thaliana columbia
  unsure (1)..(515): unsure at all n locations
accccccccccccgaaaaggggggaggaactattagggcaccccccaaaattttgagngaaccccccccccctaacttgatcccttaaacttccccctttgttttttttttttaaaacaaaaataatacattaattttttccccaaanccccttcccctttccacaacaaaccccattccaaagaaaaagttttccaataaaatcacccccttctaccccttttaacctttttataaaaccccccctggccccacaaaagcgcccctcccccaacaccactttccccattttccctctttctggaaaaagctgttgctcccccccccctctttttcctccccccaaaccacaaaccccccctttttccttttcncccccactcccccctttttcattattgaaaccggccccccatttcccccaatcaaaaaaaccaaaaacacccccttctttttttctttttctctccaacttcttcttaattttttctacaaagctgcctcttttccttcaa

SEQ ID NO: 121746 - DNA, 574 bp, Arabidopsis thaliana columbia
  unsure (1)..(574): unsure at all n locations
gaccccctccccccccccctccctccccccccccccnnggggggaagggggggggggaaacctaattaggggacgacgctcccaaactttggggggnnnacccccccccccccctaaaacccggaaccccactaaaaccttcccccccctggggttttagtcttttttaaaataaaaaaaacccctttaaacactgaaattattncaaaaacaaccacaacaaaatttccctctttccccggcaaaaaaattttcgaaaatctaaaaccctaacatttcacaccttcccccctcccaaccaacccacaaccccctttcttactccgggacgctgggcccccccccttttccccccccttaaaaaaaaaaaaaacccctcccccccccccaaaaccacccacccacccctccccaccccacccccccccaactcccccctcccccacacagcctttcaccccacaccccccccccccccaaccctccttcccccccccccacaacaaaaaaaaccctcttccctcaccccccctccccttcttcttccccacacccccccccccacaaaaaacaa

SEQ ID NO: 121747 - DNA, 487 bp, Arabidopsis thaliana columbia
  unsure (1)..(487): unsure at all n locations
cccccccccctaagcctgatcccctcaaagcggcccccccctggggtgggggcttataaaaaaaatcccaggggggtnaacccctacccccaaccccccccgaaaccctcccctcccaccgccccggggaaaaaagacccgcccaataaaaaaacccaacccccccccaattttcaaaaacacccccccaaggggcccccacgcgctcccctcccaaccccccccacttcaancccccccccaaacctcctccttaaacaacggggaacgacggggggccncccccacttactccggggcgtgtttcccgcaataaaccaccaaccaacccccccccgccgccgcnctaaaaaaaccttcacggcggcgcggacgcggtctccgcccccccccttgagggggggccccctccacccccccctccccccccgggggggaggcgccgcggcgcgcccttctctcctccccacacaaaaggcggccccaa

SEQ ID NO: 121748 - DNA, 414 bp, Arabidopsis thaliana columbia
  unsure (1)..(414): unsure at all n locations
taagcctggatcctctagagcgggcgccccggggggaaggggccccccaaccatcaattttataaaaccttctgcccgaaaataaaaatagaggggttatttttatctttcctgaacaaacggagaggtttttttttctttttttttgggggcataacgaacaaccccggtnccggaaccccaatccaaaggggggggggccccccctccccgagcaaatttctataaaaaaaggccccctccccttttcttcccccccccctccggttcttccgcgggggggccccccccccccccctaaatgaccccctcccgacggggccgggggggtggccaagaacaaaccttcccaaattttttttttaaaaggagggggtcctcccctttaaggcccccccaaacccccccccaact

SEQ ID NO: 121749 - DNA, 364 bp, Arabidopsis thaliana columbia
ccttcaacccagggtgcggccaccctaaccaacattttataaaacttctccccgaaaataaaaaaaagatttatttttatctttttggttaccccaaaaaaaaaacctgcccttttcactttttacttaaccaaaaaaatggccaccttttccccatttaaaaatgaggggggggcccaaaccttaggttcttccaaataaaaaaaaaccaccccccaaaactttacttaagggtttcctctttcaaaaaatctctttggtttaaaccaaaaaccccccgtttaaatccctaaaaaaaaaacctcaaaccctttttttttaaaaaacctccccctggctttgcttttcccctttttttttttta

SEQ ID NO: 121750 - DNA, 248 bp, Arabidopsis thaliana columbia
tctccaagatttatgagtggactgccgcgtacgtaagcttggatcctctagagcggtcgcccttgtgttttgttttttagattgagtggctctgattcaccttatctcttttcacaatggtggggataacttaatcggttttctattacaaactaattttgacaaggtgtaataaacaagggaatgtcaacaaataactcattagagctcacacttctttatatagggggggaacactccccaaggct

SEQ ID NO: 121751 - DNA, 323 bp, Arabidopsis thaliana columbia
  unsure (1)..(323): unsure at all n locations
tcgtaagcttggatcctctagagcggtcgccctttgggttttgttttttttttaaaaaaacacctggtcttatgtgtgctgcctaattcacgtggtagggaggatagtctattctactctatagcccattttgacttttggtgggacaaggagaaaggaacaccatnanaaatcaaaggtccgttttactggtattatagaagggggggggaaaaaaaanatcactattccctccctaaaactggggatccaaaaccttattattagcgttggctattgacacacatttaagcgttttatttgtgctttccaaaaaaaatgtt

SEQ ID NO: 121752 - DNA, 310 bp, Arabidopsis thaliana columbia
taagcttggatcctctagagcggtcgcccttgtgttttggttttttttatgtaaaacatgatttcccttgattatattatataagccttggggagcacagagaatgggcatttcctccaaggggatcacattcccctgattcacatcggggctttttattggatattacaccccaagaccaagcccaccttttcccaggggagccggccattttaaaaggggaagggggcctggaaaaaaaagaaaggggaacaccacccgggtgggatcctcaaccctgcggggttggggcctcccccctctggggggg

SEQ ID NO: 121753 - DNA, 350 bp, Arabidopsis thaliana columbia
aaccttctttctacacaacacaaaactatatataaagatcatacactgtaataaccgtcctgcaactattacaatcattctcccgtggaattaaccggggacctcaatgtgtttttgggattgttaatcaaagggcgggggttacctctttttttaatagagaggggggtctttaaggaccctgtgtgctctggaaaaaaaaaggaagaccccaggaaaccctttgaatctcacctcactgaaccatgtttctgtccttgggcccatccccgcaacaaaatctaataaattttttaccaaaagggggttagggggtcatccccaaaccaaagaacctaaaatccctaaaa

SEQ ID NO: 121754 - DNA, 279 bp, Arabidopsis thaliana columbia
gccgcgtacgtaagcttggatcctctagagcggccgccctttgggtttttttttaacaaaaaaatcttaaaattaggataatccgaaattaaacacaaagcctgatgatctctcaaatccaaagttcctcagaaccattatgttaggattttccagacaaatactactacatagacaatctccttagtacttacatgcaccatggggggggttggtccctaccgacctaccagttccactgaaggtacaagcaccatgggtgcgggcggggctctggaa

SEQ ID NO: 121755 - DNA, 497 bp, Arabidopsis thaliana columbia
  unsure (1)..(497): unsure at all n locations
ccctcaccccccccctccctccccccnccnngggggggggggggggtaatattcccaagtaacaacccctgatttaaggaaactcctacccctccaagtaacccgtgcccccgaatttccccgcggtncccaccccacgggggtggcgggaaaaacaacaaacttcaaaaaccattttcaccggggttttcactttgggaaatccttttgggttttttctccattttccccaaataataaaaaaaattggccaaagcccccaccctgaaatctttctttttcctccctcctttgcgcccccgtattcctaacctccccttttaatctggggggtggtttttaactaccgaacttttcagaaaaactccccccccccccgactcaagggtggttttacttttatcaaaaaacaccaaacttttgaatttgaatagccttcaaaaaatctttccaatgtgaaattcccccaatttttcctcaccgtgcctttcccttaa

SEQ ID NO: 121756 - DNA, 360 bp, Arabidopsis thaliana columbia
ccccctttggttttgttttttttaaaggaaacaaaattttattacccggttcctttctatctgaaatgaaaagaatcaacttgtccatacattccctatcttaccaaatgaaaagaatttcatcttcccctcttcctaagaaagggcttaaaagcaattatctcccccggggcgggcctatcaccattgaagaaacagaaaacaaaaaaaagcccacccctggttaaaaacccccccctttttaacccccccctctcacctccaaaaaaaaaaaaaaccccccccccccaccttcgccccaactttcttataaaaaagaaacccccggaatataaagttttaccccaactaccccccccc

SEQ ID NO: 121757 - DNA, 388 bp, Arabidopsis thaliana columbia
cacaaaaccccaaaattaaaccgaagaccccccccttttagattaaaataaacctcaaaggcccacttaaccatttataaatttaaaaaacccttaaagggcttaacacctctttaataaaaaggcagctggggccccccctccccctggaggggtttttcataaaaaaaaacccccttttcctttttcagtttaaaacacttaaaaaagtattttttttataatttcacacctgcgcgttccccccccccacgcaagaaaaactttacacacacccccgagccgccccttgtttttctctcaaatttttttaccaaaacttacaaagggtctcctttgtttaaccaaaaaaataaccttgtgccttctccctgaccccccacccctt

SEQ ID NO: 121758 - DNA, 333 bp, Arabidopsis thaliana columbia
ctacgtaagcttggatcctctatagcggtcgcccttttgtttttgttttttttttcaacgaaaagccaacatttaaattaaataactcaaagccactaacatcataattaaagcattaaggctgaacacacaaaagaaggagggggccactaccatgatgtattcatcatccccctttctttgatttaacttaaaaggggggggtattcctcttgggtggccccaagcaaaaaactcaccccccccggcgcccctgtttttttcactttttccaaattaaatgggttcttgtttgagaaataacattgctttcccgatccccaccttaaaaac

SEQ ID NO: 121759 - DNA, 337 bp, Arabidopsis thaliana columbia
  unsure (1)..(337): unsure at all n locations
cgtaagcttggatcctctagagcggccgccccnagttacgtgaatataaataaattttttttttttttnaagagaaaaagcccacttggctattataattttttctaattcaaaaacctttcaatgaatgaacaaaaaaagggggcccaattatatgaggccaaacataaagaaagagttattttactattggggggggaaaaatgcttggataatttcttgaataacatgaggggtctaattttttttggcccaaaagggggggtgtaatttttattttttccaaaaaaaggggaaatcggaggaggcttgttttggtttaaaaacacactgacca

SEQ ID NO: 121760 - DNA, 226 bp, Arabidopsis thaliana columbia
agagaggaacaaaaaatgggagagatgaaaagtattcaaatggggtgtgattggagcattttttctatcaggggcatcttctgttttcattggggtgggggaccaaagcttttatggaccaatttttaatatacctttttcaacaccacttattagtttggatttggatgggaacatatttgcccacttaatgtgggatataaactaaactttttttgggaataac

SEQ ID NO: 121761 - DNA, 449 bp, Arabidopsis thaliana columbia
  unsure (1)..(449): unsure at all n locations
aggtgacacttacaagactttgacgtcgcatccacgcgtacgtaagcttggatcctctagagcggtcgcccccggggggggggtataaatataaaaatttataccttttttttttttttaaaagggaagacttatatgtaacaacatattgataaaatatgcccctcaagacttaaaaaggagatccaagtcccctaacatagggcatttttttcaagctggtttctctttttttacaaagggcgggggagaggggatcccanttaacaatacaactttaaaaaaaacaaccccacncnnggggtggggcctatcttgtataaaaagggataccccaattctttgtttacaaaatctctctctgagaagaactttcgttttttgggccatttaaaaaagggggggtccgttacccaaaaattgttcaaaaggagcgtttttttttgggg

SEQ ID NO: 121762 - DNA, 468 bp, Arabidopsis thaliana columbia
  unsure (1)..(468): unsure at all n locations
ggaaaaattccggccccccttacaaatacccccacccccatttttccctttttcccccccctcgccgtttacgggggaaattccaaaattaaaaaanaaaccccctttacccacccttaaccttaccgttttttttgaaaaaattttttttcaaatttcccgaaactccctattcccctttttaaactttttccccccaaccattctttccaattaaaaaacttacctttttcctttcttttttcatcgggggttgggcttccttacccacctttttttttccatttaataaaattaccgcgaacttgaaattttcccaccacatttcccattatccccaaaaccccctctcccccccaccgttcacctctcatttcnnaattttctaaaaaaaaaaaacccccttttttcttttaatttcaaaaaccccccattcttttcaaaaaaaaaacttttccaccttttttc

SEQ ID NO: 121763 - DNA, 384 bp, Arabidopsis thaliana columbia
  unsure (1)..(384): unsure at all n locations
ctgcaggtaccgggccggaattcccgggtcnacccacgggtgcgggggncctctaaaatctctctctcacgagcatcgtttcttcatcgatctcatagttaccgggcgttgttttgaggccactaccgggggtctctctccgtaatcgggtccaacatcatcatcttctcaatttcgaagcattttattctctaatagggggggggatgcanattttggggtcacaaacaaaagaaaaaaatcgaaaaaggtggaaattaaaaaactggtttttatcaattcattaagcttttggagtaatacgcaatgggggggttcatttaccgtttgactcaagatataaagcttattatatatttgcataccaaggggttcgatgatttc

SEQ ID NO: 121764 - DNA, 400 bp, Arabidopsis thaliana columbia
atgacgtcgcacgcacgcgtacgtaagcttggatcctctagagcggccgccccccgggtctggtttttttttttttttctcctctaaccaaaagggaaagccttttattcttttctaaatagggaacataaaaacccgggttaattcaaaaaggtggctcttaggaaaaatcccaattttagtttcctctttaaacaaagcccccattgatttagggggctaaaacccccacgtatggggtttcaaaaacatttttttcccctggaagaggaccattccttcttctttggctcttcttccgcataggtcttgattagggcctctacgggtttcccgaataaacccccaacaagaactccctttttaaggaaccattggggggacacttttgggggcctaa

SEQ ID NO: 121765 - DNA, 432 bp, Arabidopsis thaliana columbia
  unsure (1)..(432): unsure at all n locations
taggtacactctacaagatcttgacgtcgcacgcacgcgtacgtaagcttggatcctctagagcgcgcgccctttgttttttttttttacttcaaaccaaatgctccgggtttttttgnttttctgtgttaccttttattatgttacaacacttcaaaatcaacacaaccccaaagaaaaatgttcacatcaaaaagaaatccccccaattcttgtaaattccttttcctcccaacttttgggggcctgggaggccaatggaacccatgcttaaaattttcttactggtttaaggggggtgggggctttttaaaaacccaccccctccaggggaaaacagaaccctttggggggggggtgttgggggtaaagaaacaaaggacccttttttttccatttaaaacaatatttttggggggggggggggacacc

SEQ ID NO: 121766 - DNA, 369 bp, Arabidopsis thaliana columbia
  unsure (1)..(369): unsure at all n locations
gaaagctcgtacgcctgcaggtaccggtccggaattcccgggtcgacccacgcgtccgtgaaagccaagatccaagacaaagagggtattcctccggaccagcagagattgatcttcgccggaaaacaacttgaagatggcagaactttggccgactacaacattcagaaggagtccacactccacttggtcttgcntcttcttggaggtatgcggatcttcntgaagactctcaccggaaagaccatcactttggaggtggagagttctgacaccattgataacgtgaaagccaagatccaggacaaagagggtatcccaccggaccaccagaaattgatcttccccggaaagcaacttgaaaatgga

SEQ ID NO: 121767 - DNA, 390 bp, Arabidopsis thaliana columbia
gacgtggcacgcacgccgtcgtaagcttggatcctctaagggcgccttgggttgggctttttctatatttttttttaattacctttatcctttttcgaaaaaactggcccttttttggctcagaaagttttttttaaacaaaaatttttcaaaattcggggaacacctttcatcatttaagggggttctttccctctgggggggagggcaaaaaaggaacccccaaggaataccccttccgagattttcccggtttttatggggtaatgagccccaaagagccccttaaaccccctcataacgttctggggtcattgggccaattttcggcccttttttccctggtttctttttttaaaaaagggggggggttttgctcccgttgggggc

SEQ ID NO: 121768 - DNA, 438 bp, Arabidopsis thaliana columbia
  unsure (1)..(438): unsure at all n locations
aggtgcactctacaagatcttgacgtcgcacgcacgcgtacgtaagcttggatcctctagagcggccgccctcggttttggggtttttattttattttattttttctatttttttctttttttttttttttttccttttattttccttttnccggcccaaaaaaaattttgagaaagaataaaactttttcgtggttttttttttttgggccccccctccccttaaaggttaacccaggggagattttttttaagggttttcccccggggtatctttaccaaaatgtccagtcttccaccccaaaaaaatttaaggcccccccccctttgtagggaacccttttacaaaattggggagaggggcccgaaaccttccccacttttgctttttccccttaaccaataaaaaaaaaaaatttggtcaaaaaaaacattttt

SEQ ID NO: 121769 - DNA, 398 bp, Arabidopsis thaliana columbia
taggtgcactctacaagatttatgacgtcgcatgcacgcgtacgtaagcttggatcctctagagcggccgccctccgggtttggggtttttcaacaaacttttttttttttttttttttttgttttctccccaaacccctaggattattggaatattaagttccccgtgggggggaaaaggcataaaaggtaatctaaattgtttttttaacacagggaaaaacctcccttcttacgggagaaaaaattcaaggggttttgcttcgttttaaaatcgaaatagagctaaaaaggcaccccttccctaagaaattcatatatccaaagccctttaaacaatttttttatttaggctcttcaaacaaaaagggtagcaccaatatgaaaacttgttttta

SEQ ID NO: 121770 - DNA, 374 bp, Arabidopsis thaliana columbia
ccctgcggtaccgtcccgaattccggtcacccacggtacggttttccaccaaatttcctttttttttttttttgggtctgggctgcttttttgttgtgttgttcgtgatgaaggtccctaagggaagaaacacatgatttcgaaagaccaagaccaataccaattacccccaccttggtcttgggggtggaaagggcttcttcttttcctctctttaaaataactccttactccttcttttggggtgcctcttcccggtttttcttataccgagaatcaccaaaccaaacctccagattttttagccccacctctttttctctggaatcccctcgttgtttttttccccccaaattgttcaaattttttttttt

SEQ ID NO: 121771 - DNA, 420 bp, Arabidopsis thaliana columbia
  unsure (1)..(420): unsure at all n locations
atgacgtcgcacgcacgcgtacgtaagcttggatcctctagagcgggccgccccccgggtgtggggtgtttttttatttattttttataaattttttttttttttttgttttttgttttttttttttttttttttttttggaattgtttctgaaaaacaaaacccccccttacccggggtgacgataaggaaaaaagggaaaaaaaaaccaaccccggggggggggggcatnccaaaaaaagggcccccaaaaaaaaaacccccaaaggaccgaacccggcataaaaattacgggaaaaaaaaaagacagccccgttaagaccaaggcgcccttgagggaacgggatagggaaaaactgtgtgtgtggtatgacaccgggaaatcctcaagccccgcgccgggaaaccttaaattgaagc

SEQ ID NO: 121772 - DNA, 672 bp, Arabidopsis thaliana columbia
  unsure (1)..(672): unsure at all n locations
cccgccgccagaacacgcccgcccccgccggccaaggagcaacccgccggaaaagaggccccccgggagggcaaanagaccctcntgtggggaggaccagacccccccccggcctctaggagggggaggaacaacggaccccccccagggagcgggcgacgccgacccgacgcgccccgcaccactctctacaccccccacgggagangggaaagggcgcgccgccccacacacacaacaccggcgccgccgcagcgcgccccgacaacccggacaccgacaccacccggcgcggccgccaccccgacacacgacacgccacgccccgacccaccacgccgaccaggacccccgccacccgcacgagccagcgcgccgaggacgccccccgcccgcccgccgccacacccaagcgcgcgcacgagcgcgcccgacggctctccctctagccccgaggggggcgcgcccgcgcggcggccgcgccgccggccgccgccccgcgccgccacaaaaagaccgcgccggcgccggacccggcacgccacagcgcgcggcccaccaggcgcgacgagccgccgcacggcgcacagaccgcaggcaggccggcagcggcccgcagccgcacgccccgccgcgaccacggcgaccgcgcacgaggcaagggcgccccag

SEQ ID NO: 121773 - DNA, 338 bp, Arabidopsis thaliana columbia
  unsure (1)..(338): unsure at all n locations
ccaaaccgcgaccccccacaccgccccccaccacaacaccggaacaacccgacagcaccaggggagggngcctccttgtggacacaacccccccacgagttgcgaggagggaaacaccgaaggccgcaaacgagcgcgcaacgcaccggagaacaacttttcacacgccagggggggcgaggcgcgcgaccaaacccaaacacccgcagacccgaccacccgccccacgccacccaagccaacccagaggacaggcccgcagacaccgcgaagcgacagagcggccgagccgcgcaacacacggaaacacaacacgccggcgcgagggagagccccag

SEQ ID NO: 121774 - DNA, 472 bp, Arabidopsis thaliana columbia
accccccccccaccgaagcccggactcctctaaagcgtgtcgcccttggggttttgttcttctaacaaaaaaaaacccctccctctctacataggatgggaaaaccatcggacccctactaaacccgcgtcaactacaagcgaaattgcctcaccacacacaaacctattccacacacccggaccctccgccttttttaaaaaactctcctgaaaaacgcctctttttttactcaaagggggggggcccaaaaacttctactcgaaaaaatgcttccaaaaaatacagcacacccgccttggacacacaaggacacccaaacctcccccgaaaatccctcttcttgccataaacacggcaacttacacaaaacaccttcccgcctcacaccactaatcccttattagtctcccaacaaagacccccatccttttcggaacgcacactcccctccccctctgcgcccccaccc

SEQ ID NO: 121775 - DNA, 394 bp, Arabidopsis thaliana columbia
tgacgtcgcacgcacgcgtacgtaagcttggatcctctagagcggccgccctttgggttttggtttttttttttttcaccaaaataaagatatttatcaagcaaacaccggcacatttttagatttctcaccaaacctggaccataactttttaccggccgacggaagtcatcgcttccgtgaggggcaagggccctttctgactcctttgggaggggggggaaacataaaatgttcacaaacaaaaatggcatatatcatttcacgaccgaactcagcatcacgtttcagcgtccccggagggaaaaggttccgttaacggcagggcaccaaggggcccttgggatggaaaaacaccaagtacccctctaagatgtttaaaaccaaattctga

SEQ ID NO: 121776 - DNA, 418 bp, Arabidopsis thaliana columbia
  unsure (1)..(418): unsure at all n locations
ttaggggaagctcgtacgcctgcaggtaccgggccggaattcccgggtccacccacgggtcgggggnaaactgaattatcttcttcccttgtgaaccactcaatcaatcattgatcatgcctcggaacttcaactgtggtggtaggtctgggggatcattgctctggttattactaaaaactcacttggggagggttcttgggggatccactgggatgaggggggggtncnctggacgggggcaaacaccaaaaaaaggccgggggaccctgaaaagctgtggtcnaggggcgtttgtgccaattatatatgggcgggggtgggtctatatattttatggggggtcattgggatggaatgggtcggggggggtctgttattctacttcaagggggggtggaacattggggaaactact

SEQ ID NO: 121777 - DNA, 404 bp, Arabidopsis thaliana columbia
taggtgcactctacaagattttgacgtcgcacgcacgcgtacgtaagcttggatcctctagagcgggcgcccttcggttttggggtttttaaaatttttttttctttttttttttgggtgttcttggggaagaaaagcccttcaaaaacctggttgaaatttgattttaaaacccatttggtatacagggcattatattgggaagatgaaggccccaaaacaaacagagagacaggggggttaacaaagggaatgagattttgaagggaacactgaaataagggtggaaggggcgggttccctctttaagggttcatgtgtcggtcttaaaaaaagaattgggggaagtgctgttaaaccctttagaaaagccgggaatgacaagtcctataacatcggggaaa

SEQ ID NO: 121778 - DNA, 590 bp, Arabidopsis thaliana columbia
cccccccgaggtttagaggggggaaaaaaaccccaaccccccacccaggcggccccaccacccagaacaaacaaccctctcccaacccaggagagagaagaggcccgcaacaaacccaaaaaaaaccacgagagagcaccccgaagcgcgccagagaaaagaacgcaccgccaagacaccgagacaacacgaggaagccaagacaggcaacggacaccacacgacgcccgccgccacaacgcccgcgcaggcacacgccccccgcccgcccccgcacagacgccagcacgcaacaacccgcacagctcccttctcttccagagggggcggggcggccacggggccggcagcaccagcacacgccccacgagacaaaaagagcaacccgcccacaccaccccgccgcagcccacccacccaaccgcacaagaccgcaaaaccccaccgcgacgccacggcccacccccacgacccgcaggccccccccacagccccccacaaccgcacaaaacacgaccccccagccgcgcgcccccgcccccaccacccgcgcccacacaagaccggcagacccacacacccacacgcag

SEQ ID NO: 121779 - DNA, 143 bp, Arabidopsis thaliana columbia
  unsure (1)..(143): unsure at all n locations
taccgggcccgaattcccgggtcnacccacgggtgcgagtctagaaggttactcttgacattttcacaaagccttgaacagaaatgggctctctcactgcgactcctcccggaagactcctatcccttagcatcggacggggg

SEQ ID NO: 121780 - DNA, 289 bp, Arabidopsis thaliana columbia
gggtggttggaactgattcaaataccactattatttgatggttttgggagttcctggatgggggtgttgggggtattttttttttaggggggggggttttcccaccccagggtttttccaaaaaaactggtctccttggatttcaaccttgccgggaaaaaatcgctttgggttgtaccacttctctgcttttggttctctaacggcgggctcaaaaggttgggggaagcctcgggcttctttagaaacgcttgcgcgaatttctttgggaattggcaccaactgggcc

SEQ ID NO: 121781 - DNA, 394 bp, Arabidopsis thaliana columbia
tgacgtcgcacgcacgcgtacgtaagcttggatcctctagagcgggcgcccttttgtttttgtgtttagtgtcaaagatataactctactaaaagcagcaacacctacaaagtttagttcttcaagggatgatcaaaagtattttcttttacgagtctataagtgaaagcgaaggactgttgataagacttctacttcctgacgatattgagaggggggggacatacgcaagggaagccacaaatactaaagaagaaagcccatacaagcatgaatggttcccctagcatgtatattggtttgaatggataggacacctgggagggtactgttggagggggacctaccttatctttttggaacacaacccaggtttttcccacagggggaaggg

SEQ ID NO: 121782 - DNA, 527 bp, Arabidopsis thaliana columbia
  unsure (1)..(527): unsure at all n locations
ctctcccccaccttctctcttcccccccccccccccccgccccnnnnnnnngngggggggggggggggggaaataattccccaaagttacaatcccccctnaatttgaggggaaaatatccttcccccttccaaatacccccttccccgaatttcccctttttccacccaagcgcttccggcccacccttaaccaaaaatnaaacacattccanactttttatttaccccaatctttttaatttgggccgcccaactttttttccttccccgcccgggggtattttaattttaccaatcccacaatcttttttttgcttgggttttctctggctttccataccctttaaccaaaaaatgggggtggggtctcttaatttccnnaaatcctttttttctccctncttttaaaaaaaaaaaaaatttggttaatcctatttttcttcccctttttttccctttacaacacttctaacaggaataccttcccaacaaaattctctaaaatatccccccacacccaaaaaa

SEQ ID NO: 121783 - DNA, 502 bp, Arabidopsis thaliana columbia
tctctcacaaaaaacaaaactcgttttaaacccccccccaccatttataccccaccaaaccacccccaactacatccccccccacaccatcacttttccccctgcggggtaggccgcgccaaacatacaaccactcataccattcccttcattaccctcatacaacaaatactttcgatcacactacacccttattctagcaccgaaacatacttatattttttctacaattctctctttaaaaacccccattactataacacaacaaacctttttttttcaccgcggggttgacccacctcaaccctatccaaccacagaacaaacaattcttaatcccaaatcaccatcacactaacttctctcatctttctctcctaataccaccacctcaccacctattcccatcttcctctcctccacctacatctcccaccccttctcccacatcctaacctcctcccacaacaccatccatcattcaccacaacaatcacctaac

SEQ ID NO: 121784 - DNA, 744 bp, Arabidopsis thaliana columbia
acaccaccccacccagacgcaccgccacagcagccgcgccccaccctcaccacccacccccgacccccccgacacaaaaagaggcaaaccctccacttgtgggaaccgagccccccccccggctgatgaagaagagaaaaacccaacgccccccccaacacgacgcccccgcgcaccccgaagacccttcttcaccccccgaaggcgcaggggggggccccccaaacaaacaccagcccccccagcccccccgcgcgcccccaccaccccccgccccaccgaaccccacacccccaccaccccgcccccacccacccgcccgcgcacccacccacccccaccccacacataccgcaccccgaacaacagccacagccccccccccaacagggccgaccacgcacaaagaaagcaccccacagagactctctttctctctcaccaaccaaggggggcgggcaacacacaccacccgccaccacacaacccccgccccgaccccaaaaacacagcccacccccgcccccccccgccgcaccgccacacccccccgcgacaccacgccaccgcaccgcacgaccccacgcccgccccccccaccacccagcccaccccaccgccccccaccccccccgcccagcccgcgccgcgaccacccaccctcacccaccacccggacccacctgcgaacacaaccacgcccccgcgccgaccccgccaccccacgccccccacgcccccgcc

SEQ ID NO: 121785 - DNA, 427 bp, Arabidopsis thaliana columbia
  unsure (1)..(427): unsure at all n locations
taggtgacactctcccaagagttatgacgtcgcactgccgcgtacgtaagcttggatcctctagagcgggcgcccccggggtcnggggttttatatttacttttttatacttatccctttcccatttctgagaaaccaagttctttttgcattttaaaataaagccgcttagctccaaactacaaacaaagaaaatttgaagcgaagctcaatccactgtttcacaccaaaaccaggggggggggggccaacaacggtgtgagaacctatacccaattggcaccccgggacggcccacccgacctgaaccgggataagccttgttcataaaacttggtggccgagcaaagcctttctggggacccccctttttcccccccccggccggggaaataaacaaaccccaacctttttaatgagggccccc

SEQ ID NO: 121786 - DNA, 528 bp, Arabidopsis thaliana columbia
  unsure (1)..(528): unsure at all n locations
cacaccaaagggggggaaaaacccccgcccccaacacacaaaacaagcgcagaaggagaaaaagagcacgccggggcgaacccaaggcgcagcaaaaagagaagaaacagaggcagccaagcccgcccaaacacaagcgcggccggcggcgcgagaacagcgggacggggcgcgccccggacgacgcccgcgacaacaaagaacgccggaggccaaaaaggccgcgggcatttttttttagggagggggcggagggccgggccccgccgagacgcgggcaagaaagaacagacgacaccccggcaagcgcccacccgacagcccccccgcccccccacgccgcccaagcgcgcgcacccgaacgccggccggacagcgcgcccccaccacccgcacgacgccgcccgcgggcgggcaaccgcacgaggggagccgcgaacgccgcacgcacgccaggcggggggcggacgagaaggaccgcgncgcccgcgcccaagcgaccccaacgccgcccgggagggcgcgcac

SEQ ID NO: 121787 - DNA, 539 bp, Arabidopsis thaliana columbia
ccccccctcaagcgaaagcccgggcacgccctctcacaaccacgttccacgcctctcgggactgtcgggccgtctctcccactaacgcttctcccttccatccccccccgaagaggcgggccccctaccccccaccccacttttttttttttttttttaatcacaccctcttttttttacctttaatggaggcgccttcataaaacacttctcctccaccgcggcccaaagatttttcctctaacgccttcaaaaaattttttttttcccctggggggaggggaccccccccccttaacttttggggaacctctctatattatacctcccgttaatctcctccccctccaaaggggtcccccccctttctcttccacaccccattttctcgcccaccaacccccccccagcccgagaccttttatgcctcttctatccctaacccgattcgccctccttccacgtcctgacttcttttttgatctcgccccctcttctcccctttgtctatccaaatccctccttccccctctcttcga

SEQ ID NO: 121788 - DNA, 351 bp, Arabidopsis thaliana columbia
  unsure (1)..(351): unsure at all n locations
tgatttccagcttcaaacgactcactttaggaaagctggtacgcctgcaggtaccggtcccgaattcccgggtccacccaagctccgtgtgaacattantttaancattaancttctttatgtccaataataataattctccgaccaccgtgaatcaagaaacgaccacctctcgtgaagtctcaatcacattgcctactgatcaatctcctcaaacctcaccaggatcatcttcttctgcttgaccgagaccttccggtggatcaccggacagaagaacggggactggattatccggcaagcactctattttcagggggattccactacctaacggaaaatgggtatcgg

SEQ ID NO: 121789 - DNA, 427 bp, Arabidopsis thaliana columbia
tctacaagattatgacgtcgcacgcacgcgtacgtaagcttggatcctctagagcggccgcccttcgggttggggcttttttaatactattttttttttttttttcttttgccagaaagagaacaatatcaattataacatcctttttttttttgtttatttgtgcaaaaagcacaatgaataagcccgttctgatcaaaaccccacaagccaggaactaagggggggggggggctaaatacaactttgttcccacaataataacaagaagatggccccccaaggggaaaaaacaaaataatggagaagaaagactggcgaattaagccttccttccgaagtctacccttccatgggacggggaagggaacattcgggacatggatgttagtcccacccccccgaggggaccccatttggttttggg

SEQ ID NO: 121790 - DNA, 341 bp, Arabidopsis thaliana columbia
  unsure (1)..(341): unsure at all n locations
taggtgcactctacaagatcttgacgtcgcctgcacgcgtacgtaagcttggatcctctagagcgggcgcgctttggtttttgttttatttaaatagaagnattaatcttcattctttaactacaaggggtttactagccccaacaaaaaggtacattgggcgaaaatttagcgattagtttttcccaaatgaggggtctatctgaaaacaacctttgagagggaccagccactttgttggggggggcaagctttnaaatctcttacccctttcctgagcttgggattgggntttagaaatttggggggttaaaatctcaaggactttgattctacccccc

SEQ ID NO: 121791 - DNA, 231 bp, Arabidopsis thaliana columbia
  unsure (1)..(231): unsure at all n locations
ggggggggggggtatatacctacgccggggttactaatcccccacttgacttataanggggaaaagctcccttaccccccttccaagggtacccccgggcccgcgaatttccccctgttcccaccccacggggtttccggggccaaaaaaaaacaacccacccnnnnaaattcccaattttttttccaattctcctttaccaaaaagtatccttttaaaaccccggggggg

SEQ ID NO: 121792 - DNA, 421 bp, Arabidopsis thaliana columbia
atctattaggaacactctacaagatcttgagtcgcctgccgcgtcgtaagctggatcttaagcggcgcctttgttttgtttttaaaaaaaaacacacttttcttcgctaaaaaaaatctacacaataatcaactaagagttacccgaacctaatcaaagaacacaaaaaaaaaaaaaaggggactggggaagaaaaataaaagttccaaaaataatactttgccttggggggggaatcttttattaatgttttctttgaaaaggagccccatggtttgctcctccttatctggggcccattgggtcactcaaataaccccccaatattctatatataaaaaaattggggaaaaaaaagggtttctttggcttgaaaggggggaataaccattccttaaaaaaggccacctccctaggggga

SEQ ID NO: 121793 - DNA, 263 bp, Arabidopsis thaliana columbia
  unsure (1)..(263): unsure at all n locations
cccccanaatgggtctaaacaaacttgctccaaattccacggnggggcctacaatcccaagacagggtcttaggaggagccccaaccaagtcaaccaaaaaaatatgccttcttttcgagggggggtggaccanngctcaatacctggataattggtttaaaaaaagaacacttcatcaggaaacccccaaaccactttactcctaagtcctcaattgggactttattgtggggcctctccgtgcgctttttccgggggggga

SEQ ID NO: 121794 - DNA, 585 bp, Arabidopsis thaliana columbia
cccccccgggccttaagggggggggaaaacaaaagcccccccaagagacgaaagcggaacagaccccgcccgcctttcaccagcccggggggggaagccccacccaacaacacaaccccccccccgggcggccagggacaaagacgcaacgccgggcccgcgccgcaccccccacgaacacggaccgcccggacgcccccacgagcccgcgccgcagcacccaacaaggccggcaccgcgcccgcgacgggagccgccgcggcgcaccgccgacgccaccccacccctctctctcccacgggggggggacgaggacgaaaccggacgaagagcacacgcgcccacccacacaccccacgccgcgccggcccggccgccacgcggccccaccggaccaaacgcacccacccccacagacaggcacggaaagcacgcacacacgccgccccacaccgcccccacaccccccccgccccgacgagccaccacccgcaccccacagacacagcgcagcccgcgcccccccccggcaaccggccgggaacaagcgacgacgcacccaacacccgcacccccgccccgccc

SEQ ID NO: 121795 - DNA, 466 bp, Arabidopsis thaliana columbia
  unsure (1)..(466): unsure at all n locations
gggggggggggggggtaatactcgccctgttacaaaaccccttnacttaangggaaagctcttgcccccttccaaataccccctccccaaatttccctgttcccaccccaggcgttccggaagggcccaacacaatttnaatttnaactttccctccacaccccaaattcccacacctntcntctgttttctctctataaaaaaccctttttcttttttctcctcaacgcccttaaaacttctaaaaaaattaaaaaaaaacttccccatctcaaaaaaaaacttttaatttttcggtgggggctcccaaaaaaaaaaaatcccccccatttaaaaaaactaataattcttaaatcctccaaaattcaaaaccaatttttttccaaattcctttttacttaaaataaaaatttttcttccccaattttcaaaatccaaaaattctttccaaattaaaaaacccttt

SEQ ID NO: 121796 - DNA, 378 bp, Arabidopsis thaliana columbia
acgccgcgacgtaagcttggtccttagagctccaggggtggttattcctttttatttttttttttttttttttgggtgtttttttttttttttttttttgggaaaacaaaccgggggttttattaattttgaaaaccaaatccaatttcttcttaattaattgtaaggggtttttaaaactttttttttttgggtgttggggggaaccccagggttagggaaaaaaaaaaacacccaaaggccatgagcggggtgaactgtttttcaaaaaaatgggaaaggggggcaggacttttttaataaaaggggggccataaacaactttttggggaagtggggaggtgtcttttgggggggggttttttttaaaagaaaaaa

SEQ ID NO: 121797 - DNA, 479 bp, Arabidopsis thaliana columbia
tgatttaggtgtaactatacaaaactatgacgtcgcatgcacgcgcacgtaagcttggatcctctaaagcggtcgccctttttgtaagggtttttttaattttttttaatggggcaaaaaacaggatcttttactatcacatttttgatatgtacaaaagagggggattaaaatacaatttttttgcttttaaatacacaatcaaccctaatacggttcatggatatcacgacaaaaatttttcccctgggagattttttttgaaacattccaagggtggtggaaaaatcccttttttttgagacctaaaaaaaagaaaccccttgacacaaaattttttatttcgaaatttttgaaaagcgtaatacaattttttaaattttcttttgggtgggggaaaaatggggccccccacccatcacctgggggagaatctcctttttttgttgttggaaaaatcgtttttttaagccccgcag

SEQ ID NO: 121798 - DNA, 498 bp, Arabidopsis thaliana columbia
actcactttatggaaagctcgtccgcctgcaggtaccggtccggaattcccgggtcgacccacgcgtgcggcttttgagaaagccttttacattgcccaactcaatcctcacaaaaccttgttctttgacgacgggccccggaacatccaaaccggggaaaggcgggtggtctccatacaggctggggtgggcaaaatcaaaaaaaaatagagtggaacctttttccgggggggagagagcctccaccagcaggagaggaggcatgaccacacagttgttgcgcccgaatcccttaatcaaccccccccacaatctggagctaggttgtttccgcgcttcacaggatctccaattacaaacttcctcttcaagccttaacttgatatgtaaacctaaataggcaggatgtccgacatttcagtggaaggggtgacaaaaaaagtgtctggcggcccctgttgtgtacgccgcctatccgaggcaccgggggagggggt

SEQ ID NO: 121799 - DNA, 515 bp, Arabidopsis thaliana columbia
  unsure (1)..(515): unsure at all n locations
atgnnnnnnnnnnnnnnnnnnnnnnnnnnnnnnnnnnnnnnnnnnnnnnnnnnnnnnnnnnnnnnnnnnnnnnnnnnncttcgtgtttttttttttttttttttttttttttttttttttttttttttttttccaaaccttaccgacaaagggctgaatctcaggggatcgtggcagaaaggccactttgccatttacaatacccggtggcgtatttaagccgtctgcaaaggattctacccgccggtcgggggtaattataattaagggggggccgaacaacgctttcgccaaacggtcttacccaacaacacgtgcctttgggagcttaattttctactggggggcggaaatcggggggggggcccatgccttttttttaacccgaattttgacttagaggctgtcaatataacccagcgccggggatttttgcccctttggtttttaaaccaagggcgtgaccaattgggagataaacgggtcctttcaaacaaggggaaattcctttcgcg

SEQ ID NO: 121800 - DNA, 342 bp, Arabidopsis thaliana columbia
cctcgtgtgaacattttctataggcgccaccagagaccaccaccacccttttttttttgcgggggggggcgacagacgtgagggacaccctatgtactaataaaactagcgttgctgtctttagttctggctggtcgtacactcggccgagaccaaacaggtgggcttcgataggcatgagtccgaacgcccagtgtcgcgtcctcactgggagtacgctggaccactgctcgaaggagcgtatctaccgtaagagccagcctatatgtgattggccacaacacggcacggacgctcgcgtgctcattgccaggcgacagcggcgcattagcgggggtcgac

SEQ ID NO: 121801 - DNA, 523 bp, Arabidopsis thaliana columbia
agctcctaatacgactcactttagggaaagctcgtacgcctgcaggtaccggtccggaattcccggtgtcgacccacgcggtccggttaggtcacctattttgagttatggacacacaaggccaaaacatgtgtgtcgggcgtgcgacccatcaacctactagcagtgggggagaaaacataccatgtcccaacaaaagcttgattcgaggcgtcaccaaaacactgccttttgttgggggggggcccttaaccccccggaacggaaatagaaaaacccttctacgcccaggcaacaacaacccccgcctccacaaagtctgaaccaatttctttttggggcctttcccaaattccattcgaaaaacaaaaccaagggggctagaagcccccccttttaactgcctgcccctttttcttcttagaatgggggcccttggcggcccgggcaataagacccaaggcccactgtgacctttctttctaaaaatcggctgcgacggagcctcctctctttgaaaaag

SEQ ID NO: 121802 - DNA, 494 bp, Arabidopsis thaliana columbia
  unsure (1)..(494): unsure at all n locations
ttgnnnnnnnnnnnnnnnnnnnnnnnnnnnnnnnnnnnnnnnnnnnnnnnnnnnnnnnnnnnnnnnnnnnnnnnnnnncttcgtgttttttttttttttttttttttttgttttttttcttttttattttttttggacttttttcttttttttgtgggcgcgtgtgggtcaaaaaccccttatataaaagccctttaaaaaccccccaaaggccttttttgctacaccttttatttttttgggggggggtcaagaagtttttccaaagagagggttaggtttaaaaaaattctctgaacccgtgttttggttttttttcgcgggacgggcttcgacatcttgggggggggggggggcccggctcttgaaacccggcctcggggggggcaaggggtcgagaaggggggggtttttcaaaaagagcgccgtgttggttaccccccggggggtcccccctcttgggggggggcgaggggggggagcacaccgagggg

SEQ ID NO: 121803 - DNA, 425 bp, Arabidopsis thaliana columbia
tacgactcactttagggaaagctcgtacgcctgcaggtaccggtccggaattcccggttcgacccacgcgtccgcccgacgtcatggttttcagggactttaacctcagaattcgagctggacatagccaagctcttgtgggcgcgagtgggtcagggaaagattctttaattgcgatgatcgagcgggtttaccacccttttgctggaaaagtcattattttttgggggggggctccccccgcttaaccctgaaatctacaaaagctcgaacgctggtcttgttcaacaagacccccccttttttagaagaaccgatcttcaaacacacattgcttatggaaaagaggggccccacaggaatccccaggaattgaggtgcggctcccacgccccaaagggctcgccttgttcatacagtggcgc

SEQ ID NO: 121804 - DNA, 519 bp, Arabidopsis thaliana columbia
atgaatttatgtgatactactacaacagctttgacgtggcatgcacgcgtacgtaagcttggatcctctagagcggtcgccctatgtgttttttttttttttttttttattttacggggagtttttttttctttttgtggcgacttcaataatacatatgttacaaaacgatcagaaatatacaacagtttttaattatacatacgttacaaatcgatcataaagggcacaacagttttctttcatgcgtatgctacaaatcgaacagaaaggccacaacaggttttaatcacaatatataggagctttgatacttcctgtggtattttacatttctttgcctggactgggcttaatttaactggactgggctttttttaactccattcatcccgagaagttttttaaatcctgttttttgttctaaggttaacgggtgtgggaacctttatgttaaatttgaccctcaaggtcgcttttttaagcggggttttctgaacaggattcttttttttggaa

SEQ ID NO: 121805 - DNA, 508 bp, Arabidopsis thaliana columbia
tacgactcaattagggaaagctcggccgcctgcaggtaccggtccggaattcccggttcgacccacgcgtgcggtcttcttctttcctcagctcacggggagtctctggaacggattgtactaatctcattattttcccggtttcagaacgatttctggaacattcattccacactctgagaagaaacatgagtcacccgagaaaggcagatgattttttttttggaggtgggggggactttacacctttgggcctaaaggacccaaaaatggggagatattttttccccccctttgggggtctttagcccttttggggccaagaaatggggagtgtttattttccggagtttttagaggaccttaccccttggggcgacaagaaataagggattttttttctgcgtgcggctttggggtccctatacctttttggaaagaggcaccctggaccacaaaaaaagggggagggttttgtggggacactatttcttgttgggggggcttg

SEQ ID NO: 121806 - DNA, 525 bp, Arabidopsis thaliana columbia
  unsure (1)..(525): unsure at all n locations
atgatatgccnnnnnnnnnnnnnnnnnnnnnnnnnnnnnnnnnnnnnnnnnnnnnnnnnnnnnnnnnnnnnnnnnnnnnnccacgcgtccggcgagatctctccaacgaaaaaatggcttgtagactcttttgggcttctagggttgcttctcatctaaggatctccgttgctcaacgagggttttcttccgtggttttgaaggatttgaaatatgctgattcacatgaatgggtgaagattgacgggaataaagcaccctttggtataacggatcaccgcccaggaccatttaggagatgtggtctatggcggagctacctgatggaggacattcggtgcacaagggaagagttttggcaccgttgaaagtgtaaaaaccactaccgatttcaatttctccattttgggggaagggtggttgaaagcaatggaggggcttccccactccccttggaatggggaaacttttaccccgtgatgaacaggggaggggatactaaaacttcaacctgactcactgcgg

SEQ ID NO: 121807 - DNA, 520 bp, Arabidopsis thaliana columbia
  unsure (1)..(520): unsure at all n locations
atgatactgccnnnnnnnnnnnnnnnnnnnnnnnnnnnnnnnnnnnnnnnnnnnnnnnnnnnnnnnnnnnnnnnnnnnnnnnccacgcgtccgcccacgcgtccgcgtgaagagagtaatgggcatcacgagactagcccatcaatcccaagctatatgcaagcaactaaatcggcgaaagcaaagctaaggcttcaaggctcaccaaagtctgcggagcaagatggaactgagaaagccactgttcggagacgtcactctctaccatctccaggtaatggtaggatcacttctcactctccaagaacaacgagactcgcaaactgaggtgacaaaaccgggaataagaaggagaaacctcttctgtcgccccgagaaggaaacgccaaaacaactccagcagagcggaagaggtgattggttccagcggaaaggaaaacctttatgggtcttgattctatcgccgcgacaataccaaacatgaggaatgcccccattttatctatttaaaggctagaga

SEQ ID NO: 121808 - DNA, 380 bp, Arabidopsis thaliana columbia
aaaaaagatgcactagcgaaccaccaagactcagcggtcagggaccaaggaacgggagcgagcgacggaagtgcacaccgccgcggagcaacagaccggaccggacgaaggggtggacacaggggaaggctttttttggggggggggagcaggacgcgggggggctaaaaaaaaacccgcgaggtggctccgggcagagaacgcggggagagaaaggacggcaagagggggggagggggtggataacagaagagctagaagatgctacgaggggagaggcgatgcccagcgggtgagggtggcgtgcgtcgggacgggcaaagggggtagtgtgtcaagccgagaagcggatgggggaaacagggggaagttggggggta

SEQ ID NO: 121809 - DNA, 455 bp, Arabidopsis thaliana columbia
  unsure (1)..(455): unsure at all n locations
annnnnnnnnnnnnnnnnnnnnnnnnnnnnnnnnnnnnnnnnnnnnnnnnnnnnnnnnnnnnnnnnnnnnnnnnnnnnncttcgtttttttttttttttttttttttttacccaaaagaacttaataaggtttttaaaaagaaagaacaaaaacagaaagctcgaaaatagttattaggaagaaaaattctgttagattccctcggccttctcgtcctcgctgctgaaactattgttgctgctccattcacacttcaagggagatctaggcgatccacagtacttaccaagcttttcaaacgtgtgatacatcactgttccactctcttctcctagagactcaaacggcctctctctgcacccatagtcttccaagcctacagtaatctctgggttggatgagtccgctccaacgctcgagtgcacagctaccgagaattgcttgggctccaaaa

SEQ ID NO: 121810 - DNA, 516 bp, Arabidopsis thaliana columbia
  unsure (1)..(516): unsure at all n locations
annnnnnnnnnnnnnnnnnnnnnnnnnnnnnnnnnnnnnnnnnnnnnnnnnnnnnnnnnnnnnnnnnnnnnnnnnnnnnctttttttttttttttttttttttaggatattcgttgaatcaataagagagaacagatgatattactacacaataccagaaataaaagagaaaaactcagcaaagaagtcaaaatagtccaacttgtataaaataccaaaaatcctgcaaacttcttgactagtagttgaaacttgtcccacgcttttcttttgaacaacgcttttaggatggagggcaaacacttgggctggtcacaaagatggcagttgggctgcctggagatggaggattctgcgtcagcagcgaagcatgtggaccagctattgaaacatcatcaggggcacttgcagaatatatttcaacctcttaaagaccaagttgccgcctgatcaagtccttggtactctgaaggacttcgatctctccaaaagggaacctgaagttcagagcctgag

SEQ ID NO: 121811 - DNA, 507 bp, Arabidopsis thaliana columbia
  unsure (1)..(507): unsure at all n locations
nnnnnnnnnnnnnnnnnnnnnnnnnnnnnnnnnnnnnnnnnnnnnnnnnnnnnnnnnnnnnnnnnnnnnnnnnnnnnnnnnncttcgtttttgtttattttgtttttgtttgagcattttataaatttttttttggagaaaaggttagatgtatactcttactctaagaaaactctcaaggtatttgttcaccgagaaaaagaaaggttgattgtacagagaatccaagggaactggtttatgagggggtggcgaaaccccaacccagttcaagaaaggaaaaagtggggaacatattggtaagggctccgggaataaccaaatcttatataacggccggtgaaaaaacgggaagaatttggtagaagggggccggcaacgccctcgaaaaattctttgaggaacctggggagggaacacattccgcccaagaaatattttgggtaagggcacgtttcctctaaggacatgggcggaaaaaaaccagcttcccatggggcccggggg

SEQ ID NO: 121812 - DNA, 533 bp, Arabidopsis thaliana columbia
tacgactcactttagggaaagctcgtacgcctgcaggtaccggtccggaattcccggttcgacccacgcgtccgctctattttgctatcgtttgagcatctcaaaaatttctccggggagatttgtttgtatatatactcttccacaaagaagatgcttaaggtccctgaacaccaagttgctggtcacattgctagtgatgggaagctcggcccatttttttttgagcggggggggggtcttcaacgcactttagggagaatatcccgggccaccacggaggctgagtttttttgagccctttcaaatcagaaaatggggggttccaggacaacatcgcatagatactctcgcggggtgtatcacggggacctaagcgtgggaagaaacatttccggggattctggagaagctcccctcacttgcgtctagaaaaagtgtcagtgaagcccaccccaacacccgttgcggggggggcttgtaaaattggtttcctagcaactgcggcgcctggtgttttcagaaaatttctt

SEQ ID NO: 121813 - DNA, 509 bp, Arabidopsis thaliana columbia
  unsure (1)..(509): unsure at all n locations
aatgnnnnnnnnnnnnnnnnnnnnnnnnnnnnnnnnnnnnnnnnnnnnnnnnnnnnnnnnnnnnnnnnnnnnnnnnnnncttttttttttttttttttttttttttttttttttttttttttttatgggaaaataaaatacagcttcatatatataaaatatataactaacgggaaacattttcatataaaatataataatcccataaaaagtaaaagaaaaaaaaacagaattatgaaactcattcgtatatttagaccaatgccaaaagtcttccaatacttaaaacgataaaaggggtttttgtcgtaaagagagaccaaatacttccgtctaggaaaaatttgagtaaccgaataaaccggtttgatcgaatccataatttggccaataaccgtttgggataaactcatccatgttctgatctaagcttgaactcgctggaaactccatgttttggttaccgatgatcggaaaatcaaagttttgtcggaagcactgaaatgcga

SEQ ID NO: 121814 - DNA, 605 bp, Arabidopsis thaliana columbia
aggaggggggagggagcgggagaaagagaggggtttataagggagacgggggcaaaaacccaagcgagaagacacgaacagagagcagacaaccagcgcgacgagcgaacagagacagacgcacacgagagaacaaccgaggcgaaggaggaaagaagggggaaaaggagaaaggagaaaaaagggagggaggccgaggagacggagcgaaaaggcggcggaagacgccggaaaacgacaaaggagggttttttttgccgagagaggggaaaacaggaggcaaggaagaggagaggggagacagcacgccgagaaaacagcaggaacgaaggagagggagaggagggggcagagacgagaggaggagaggcagcgaaagacgggggaggcgaaagaaaggaggagacgagaaggaaaagacaacggacgcgcggaacaaacagagaaagaggagaaggggcaagcgggcgggggaaagagaaggagagaaggggcaaggaaacggagaaacgacagagagaaggcacagcgaaagagcccaggaccacaccccgacggcagcaagccgagtggcgcggcggcagagaaaacggcaggagaagacc

SEQ ID NO: 121815 - DNA, 402 bp, Arabidopsis thaliana columbia
  unsure (1)..(402): unsure at all n locations
nnnnnnnnnnnnnnnnnnnnnnnnnnnnnnnnnnnnnnnnnnnnnnnnnnnnnnnnnnnnnnnnnnnnnnnnnnnnnnnnncttcgtttttttttttttttttttttttgaggcagaggaaacaagttcttatttgggcgctctaacagttcatatcctgaaggggacacacatttttttcccatccaaatgggtgtaaaaggatccacactgctttccataaaacggggaagacacttccaaaactgaaatatagataagttgagtgcatttatattctctacggaggatttgggggacgactataaccatgtaagcctctctagccccactccaaaagtaccttggctgcatcagatttccgcactatcacttcaatgaaacaaaagcactatttttcct

SEQ ID NO: 121816 - DNA, 557 bp, Arabidopsis thaliana columbia
  unsure (1)..(557): unsure at all n locations
tccaggtacaatacgactcactttanggaaagctcgtacgcctgcaggtaccggtccggaattcccgggtcgacccacgcgtgcgggcgatttttgtttcaattgtcagaatctgaagctccgtggaggatgcggatacaaaaacaaaatgcaaaacggatcaagtgggtgagtacaggggagatattttaggatatggtacaaaaaatgccaaacacgccgttttaatattttttttggagggggggcccttccagctccctcccccgtgatgaaaacacaatgttgtgtgggggcggcaaaaaaaccatactctttgcttatcatctaaggagtggttagaaaatttgggggtgggttatttggggtggggtcctgggcatggagaagagagagcgtaagaactcacccgggtttgtgagacgcgccctcgcacccctgagagaaggagaaatgccttctacctgcccaagaaagaaaaagagaaaggggggttttatctgagagccgtcttacgcggcctcttcttgtggggaaaagaggagatttttattttt

SEQ ID NO: 121817 - DNA, 194 bp, Arabidopsis thaliana columbia
tttttctcaccacacccacaacgatttatcaagcgaggaaccaccccagcaagaagacgagcagagccgagggacgcgcgcgcagagcgtttatacagacctcgccggacgtgaaacacgcacccaacacaacgacgaggcagcgcgcgcacggcagggagcgcgcgcagcgacggcggagcgagacgcacgcg

SEQ ID NO: 121818 - DNA, 462 bp, Arabidopsis thaliana columbia
gactcacttttagggaaagcacgtacgcctgcaggtaccggtccggaattcccgggtcgacccacgcgtgcggttcaacgttgcgaatccaactactggatgccagaagaagctcgagatcgacgatgaccagaaactacgtgcgttttacgacaagagaatctctcaagaagtcagtggagatgctttgggcgaggagttcaaaggatacgtttttttttatcaggggggggtgcgaaaagcaagggttcccaatgaagcagggagttttgactccaggccgtgttcgccttttgttgcaccgaggaactcctttctttagaggacttggagggggatctgtggacaggaaaagaacctctggggggggtgggaatgggagccttgaccttttggtcttaccctcggctttgagaaagggggaaaaccgtcctttgggtgtgccccctactgggaagccct

SEQ ID NO: 121819 - DNA, 518 bp, Arabidopsis thaliana columbia
  unsure (1)..(518): unsure at all n locations
atgnnnnnnnnnnnnnnnnnnnnnnnnnnnnnnnnnnnnnnnnnnnnnnnnnnnnnnnnnnnnnnnnnnnnnnnnnnnctttttttttttttttttttatgtcataaaaaatatagtttatagttcttttcttctttttcattacactgaaattacatttttcacaaacagtaaagtgaaaatcgtagatacaatatacaaaatcacattagacatacaatgtttctaaattcgttcaaagtttgaaacttgagggcctcttaagcctgttcctagaatgccaagccagaagatattttcttttattcggattggttctacttaactcaagaagttattccggtactatatattaagtacagaaaattaaaaaaccaagattgtttcggacctctattctccggtgagctggggcatccaatgaggcaacgttgcattcgtccttcgaattagggttccggcagctacttctccaactccatccctttgtgatgtatcccccgaagataaaggaggag

SEQ ID NO: 121820 - DNA, 474 bp, Arabidopsis thaliana columbia
  unsure (1)..(474): unsure at all n locations
atgaannnnnnnnnnnnnnnnnnnnnnnnnnnnnnnnnnnnnnnnnnnnnnnnnnnnnnnnnnnnnnnnnnnnnnnnnctttgttttttttttttttttttttttttttttttttttttttttttttttttttttttttttttttttttttgaggacacaaaaaatttttttaaaggtggggtcggggggaaaaacaaaagaacgggaaagaagaaaggggggggccatattatttttttgttgagaagaaagcaaaacaggggcattggggattttacttaccccaactacataaaagggcccattttagggggtggggaaaatgccattgaaaggtttaaaaaaatggaaggccacccccgggggacaaactcagagtgggggggaggtaaaaaaactgtcccccgcggaaatagtggttccctccccagcggggagtgttcacattttttatccgggggttaaaagaaaaa

SEQ ID NO: 121821 - DNA, 498 bp, Arabidopsis thaliana columbia
taatacgactcacattagggaaagctcgtacgcctgcaggtaccggtccggaattcccgggtcgacccacgcgtgcgggcgaacctctcccaagcaccgaactgaaagaggtatggaaactcgctgatgggccaaaggatcacaaatatcaatacactctctttgctcacaagattaatagcttccacactgccccgaaaaagctggtgccctctgattcacgtttacgagggggagatcccctcttgagaggggccacaagccaaatcacgtataagaaaagcacgtggaccatatacagaaaccttaaaaaaaaacccggaagaggaaggccagcctttttccaaaagggtccaaggaaacagaaaaagccctgcgtcaccgtgggggatgtgcaatctccccattcaggggaagtgctcgcaagatcgggccttgcgtgatactgtgaagataaccccgcctttggcggccccaattcaccctatgggagttccg

SEQ ID NO: 121822 - DNA, 675 bp, Arabidopsis thaliana columbia
  unsure (1)..(675): unsure at all n locations
gaggcacagggggagacgcgggggagagacaaaagaagatttttttttcccccaccccccactttcagggggaaccaaaaggggaggaaaagaggggggaccaaaacgagattctagcagcggggggaaacccgcgaaacaacgaggagaagaaacaggaaggggggggaggggaaggcaagacacaggagagaacagacacgcgcgccacgccggaagacagcgagaaggagcagagggaggcagagaggggagggaggaggagaggccgaggggaaaaggggcgggggagtttttttgggggggcgggggcacagacggcgaggcagaggcgaagggggcggaagggagcggcacggaagagagaagcgcggaagcgagagcggaccggagacacgcagacagagcgaaagcaggagcagagagggagaagagggcggggacggggacacgggagaaaagagaggagaagaaagagagcgcagggaaagcagacgcgaaaggtatggacgcaaggacgaggcagggaggaagagaacgagaagtaacgaaggagacaagggnaaaagacacgagggggaagggcgcacgaaaacaacagcgagagagcgggcagacgggggcagcgaaggacgggggaagcaagaacaccgcgaagaaaacgacgagagaaga

SEQ ID NO: 121823 - DNA, 187 bp, Arabidopsis thaliana columbia
caacgctacgagcagcgcccgcgagcgacgggaaggccccattttttaagcgggcggggcaaaccccggaaactacacaattgtccgactgcgggcaagcctgctagcgatgtgtgggtataagataagacctggaggagtactgctggattacgacttattgaccgcagccacaagtagcggagcc

SEQ ID NO: 121824 - DNA, 517 bp, Arabidopsis thaliana columbia
  unsure (1)..(517): unsure at all n locations
nnnnnnnnnnnnnnnnnnnnnnnnnnnnnnnnnnnnnnnnnnnnnnnnnnnnnnnnnnnnnnnnnnnnnnnnnnnnnnctttgtttttttttttttttttttttttttttttttttttttttttttttttttttttgggggcaaaaagctgaaacaaacctccttgagagaagggagattttcttatgtccattagtttatgttttgggttgggtgaacactaccccagacattttttcattggttgttggggcaaaaagctgaaacagacatcctgagagatgctaacacctgtttcgcttttttaggaaaaaaaaaacaaaaaaacccccgattttaaatctttagttctcgcccacacaaattacaaaattctttcttttgcttaaggatccgcagttaagcttgaaaaacaaaatctgagttctatccctgatttagaattcttcctgggcgagatcaaaatcggcatcttcttccttttatttttcttaataaaaaacctgccgctttcttt

SEQ ID NO: 121825 - DNA, 508 bp, Arabidopsis thaliana columbia
cggctctctacgactcacttatagggaaagctcgtacgcctgcaggtaccggtccggaattcccggttcgacccacgcgtccggctgtatcgccggaggtgtttccgtttacctctctcacacctatttctcttcttctatctgacattcgaaagctctctctctctatctctcttttttaccgcgcttgctacacattgtggcagacatcaactcctacctaaatctgttagcagcccattttcagatcgaattgaccccaaggagatcacatcagtttttgggggttttgaggaatgaatttcttgcttcgatctgcttcttccgctactcatcggcctccggggatcgaaccaccagctacgccggctaaacctccccctgaaacagcgaagcccggagttactttggaagggctgattgctgaagaccatttcccacaatatccctcagtaaatgaagacccccaccggggggggggtggtcctggacaccttgatgggaatgg

SEQ ID NO: 121826 - DNA, 521 bp, Arabidopsis thaliana columbia
  unsure (1)..(521): unsure at all n locations
aatgannnnnnnnnnnnnnnnnnnnnnnnnnnnnnnnnnnnnnnnnnnnnnnnnnnnnnnnnnnnnnnnnnnnnnnnctttttttttttttttttttttttttttttttttttttttttttttcagggaaaagaagatagatccagatggatgtacagacctgattagtttccaaaccaaaaataaaaaacaaacaaaggtgtaatagtttcgcatagatataattataatttcacaaacaaggggtggtatttaaaaaaacaaaccagtcttgttttttaccttaacccaaggtctcctgatcaaaggtggggggtaatgaacacgaaaagttgtttcctttaaacttcctctagaaccaagtggttactttggaggatgtggtattggcaaagggggcaagccgggttgatgtatagccatttgtctacccatgaacaggggaaagggtgcccaaaagggaggtccttataatttgtgccggcttaatatgcagggagacagaggcaacattctggttt

SEQ ID NO: 121827 - DNA, 519 bp, Arabidopsis thaliana columbia
  unsure (1)..(519): unsure at all n locations
nnnnnnnnnnnnnnnnnnnnnnnnnnnnnnnnnnnnnnnnnnnnnnnnnnnnnnnnnnnnnnnnnnnnnnnnnnnnnnncttttttttttttttttttgattttgaacttttgagtttagttccctttaaaaaaatccaaaagccataagaaagatttttagtcttaaaactacatattgtcctaccttagggcctatacaaaagacttttgaacatgagaggaggattgatatgtgttgacatataaatcaattttcatcaagcgttagcagtcgatttgaagcatgtctcgtccaaagtcgagtatatgcaaccatcgtttgagagctgttctaacgcttccttgacttgaagcagcggaatcctgagttcacgggcaattatatcacagtgaactccagcttcagatacaatgtgcataggttgattcaggtaattcaagaccgtctgctttacaccatgcattgaatcattgaattggttcgggaactgattagatggaccggtttggtagggct

SEQ ID NO: 121828 - DNA, 520 bp, Arabidopsis thaliana columbia
  unsure (1)..(520): unsure at all n locations
annnnnnnnnnnnnnnnnnnnnnnnnnnnnnnnnnnnnnnnnnnnnnnnnnnnnnnnnnnnnnnnnnnnnnnnnnnnnnctttttttttttttttttttttttgctgaaaatggaaaagcactaataatttagtcacattaagaagataaatcgctatacagctataattaaaatcttattctcattgtaatggtttgatatgaatcacaaagagccatgttcttcacagggaagaggtagtgagtagaagtcatggggccaatctatgaattttccacgcaggattcccgtttacgtcttgcagagaatactgcagcctgtcatgtaaacgagatggctgtccctgccaaaactcgaaaaggtttggtttaagtctgaatcctccccagtttttcggctttggtatcacacttccatccgaatattgttttgtcagttcttcatattcgtcgtatagaacatgcctgccaggtacaacagaactctgcttgctaacaatagctccaatctgacttcctt

SEQ ID NO: 121829 - DNA, 519 bp, Arabidopsis thaliana columbia
  unsure (1)..(519): unsure at all n locations
ttgnnnnnnnnnnnnnnnnnnnnnnnnnnnnnnnnnnnnnnnnnnnnnnnnnnnnnnnnnnnnnnnnnnnnnnnnnnnctttttttttttttttttttttttttttttaaaggaaattataatggttaataatcataacatttatacatgaacttttcaatgatagacataagtcacaaattgacaaagtttagaaaagagaaaaatagaagaagagtgagtggaagagaatccttttgcatgaagatacagcttttctgagtgattgagaatttctgacccacatgatcagacttggcaaatgttagttaattacggccatcaactttttgttctccagttccatcaagatccatcttagtgtctcaaccggatttgccgttaaccgcacagcgaactcttaatgatgaagagatgtcagtggtttttacgagtttaataaaccgttaaataacgggtttttactctgttgttgttgctgctggtgaccgttgcctctcttaagctggactttcaatt

SEQ ID NO: 121830 - DNA, 500 bp, Arabidopsis thaliana columbia
atacgactcactttagggaaagctcgtacgcctgcaggtaccggtccggaattcccgggtcgacccacgcgtccgcttcttccctctttcgttttctcgcgactctctagggttagggtttgttgattttcacgcgttattcttcatcttcttctgcaattcgcaactagagaagctaattccattgaagttaaggtggggataatttttggttttagaatatactaatggctggagtactagctggggaatgttcttacagtgagagtggagtttcatcacactcaaggaattcccatgaaaagcaagaagaggtttcccgctggtattttggaagaaaagaaataaaagagaattcaccgtcaagggtggatggttttgacttaaagaaggaaacatacctccgcaaatcctaactgacatttttgcaggacttgtgcataaaattgaaaagttcccaggttacaatagctacagggataatcttgtgacatcaattt

SEQ ID NO: 121831 - DNA, 519 bp, Arabidopsis thaliana columbia
  unsure (1)..(519): unsure at all n locations
nnnnnnnnnnnnnnnnnnnnnnnnnnnnnnnnnnnnnnnnnnnnnnnnnnnnnnnnnnnnnnnnnnnnnnnnnnnnnnnnnnncttttttttttttttttttttttttccaaatttaaatgcccatctcggaatccatcttggagaggccaatagtaaaactatagttaaaccaaacaaacattgtagtgcataaatactcatgtgaacttattttacggttgatagaaccttttcggtgtttcctaatcaaactcaaattgttagtgctaaagaaagatataatggatgaaaatgaactacatacttatagtgaagaaattcaggatcaaaactcttttggtgaaggggattgtgactcatgagcggatggttactgaatgatcaaacaccatctagtctaggaagtgcgatcactctgttctgtagcacgtttgcttcaattgtaatgtgggcgacaatcagatgccaaaccgtgttgtgtcagataaactttcgtactcaggttatgactcgaact

SEQ ID NO: 121832 - DNA, 519 bp, Arabidopsis thaliana columbia
  unsure (1)..(519): unsure at all n locations
nnnnnnnnnnnnnnnnnnnnnnnnnnnnnnnnnnnnnnnnnnnnnnnnnnnnnnnnnnnnnnnnnnnnnnnnnnnnnnnnctttttttttttttttaagacgaaaccaaatcaatctcttttttctctgattggtgttgtttcacaattcacatacctgaaaaaatgattttactatacataaactcaataagttgcagagatacaatggactgttaagaactcataaaaatcaagagctaaaatgcattgatgaacaacaatgtaatcttcaaaccaagaactatatcactcaagacagaacaaccagagtcatcaaacatgatcacatacgaagacgaaaccagaagattgtaattgttcctgaactttgatcaatctctctctttcagtattcacaaaccataaaatgaatctaagaagctaatcttcatcatcactctcatcactaaagtagctaactttcttctcctttctcttcatcctcctctcttcttcttcctctgcttctctttttctc

SEQ ID NO: 121833 - DNA, 515 bp, Arabidopsis thaliana columbia
  unsure (1)..(515): unsure at all n locations
atgnnnnnnnnnnnnnnnnnnnnnnnnnnnnnnnnnnnnnnnnnnnnnnnnnnnnnnnnnnnnnnnnnnnnnnnnnnnnctttttttttttttttgagaactattaaacttcaatttgttatttcaagtagagagcaaaagctattggtgatagagaaattgttaaagatttggtcacaactcacaaacaatttctctatgtagcaaaagcttttgacccaatctccacgtcaccctttttcctcaagacccttgtgttacaatcatggtaccaaacaacacaagaaacccatttaacgacattcccaacacaaatcaaacttacatagagaccagtgtacaacactccattcccactcagactttcactgcatttgtagtataaacatggcatccttgtcacaagagcgccgaccaagaacactagcatcatccagaagtcacgcttctcttgtcctcttaagtaccaagctgaaagagacagagcactacttccatagatgcctttactatct

SEQ ID NO: 121834 - DNA, 526 bp, Arabidopsis thaliana columbia
  unsure (1)..(526): unsure at all n locations
aannnnnnnnnnnnnnnnnnnnnnnnnnnnnnnnnnnnnnnnnnnnnnnnnnnnnnnnnnnnnnnnnnnnnnnnnnnnnnnncttttttttttttttttaagagggaatcgaattttatcacatcttgacaaaacaaaagcattctcactaaaatcaaacacgaccaacacacatacatatacaaagagtgaaagagtaatcttaacttggcgtataacaaattatgtatataaataccttcaagggacatttaatttagttcaacaaacaatcaaatcacatatctctaagtttgctgagattaactggagatataactttaacatcaccatataacaattgcttcgcgaagatgacatttgctgcttcactcggatgataaggatcccaaaacacatatttatccctctcttcacacaaactcgaagtcggtccgcacggaattatacccgcgtattgtcctccattaccgcaacaagcctttgtcgcactttttgacccctatttattcgagttaggaatgac

SEQ ID NO: 121835 - DNA, 412 bp, Arabidopsis thaliana columbia
gaaacgagaggcacacggagcagaccgggggccgcaggtgcaatgtgaagagggcccgaccggacacgagatcaagacgacaactcgacgcgaaaaagtacggcgcgcaaaaaattttgtacggcgggagggcgaaaacgcgcacaacgcacgtacgccagacgcagagcgcgacgcagggcgcagagcgaccggggacggagcgcgacgacaggagcgcccgtatcgccccggcgcggcgcgcaacagagggcgcgcacccgcgcgcggcaggaaccacccaacaccggaagacgggggacgggccccacctataacgacccgctcgcacagatacggacggccgcacccgggagcaccaacgaacgaagagccgagcagagccggcacacccaaacgaaagaaccaagga

SEQ ID NO: 121836 - DNA, 497 bp, Arabidopsis thaliana columbia
catacgactcactttagggaaagctcgtacgcctgcaggtaccggtccggaattcccggttcgacccacgcgtccgcccacgcgtccgaaacagtgacatttttctacaagaagctgttgctagatataaggggtttctctatctgataaagatgaacagagaaaggtctttaaaaaggttttgtgttccgacttacgatgttgaccttatctggcacacacatcagctgggcccagtttcttactgtgatgatatggagaagctcattggtaaagtgttggagcatgatgacacatattctgaccgaggcaaaggtaagaagctcgataccggtttttctaagactactgcacaatgggaagagacattcggtacaaggtactggaaagccggtgcaatgcatagagggcaaacacctgtacctgacacaaattcccttatgcttctgagggtgggggcaagacccacctgcaaaaacgattcccagattttatcc

SEQ ID NO: 121837 - DNA, 287 bp, Arabidopsis thaliana columbia
cgagaccaggagactttttcacacacgacggcggaagacagaccgacaaatagaggagcggcacagcgccatataggcgtgccagagggcgacaagatgagcggacctatccaaataacatgcggacagaagacgcgcgacgagtggaagtacaacgggaacaccgacgcacgctagcgcacgtagttagagagcgctagagggcccacggggacgtaccaatcgagtctcgaaaacatagcgatgtttttcttaccaagggcgtagagaatttccgaatgcttata

SEQ ID NO: 121838 - DNA, 511 bp, Arabidopsis thaliana columbia
  unsure (1)..(511): unsure at all n locations
aatgnnnnnnnnnnnnnnnnnnnnnnnnnnnnnnnnnnnnnnnnnnnnnnnnnnnnnnnnnnnnnnnnnnnnnnnnnnnnctttttttttttttttttttttttttttttttttttttctccaccgggaaaaaaaattaaaaattaaaaaaagactcggatctaggccattttttttttggtacgctttgaaaagagtaaatcgaaagactttttagactagtaaatcagtaataccaaacagctttatcattattcgaatccaacatcaacagataattagggggagaagttgtcatcacaacctccattgcaatcgactttacccttctccttatgggtcaacaaaaacacgaagtgggggttataaagaacagggattatcaaagcagagctcaagaacacaagcccaggcccaaagatccatagcatcaagggcaagcccatgtagaacagcctattacctaccgtattgagcaagaaagctttctcgagtagttcagagacatcct

SEQ ID NO: 121839 - DNA, 513 bp, Arabidopsis thaliana columbia
  unsure (1)..(513): unsure at all n locations
nnnnnnnnnnnnnnnnnnnnnnnnnnnnnnnnnnnnnnnnnnnnnnnnnnnnnnnnnnnnnnnnnnnnnnnnnccacgcgtccgattgagcctttaaagtcttaaaggatcttcattgaactttgaagaatagtttctgaaacaacaatggccaaaacgcactagggtattgttggctcggcaacactctaatcattatagattatttggcaacagcccatttgggccaacctgtgttgggtgagaaagaacaggacaaggtcttaaaatagcctgatcagaattgtaatgttagttttgatcactactatgggccagaagctactaataaccactcggggaggagctctcttttactaggttattggaacccgtggaagaccctaaggctaagcctgttgttctttggctaaagggaggacaaaaatttttttttgtgccatagggaaaaggggaagaaaacgcaccccttttaatttaagggggaggggaaaaacttttaccctaaaaaat

SEQ ID NO: 121840 - DNA, 497 bp, Arabidopsis thaliana columbia
  unsure (1)..(497): unsure at all n locations
tgnnnnnnnnnnnnnnnnnnnnnnnnnnnnnnnnnnnnnnnnnnnnnnnnnnnnnnnnnnnnnnnnnnnnnnnnnnnnctttgttttttttttttttttttttttttttttttttttttttttttacggtcgttgttttttggaagatggtttttttttttcaaaaccaaaaaagggtggaaggtttggggaatggatattaaaaaaaaaccaaacgggaatgggtcttcctccttggcaaaggggagaaaaagaaatcttaatttggggccaaagctacaaagaaggaggaggaagaacgttctttgtagcttccgccgttggtaaaaaaaaaaaagagctttaaccttttttgcgcacagctgcaaaaatacaacgtggctcactaaatgtaagaaccgggttctgggccctaacatgggagggaacattggaaaggggggagtccagggaaacattgcggtccaaacaaaaaagaagagtgaaagagtggggaa

SEQ ID NO: 121841 - DNA, 507 bp, Arabidopsis thaliana columbia
  unsure (1)..(507): unsure at all n locations
annnnnnnnnnnnnnnnnnnnnnnnnnnnnnnnnnnnnnnnnnnnnnnnnnnnnnnnnnnnnnnnnnnnnnnnnnnnnnctttgtgttttttttttttttttttttttttttttttttttttttttttttttttttttttgttttgtttacttttttttgttttttgatttttttttgcgggaaaaaaaaaagggtgttatgggaacagggaacccaaaaagggtggggggccccctttcccccagagcggggtattgacgggagggaaaaaattctacctggtgaaccgattgtagagggcagagggtacagagtttcaaaggggaaattctttaaacattaatccccccgcccccgcaaaatgggggggaaaaacaaacaaaacacagggggggtgttctcccggggcaccccaggggggagaagagggttcccaaaaaatgggaaaaaaggccccccccccgggggaggggggggaaaaatccggaagggggacttggggggaa

SEQ ID NO: 121842 - DNA, 324 bp, Arabidopsis thaliana columbia
  unsure (1)..(324): unsure at all n locations
caccccccggagactgacaaagaaagaccaanacccagagagcgcgacggagagcccccggagtttaaagacggaggcggaaccccagagaaacagaagacgcaacgagaccacaacggaagagaacacagaggcaaaggccagcgaccaggcacaggcgcacaacggcgaccacccgagctgacaccccaacaagcacggcaccgcccgcacaaaacaagacacccaggagaccgggcaccacaaccgggggaggcacacgacgtttttagcggacaagagggaaagcgaagcacaagagcgacgaacacacggaggagacaa

SEQ ID NO: 121843 - DNA, 433 bp, Arabidopsis thaliana columbia
gggcggagcagccgagaagaggacgcgcaacgaccgcagagaagaggacggggggacggcagagaaagagcacgcgcacgcgcgacgaggacgggggcgacggggtttttacgcgcgcgggggaggaccagcgcgcgagaggccgaacgcaggcaccgaccggcggacaccgcgcacacgaccagcaacgccacaggcgcgaacgacgcgaaagacgcacaaaccggccaaaggcagcgagaaaaaaccgcggcgaaaagcgcgcgcaaaacgaaagaaagaaagaagcaacccgcgaacaaacccaaaaaaagggaagcgcgaacgcagcgcgaagaaagagagagaaaggcccgggaaccaccagcgaccaccgcacggaacgcaccaaagacccagccccggcacgacaaggcgccgccagcccgggagg

SEQ ID NO: 121844 - DNA, 518 bp, Arabidopsis thaliana columbia
  unsure (1)..(518): unsure at all n locations
gcccgcggggccgggccggaattaccaattttcgggggggttaaaactcnnaaannnannannnncgggagaaaaagaaaaaaggagaaaaagagagcaaagaaggggggggggaaaaggggggggggggaaagggaaaggaggagggagaggaataggaaaagagagaaaaagaagaaagagggggggaaatttttttttgggtgtttggggacacagaaaaaatattttttttaaaaaaataaagtatgaagggttggtgtgatggggatattgttgtggaggaaaaggaatggtatagatgtggtgtgaagagagtggttgataagggttgttgatgagttagatagaggtgggggatgggggtgatagtgagtggttagagtattagttgttgatttggagggaataatagtggtagtgggtgagagtaggggttagtgtggggggttgttattaggggagagagaaaggaggagtaatggggtgtggttatgagtatagtgtggtggtgggtt

SEQ ID NO: 121845 - DNA, 503 bp, Arabidopsis thaliana columbia
  unsure (1)..(503): unsure at all n locations
nnnnnnnnnnnnnnnnnnnnnnnnnnnnnnnnnnnnnnnnnnnnnnnnnnnnnnnnnnnnnnnnnnnnnnnnnnccacgcgtccgctcctttcttcttatttctgagcaaagttttttcttcctttcatattgngaggatgtccaaaaccaatatgaaattttgcaatagttattttctggtcgatccgaccaaagcaagttttcttgatctccttttgcttttgttttcctccaaccgtgggcggagcaagattcatcgattctcctccggatacgcttaaaggcttccggagaagtttcccgagccgatggatccttgcgttggccatctttcttaaaaaagtattaatgctcttagtaaaccctttccattcattggcaaaagcctcacatatgggctaacccttcttacgggaaaggggggcttcttacactggatacttacccttggggcaggaagggtcgataagccctgaacaattcttggaaaggtatttttttt

SEQ ID NO: 121846 - DNA, 524 bp, Arabidopsis thaliana columbia
  unsure (1)..(524): unsure at all n locations
aatgnnnnnnnnnnnnnnnnnnnnnnnnnnnnnnnnnnnnnnnnnnnnnnnnnnnnnnnnnnnnnnnnnnnnnnnnnnnnctttgttttttttttttttttttttttttttttttttgggaaagaagggactgtatatcattgattttaagttggaactcgttatgaaacattgaactaaaacctctttagaaactcttgctacatgaatcacaacataaaaaagcttcgttctggttatgtctgtcaacttcttctctccaatttcctctcggaagatctttttccttccacctttggtctccgttggtgcgcaaaagctgagtatccagaaccagcacttgtagcagatacaagagctgcattagaccggattgaggatatagaatcctgagttccagctgctagaggaggattctttacgtccccatcaaccttatcccatttggatttgttgttgggtctaccatcacgagcgggaatttcggttggtttggaaggcaatccactaatagctaaagctgg

SEQ ID NO: 121847 - DNA, 517 bp, Arabidopsis thaliana columbia
ctactaatacgactcatttagggaaagctcgtacgcctgcaggtaccggtccggaattcccgggtcgacccacgcgtgcggcactcttcaccaccacccaagaagcactacgtgtacaaatctccccctcctccagacaagcactactctcccccaccggtttaccattccccaccaccaccaaagaaacattacgtatacaagtcccctcctcctccggttaatcactactggggggggccggtttaccactcaccaccaccaccaaagaaacattacgtatacaagtctcctcctcctcccggtaagcactactctccaccacaccattcttacctggacaaatgtccttcctcctgcatagccagtagtaggaaatcttttatccgggggagaacacggtgggcccacaagaggagaaacggcggggacgagccccaggtgctggggatgggtgatagggacaaaccacaggagtgaaggggggcattccaggcggagaagggttttgtaatga

SEQ ID NO: 121848 - DNA, 518 bp, Arabidopsis thaliana columbia
  unsure (1)..(518): unsure at all n locations
nnnnnnnnnnnnnnnnnnnnnnnnnnnnnnnnnnnnnnnnnnnnnnnnnnnnnnnnnnnnnnnnnnnnnnnnnnnnnnnnnnnnnnnnnnnnnnnnnnnncctttttttttttttttggagttagaatgctatgaattccaaaccagagaagattcaaataaaacagagactaaaagggctgttcaaacagtaataatttttgcacatgaacactaaaccagaacgatatcttgaaacgggggtgcagtctgtactcagtagtttgagggcacctacggaaagcaagtaatactacaggggggtccccgcttccagtggcttaatgatgaaacattatcaggacaggcaaagcgtttttttaatcataacaccgtatatttttaaaagggggttggaatcattcccgaagataagggggattgctttcaaaaagcgtcctcacctttgtgggaaaggaggaaggtctacaagaagaggggggccctttttttttatccccttttaaggaaacattttt

SEQ ID NO: 121849 - DNA, 519 bp, Arabidopsis thaliana columbia
  unsure (1)..(519): unsure at all n locations
annnnnnnnnnnnnnnnnnnnnnnnnnnnnnnnnnnnnnnnnnnnnnnnnnnnnnnnnnnnnnnnnnnnnnnnnnnnnnctttgttttttttttttttttttttttttttttttttttttttttttttttttttttttttttttttttcggggggaaagcaatgattgggcttgtatttgaaaccccctaaggaacaaatccatgatttggggaaaacgtccagccccgtccaatgacaaacgggggaaacctcaaacgggctttccccaaaaaagaaaaaggaaacttccaacccacaagccaggggtgaaaaggaaagggggaaaaaaaatgaaatgttaaaatttgggtgggggaaaaagaaccgggtacaccccattttttaaaaccccccccacgggggtaggaactccggaaaaagaagaggggcccaacccaattgacctcttgaaacactggctttagaggacatgacattaatgggggggcccaaaaaatacaagagcgttaaatttgag

SEQ ID NO: 121850 - DNA, 506 bp, Arabidopsis thaliana columbia
aatacgactcactttagggaaagctcgtacgcctgcaggtaccggtccggaattcccgggtcgacccacgcgtgcgcccacacacaccttaaacctcgcatctttgagctcaacagcctttactttaaactaacactctcaagatgcgtgaaattgttcatatccaagctggtcaatgtggtaaccaaattggtgccaaattttgggaagtcatctgtgatgatcatgggggggacccaactggtacatatcatggagattcagatcttcaattagaacgtattaacgtttattacaatgaagcaactgggggacgttttgttccccgggctattttgatggattgggaaccctggactatggactcaggccggggccggccattggggaaaatcttccgccctgatacctttgttttgggacaattgggggttggaaacagttgggctaaaggcactacagtgagggcgttaaacttattggttcagtcctgggtgttgcccaaa

SEQ ID NO: 121851 - DNA, 518 bp, Arabidopsis thaliana columbia
  unsure (1)..(518): unsure at all n locations
aannnnnnnnnnnnnnnnnnnnnnnnnnnnnnnnnnnnnnnnnnnnnnnnnnnnnnnnnnnnnnnnnnnnnnnnnnnnnnnncttttgttttttttttttttttttttttctcatgaagggatatgcatattattacaaaaaagtagaaccttattacaaaaactacttgttcgcaccatatatagtgatttgggtttggggtaactaactcagcaaacacaaaacttgtcaaaagttttacattcacggggggggcagaacaaaatccgttggggctttgaaaaaaaacctggaaatttttagggaacacaaaaccctccacccttttttttcttctctcccgaatagaaggctgatttataggttgggccccatggttaaggcggggggggggtttctgggagagggtgcccttcgaaattttcttttttttgccccttgaagcgggttacagggcgggttaaaggcgaaaacaaacccttcaccccttgggcattgggtgggggtaacagaaata

SEQ ID NO: 121852 - DNA, 601 bp, Arabidopsis thaliana columbia
  unsure (1)..(601): unsure at all n locations
caaccaccagcccccccacccgaccggcggggaaggttttttatgtaaccacaaaaccaaattttgacaaaaacccccgccccggcgngggacagccccacaacacaatttacacccaaggggaaaagccccccacaaaaaaaaaacaaacaaaccaaaaccacccaacgcaccaaacacgaaccaaaaacaaagaacaggaacaagcgagaggaaagagaaacgcacgagagaggaaggacgaccccaagcacgcaaaccaaaaaaaagagacacgaccaacagggggaccgccaccacatcccacgagggggggggggcgaccccgcacgccgcgcccgaaccccgccagaacaaaaaaggacgcaccccgccgcgacgacagacgccagaaggggcacaacacacaacacaccaaggagaacgagaggggaaacccaacgaaaggggacgaaaagagcacccagaggacaaacagagacggcacgaggagagggagggcggcacaaaccgggcagaagagcaaagcgacaacaggcgcgcacagacggacagcacacaaaacagcaccacccacaagggcaaaccagcacgaagagga

SEQ ID NO: 121853 - DNA, 524 bp, Arabidopsis thaliana columbia
ggtgcactatagaagattatgacgtcgcatcgcacgcgtacgtaagcttggatcctctagagcggtcgccctatgggttttgtccttttttctttttttttgctacaaaagcaataattgcttacaagcctacaaggaatgggattttttttgtcccgaccattctagtatacatccccacccaaatagaaaaaagagaaccccattgtttattgttaccaaaagaatgtttccttgggctgactattactgtatcaatcaactattaacttttttttttcctcctccttccaattttatactttgaaaggtaagaaggcgctttgaaaattgctccacgggggtctttttttcccagttttttccccttggtccatcttgacccaccttttgggccctttaacttataataggggcccgaaaatctttaaggatgtggggggggggcctttcttttttttaaaaaattctaaggtttcacagcccggggggggtatttcaaccttcaaaaaattttgggctgg

SEQ ID NO: 121854 - DNA, 510 bp, Arabidopsis thaliana columbia
tggacgcttttgtagtgctcccgcgctagaaccgctgacacaaccacctttttcttttttcaacccgcccccaccttttttcaaacaaggaaaacagcgagagcgcccccgcccctatacacccgcaacaattctaacataggggggggaaggccggaccataaacacgatgctacagtgatagcgtcggaggtaagcctcaatcatccgatcacgcccgtaattccacacccgcaccgctatagaacaaagaccaacccccactcacctgcccggctcataaaactccactacttacctgtccaagataagcagcgtacgactataacaagtttttttccaaggggggggtgataccatgatcccacctaattacgcccactaacaaaaaactctgcgcgtcagccgcagcaggtagatgccctacatattggtgtcatcgagttcaggccattctcacctctgagtatgatggattgccctcccgccactcatccccaccctttctgc

SEQ ID NO: 121855 - DNA, 497 bp, Arabidopsis thaliana columbia
gacgtggaactgccgcgtacgtaagcttggatcctctagagcggtcgccctatgggtaaaaccttttccttaatttctaaatccattttagattcttcttctttttttcacatcttttttcgtcttccgggcggggcgcgaaaatgaaatacatacattccaaaaccctttcctggtttttttttttacaaaaagaaaaaaaaaattttttttcggggggtgggcccacaaaacgcccttaaaaaaaaaaattccccccccttggtgtgaaagaaaggcacacccacgggaacccccaccccgggcggtgttgtttaactcacccctctttctatgggcgcccccttcctttgaaatattatgagaacgatcgtcttacgaaaaaacccttacacctttgtctggccacgacccccttccacgatggccgctacactgatgtgctcgcccccgccaatgcgcccacctagacgacgtcatctcccacagcaacaaaa

SEQ ID NO: 121856 - DNA, 456 bp, Arabidopsis thaliana columbia
  unsure (1)..(456): unsure at all n locations
gtaagctgggatcctatagagcgtttcgcctttgggttaggcctnaaatagaaacttnntgaataaaaataaaccagggactcatttacatgcttatagagcgaaaacccaggcttgtgtccgatatatagatggataccatgaaagggctgggaatataaaagaaaggacctgaagaatttttttgggttgttgggagagacgaagttgcaaaataaaaaaaaaccccccccgagcctggtgttggcgtcccccccatcgctcaacacgggagcgggtgttcggtctgcgggctaatgttttatggtgtgcggcgggagctcggcgagatagggtgagcagaaaatcgcggcgaacgcggagaggttgtgagtccacgtggggctccccgggggccgcgcaccgttgtgtccggccgctgcctggtgcccggcttacggagccgcgcagtgaggg

SEQ ID NO: 121857 - DNA, 516 bp, Arabidopsis thaliana columbia
  unsure (1)..(516): unsure at all n locations
cacaccactcactttagggaaagctcgcacgcctgcaggtaccggtccggaattcccgggtcgacccacgcgttcgcgtgattaacgcaaccctagccgctcatatttcctccgcttgtgatatcacgggtcctaacatcactgactgtgtttggattctgcatctacctcgaaactcaacattggctaaagagtttgagaacttaggaagggttgaagacttttacagggggggcatctnctacacaaattgataaagatgggacaggggggggaaaagccccacccattgaagacaaatggatggaaggaaaagagttggtttgcgcacgaactttaaatatatttgcgtagttgctcaaaaatccctaaaaaaacccccctttctttaagggccctttggtttataagcacacacccttttgagaatctttttttctcggagaaaaaatgcctcggtcggggacttatgtgcctggataatgagtcccccggtggatttttaactcccggggg

SEQ ID NO: 121858 - DNA, 529 bp, Arabidopsis thaliana columbia
gacgtcgcactgcacgcgtacgtagcttggatcctctagagcggtcgccctatgggtttgtccttttttaatttttttaacctttaagaggctttgtttattttcttgattaaaaaaaaacgcttgtttacgggaaccttttttacattaccgggagattttgtctacttcccctcaagaaaaaaaaaaaaactctttttgagtttttttacgggagtgggcgccgcttgggagccaaactcaaccaaaaaaaattccctttcgcagagagcgttttatggggggcccgcctggtcctgtttttttgggagggggagaaccggccccgactccttcagtttaaaagggcgaaaagggtggtgtattgtaaaggagaaagtcacaagtgtggttcttggtaaccagcctcctcggccggaggccatatggggatcccctggggggacttaaaacccagcgggcgcaggccccctcctgttgcgggagggcaaaggtcctctctcgttctagccccttcctttaccatggc

SEQ ID NO: 121859 - DNA, 521 bp, Arabidopsis thaliana columbia
  unsure (1)..(521): unsure at all n locations
ggtgcaactatagnaagagttatgacgtcgcctgcacgcgtacgtaagcttggatcctctagagcggtcgccctatgtttttttcttttttttttttttttttttttttttttttttttttttttttgaaagagaaactgacaaaattttacgatggttgaaaccaagttcaggaataaaggggtgaggaatttaaactaggtggggtttactagaaaacaacctttccatctaaggaggggggggggccgtcacttgagagctggacaaatgcagtttttgttttctacctcctatgaagagcaggggggttgaaatcctttcttgggccaaataaatttggttttagcagggtttttaaggaaattatcaagcttggggtttgaaacattgtgcaaaacccaccaaaggggttattatcctttgggggaaggacgctgggccccttttaaaaaaattcttttttatttgggggcggtataaagacaacggtggttgttttagtttataaaacggggggg

SEQ ID NO: 121860 - DNA, 521 bp, Arabidopsis thaliana columbia
  unsure (1)..(521): unsure at all n locations
nnnnnnnnnnnnnnnnnnnnnnnnnnnnnnnnnnnnnnnnnnnnnnnnnnnnnnnnnnnnnnnnnnnnnnnctatgtgtttgatcttttttttatgttgcttgtcttggatagggggggatattattaaaaaaaaaaaaaccttgggacagtttcatgcgtggttttaacagtcataaaagagggcattacccatatattcaaggccccacgcccccttattagacaagctaaaccgcggtgggtcagatcttgagatacagcactccagaggtcccttcggttgcttgggatctgaaaaactccgcatactttggaaagaggagggtctttataaggggggagggtttttttaacacaaaatttttttgggggggcccaaaccccggggggattccccatcaaatccgaggtggaaaaactcccctctgaatttcttgggcccagctaaatggggccaaacccctctgccccacctctaataaccttgggcgttgaaaaaaagccccccccccagggggg

SEQ ID NO: 121861 - DNA, 494 bp, Arabidopsis thaliana columbia
  unsure (1)..(494): unsure at all n locations
gacgtcgcacgcacgcgtacgtaagcttggatcctctagagcggtcgccctangggtttgtgctttttttttatttttttttttttagctaaaaaataaatgtgaattaaagagtaacaactgtttataaaaacagaagaattattcaacaacaaaacttaaaccagagagggacaaaagccaagcataaaccagagagaaaaatccaaaggtgggggggccttaaacttgggtttaagaaaggtggggccttttggaacccaccatcacattggcctttaaccccaaccaccataggcgttccagtaatctaagggaacggggaaacttgctaaggctcgaagttccccaacaaaaggctcccttggggttagatctggaagaaaaaaaacggtttttaaagagaccgtgcctttccccttcaaatggaatggacaaaaaaccccctggggtttttatctctttttttcaagggagaaaatctttttgggtcg

SEQ ID NO: 121862 - DNA, 543 bp, Arabidopsis thaliana columbia
accacagggggaaccggtgcggaattgcagggtttgagagaaaggggggagaggttgagggcagggcgggagagaaggaagaggagaagacacaaacatgtagcacgggggcgtgagaaccgggggaagagagtggagtccgggagaggggagcgcggaggaagacgggtcggaaaggacagagagagagggagagaggaaaagagggagaggagaggaatttttttgtagagggaggggcaggagtgtacagagcaagaaagcacggaatagggaggcgggagactcacgaagagcgccggggagggagaggaggagaaggagaagaaggaggtagagggcgagggagagaaaggagagtggaggaggagagggagcaaggaggcgagatcaagcagaagaggagcacgggagatgagaaggggaggagatgaaggcaatacgaggaggcaggaagggccgacaggagccgcaagagaagacagtggtaagagggagaggaagacaagtgagacgggcaggaggggcgatgaaagaagaatg

SEQ ID NO: 121863 - DNA, 604 bp, Arabidopsis thaliana columbia
cccacccgcagaaacaacaagactttataccacaagaggggagaagaggccgcacgaaacacgcactccggccgcgcgcgacgccaaaccaacaacacgtaagcccgcacaactacacacagaagcccaaaaaggaacacccaacgcagcaaagacagacaaaaggggcacagaccccacacaaacccggacagcccccgccccacccgtagaccgaaacacccacccaagcagcacttaaccccaggggggcgggaacaaagcaaacaaaacctgaccgccaacgagaccaacagaagcccgcgcccacgccaagacaccgggaaaggagaacacgcagcggaaagataacgaaaaggaacgaaccggaccgcacggaagagaggaaaacataccattcgcacacccaccccacccaaagcccccagcgccgcgagcaccccgaacgacgccacgaccacgagccacagggcagcacgcacaaagctgcaccgagataccacgccaggcccggccgcccggcaaagccgcaataggaagccacccgccaaccacacccagcaccacccagagcgcagaggaacaccagaacaccgaaacgcaa

SEQ ID NO: 121864 - DNA, 513 bp, Arabidopsis thaliana columbia
aggtccactatagaagatttatgacgtcgcctgcacgcgtacgtaagcttggatcctctagagcggccgcccttcgtgtttttttttttttttttttttttttttttttttttttttaaagaactagtcaagatcgattttttttttacataggaaatgtttaaattttacagaggtttaaaaaagaaaaaaacttgaaaacaaacgggagagatttttaattaaaaataaacctgggggcgcggtaatttatgggggtttttaatctgaaaaaaaaaaaacggaaagggtcttttgctcaataaggggaaaggaaagattctatgacctcttggaggggggcgagttttttttttgctatcagcccaaattcatgaggaaaggggatgaagtgtttgaagcaagcgtagaaataagcttttttttttaggcgaaccatttttctggaaaggaagaggggtttttgggaccataaactcgggaaaagccgtaaaaaggaggggttcccccact

SEQ ID NO: 121865 - DNA, 542 bp, Arabidopsis thaliana columbia
  unsure (1)..(542): unsure at all n locations
aggtccaactatagaagactatgacgtcgcacgcacgcgtacgtaagcttggatcctctagagcggtcgccctttgtgtttttttttttttttttttattttttatatttttttttttttttttttcaagacccaaagaaattttattttaaggctaaacaagtttgggggaccaaaaaattacattttggggggggatgtttccgctataacacaagatacaaaagaaagtgtctttaaaggggggaggggaacttcgggcttctctaaataccaacaataacaaaaacaaacataggtgagaggcacccncgngcggggtgtttcaaaaccaaacaaatccttatttaccccctcgtttttcccttcacaccaacgctttttttatttccacaaaattaaaaaaaaacctttttattggaaaagaaggttataagaacccaacccatgaggctggggggggaaacttgtcccccccccccaaaagaaaaaccaacaggtttttttttccaaactaagggcacctggttctcttcaaaggc

SEQ ID NO: 121866 - DNA, 514 bp, Arabidopsis thaliana columbia
  unsure (1)..(514): unsure at all n locations
cagctannnnnnnnnnnnnnnnnnnnnnnnnnnnnnnnnnnnnnnnnnnnnnnnnnnnnnnnnnnnnnnnnnccacgcgtccgcccacgcgtccgagctaggagagaaagaacacgacaggagcttcggacttagaaactttaggtacatcgaggagatcaaggaagctctcgagagggagtgtcctggtgttgtctcatgttctgacattctcgtcttgtccgcaagagaaggcatcgaagcagtaggaggaccttatattcctttgaagacaggaaggagagatggacttaaaagcaggacggatatgctcgagtcatatcttcccgaccacaacgagagtatctccgtcgttcttgaaaagttcaaatccatcggtatcgacactcccggcctcgtcgccctcctagggtcacacagcgtggggaagaactcactgtgtcaagctggtccatcgtttgtaccctgaggtggacccgtccttaaacccgaccacgtgcctcacatgctacac

SEQ ID NO: 121867 - DNA, 513 bp, Arabidopsis thaliana columbia
agctcccatacgactcacttagggaaagctcgtacgcctgcaggtaccggtccggaattcccgggtcgacccacgcgtccgcccacgcgtccggcctgcttctactcgagttccttctcagagaattacacctcacagtgttccttctccaagaccaagttcaccaagaggtgcctccccacaagccatctcttcaaagccgccttctccaagagcagagccaccaacattggacactccaagacctccctctccaagagctgcttctctaagagcagacccaccaagattggatgctgcacgacccaccacgcctaggcctccttctccactagcagacgcaccaagattggatgctccacgacccactacgcctaagccgccttctccaagatcagacccgccaagattggatgctccaagacccactacgcctaagcccccttctccaagatcggtttctcctagggctgtgcagcggcgggagattgtttatagaccagagccaacgct

SEQ ID NO: 121868 - DNA, 483 bp, Arabidopsis thaliana columbia
taggtgcaactactagaaaatctatgacgtcgcacgcacgcgtacgtaagcttggatcctctagagcggccgccctttttttttttttttttacaggctttataaacgtattccattacttcaacaggcgatgctaaagacatgcaatacatgtagactacatgatgtagtcatttatattaagtccaaatccagctccaaggtaacaattaatgaaggatacacacacgttattattggcgtgggagattttgttcaaagaattttcagatcaagatcatagccgactcgggacttgtgcctctcaaacagatccctaagcgcttccacatactggccatgaaacttagcaatctcttgggcaggtggcttcaaagtttttgtgacttctattgggtcaccaaccaccacatgcataggctgtcgacacgggaatggggatccaaaaactccccagaaacagagcggggagaatcttgttgc

SEQ ID NO: 121869 - DNA, 498 bp, Arabidopsis thaliana columbia
  unsure (1)..(498): unsure at all n locations
nnnnnnnnnnnnnnnnnnnnnnnnnnnnnnnnnnnnnnnnnnnnnnnnnnnnnnnnnnnnnnnnnnnnnnncttcgtgtttgttttttttttttttttttttattattgttttttttttttttgtttttttttaattttttttttgttccagaaagacacccttttctaaaagataaatccatggaaccccacaacaccgagccaacagggaaggactttttgttatcccaccacacggggggggggcgtttccacccgcgaaagaaaaaaaaaaagaaggttgttgttcaccttaaaagatactgcgaaaccctccggggggtgttgggtaacccgagaaagcagtggaggggggcccccaggggggggcccccgggccaagaaaggggggggccccccgtggggggcaccccccgccccgacctgggcaaacccccttttggggcaccacccggctgggagacaccggcaggggcaccccccaaaaaagagggggg

SEQ ID NO: 121870 - DNA, 508 bp, Arabidopsis thaliana columbia
taggtgcactatagaagatctatgacgtcgcacgcacgcgtacgtaagcttggatcctctagagcggtcgcccttcgtttttttttttttctttttttatttttttttttttttttttttttttttttccacagggacacatgcttttttatgataaaaatggcattacatactgcattatccgggggttttttttttgtttccttcccttaaactatggaacaaagagtttatttaagtttttaaaaaattgcccctaccacaagctctgttatgagttcatctggcagcattacctaaatctctctacctatgattacaatggcattttctaaactcagccactgcaacttcttctcctccaaataatattggttgggtttctcctcttttcttggaccaaatctccaagaagattttgtatcttgtttgcctcccatttgcggcatcctttggggataaacccaagggggggacccccaactggttaaacaaaggggccttcttg

SEQ ID NO: 121871 - DNA, 504 bp, Arabidopsis thaliana columbia
  unsure (1)..(504): unsure at all n locations
gacgtcgcacgcacgcgtacgtaagcttggatcctctagagcggtcgccctatggtgttttttttattttttttatttttttttttttttttatttttattctgttttttggtatttcaatcaacatcaacagtttgccatttgagtgttttaattttaaaacccttacccccatggggtgggggggggggggttaccaaaaaattttaaatttagggggggggggnggaaattttaaaagggggcaaatatatttcccatattttatttttttaagaaaccccccgggggtcaaaaaaatgcggggcaaaaaaaaaaaattgatctttttttaaaaaaaaagggagcggaaaaaaaacttgttgtttttggtaaaaccacccggaaataggagagagagggtcgagctttcaagcccccttggtttttgcgcccgggggtggtctcaaaaaagagcgccttttttttaaatggggtttcccacaaaaaaaagtgtgggggggg

SEQ ID NO: 121872 - DNA, 297 bp, Arabidopsis thaliana columbia
accccccccccatttaacgggggagaacgacacccgacaggggcgcacgcgcgcaaggaaccattttcgaaccatgggggaaagggagaggaaaaaaaaagagcacattgacgacgcgtaggaggcgtagacagagcgcgatctcaacgatgttggtaactggttctgcgtgtgccactgtttcactagtgtttacctggagtagtagaggctggatgttcgttgccactcgagaccggacgaggaaggttttttttttagtgggggggtggcccagaacgatcgggatgacggatg

SEQ ID NO: 121873 - DNA, 299 bp, Arabidopsis thaliana columbia
aggcgcggattttttttaaccccccccaccgttttaccgcggaaaccccctccgcgtgaagaccggtgctgcgggcgatttttagtacggggtaaaggtttcttaaaaaaagggttcttggtacctagctgacaaggcacggagggagataaaaaggggcggatgagagcatgcatgctagttatggtggtgccagagttgaccaaggggacgagcagaggacgagcgtttttttacgaggggaacaggacaactccatgggcagcctggtagaagcaagtcgttggaacttctccaag

SEQ ID NO: 121874 - DNA, 508 bp, Arabidopsis thaliana columbia
cgcaccggacgaagcttggatcctatagagctttgcccttgggtttttcctaactgagaattaatttgaaagaaaagtaaatgtgatcacggaaaaataattgactgtagcttcgaaaaataaaggaaaatcgggtggagggaacacctctgcggacatgggaaaattaaaacgtgccacggaaaatttttttggggggggggggggcatcaggggactctagatgtagtaagagggaaacatttcatggggggggtgggaaaacccggttcgagggagaaaaccaggaaagaggggatacttatttatagaacaaaaagtatgcataaagggcaggcaaaacacaaagtaaaagcggggaagccgtttacaacagcgactcgggtgcggcttcaggagaacagaagggagcccttccggggggagggaaatagctggaatcatgtacaatcaagaagggcgttcagataggggggaaagcaagaagagaaatgaaagagcccttcgt

SEQ ID NO: 121875 - DNA, 191 bp, Arabidopsis thaliana columbia
  unsure (1)..(191): unsure at all n locations
acaattccccgcactgggatcctttgaaggcctggagattcccgccgccatntacacgccttagcaatcggccattttttttttcaggggggggggggccattccccgaagtgttataactccacatgaaacgcgaggaattttggatcaaagcacccggatggacattgaagggatggaagtgcgacgaa

SEQ ID NO: 121876 - DNA, 516 bp, Arabidopsis thaliana columbia
  unsure (1)..(516): unsure at all n locations
nnnnnnnnnnnnnnnnnnnnnnnnnnnnnnnnnnnnnnnnnnnnnnnnnnnnnnnnnnnnnnnnnnnnnnnncttttttttttttttttttttttttttttttttattttttttttttttttttttttttttttttttaaaaaaaaaccctcccgagggtggtttttttggttccccattcaaatttcccatcccagagattaagggggaaaagaaaaaaaaaatttaatttggggggggggtggaaaacataaacctcaaacttttcatttgcaatctttaaacaccaaatataaaaaccgctcgcctgtgttcgcaaaaacaaaggggaagggggaccatgcaaaacctttttttattcaaccatttgcaataaaaagggaataaaagaaaccccccacgagggggggagggcctcaactcaatttttggaatggccaattttgtttctgacaaggcctttggtttgagggggtggacacccttccagggaaggaggggtcatcccccccgaat

SEQ ID NO: 121877 - DNA, 515 bp, Arabidopsis thaliana columbia
  unsure (1)..(515): unsure at all n locations
nnnnnnnnnnnnnnnnnnnnnnnnnnnnnnnnnnnnnnnnnnnnnnnnnnnnnnnnnnnnnnnnnnnnnnncttttttttttttttttttttttttttttttttttttttttttttttttttaacgagacaaaacttccccgagatttaacaaaagcaaaaacaccgaaggaagatgttgatagtttcgcccaaaacaaaaacttgaaaatccaaagctttcaagaacatttctggggggggttctgcaaaaaaacaaaaaaaacacttttacgggggttataaaccggggttttttagaaataacttaaaacccccagggcacgatgttgtttccaagaggcagaaaagatacctggtcatttgccccaccctctggttgctgggctacacttctaaaaaaatccttgggttttgaaaattttgctttaagggcccttggagatcccacgagggggaggccttcggtatggggattttaaaaaagattcccgggattttatttggggttggtgg

SEQ ID NO: 121878 - DNA, 256 bp, Arabidopsis thaliana columbia
ccccccccctttagagggaagaagaaagaagacgcccggcagcgagcacgcaggacggagaaaccagttttagaggagagggggaaaaggccgacgggaaagaacaagaaggagagcaacggaggaaggaggacggggcaagaccgccagacgcacccacagagcgaagagcaccgacggggcgaccgcgcgaggagcagagaacagaacgcgacggggcgagcagcgccccaacgaacccgaccgcgcacagacg

SEQ ID NO: 121879 - DNA, 443 bp, Arabidopsis thaliana columbia
  unsure (1)..(443): unsure at all n locations
ggtgcaactatagaagagttatgacgtcgcatgcacgcgtacgtaagcttggatcctctagagcggtcgcccttggggttttttgttttttattttttttttttttttttttttgtttgaagggaaaactttatacatttcctttttcataagaaaaaagagttcctaaaataatttgtctaaaaaaaataatccgtataactaccaaattatgcccccctaaagattatagacggggggtgggggncaactttttcaaacataaaaaaaaccggtttttacatggaacgaagaagcattcccccggctgcaatcaaataaaaagaccaagggtttgttttccccttcaaatcctctggctttttaaaggggggcgacagagaacagtggcccatttgtttcccggcttctttggccggatcttaccctgggttatgccttgg

SEQ ID NO: 121880 - DNA, 517 bp, Arabidopsis thaliana columbia
taggtgcaactactagaagatttatgacgtcgcacgcacgcgtacgtaagcttggatcctctagagcggtcgccctttttttttttttttttactgattataatttatttagaaataaatgatacgactgtcgtttctacaaaactgaaatttgcaaacattggaccaaaaagcgaaaccttaatcacttgaaacgacaacgttctttagtatgtttttggacatacaaagtacacatagagatggtccctcactcttcgattgtttcttaacctaatataattaagcaatattgaacttgagtcactcaatgctgcaccgaaggagcctttagattttgagcaaattcatgagagtttagcttctcattcatcactctgaatttctcttttatcctctttatccttctgagctcgatctctgtgctccgtttcttttgatcaagggattgccggagattcgggatgccaaagatactatcgagggggtcttaaaatgcgttttccaactcttccgg

SEQ ID NO: 121881 - DNA, 512 bp, Arabidopsis thaliana columbia
  unsure (1)..(512): unsure at all n locations
taggtcnnnnnnnnnnnnnnnnnnnnnnnnnnnnnnnnnnnnnnnnnnnnnnnnnnnnnnnnnnnnnnnnnnctttgtttttttttttttttttttttttttttttttttttcccaaccatataaggtcccatagattacaaacgatcacatcagcagtgacccaaagggccaaaacactcgtaatacccccatcagaaaactaaaaaaaaaaaaaaacctttaactaccttgataaagggttaacccgaggggagattaagagacttgaaacaggtaaatccccctttaacaacagggttgtgcccgcgaacaaatttagcatcatccgatgccaaatacaaagccgttttagccacatttatctcctaaaatttttttccctttagtcctcccggcgggttcaaaatcgcaaaaagttgttcctcccaaatgttatgaccccaaaacgcctttcaaaacattctaaaagttagagccgccggtattcctgcgggcaaaaacaattgattt

SEQ ID NO: 121882 - DNA, 544 bp, Arabidopsis thaliana columbia
tttttaaccccgtccccaaggtttttgggggacgcaaccggagcgagcagtagcatgaagggagaacgagggagattttttgcgcgaggggggataggtcccctaacaacgaatgttacgacaatgaaaagcagagtacgcgggccacggagatgtatcctaaggaacggcgcagcgcgcgagcgagctttgatactggtacgtagttgagtgtgttaggacacgacgcgagccgtggagtgatagactgtgtaggagggtgggaggatgcgacatgttttttaggagcgtgggatgccatgttgtatgacgagaagccctcgagatagcttgaattcccaccccacaccggggatggatggtagttcgtcggaatgcttacgcagggcaacgctttgacatgacgggagcacaaagtcagagagatactccctgtttccgacatgaggaggcacggcggctggcccgaaacaaagaacggggtatattcgccggcgggacgcctcggaacccttgccgcgaggtcagggacgcccgaagactg

SEQ ID NO: 121883 - DNA, 515 bp, Arabidopsis thaliana columbia
  unsure (1)..(515): unsure at all n locations
nnnnnnnnnnnnnnnnnnnnnnnnnnnnnnnnnnnnnnnnnnnnnnnnnnnnnnnnnnnnnnnnnnnnnnnnnnnctttgttttttgtttttttttttttttttagctcggaagaaaattggtccctttagttgtttatccatgatttgcaatatgatctataatctgttgctttactaattagacccgaaagcagactactacttcgactataccggctgccgtttctaaacccgtgaatgactggaccgtgtagtaaacgatgatacatgacactaattgtggaccaatattaaccggatctaaagccttacattcaaaataaaccaccacttcggtttgattagccggagaaacagacaggttaatagccacttatttaaaacccaaaatacaaattgtggagagtcattctcgttaagcactcagctttagacatattggttgaggatttcatcaacagtagtgtatttgacatcaggggaaagctcataagcttctaccccgaaagaagg

SEQ ID NO: 121884 - DNA, 467 bp, Arabidopsis thaliana columbia
  unsure (1)..(467): unsure at all n locations
gccgggccccccacgngggggggggntttctggtgacaccccccaaaattataggggacgacccgccccccccccccaagcatcggaatcctctatagagtttcgccctttggtttttgttttttttaaaaaaaaaaaaggggcggtcctcccaggtcccatctctttcaaaccaccgccgatacacaactgaatacgcggtgcctgttatctctttttgcacggtctttctctgtttttcgcatcaaaaagccagtcctgcccatgttttttttgggttgagggggaacaaccagccgcctctttttaaaaaaaaagaccatcgggccgtggtgtagacaacctcaccacctctctcttccggaacgtgggtgtgaacagcttcgcgtaattctgtcctctctgtttgtctccgcccaccccccctactatgttggtgtcagccgctagtgtccctgcggaccatc

SEQ ID NO: 121885 - DNA, 516 bp, Arabidopsis thaliana columbia
cccccccaaataatagaaaaaaccggcccctccacaaaccccccccaaatcccgtttaccccggggggcggggggaaaaaaaacaattctcccaaaactattaaataattccaacaaacaaccaatatttacacgcatttcccagaacgaacaccatatcccactcttccccaccatactaaacccccaaaaacccaaaaataaataaaacatcactttttttccgggcgtggtccatacaacacaaacacccatttcaaaaaaaaaaaaatcctaccaaaattcccacaaacattcacacattttgcttaatattaaaaaaaaactacacacatttataactgaccttgacaccaacccaacacaaccccactctatccacacaaatatacaacatcttgtcaacaaaaccactcaacattccactcaatttctattaatcataccatcacacctaaaaaacatgctcaatacacaactacaacactcctatatattaaaaataacaaacaacaa

SEQ ID NO: 121886 - DNA, 495 bp, Arabidopsis thaliana columbia
ggtgcactatagaagagttatgacgtcgcacgcacgcgtacgtaagcttggatcctctagagcggtcgccctatgtgttttttttttttttttttattttttttttctttttttttttttgttttgcacacaaccataacaaaattggattatagaggaaaaaactggggcttcaaatttcatacgacaaaagaaaaaaagattcctttaaatgaaaactggggcttggtttacccgggcaaaaaaccggaaggtgggccgccccagaaaggctaatccaacccataattcgatttttggccgccgaattttaacactaatccatatttaattaattactttggggccagtcttgcaatttaacaaaaactgcctggggggggggtgaatttcttattttgcccctaaggtagaatcgaatcccaattgttctggtacgagggatttctttccgaggggaacgtttgttttcattggggggggttcctcccgggg

SEQ ID NO: 121887 - DNA, 317 bp, Arabidopsis thaliana columbia
cccatttcgagggcggcgaacgcaacgccgagagagcggcagcagcggcaaagcgcccacttttgaacgatggggtggcagtgaggggcagcctcgagccgcggcgcacgcaacgagggaccgccgctcgagacccacagccgctcctacgctccacacccgtcacgcaccgcccctagtcagaacagaagaaccgccagcgaaacagatctacataccggacgagcacagacacggaaccgaccgcggacacttttttttgagacgggggcacaaatcagagacgcacggacggcgccatgatagacgcctgacgc

SEQ ID NO: 121888 - DNA, 497 bp, Arabidopsis thaliana columbia
  unsure (1)..(497): unsure at all n locations
nnnnnnnnnnnnnnnnnnnnnnnnnnnnnnnnnnnnnnnnnnnnnnnnnnnnnnnnnnnnnnnnnnnnnnnnnctttttttttttttttgtaatgaaaactgacaatagctttttctgagttaatattagttgacagtttacatgtaaaccaaaagaaaaccccgagcaacatatacccattttaacattctaagttttttcggttctttcggtaaatatatgaacaaaaaactgggtgattatcatccaaaatgcttactggcctactgggtgtgcaaaatcttcaccatgtacactactaaaaagagccatctactaagttactgtttaaggcagtatcttgaccttagtttgtctaagacctctgcatactccattggggttgctttatggcagaaaacattttcccatatcttcagtagctcgtttttctcggttgaggtagggcacatgacgagctttgttgaatctaggaaccctttggtaggttctaaaa

SEQ ID NO: 121889 - DNA, 513 bp, Arabidopsis thaliana columbia
aggtccactatagaagagttatgacgtcgcacgcacgcgtacgtaagcttggatcctctagagcggtcgcccttcgtgtttttttttttttttttttttttttttttttttttttttttggggaaaaggatttcttttttcaattaaagaaacgtttattacataaaaggggaaaaagaaaaaacatgtttggaattaaaagaaggctttaaagcaagaaccatattctataccatgggggcaataggaatcaaaagccccttaaaagggggagggggccctgggggaaaaatcaacggtaacatcaagagagatggtgtgagaccaacaaccccacccattggtttctaaacgggaggaactcgctgatattaccctctttgggctgttctgcgaccaaattgcccaaaccaatttttgcttcccaatatagggggcttgagcgtacccccaaaaaccgggtttttccggtataaccccctctcccccccatgtggggggaaaaaaaaatgt

SEQ ID NO: 121890 - DNA, 501 bp, Arabidopsis thaliana columbia
cttagaagattatgacgtcgcacgcacgcgtacgtaagcttggatcctctagagcggtcgccctttttttttttttttttttttttaggatacaattggggagaattaattcaaaaaacaacaatcttctaacaataacttagcccctgattaaatcaggaaacattttagttttaattatccttaatctgctattaaccgatatactactaccatgtttttttcaccggggaatatcagaaactcggaacaacaccgaatccggcataaactccgacgtgtccaccatcattctttctagaatgtgttctcttagcaaaacgtcctttgattctcggcctcatctgaggggaagctttacgcgacgcatacctaatgggttttgtaaaattcccgattctttcttttttttttatacctaaaaacccctggtttccctctcccgcggagataactgcaccggtggggtgtccgggtcgttatttccccgccgtaattcct

SEQ ID NO: 121891 - DNA, 616 bp, Arabidopsis thaliana columbia
gggaagaggacggacaacgggcgcgaccgcggggacggcagagaggagaccgcgccaaagaggggttttttaggagacagggcgggggaagacaccgcgcaacaggagggaaggaacgagacggaaccgcgtggaagacaagggagaagagggagactgggcgacaaacggacgggaagagacccaagagggaggcaaccgagaaggggaaagaaggggaggggcgacagcccaccggcaaaaccaaggaaaaggagaaggaggagggggggccggcacattttacccagaggcgtgggaagcaagggacacgagccgcacagcacccgagagagaagaggagaacccacgaaagggcaggagcgaggagaggacagcaaggcagaacagcgcacaaagagaccgacggaaggcggaggagcaacacagcaccgcacacgccgacaagacaacacgaagagagggcaccgcgcagcgaccaggataccgagagagcggcggaacacgacggcaggcggaccaaagggggcccagcgccgccgcgaaaccgagacaacacaagcgaggacaaagaaaccgcgggcaacccaggccagggaagaggccggcgcaccaa

SEQ ID NO: 121892 - DNA, 288 bp, Arabidopsis thaliana columbia
ccccccccacattaaaagggaaagaaccagagcccgcagaggaggcggcagggggcgcagacgacagattctaacgcgcagggcgggaggggacggggccagcaacaagcgcgccgacacgcacgcgcacgcgccccagcgggacgcccaccgccaggcgacaccagacggggcgaaaggaggagaggagagaggcgagccagaggagagaggagaaggcgcacgccgggcgcaaacgcgagacgcaacgaccgcgcgccggacccagcgaagcgcgacgccgccgaa

SEQ ID NO: 121893 - DNA, 517 bp, Arabidopsis thaliana columbia
taggtgcaactactagaagatctatgacgtcgcatgcacgcgtacgtaagcttggatcctctagagcggtcgccctatgtttttgttcttttttttttttttttttttttttaaaaaaaacattctatttcaaattaaaataagtgacaaaagttataaaaaaagaagaaaaaaatctaaaaaggggtgaaatacagacgacccaaggtttattagattttaacatttaatccattctttggggtaattggggtttttgcagtttcgcacagaaatactgtatttgaggagtttcattaaaaaaaaaaaatagtaaactaggggaatcctcccatggccgttgccttgggtgcccccggtgggggggaaaggaaaacggttaacgataatactccacttaacgccggtgaaattgctgaaaaaataaaccccggtaagtttccaccgcccaaacagggggaagagggcccccctctagggagaattcatttgggggataacaactcccaaattaaaa

SEQ ID NO: 121894 - DNA, 474 bp, Arabidopsis thaliana columbia
ccccccattcaggggaagaacggggccccggggcgcccgccctttattaagttttgccccgggcgaggggcctccaaatactttcaaaaaaactttggctctttttgacaccttctccacgcccacaaccaattttcaaatgtgtaggtaaacaaccaacaagcctctatctaaaatacggctctcaatccttctctatgcgctctttttttcgggatgtatgccccctttctctcttcccttacaaaaaaaaatccctcgctccacagcgcgggcgttttccaacagtatttttttttaacgacatttcattaactgttgttttcgccatctcttttcccaaagtagcccactttcacctccgctaccaagaccgcactaagttcctctaatccctccaaatgttttattctacgcccacacttaatctctccctctcccttctcatccacttcgtttgtatcctgtccgccc

SEQ ID NO: 121895 - DNA, 398 bp, Arabidopsis thaliana columbia
ggtgcactatagaagagttatgacgtcgcacgcacgcgtacgtaagcttggatcctctagagcggtcgcccttttggttttttttttttttttattttttttttttttaacacgaatcttgtcaaataaactaaaaaccagtcaaaagtgtcgggggggaaacagtcagacaagttatcatactttggttaaacctatcttcctgttggattttaacttggcatacattctacagtggggacacttaccccaataaattgaacgacactcaaatacaatcttttgacatcaaaccctccattttcattggggaggtcgacttttggccaaccaatccacacttttacgtgctctttccatcgggtgaaacttatttttgtatatgcccacccttttcc

SEQ ID NO: 121896 - DNA, 517 bp, Arabidopsis thaliana columbia
  unsure (1)..(517): unsure at all n locations
nnnnnnnnnnnnnnnnnnnnnnnnnnnnnnnnnnnnnnnnnnnnnnnnnnnnnnnnnnnnnnnnnnnnnnnctttgggtttattcttttttttttttttttttttgagtaaaaatataaattggttttgactttgttaatacacaaaaagatcatccaaaagactacaataatacgaaataactacaaaatagtagtattatgcttcctaaaaccggtggggggctattggtttatgggagttaaggctcaatttattttattttatctgataaagaaatctacttattttgggtcaaactatataatgtggcctcacatattattattggaacactgacccctataaaaatccaaaaccggttttaagaggagactaaagagaaaattcataactaaacacatggggaaaaacaaacaaagaaaaacttttaaaggaagaagacccttaaggggggttgagtttggtttagggccaagctaaaacaaagggcagaaaggcgggttttttatttttt

SEQ ID NO: 121897 - DNA, 437 bp, Arabidopsis thaliana columbia
tgacgtcgcacgcacgcgtacgtaagctcggaattcggctcgagtttcgtctctgtgtcgcgctcccaatttctccgccggcgggaaaaccatgtcgcacttcggaaggtgaggtccaccggatataaacgacacctactcacttcttgtgcttaacatcaccttccggacgactggtgatgatctctatcctctattcccaaatttttgaaggggggggggatttctttattcccaaaaatcgaaagactgccgattcgcgttgtttttcgtttggtcccccataaatataaagaccaaactcacaaaccagtgggaagtggtttgatgaaagattttttaataacaaataaattaattgtttattttgacaatatttggcccacattgctgaaaaaatttctcaaaggaggagtctccccacccccccccaaatt

SEQ ID NO: 121898 - DNA, 638 bp, Arabidopsis thaliana columbia
  unsure (1)..(638): unsure at all n locations
cccccaccaattaaaaaggaaaaaaacccaaacccccccccaaccacccacaccgcggcaacaccaccttttttaacacaaggggggaaaaggccgncgccaaaaacaaacacccacataccacccaccccacacccccccctcacccccccaaactccaacaccaaccccccaacaatacacccacccaaccacacacatcaaaacacaaacactcacaaccaaaacatatccacccaacacacaaactacctaaacacaaacaaccgaaacctctttttttttgcgcgacgatcggccaaccacaacaaagctcccccgacccaaaaaaaaaaacaaaaacccccccaacccccctacacacaaacacacagaacaaccccaccatcccaccccacaatcaaaccgaaccccaaaacaagaaaatgaccccccacgccaatctcacccaccctaatatcctcccccgcaattaccacgcagttcatcccctcgacacaaacatcaaaccaccaccacaccaccccaacaaaaccacggaccgaccacccacccacctccaaatcaacagccccctacaaccatcgcctatgcacaacccgtcatacagccacaaaaaacaatacccacccacaccc

SEQ ID NO: 121899 - DNA, 440 bp, Arabidopsis thaliana columbia
gacgtcgcacgcacgcgtacgtaagcttggatcctctagagcgttcgccctatgtgtttttcctttttttaatatttcttttttttctttctttttttttttttccaaaaaaggaagggttttgcaaattgcaagcccacacttaaataattggcgaaaaaaatgttttttgctttctcaaaacatttttgtaggagagaaacttttttcaaaggggggtgaaaaaaaatgttttattttttaacaccaactttttttttttttcaaagtttgcacggcccaaccaaaggacttttaaattggtaaatgcgctaattagcgccttttttttaccctttgcggccttaaagttgccaataaaactcctgtttttaaagacgcccccccccccaaaaaacctttaaatgtgctccttcccaccttttttttttgagatcccc

SEQ ID NO: 121900 - DNA, 498 bp, Arabidopsis thaliana columbia
ggtgcaactatagaagactatgacgtcgcatgcacgcgtacgtaagcttggatcctctagagcggtcgccctttgtttttttttttttttttttttttttttttttttttttttttttttttttttttttttttgggaggctttgctaaattaaaacataacaaagccccccaattttttgttgttcaaaattcaacttttacaaaaaacaccctttgtattttttaaccttttaggggacataagggaaaatggcctccctattaaccaaataattttaaaacttccggagataccaggggggcgttttttcacccgctttttttaattttccccccccaaacccaaagagtacccgcttgtttttttttgttcctccactcgaaaaaaggaacccccatacaaaaatttttttgccaaaaaggggggaaaaaacacctttccaaaacaattctttttggggaaaaatggtcctttttccgtttgggctgggatttt

SEQ ID NO: 121901 - DNA, 511 bp, Arabidopsis thaliana columbia
aggtgcactatagaagagtatgacgtcgcactgccgcgtacgtaagcttggatcctctagagcggtcgccctttttttttttttttacagaagcatatcatccgcaacatcaattccaatactctcacaaatctaatgtccaggaacaaactatgtcaaaagacatatcgaccaaattgtataaataattcttaaggaagaaccttaaagatcaagggacagatacaatcattggggtgaatttcttaaacacctttctaaatttatacaaaaaagcctttacacgccggtgctattcccacccaattcaacctcacataaaagaacttatatggcacccttttttttggtacttgctaacacagcgtgggaggtgattcccgacctataaatgtgggaccaaaattaccaaggagaggggggtgggttttgattaaaaaacaggggtgcgccaacacaccccgggtttttttttcccgtgtggggaaaaaaccccgccagggggaggccg

SEQ ID NO: 121902 - DNA, 514 bp, Arabidopsis thaliana columbia
  unsure (1)..(514): unsure at all n locations
nnnnnnnnnnnnnnnnnnnnnnnnnnnnnnnnnnnnnnnnnnnnnnnnnnnnnnnnnnnnnnnnnnnnnnnnnnnnnnnnnnnccacgcgtccgcggacgcgtgggcgccccgactgcgccatctaccgaaaacggttttacacccacacctgacatgcttaaacttgcatctgatatgatgggtaagatgtcaccagaagagcgtgagaggatgtttaacatggcatcgtctttgaaagcaaacgctggagcttcaacatcatacggcaatgcagaagcatctgaaccacgggaaagtttaggagcgagtgggagttcttcgggaaattcctttgtggctccaagaagcggtttcgaaccaagcatcccttctgctccgcctgctgacttacaggaacagatgagaaaccaaatgaaagatccagcgatgcgacagatgttcacgtctatgataaaagacatgaaccctgagatgatgggtagcatgagcgaacaattggaaatgaagctttt

SEQ ID NO: 121903 - DNA, 515 bp, Arabidopsis thaliana columbia
  unsure (1)..(515): unsure at all n locations
nnnnnnnnnnnnnnnnnnnnnnnnnnnnnnnnnnnnnnnnnnnnnnnnnnnnnnnnnnnnnnnnnnnnnnctcggggttttgtttttttttttttatttaggatgcaaaagcctattcaatagtaaattcaagatcatacgattctcttaaacaagggagcataagattccggaaaaaaaagagaggcaaacacaaaaatcctgctgacacattaagactaaagttgttaattcatgggggcaaaagggaaacaccagactantaaaatccttcctcccactccaccttaagccacaagggtgctccgcggaagtggattcccaccttcccagaggggagggagcttttttgttcttttttgaaatagacaagggaaggcggggaattcctggttttcacccaaaaagaaccccgaacctgggaaacccctggccccttcctgtccctctcggaagaggttacgggggggaccccccttttttaattaaaggggccccaaccctcaggggtctca

SEQ ID NO: 121904 - DNA, 513 bp, Arabidopsis thaliana columbia
  unsure (1)..(513): unsure at all n locations
annnnnnnnnnnnnnnnnnnnnnnnnnnnnnnnnnnnnnnnnnnnnnnnnnnnnnnnnnnnnnnnnnnnnnnnnnnntcgcccttaggttatttattgttttttttttttgatttcttttattgttgttttttcctttatatttttttgggagctcgaaccacgggtgggggggatttttctttttaatttacccatttaaaaaaaggggaatttgttttgaaaccacaaaaagttttttttaaaaaaagaagcctaaatgtttttttccccggtggcctgaactccttaaaaaaagtttcccaaaaaagtctcctttttttggggagtagataatcttattttccccgaaaaaggattttttttttttttgaaccccccttttttaaaacgaaaaaagccttttgttttttttttaaaatttcttaatggaaaatgtgccttctttttaaaaaacacccttggttttaaattaaaaaaatttttttctttttccgggggaaaaattttttga

SEQ ID NO: 121905 - DNA, 473 bp, Arabidopsis thaliana columbia
  unsure (1)..(473): unsure at all n locations
annnnnnnnnnnnnnnnnnnnnnnnnnnnnnnnnnnnnnnnnnnnnnnnnnnnnnnnnnnnnnnnnnnnnnnnnnnnncttttttttttttttttttttttcctttaaaagaaattaaagcatgcaattcgatcaactaattacacatttggagaaatatatagaaactgatacaacatgtacatttaaaaactcttaaacgtgttccggcggaggagacggtgcagaagccacgctctgtccagggtgcgatctactattcacggggaacttaaaactccttttatgatacccttttggttttgggtctctgcccactctttaattgaataatactcctccggagacttaactttattttccggggaagggaaaaaaatggttccccattgggggaagggccctaaagtggaggggaaagggccacgccttaatcatcccccccacccatgtcagccctttgttccggggga

SEQ ID NO: 121906 - DNA, 507 bp, Arabidopsis thaliana columbia
  unsure (1)..(507): unsure at all n locations
nnnnnnnnnnnnnnnnnnnnnnnnnnnnnnnnnnnnnnnnnnnnnnnnnnnnnnnnnnnnnnnnnnnnnnnnnnnnnnnnnnccacgcgtccgcggacgcgtgggtttttccactgatcaagggacagcaatcaattatgttaacggcagaacctcgatgacagaaccagtcaaacagacatttagctactactctgcatacaatggatcaaatgacaaagaacctcttatacctcaaaactcgggtgcgtatgttttccgtccaaatggtacattccccatcaatccggaaggacaggttcctttgactgttatacatgggccgctagtggacgaagtacaccaacagattaatccatggatatctcagatcactagagtttataagggcaaggagcatgtggaaagtgaattttttgtgggaatttaccaattgatgatggaatgggcaaaaagtaataacccagatctaaagttcctggaaagcaaaaaactttctacacggat

SEQ ID NO: 121907 - DNA, 516 bp, Arabidopsis thaliana columbia
ctatcagaagagctatgacgtcgcatgcacgcgtacgtaagcttggatcctctagagcggtcgccctttttttttttttttttttttttttaactcaactttctatgataaaccgggccggttttgggccgggattgaatgggccaaaaattggatcttaggtttgaaaattttgaatctatctttacaaagaatctgcaacctatgtacatgtataaatatgtaatttgtaggtgtaaaagcaatcaaataataggggcataactcataaaggaacatctattgcttgaaaaaagaatggaaaccctccaattcttttggggctcaaaacattccccaacaaaaggttccatttttttctcatctttcccgggtttggggggtcaatcctctttttcaaaattacgggaaagggggactttgtttttgttccgagtttacccaaaggcccaaatgaaagctaagaaggtgcccaattttttttgaacggctacacccccggggattatttttttt

SEQ ID NO: 121908 - DNA, 505 bp, Arabidopsis thaliana columbia
  unsure (1)..(505): unsure at all n locations
gaatgtnnnnnnnnnnnnnnnnnnnnnnnnnnnnnnnnnnnnnnnnnnnnnnnnnnnnnnnnnnnnnnnnnnnnnnnnnncttcgggtttttttttttttttttttttttttttttttttttttttttgggatctggggaaggattcttcattctccgaaacaaaaaaacaaaaaactagattggaaggctttgatgatgaaattacacattggctaatcaaaacaaagccctggccattatccgagtttgacatagcatcaatgccaaaaagcgtaaatgggggttgagatgtaaatcaccagagcagaggaaaccagggtgccgagcgttgcaacagtttgagccccccatttgctgcccgaagagaccaaaccaagacgggtctgaatccctttaccatagagaggatcaagaagagacagccctttacagaccccacaggaaaagccatcattccccatctaaaaaccttgatatttgtggggagctctgaaaatctcggg

SEQ ID NO: 121909 - DNA, 515 bp, Arabidopsis thaliana columbia
  unsure (1)..(515): unsure at all n locations
nnnnnnnnnnnnnnnnnnnnnnnnnnnnnnnnnnnnnnnnnnnnnnnnnnnnnnnnnnnnnnnnnnnnnnnctttcttttttttttttttttttttttttttttttttttttttttttttttaaaaaaacacaaactgtctaatattttacattttccatttaagaaagttaaaaaaaaattcctctggggaacactaattttttcccatggttcccaaacaatgaaagtattttgggataaaaactcaaagaaaacccaaacagatttttgttgaaaatcgggggggttatggaaaaattcttacagagagatagattaatatttaccaccaagagcgggggaaaccgggccccattgaggtttgaagcatataactaaggagttcgttggacctctccggacccatgttaacagttttataaaggtggttttaaatggaaacaacctcggggaggttttttttagaaaagggactttcccatgtttcccaaaggttgaaatgggaccccccaa

SEQ ID NO: 121910 - DNA, 516 bp, Arabidopsis thaliana columbia
  unsure (1)..(516): unsure at all n locations
gaannnnnnnnnnnnnnnnnnnnnnnnnnnnnnnnnnnnnnnnnnnnnnnnnnnnnnnnnnnnnnnnnnnnnnnnnnnnnnctttttttttttttttttaataaaaagatttgagttttatactatgatctggtttattttcctctgtttatctgacaagagcacatgggattctagaattacagcttgcgcaggataagatgtgcaccgaactgtgggtgaatggtgacgactatttgtggcgcatgagcataggaaggagaaagctcgaaggagaatctctgtagaatcaacgccattgccatctttgcctccaacatggcaaaattctggccgatgcatatcttcggtccccatgcaaatggaaagaaggagacctggtctttgttgcctttaaagaccgttttgaatctctcaggcttgaattccccataatgggggcgggttggactagcattataggtagactgatatggaaatgtttcattccggaatggaaagtatattggaaacccc

SEQ ID NO: 121911 - DNA, 531 bp, Arabidopsis thaliana columbia
  unsure (1)..(531): unsure at all n locations
atgaannnnnnnnnnnnnnnnnnnnnnnnnnnnnnnnnnnnnnnnnnnnnnnnnnnnnnnnnnnnnnnnnnnnnnnnnctttttttttttttttgaaagaaatgctactcatctttatatagagtagaaattaatttaaagttgatatgaaaaattcaaaccagacatgagttaccgagaatggttcctcaaagagtgttcaaattactcacgttgggaacatgttgttttgaatttgtggattgatcttcacgactgagttctgggctccatctacttatcggtggttcttccactgggaagttctccaaacatacaagtagattcacattccttcctttgaaggtaccattaacgtagagagtcaacaacgtttttcgaacactttccgtttaccctaacagaacatgggatttctaccccactcttaaaccgatcactgtccccagactgaattaaacccggttttttaaaggggacaaaaaatgggtgggggaccggttgccacaaaaatccacaccggatttgaac

SEQ ID NO: 121912 - DNA, 464 bp, Arabidopsis thaliana columbia
  unsure (1)..(464): unsure at all n locations
agnnnnnnnnnnnnnnnnnnnnnnnnnnnnnnnnnnnnnnnnnnnnnnnnnnnnnnnnnnnnnnnnnnnnnnnnnnnnnnnnctatgttttttttatttttattttttttattatttttttttttattatttattatgtttttttttttttggttctttgttcttacccctacagagaccaatttgcatcgggggagaaacaatcgaagaaattgaaaagtaatgaaagtgggcggggcttgttccggggaggaccgatttaaaaaaaaccccttagtttagccccaaacgaaaaagggggggcgaaaaaaaacccggcgctaaaacaatggaaaaaaaaagaaagacaaggctcatcgagggcttaacaagaagaaaaaaagggaggaacatttccccggaaggcaaacaaaggggcaaagaactaaaaaatatttggcaacgagaggtgaaatttaaaaaaa

SEQ ID NO: 121913 - DNA, 527 bp, Arabidopsis thaliana columbia
  unsure (1)..(527): unsure at all n locations
nnnnnnnnnnnnnnnnnnnnnnnnnnnnnnnnnnnnnnnnnnnnnnnnnnnnnnnnnnnnnnnnnnnnnnnnnnnnnnnnnnnccacgcgtccggttcttagtgggccgtttttggtaagcagaactggcgatgagggatgaacctaacgttgagttaaggcgcccaaatgcacgctcatcagataccataaaaggtgttgattcataaagacagcaggacggtggccatggaagtcggaacccgctaaggagtgtgtaacaactcacctgccgaatgaattagccctgaaaattgatggcgctgaagcgtgctgccgatactcaaccattagtgcaaatttaatatgaggcactaatgagtaagagggcgtggggacaagtgtagaaacctttagcgtgagcttgggtgggactgtctctagtgcagatcttggggggtagtagcaaatattcaaatgagaacttttaagggccgagtggagaggggttcatgagaccagaatttgggcatgggttactcgatcct

SEQ ID NO: 121914 - DNA, 507 bp, Arabidopsis thaliana columbia
  unsure (1)..(507): unsure at all n locations
aatgnnnnnnnnnnnnnnnnnnnnnnnnnnnnnnnnnnnnnnnnnnnnnnnnnnnnnnnnnnnnnnnnnnnnnnnnnnnncttttttttttttttttttttttttaggtaaacaggttcttactatgttaccatacattcgctgtaatacagactctaaattgggtaaaaaagaagtctaggaattaaaaatatcttacatgtgcggctaaaagatgctacatgattgtatctcatggaccccaacttcatctttgtgtagcgttttccaaccaaactggtatgtgaaagatcagacatctgtttcatctaaactaagcttggcacgatattgacgacctttgctttggaaactggtgcagctctctgattctcgtatttcagtatccccatcttctgttgcacttggtctctctttttttgccactctccagctccgataggcttcgtctattacaggtactactggcttcacttaccgccttgggcttattctgggggaaaaagg

SEQ ID NO: 121915 - DNA, 505 bp, Arabidopsis thaliana columbia
  unsure (1)..(505): unsure at all n locations
nnnnnnnnnnnnnnnnnnnnnnnnnnnnnnnnnnnnnnnnnnnnnnnnnnnnnnnnnnnnnnnnnnnnnnnctttgtttttttttttttttttttttttttatttttttttttttttttttttttttttattttttttttttttttttttttgtttttatatattattgggggaacaaaaaaaatttttttttttttggggggaaaatcctttttttacccctttataaattggtaccccaaaaaaatactattaggtaaaaaatgaaaaaaagtggggggcaaaaaaacttctgaaaacagggaactaataaatatggggctggggttgggtttaaaaaacctttctttttggaaaaaaccccccgtgtgaaaacctttgcttgtggggaaaaataaattttttccaaaaaccgttattaaaaaaaggggggcgcgccctttcagggggggaaccccctcccgatgtttttttgaaaaacccccctgggttttttggaccacac

SEQ ID NO: 121916 - DNA, 526 bp, Arabidopsis thaliana columbia
  unsure (1)..(526): unsure at all n locations
gaatgnnnnnnnnnnnnnnnnnnnnnnnnnnnnnnnnnnnnnnnnnnnnnnnnnnnnnnnnnnnnnnnnnnnnnnnnnnnctttttttttttttttgacgtgaagaggacatacacaattgtataaaatgttagtttcataatatttccacgtagctaaaagtagccaagttgcgaagatgaacaggaattacattatataaaatagcaaacaatgttaaaattgaataggatacacattccacagtatatatctagggtattcaagactggaatgtgaagtcagagtgatcggtcttaagacaagagagaactcaaagaattggaggctgtagagttggatctccagcaatcgcatctgcaaatactcctagatcctttcacgacccgctgtgacctnctcgtgtgaagcttgatattcaccagctttccgggtatcattctccatgtcaagtcctctggacctaatggctgggcagggctcgaatatggaaatggggagagtttgagcaagattttctgcaccc

SEQ ID NO: 121917 - DNA, 535 bp, Arabidopsis thaliana columbia
tactctacaagagcttgacgaggcatccacgcgtgcgtaagcttggatcctctagagcggcctgcctctgtgttttttttttttttttttttttaaagcattactttttattgaaggtattgatatacaacaggggatttgttttaaggctcaaaggcatccaattgccaaattaatactggaaataattaaataggcctgtcatgccgatcactggaaggttttttcaaggggtgtactctatacatattatttctactaactgcgcttaaataattaccaaaagcttctttttttgcagagaacaattggatatgttgcttgtaacatttcaaaggggggaaaaaaataaactcctcttaaaattttaaggggaaaaacccctgcaaaaaatatttttcttcaagagtaaaaagggattctctttttcacaaaaaggcacaaaggagctaaaaaaatattggcaaattttttacctaaacccttacatcccattattatctttattataaagtggcggggcccacacaatttt

SEQ ID NO: 121918 - DNA, 483 bp, Arabidopsis thaliana columbia
tactaccactcactattgggaaagctggcccgcctgcaggtaccggtccggaattcccgggtcgacccacgcgtccggcggggggccgggctcgattggcagtttataaaaagaggtatattacatataaaagtggatattttccatgataagagaaaatggccaattctttaagaggagaagtattgaatctttataagaatctgctgtatcttggacgagactattcaaaaggagcagactatttcaaaaggcgtctgaagaatgtttttcctcaaaacaaaaatgtgaaggaccccacagaagatcaaagaactatttgaaagggcaaatttctaatgaaaaaaactaccagcattatactttcttaagaaaaccaaagttttgaacaaacccttctactcaaataccccccaaaactaatggaccaggtttactttccttcgactgaaaataaacgccacttcttattttcccaccttt

SEQ ID NO: 121919 - DNA, 523 bp, Arabidopsis thaliana columbia
gaactatacaagactttgacgtcgcatgcacgcgtacgtaagcttggatcctctagagcggccgcccttcgtttttttttttttttttttttttttttttttttttttttttttttttttggccggaaacaatacgattgggaataactttaacttactattggccaaccgaagggttttcttcgaaatctaataataatgaacggggaatcaaattaaggggtttttactaattagaagttgaccctcaggctcaggggcccccaagaagaacggccacgtgtgctgatataaattccacgtggcagagtttatgcgttttttgaaaaaaaaagaaacccatttacccccccgaaaaaaaaggctccataaccctttttaaagaaaaaacccctctcccccggacacttttttcccgtttttgatggggaaaccccggtttggagcccttcaaataaaactttcttgggaaatatccacatgtgtcccgggaggggaaaattggttttttattcaaaaccct

SEQ ID NO: 121920 - DNA, 517 bp, Arabidopsis thaliana columbia
  unsure (1)..(517): unsure at all n locations
nnnnnnnnnnnnnnnnnnnnnnnnnnnnnnnnnnnnnnnnnnnnnnnnnnnnnnnnnnnnnnnnnnnnnnnnnnnnnnnnnnctttgttttttttttttttttttttttttttttttttttattttttttttttttttttttattttttttttttgtggactaaaagaccatttacttaaaggccccttaaagggggcaaactttttttttaaattggaaaaaattgtgacaaaattctacttaggttttacaataacaataaaaaaaggggccccccgaaaaaagttttttttacccccactggtcctggttccccgaaaggaacaaaatttttaaacagttggcttaaacaaaaaaatgaaaaacccagttttttgggtttattttctttggggaaggaacaaattatttggaaagacttttttgttcaggggaaaggcccttttttttaaggggggttttaccatatttctaaaaaggacacgcgacacaaagaacttggggattttttttttt

SEQ ID NO: 121921 - DNA, 467 bp, Arabidopsis thaliana columbia
  unsure (1)..(467): unsure at all n locations
tttttttctaaaaaaaaaaggtttacaattggttgtgaaaattttttccccacaaggggggggtttaaatccccccacaccacaattttttcttttttgggaaaaaaaaaaaacaaggggggtttttttcgaggggagggaaaaaaaaaccccctcnctcctacacacacctttaaaaaactttttttttaggaagaaaaaaaagaaaaaaaaacgccgccttctctcttctgggcggtattttttttttgtgtgtcccacccaccactcaaaaaagaaaccccttcttttttgtttttccgtatagaggtggtgacacaaatatattttttttccatcaaaacccgctatttcttcagcaaacgattttttttttttatttcttcccaccccacttcttcttcctttcgtttgtttagggtactatatttttttttctcgaaccaaccacagagaggggggggtgt

SEQ ID NO: 121922 - DNA, 513 bp, Arabidopsis thaliana columbia
  unsure (1)..(513): unsure at all n locations
nnnnnnnnnnnnnnnnnnnnnnnnnnnnnnnnnnnnnnnnnnnnnnnnnnnnnnnnnnnnnnnnnnnnnnnnnnnnnnnnctttttttttttttttttttttttgggttaagcattatcgttttattaaagttctgccattgtcaccaaatggccaataatatacatatacataaacactgtaacattttaaagatgaaacaaacagaaaaaggcttcacgagtcttccttttgaagcagaagagacgaaatatcattaccaccaccattattcggcgtcggagtgtgttcattccgacgccggcgcttcccgtaaccactgttaactgccacctcttgccatcccccaaacgtcaaactattagcgaatgtatctttcacactctccatcacttctttctccgctggagataatctctctagtgcaattcctgaagcagcttcctcaaattccctcatacaagcaatcatattcatgacttgggactccagaaacgcttctcggtataattt

SEQ ID NO: 121923 - DNA, 464 bp, Arabidopsis thaliana columbia
  unsure (1)..(464): unsure at all n locations
atgaannnnnnnnnnnnnnnnnnnnnnnnnnnnnnnnnnnnnnnnnnnnnnnnnnnnnnnnnnnnnnnnnnnnnnnnnctttgtttttttttttttttttttttttttagagaaatctatattattcattatttggtattcagtctctttcatttccacctctttcacatcaaccgaatcagtaacctcagctctataaacataaaacttaaccacgaccaagaacaaaacgaagttaaccagattaagtaccgcaaagaacaggtaatagtaatccaacctagactcattaagggtggtcaaaatccatcctcttcctcgtttctttgttatctcagataccgnagataacaagaaactgctcatgaaattcccaatcgccaaactcgttggccaatatgatggcccgaggcttttcatgctctcgggagcttgatcgtaaacaacctaagctttgaactttt

SEQ ID NO: 121924 - DNA, 509 bp, Arabidopsis thaliana columbia
  unsure (1)..(509): unsure at all n locations
nnnnnnnnnnnnnnnnnnnnnnnnnnnnnnnnnnnnnnnnnnnnnnnnnnnnnnnnnnnnnnnnnnnnnnnnnnnnnnnnnnnnccacgcgtccgcggacgcgtgggccattttcgccacgggtatactagaaatgaggtggagtggcgtaggcatagacgaatggtggagaaacgagcagttttgggtcattggtggagtatccgctcatttattcgctgtgtttcaaggtatcctcaaagtccttgccggtattgacacaaacttcacagttacctcaaaagcttcagatgaagacggagactttgctgagctctacttgttcaaatggacaacacttctgattncgccacgacgctgctcattgtaaacttagtgggagttgttgcaggagtctcttatgctatcaacagtggataccaatcatggggaccactctttggtaagttgttctttgccttctgggtgattgttcacttggcccctttcctcaaggggtttgatggggt

SEQ ID NO: 121925 - DNA, 494 bp, Arabidopsis thaliana columbia
  unsure (1)..(494): unsure at all n locations
tttgacgtcgcatgcacgcgtacgctagcttggatcctctagagcggccgcccttcgttttttttttttttttttttttttttttttttttttttttttttgaaaaannnaaggcacaagaaccaagcggaggggccaaaggagaaaaaaaaacaagcggttccttggtttgatgcgacacttccgccaacccaacaagggagtggtcgctttttttcggggggtggtccatgtattagggctccctaaaaaaaaatttaaaaacaattcttttaaacaaaaattgaaaaccaattgggggcccctccagcgccaatcccaagcccaaaaataactccgcgggacacggaaaaggccttttaacttgtgcatcttactcacaaagatcaaccaaaggccgtgttggagccgccctaaagagacccgcggccgggacccgttgacaattaaaaatacccccttctttttgccctttgggcgaattttttacggga

SEQ ID NO: 121926 - DNA, 530 bp, Arabidopsis thaliana columbia
  unsure (1)..(530): unsure at all n locations
nnnnnnnnnnnnnnnnnnnnnnnnnnnnnnnnnnnnnnnnnnnnnnnnnnnnnnnnnnnnnnnnnnnnnnnnnnnnnnnnnnccacgcgtccggccaggcctcgatgagtaggagggcgcggcggtcgctgcaaaacctaaggcgcgagcccgggcggagcggccgtcggtgcagatcttggtggtagtagcaaatattcaaatgagaactttgaaggccgaagaggggaaaggttccatgtgaacggcgcttgcacatgggttagtcgatcctaaaagtcgggggaaacccgtctgatagcgcttaagcgcgaacttcttaaggcaccactaggtgggctccagaagaagagaaatcactacctggaaggtggtgatgccggaaaccgtgagaacttcatcaatgagcttatcaggaggatggattagaatggtatcggtttcaatggcaaacttcttctgcggttttatttatgtgcctcctcctggaatttgatcttctttttcaaggtaaagacattttgaatctt

SEQ ID NO: 121927 - DNA, 518 bp, Arabidopsis thaliana columbia
gaactatacaagacattgacgtggcatgcacgcgtacgtaagcttggatcctctagagcggtcgcccttttttttttttttttttgttaaactttcttcatttttcaaattacaattcattacataatttttttaaaacatacaaagtgcaaacatatatataaatggaggaactgcaaactggagataaattatttcaaaaaaaaattgaaccaaagaggtaattatcttgctcagaagtttttagaatgtggaagaacacaaattaaacccgccggtagttctcagcttcgaacacgggcaaggactaacctttagtgaagttccactgacatccgaacacttccaagttttatacgaattcaagcttccatgtagattaatttcattaaacatatacccggaaaagggggagctcttaagacctttgaatagagccaagggtttcgaacgttaacttcccaaaacgtcttgaaatgtattcccttaacaaccggaaaaacgttcggttataattt

SEQ ID NO: 121928 - DNA, 528 bp, Arabidopsis thaliana columbia
  unsure (1)..(528): unsure at all n locations
annnnnnnnnnnnnnnnnnnnnnnnnnnnnnnnnnnnnnnnnnnnnnnnnnnnnnnnnnnnnnnnnnnnnnnnnnnnnnncttcgtttttttttttttttttttttttttttttttttttttcaattaaaaaaaagaagtgggaaaaataagatttataagcaacaaataccaaaaaaatatcggggcttaaaaatcagagagaaacaagaaccggatcggtttgtttccaaatgttacataaaaagaagaagaaactggcaagcgcgggaaacttacttaccgttaagagaagaagataactgcttattcttctttacgcgggtttgggtttgaagggtttgccggcacaacctaactggggagaataatccaacagggtgattggcccaatgaatatacccttcccgagggggaagtgtttggggcaggttaaccccctaaaaccgcgggttgattttttgagaacccaaacaagggaaaggatgtggtaaaaaccatttttttttctaagatttgccttttgggg

SEQ ID NO: 121929 - DNA, 500 bp, Arabidopsis thaliana columbia
  unsure (1)..(500): unsure at all n locations
nnnnnnnnnnnnnnnnnnnnnnnnnnnnnnnnnnnnnnnnnnnnnnnnnnnnnnnnnnnnnnnnnnnnnnnnnnctatgttttttttttttttttttttttttttttgttgttttttttttttttttttttttgttttttgtgttgtgtttggttttttttttttaaacgggagccgcgaagaacaacacatggggccgaaagaaaatgcttgcggggggggggggtttttttttaaaggggggggggcccccaaggggggaagggggtttaatgctttttaggggagtggggttttttacaggaggaagggctaaaagcaccccaagcccggttggggggggggtaaaatgggggaaacccccaaaatatcttgcgagaaagtaaggcccccaagggggcgctttgaacacatgaaaaaggcggtttaccggggggtgtgaccccgccaatggaccgctttttgtgcgaggggggaatcttccccggagaaaaaccaaa

SEQ ID NO: 121930 - DNA, 527 bp, Arabidopsis thaliana columbia
  unsure (1)..(527): unsure at all n locations
tnnnnnnnnnnnnnnnnnnnnnnnnnnnnnnnnnnnnnnnnnnnnnnnnnnnnnnnnnnnnnnnnnnnnnnnnnnctttgttttttttttttttttttttttttttttttttttttttttttttttttttaaaagaaaacaatgaaccgttttaactggggagcaaaagtcttacaagtgggggtagttgagagttttgacccacaaaccacaatcaaagcccccagatttattttcggggaagggaaaaaccaaacgggccaaaccctaaacctaaattgtttttcaagtgattaaacatttaccacacgcgagtttaagtttgttcaaaagagcccacagaaacatcaagggaaatcccccgttaagatagggcaataatttggcagaagcgctcaacaatacttttttattcaaacacttccccggtgaaagcacaaaaatttcaaacaaggtctttttaaaaaaaacgagttacatttattggggatcttataaaatttggggccctggagaactgggtaatg

SEQ ID NO: 121931 - DNA, 516 bp, Arabidopsis thaliana columbia
  unsure (1)..(516): unsure at all n locations
nnnnnnnnnnnnnnnnnnnnnnnnnnnnnnnnnnnnnnnnnnnnnnnnnnnnnnnnnnnnnnnnnnnnnnccacgcgtccgataagcatttgggggaaatcaatcgaaaaccctaggagagataaaaacaaaaatctagacggagatttatggcgacagcgaatcctggccgtggaggtggtagaagaggcggtggagctatggatgacgataagttggtcttcgagactaccgatggaattgagcccatcacgagcttcaatgatatgggcattaaggaagatgtgcttcgcggtgtctacgaatatggattcgagaagccttccgcgattcagcagagggctgttatgccgattcttcaaggacgtgatgttattgctcaagctcagtccggtaccgggaagacatctatgattgctctctccgtttgtcaagtcgttgatacttcttctagagaggttcaggccttgatattatccccaacaagagagctggctccacaacagagaagacgat

SEQ ID NO: 121932 - DNA, 464 bp, Arabidopsis thaliana columbia
  unsure (1)..(464): unsure at all n locations
atgnnnnnnnnnnnnnnnnnnnnnnnnnnnnnnnnnnnnnnnnnnnnnnnnnnnnnnnnnnnnnnnnnnnnnnnnnnnctttttttttttttttaatataactatcgacccgctctctgtattcaatcacacagcaaaggtacaacaagtatcacactttcaataatgctttctcgatacatatctcatcccaagatcttctacagaagaatccatttgcttgtaatggatgcaaagcagtccctatctgtttctccaagacaatcaatgtgtactcactcttttcaacacattgtttacttgttaacacaacaagattcgagccaagaacaagagagctaaggagacacgggaactaccggttgagccatctcctcaatcgggaaacaactccctgaggaggaggggaaggtggaataagaacatcaagaatggtaactctctcttttggaggcaatggtacc

SEQ ID NO: 121933 - DNA, 515 bp, Arabidopsis thaliana columbia
  unsure (1)..(515): unsure at all n locations
atgaannnnnnnnnnnnnnnnnnnnnnnnnnnnnnnnnnnnnnnnnnnnnnnnnnnnnnnnnnnnnnnnnnnnnnnnncttttttttttttttttttttttttacgaaaaagaagaagattaagattacctaggctcatggaataagagcaaagaagagaatgtgcttgtgccaaatgccaaacacaaaggcatgccttgtttcttcaaaagagcaaattatgcaaaagtacatatttgagaaacgggaacactaacaataagggttgggaagagttatggcaataaacaaagatctctccctatgtgaataataatcataagagggggggaagaaaaaaagaagaagaacaagacccccctgggagggtcgaaaacagccatatgtttgggtttactacacaggggaggggacggggagtttaaagggcaaacccctttagcttaaagactggataccaaagtcccttgagggggggccgccccttaagcctacgaaactaagcttttttttta

SEQ ID NO: 121934 - DNA, 516 bp, Arabidopsis thaliana columbia
ggtgcactctagaagagcttgacgtcgcatgcacgcgtacgtaagcttggatcctctagagcggccgccctttctttttttttttttttttttttttttttttttttttttttttttcttgttttcttttttttttcctcttttttttctttttgaccgggggggaaacccaattttttcttttttttaaagatctttggggggggggtccccgaagaacgggcgcttttcccccccccgcccccttttttttttttggcgccagaaaaaccttgagcccccaaaacccgccttttttttttttggccactcgccccctttttttatacaaaagggtttcaagggtccccccttgaaacacccccaccaaaaccccctctgtggcccgggaattctccccctaagcggggagagctttccccacaaacgcgcctgggaggttttcccccgacagtggcctttcccccccccccggccccctctcaacccggcgtgagcccccgggttccccccaaa

SEQ ID NO: 121935 - DNA, 500 bp, Arabidopsis thaliana columbia
  unsure (1)..(500): unsure at all n locations
aatgatttatgtgtgannnnnnnnnnnnnnnnnnnnnnnnnnnnnnnnnnnnnnnnnnnnnnnnnnnnnnnnnnnnnnnnctttgtttttttttttttttttttttaccaaagttaccaagaaataaaagaagtaaaatattacaaacaaaaaaacacattatatccaattttatgaaactcgaaccacaaaactctcacaaaggatcagtaataaaaagaaaaaactctcacttacaagtaataggtgatgcccactttgatcaaacaaatgtgaggaatattcaacatcacgcctgggctccggaaattcttcctcaagaacgagaacgctacgtttaccaccagctgttttacaaacactgagttccggtttgccttcacggaccgtgtccgacaatgtaagccacttcaaggtccttagattcaccaaaaaaaaagttttccttcacctgggtggctgaacttgggggccattggctgaactaaaacatcttttat

SEQ ID NO: 121936 - DNA, 489 bp, Arabidopsis thaliana columbia
ttgaatttatgtgtgtactctacaagagctttgacgtggcatgcacgcgtacgtaagcttggatcctctagagcggtcgccctacgcttttgttacatcttattttttttttttattttttggggaaatcaagagctttaaatacctttctcaaaggggtttatccttaaaaaaaccacttttggacccaagccccagtgttccaacctttttaaaaccgggctttgggaaatgggggtttttttcggggggtgtttttttttcttcgacatttttagggacctttttttttttctttaaggcatggggccagcacccccaaatagctttgggggggtttagaccccccggcctctgttcatttgatttaaaaaagggggggcccttcattggagtgggcccacccccccccctaccatggagccctgctctcctgggggggcccccccacttttggcctcttactgtctgtggggggggggccccccc

SEQ ID NO: 121937 - DNA, 508 bp, Arabidopsis thaliana columbia
  unsure (1)..(508): unsure at all n locations
annnnnnnnnnnnnnnnnnnnnnnnnnnnnnnnnnnnnnnnnnnnnnnnnnnnnnnnnnnnnnnnnnnnnnnnnnnnnncttttttttttttttttttcattacgttagagattaattaggattacgataactatgaatattccacatgagtcttttatgttttaggattcataacacaatactaaaaaagatttgcattttgatgagatgaacttaaaggattctcggagatcgttatgcgtatcggcttggagaacgaagtaagggtgctcggatgatataagatttatcgatcaaagagaagtcatacgttgtgactagatgatgaagaaatatagccatctgaagcctagcaaactctgctcctgcacatagtcttgcaccaccaccaaacgccatgaacgttttaaagccagaaagcatttttttcccttccatctccagggataaactcacatgggttgttcataaatttgaggggtcatattgaagaaaaatggaaccccc

SEQ ID NO: 121938 - DNA, 418 bp, Arabidopsis thaliana columbia
  unsure (1)..(418): unsure at all n locations
annnnnnnnnnnnnnnnnnnnnnnnnnnnnnnnnnnnnnnnnnnnnnnnnnnnnnnnnnnnnnnnnnnnnnnnnnnnnncttttttttttttttttttatagagataggaactaaacaaatatagccaagaaatcctttaaaaattgtattcccagttacactctcctcggactttctgcttaagattcctttattttctgatgctcctaaaaaattgtatgatagataacaattttcctaagtacaaaaatggctctttctatatgtcatgtggtacctctcttatgttgaaaaatgctataatgggccatcgggtttcttgtcggagttttcggagattgagaaaccacgttatgctttcacggtctttggctatgggtgttatccgagctacaccaccatggaacgggataacca

SEQ ID NO: 121939 - DNA, 524 bp, Arabidopsis thaliana columbia
  unsure (1)..(524): unsure at all n locations
nnnnnnnnnnnnnnnnnnnnnnnnnnnnnnnnnnnnnnnnnnnnnnnnnnnnnnnnnnnnnnnnnnnnnnnnnnnnnnnnnncttcgtttttttttttttttttttttttttttttttttttttttttttttttttttcctcttcggggaggaaatttaaatttaaaagggggttttcaccgtttctcccatacatatataaaatgatcgggactcgggactgtgtttttttctcaaagctttaccaagggggggaaaaaaaacccaaggacccccgggggccttaatcctttttacgatctctgaaattaccaaaccatgggtgggaacccttggaaaacattccttttttggtatcctcgcttttttcctgggaggaaaatttcccccacgggcccccaaaattcctttttgccctcacccacaaagtcttttggaagcccaaaattttttcccgattggctttcccaagttttgaaccccgggtctttaaagacccgtctcgtttaaaaaagaacccctcc

SEQ ID NO: 121940 - DNA, 511 bp, Arabidopsis thaliana columbia
  unsure (1)..(511): unsure at all n locations
ttgnnnnnnnnnnnnnnnnnnnnnnnnnnnnnnnnnnnnnnnnnnnnnnnnnnnnnnnnnnnnnnnnnnnnnnnnnnncttcgtgtttttttttttttttttttatagggaaactcagtctcatattatatctttgactttcctttccttagaaacagtttttatacaatttataaatattgtgtatgggagctaaagatacatgctatacctatacatcacaaattctatatctgatatttggagctttaaaagaataaactatccaccagaccaccaggcatcatcatatcatcttctcaaatttataaagcttatttaccctttgcatagacctcagtcccaataccatgaatatccctgctccaatgaagggaccatggggaacaagctgccttcttgggtggtaaaggcacccccaatataaaggaaagttcttccaaaaactgtatccatggcgccctctggagatttggcgctttcccggctggttttttccactaagaaaccc

SEQ ID NO: 121941 - DNA, 498 bp, Arabidopsis thaliana columbia
  unsure (1)..(498): unsure at all n locations
ttgnnnnnnnnnnnnnnnnnnnnnnnnnnnnnnnnnnnnnnnnnnnnnnnnnnnnnnnnnnnnnnnnnnnnnnnnnnctttttttttttttttttcaatatgtttgattaaattttatgatgcgacaactaaaataattgtgaagctcgttcaaaactcagaacgaccacaagtataataatcgaaaacaagatctgcccaatgccccttcacaatctctccatctaacccaaatttagccatcaagatcccacaagtcctttgtacctagcgtacgacattatgatcacaaacacgactacacaaagtgtccccgtcaagcccaccacgtatttgaacatgtatccatgaccgtcgttccatgtgtatggaatgttcatcccgaaaattccagcgacaggagagtacctcgataagcaaactggtcccgaacttaacactagctcccactggataagctgattccgatgattgtcaagctggatgttaatgcaccct

SEQ ID NO: 121942 - DNA, 524 bp, Arabidopsis thaliana columbia
  unsure (1)..(524): unsure at all n locations
annnnnnnnnnnnnnnnnnnnnnnnnnnnnnnnnnnnnnnnnnnnnnnnnnnnnnnnnnnnnnnnnnnnnnnnnnnnnnctatgtgtttgaattttttgtttttttttcttttgtttttttttttttttttaattttttatttttttcccaaacattttgtggtttttatgattaccaataccagacacaaaccatgatgatggtttaagggtttttttttgctaaaacaccaaattattttataagtttaaagaaaaatggtggaacccaatttttcggacataaaaaccttaacaaaaaccaaattaaagttttcggggaagggaaaaaaaactcatccgctttttgggtttcccggtgagaatttgggaaactgaaatcttttccggggcaatggttcattgaccggcaaaaactttttataaatatttttaaaaaatttttcccccaaggaaaaaagaaaaacccgggacaaaaaaaggggatgggccttttggggcaacttttggaaggggaaaaaatg

SEQ ID NO: 121943 - DNA, 576 bp, Arabidopsis thaliana columbia
  unsure (1)..(576): unsure at all n locations
nnnnnnnnnnnnnnnnnnnnnnnnnnnnnnnnnnnnnnnnnnnnnnnnnnnnnnnnnnnnnnnnnnnnnnnnnnnnnnnnnnnccacgcgtccgcagctttggttctgcctccgccgcttcttcttcttcttctaatctccgacagatttactctgattctgttgtcttcgagatgatgatgatgtcgtcncttggtggtggtggtggtggaggaggaggaagcnccccccccccctcctttttttcngggggggccgacaccccctggggcccctcccttttcaggtccgtccacccgtgtgtgccgtcatttcctccatccccccaattgcgcgccccgccccgtcctttccccccggttgttctgtctgatcccatgtacaccgggcgtccccatccgagggcgtgcccgccgctgatgtccgcgccgccctctgtattcgttatctatccgctcccgcgcgccctccagccgccggcgggcgctagcgtttgtccgcccgttccgcgcattcctctccgcctgtccctgattgctcgcgctgttccgccgcccgcgctccatacccaattct

SEQ ID NO: 121944 - DNA, 390 bp, Arabidopsis thaliana columbia
  unsure (1)..(390): unsure at all n locations
annnnnnnnnnnnnnnnnnnnnnnnnnnnnnnnnnnnnnnnnnnnnnnnnnnnnnnnnnnnnnnnnnnnnnnnnnnnnncttngntttttatttttttttttttttttttttttttttccaacacaaaaagttgttttatttatttaacgtaggtggttttaatataattcaagttacccagacgaaaaaaatctttttttaaagggagacgattcatgtaacaccattcagaaacaataaaatgaagctcgttcaaaaaaaaaaaacttttaatgttacagagaaaaagaggagtttaaagtttttaacaagttttacagctacgtttggaattcccagggatctgtggagtccaaccatatactgtggaatttttcacattttcaaag

SEQ ID NO: 121945 - DNA, 484 bp, Arabidopsis thaliana columbia
  unsure (1)..(484): unsure at all n locations
gtcgcatgcacgcgtacgtaagcttggatcctctagagcggccgccctangngtttttaacttttttttttattttttttttttttttgtgtctcgttttcaataaggtgctattttttttgagccggggggaggccatccctagaatagccgacctagacacgcggggggggagcggcccaaacaggaacgcctaaaaaatttttttgggggggaaaaaaactgtggaagcaaaaaaagaaaaaaaacgtggaattttttttttgtcccgcgcccagaaaaaaaaaaccatttgtacacaaagaccaacaaaaaaaagaggattcgaaacttgtgtgcccttttaaacaaaaaaaaaaagaggggaatcccctgttttttcgcccggagaaaaaaaaaaaaaagcacaattgtggttatccaccaggggaatgcccaaaaaaatggttttttttttcttaataaacccgacacaaaccccact

SEQ ID NO: 121946 - DNA, 526 bp, Arabidopsis thaliana columbia
  unsure (1)..(526): unsure at all n locations
ggtgcactatagaagattatgacgtcgcctgcacgcgtgacgtaagcttggatcctctagagcggccgccctccgtgtttttttttttttttttttatctttgaaaaacctttttttaccggtggcatttttttggagaagacaagaacgggggaaacccaattagagaccccgaaaaaaacatgccattccagataacatttgttattgcaataaggtttttataaaaaaaagggggagggggccgccttngggtggtgggntaatttaaagaatcttgcgaaccatttttccttttgaaacaaaacaacctttatgtaccccacccttaaaatttgttgatcgctcggttctgaaaaaaaacaaagtcttctgaaaaacaaaatttttttttttcacccacaaaaaagtgtttttcccccccctttatttttttttttaccctccggggggcacccccggcggggcccagcaacccccaggtttttttataacctgggttttgggtttaataccccttttttgg

SEQ ID NO: 121947 - DNA, 511 bp, Arabidopsis thaliana columbia
  unsure (1)..(511): unsure at all n locations
cnnnnnnnnnnnnnnnnnnnnnnnnnnnnnnnnnnnnnnnnnnnnnnnnnnnnnnnnnnnnnnnnnnnnnnnccacgcgtccgcccacgcgttcggccggaaagggaaaaccggttgatttcgtgttatgtattggagatgacagatctgatgaagacatgtttgaagcgattggtaatgcgatgtcgaaaaggttactctgtgataatgctctagtctttgcatgcacagttgggcaaaagccaagcaaggctaaatactacttggacgatactactgaagtgacatgcatgcttgaatctctagctgaagcatcagaggcttcaaacttttctatgcgtgaacttgatgaagccctttgatttggaccagatcttttgccagatggctaaagaagaggttagacagacaaagacagggaatanaagagactgggagttttgttgggctgtatggcgtttgcccgatttgaagaaagaaaagaaggaaaagggtagtgaaaagagtaata

SEQ ID NO: 121948 - DNA, 470 bp, Arabidopsis thaliana columbia
  unsure (1)..(470): unsure at all n locations
acgtcgcatcgcacgcgtacgtaagcttggatcctctagagcggccgccctttttttttttttttgattcagaatagcacgtgaaatattatatttaaaatatccagctaacagtgatctacgcaaattaggatgaattccagagaaaaagtggtcataaaataaaataaaataaaatacaaaaacccaaattaagttaggagcactatattaatcatgctacatacatagncaaagttcgtagtaagtagacttagaaatagttaccggtagagttattacgattaagacaagcgttagcaaaatgtgaagggatcgcccacatgaaaaagccccttataccaatatactggttcttcaagttgaaaagacaaaagcttgttccaaagcccgggtggcactccactgggtttgggcggctttaccttaaaggacaaaaacacgggttgcaccgtttaccgttcccgcgg

SEQ ID NO: 121949 - DNA, 469 bp, Arabidopsis thaliana columbia
  unsure (1)..(469): unsure at all n locations
nnnnnnnnnnnnnnnnnnnnnnnnnnnnnnnnnnnnnnnnnnnnnnnnnnnnnnnnnnnnnnnnnnnnnnnnncttttttttttttttttgatccatgaattggagattattcattacatagaaacataagaagcgagctgtggatattcaaagacatgtatatacattgggcaggttttgcttttcggaccaaaaagcctacttcagcaatctcccatacgacactgaccacttaacagtgtcactcgcatttctccttattcacgccataaaaaacgaagaaaggggccaaaaatatatttaagcgaccctcatattctatatataatacaaaattcatacaggacttttttcctggttaataagaaagggaactttgtattcattttcatcgggaagaagaataagcttggagggatttctttcttcatttgaactttggtttttttgctttccttcaatggcccc

SEQ ID NO: 121950 - DNA, 533 bp, Arabidopsis thaliana columbia
  unsure (1)..(533): unsure at all n locations
atgaannnnnnnnnnnnnnnnnnnnnnnnnnnnnnnnnnnnnnnnnnnnnnnnnnnnnnnnnnnnnnnnnnnnnnnnnctttgtgtttttttttttttttttttttttttttttttttttttttttttttttcggggccccaaaagatagagaaagggtttgagaaagaaaaagggtttcctttacttcctccaccttttggcgtggaagcaaacttgctacaataagcttttttttttttttgggggcccaaatgggaaaataaaaaccttggattaaaacactcacaggctgttttggggtgggtttcctactacaaaccgtgtaggatggtggaaaacccaggggggagaagagctagggggtctttttggccattgttgggagagagcttctttatttgaaatctccaaaacaaaaggaagggaggcgaaattccaattaaaaaataaacccaaatttttttgttaccacctttctttttagaaccaaacttttttttaaaaaaaacaattccttggtttttttttttt

SEQ ID NO: 121951 - DNA, 563 bp, Arabidopsis thaliana columbia
  unsure (1)..(563): unsure at all n locations
ttgaatctatgtgtactatacaagacattgacgtcgcatgcacgcgtacgtaagcttggatcctctagagcggccgcccttnggtttttttttttttttttttttttttttttttcagacctaatgatatctgatcaaaaacttcattgctttaattctttcatacacaaaatggttacatgaaaacttggggttaatgtttcttttaaatatgggtttcatcatgggttggctttttttttacgtgggggagactctttgtaagccaaatagggggtttctttttgatgaaacttgtttcatcctccaaaagggttccaaagatccctttaagctataataaactttttcttgcctaaaagaaaccttccccaaaggtctcaaaaaaaaagttcccaagggcttgtcgctttcctccctcgttttttgaggcttttttttttgaaacccccccggagcacccggcaaagggggctaataacctgcccaaacttttggcctctttgcgtggggcctccccctcggttttttgaaacaacgaacctcctatccttttttttttt

SEQ ID NO: 121952 - DNA, 474 bp, Arabidopsis thaliana columbia
tactatacaagactttgacgtggcatgcacgcgtacgtaagcttggatcctctagagcggtcgccctccgtgtttttattttttttttttttttttttatatagattttttttttataaaaaaaaggccgggggaaaaggatttaaatatgaatccctcatttaaaaagacgatttcaaaaaatttaagtttctttttaaaacccctattcctttaaaaaaattttttttcaggaaaaaccggttttatttttacacttaaaaaatttttcaaaaagggggttttttcccccaaggccccaccctcctttttcttccctttaaaacccccttttattgggtggaggccccccgcgggtttttttttcactcaaggccttcccctctttttataataagaactttacttcccccccttttggaaccctctaatttacttgaagagagaaagggacaaggtgataaaaaaaaaccc

SEQ ID NO: 121953 - DNA, 490 bp, Arabidopsis thaliana columbia
  unsure (1)..(490): unsure at all n locations
nnnnnnnnnnnnnnnnnnnnnnnnnnnnnnnnnnnnnnnnnnnnnnnnnnnnnnnnnnnnnnnnnnnnnnnnnnnnnnnnnnnccacgcgtccgcaccaatcacacttctcaaaaaagatcagagatttctagatccttcttcttctcctgcaaattcatctacctgaatcttccaactttataaatcgatcatgatctccgtcgtaatcatcgctgagttactagtagagtacacgacggctctcgcgagactaaccgccgggattcttccatcgagacggagaggcgatagtaacggtgcacggattggtgggtttctctctgccttgtcctttctccgccgaggagtaaagggttgcaaaggagggagaagaacgaagaattcgaaggacgagaaggcctggaggaagaagaaaccaccgcggaccccccgcccaactgaaagggttcgaaaggagaagaaaaaagaagggtttgggactgagggga

SEQ ID NO: 121954 - DNA, 523 bp, Arabidopsis thaliana columbia
  unsure (1)..(523): unsure at all n locations
tgaannnnnnnnnnnnnnnnnnnnnnnnnnnnnnnnnnnnnnnnnnnnnnnnnnnnnnnnnnnnnnnnnnnnnnnncctcgtgttttatttttttttttatttttttttttttttttttttttttggggtgccccaccaatatttttttaaatttattagatacctcaaggaaaaccaaaaaaaaatcccagaaaattaaaattttttcaaatttgatcccccgataagtaaattttggcagggggaaaaatgaacccaagccaaactaaaaccatgccccataaatttgctcttttggggtattccaacaactaaaaaaaaagagaggtattttgtttttttggaaaaaaaatttaccgccgtcttttatttttataataaatcccggtttaaacccctcaaataaaaaattaaaaaacccctttttcgaactttaccttttggggaaaaaaaaaataattttgggggaaaaaaaaaaaaattttttaccaaaatcgaggggggggggagaccctttttttt

SEQ ID NO: 121955 - DNA, 517 bp, Arabidopsis thaliana columbia
  unsure (1)..(517): unsure at all n locations
aaaaaatatttgggggcccacccacgcgaagggggaaaggaaaaaaacacgagcccccggtctttggtggccaccccaaaaaagagaaaatcttaggcccgaccccccgcagaaaactccccctcccccaaatataaaaccccaccggccccccgcacgtatttttttggggaagttggggggcacnccccccccccccctctaaaaaaaaaaaaacaagtgcgtttttgttgccgcgggcgccccttttctcccccccccaaaagcgacgaggtgatcttataaaaaaaaacaaccaaggttttgtctgttgggacccacataccccgcaccggggggggaggcacaaaaacaaaagggtgtggggggcgggtggctacccccggaaagacgagatggttgatcctcacccccggagcccccaaaacaacaaggcacatcccgcccccggccggcggggccggccacagtgcaatccccctaagacagccgcccgttctttcaacaaaaagaaaag

SEQ ID NO: 121956 - DNA, 513 bp, Arabidopsis thaliana columbia
cactcactttatggaaagctcgccgcctgccggtaccggtccggaatttccgggttgacccacagcgttcgggcacgcgtacgacacaatcaatggggtctcaacgggtatatccggtctgattgtgactctgtccgtgttttttaccatacccaacattacactgggactccttaagaaagctgcgctgatttcataaaaacttgcttcgattttttttggggggggtggtataacccattccatctatggagaaaaaaaaaaccttgttcgtgagccccattcttattatgcccttaacaaccacccttaccatcacaaaatgagaataagaaatgttttggggggaatatacggggtccaaaccggcggacaattttggaacccggacagggtttggaccacgggggaaaaaaggactactcttccaagcagtccaaaaagggatgtgtttctttcaaaaaaaaagagggtcgtgttttcctttttttaaacccaacgagaccccgaacg

SEQ ID NO: 121957 - DNA, 520 bp, Arabidopsis thaliana columbia
gtgcactctacaagactttgacgtcgcatcgcacgcgtccgtaagcttggatcctctagagcggtcgcccttttttttttttttttcgttttaagcacacacacactttttgcattgaaagaaaaacagttgccacaaaacacatctcaaaacagagtggggcctaatcctatgtggctaggggggggtctccaaaaaatatccatttttttccacaccggaaggaatatttgagggtggggctttgggcgaccctttgggatccaaaattacccaacccggttcaattgtggggggcttaaccccccatggggtgaactggcttacaacttttgaaacccccaggtatggggagttccccttctttgtgggaaaagatggttttctcgggttgggggggggggggggaaaaacaaaaacctcttgaaagccccccgagaggggtggacccccgagggttttccgcgggggtggcaaaagtttttttgggggggggggtgtcccccccggaggggggggg

SEQ ID NO: 121958 - DNA, 490 bp, Arabidopsis thaliana columbia
  unsure (1)..(490): unsure at all n locations
nnnnnnnnnnnnnnnnnnnnnnnnnnnnnnnnnnnnnnnnnnnnnnnnnnnnnnnnnnnnnnnnnnnnnnccttgggtttttttttttttttttttttttatttttttttttttttttttttggggggagaaaggcccaacccaaacaaaacaaagagggcaacacgatttggttcatacaatattaaaaaataatttttggggccaacaattcgttggaacacattatacaaaaatgtgtttaaaaaccgggcgagaaggggaaaccggtctataattccccccctccacccccaaaaaactggccagccgttttttttttagccttaaaagaagccgaatttaccttaaagcccttcacttcactttatttggagctccaccccctggttctggtgtaaaattctttttggaaggaagggtggtaaacgaaaaaatcccggaccaattggaaccaccttttggggaaagaacacccgggggaaaaacg

SEQ ID NO: 121959 - DNA, 504 bp, Arabidopsis thaliana columbia
  unsure (1)..(504): unsure at all n locations
nnnnnnnnnnnnnnnnnnnnnnnnnnnnnnnnnnnnnnnnnnnnnnnnnnnnnnnnnnnnnnnnnnnnnnnnnnnnnnnnnnnnccacgcgtccgaattacttcaccgtgaagaagctgatcaagaagaggaaaggactgacgccgcgcgagaagacggcgcttcatgactgtttggagactattgatgagacgctggacgagctccatgaaacggtggaagatctccatttgtatccaaccaaaaaaactctgcgggaacacgccggagatctcaaaacactaattagctccgccattaccaaccaggagacttgtctcgacggcttcttcatgacgacgcccataagcaagttcgtaaagccttgttgaaggggcagatacacctagagcacatgtgcagcaacgctctagcaatgatcaagaacatgactgatactgacatagccaacttcgagccaaaagctaaaataacctcaaacaaccgtaagctcaagggggggga

SEQ ID NO: 121960 - DNA, 267 bp, Arabidopsis thaliana columbia
caaaaaatttatggacgggggaaccccaccccccaccgcaagacccgggaaccttcttacaaaaggtttgcccccacgggggcagagccccccccaaaatataatataattttgcgccccgcgcacccagaaaagaaacacaaaagagagacttacccccaaaaacccgcgaaacccggggaggaaacctcattataacccgcgtgagtgaaaaaaaggaaaaattatatcaaaaagcacggcacccatgatatagggtcaagccct

SEQ ID NO: 121961 - DNA, 517 bp, Arabidopsis thaliana columbia
aggagacgtttgttcttataccactcactatttggaaagccggcccgcctgccggtaccgggccggaatatccgggtcgacccacgcgttcggttggggtagattaaggccgtcccccgaaagggaaacagagatatgtgttgggggagctctttccacacagggacaggcttgtacggtatgccccgccttaacctactaaaacaagggcttgcctgtataagcagcctccacctacccccttttttgaagggggggggtccaaaattcacgattcttctaaacaaaaaaaaaaccctccacccttaaaaaaaacagaacaaacgggcgcctatttctcgcagcatcccagtctatcccgccgctatatgtgaacctaaatagattttaccagacggcccacctaacaacaatcacccctggccattccgcctacaccagaggacagcattgataaaactcctcgcgatggccgaaactctaagacaacgttcggaggtaccccgcatacctcgta

SEQ ID NO: 121962 - DNA, 422 bp, Arabidopsis thaliana columbia
  unsure (1)..(422): unsure at all n locations
gcgccccggcccannnnncggccgcttttgtgtcactctacaagactatgcgtcgcacgccccgtccgcaagcttggatcctatatagcggttgcccttttgggaggaggccttttattatttggggtttttccacgcccttgctcttcggggctccctctctgttcgggcggcggggcggacccgagcccggcgcgaaaaaaaaaaaaaaacccaacgtctttgggggcggcacccgccacaatcttatcctctgcggctttttttcgggtgtgtgggccccccttttgttttttttaaaaaaaaaagggggtttttttttttctcccccccgagaagccgcgttgtttttctaccacccgcccggggcccctccacactcttccctttctctatctctgtcgcctactaaatactccgca

SEQ ID NO: 121963 - DNA, 493 bp, Arabidopsis thaliana columbia
atacgactcactatttggaaagctggtccgcctgcaggtaccggtccggaattcccgggtcgacccacgcggccggggacatgttatatatgagtcaagtgaaagaaaaccatatgcagtcacagcttttagtggaactggggaataaatctggtgtgatgcgcttcataccccaagggcataagaaggctttgcggggccaaaataccggggaaactaaaaataacttgggggtgtgaaaacatggggggactgagggggaaaaaacacacttttggttcttttacagggggcccccctggtgaggcaaacttctaaacaaccccctttttaagagggtctcttaatttcaaccctttttatatggaggggggcgtttttggtcggcatttttcgaggaaattttttgggccacctttccccacgtgggggttttctggaaaacaacgtggaatttttgttgggacctctcccgcgcgggcgcaatttgatt

SEQ ID NO: 121964 - DNA, 594 bp, Arabidopsis thaliana columbia
acaacatacccccagtagtagccgcccccgatagtagacaccaatctttttttacccacctcactatttttgcaaagcccggcccccccccgcgaagaacccccgcccccggaaaaatctccgcgcgttgtacccaaagccggtgcggaggggcggcttataaaaacaaacggccccttcacctacaagtagccgcggttcctttctaaccgcagaattgaaacacctaacaatctattttcacacatcaaaaaaccaaccatgtataaaaacactaatccaactcccttcttcgttctaattaccccccaaaatctcccagtgaaaaaatttttttggggggggggaaacaccctaacgacatacccataaaaaacaaccaaccgtctgtcccgcattaccaactcccccaataaaaccggccgaccaaatcaaaaccacacaaaaataaaaccctcgtaaaatacaaaatcaaccaactctccaacataacaccgttaattcccccaccacactaattcaacaacaaccacaccacctacctaacgcgcgccaacacccaataaacctcctaaccaccaaccacctccatta

SEQ ID NO: 121965 - DNA, 607 bp, Arabidopsis thaliana columbia
  unsure (1)..(607): unsure at all n locations
tgcgccccgcgcggtagaaccccncccccgccacgcaaccaggtgtcactattacaaaaaatttttgtgggacgcccccccgccgccagcggggggtacctctaaaagaaggtttgcccccatcgggtttggttcctcataaacaaaaaaagctaacaacaaaccccacgcgcgccccacaacgaaagagataatcgcgctcagaaaggaaggaccagcaaaagagggaaaggggcctttactgaaaagaacccaaaaaacttctaagggagcgaagtctcggacgcgaaaaccaccacaaaaaaacttttttttggggagtgagggagcccacccgcaaaggcacccctctctaaaaaaaaaaaagaagaggacctccgggtcgagaaatcaaaccccaaacaacacgaacttctagaacaaaacaaagccaacgtacccccgccaacccccttcaacttcaatataccaaccaacgaagaggccgcgcccactcaagacctcggaatcggcgaaggaaaacctgtcaacccggacaggaagcgccaagaacccaatcccacaaagaaccagcccaaaaagcccgcacacaatggcgcaccgaacc

SEQ ID NO: 121966 - DNA, 454 bp, Arabidopsis thaliana columbia
  unsure (1)..(454): unsure at all n locations
gggacccccccggcgcaacaggcgggagcggtacaatcaaccaagtttcccagaggggcggagagacccccgcaccgaggaggccagaagaagcccgaccgggcgcatccgacaccagaccgaacgaaaccgcacccccggaagagagacagaccccgacaagacaaaccgtccaagacccagacgaacgcgtagagagaccgcccacgcgaagggcaccgccggacacacacgaacacacgactcttttttcccgggggggggggaccaaacaaaagagccgacgacgcccaaaacgaggaacgaaacaagggatcaggcggaagcggagaacggcaaacgcagccnggtgccaccggccaacacaaggggggcgacaagctgacgggccagacggccaaagccgcacagagaacgtggcaaccgagaaacacgacgcgacgagaaacgcgcg

SEQ ID NO: 121967 - DNA, 500 bp, Arabidopsis thaliana columbia
cacattttttttttccccccacctttttgaggggggcccccaccggaggagcgggggaggaagaaaagcccatttgcaagggcggggggaggcgccaaagcaaaccgaacggcaggaggaaagcgaggaccaagaccgcgcagcggaaaccccaaccaccgcaacgcccgacaggaaatacggacagggcaaaccgcaagacaaatccatagcagagcggacacggggaagcagcgagaagaaagcctttttcaacggagggggcgagcccggcaaagcaggcgtacaagagaaaaacagagacccacctggagaaccgccgagaaccaccgacgccccaaaaacaaccggccgagccaaaagaaacgcacgccggaggaggcaccagaggcgggaaaaaacaaaccaacagagacaaagaaaaaaaagaccagagagaacgcacgccacgcacaaaagcgaataacaacaggcgaacgaagagagaaacaagcggaaaa

SEQ ID NO: 121968 - DNA, 374 bp, Arabidopsis thaliana columbia
acaagagttatgacgtcgcatgcacgcgtacgtaagcttggatcctctagagcggtcgcccttttttttttttttttaagcaaaactcgagaatatatagattttgtttcattgttacttcagatgaaaaatagggtaaagaatggcctgggcaacaaaaaaaatattttttcagttaatatctaaaggctcaccccccctttccaatgggaaatgttcccttttgggtacccagggagggcacatagagagggacaacacacaccctccccccttcctttttttttacaaggccgccaattcagggggagtgcgggataaaaaaaattcttcccccatggtcttttaaagggcggggggaggggggttttttt

SEQ ID NO: 121969 - DNA, 528 bp, Arabidopsis thaliana columbia
ggaaaggtggtacgcctgcaggtacccgggccggaattaattaccgggtccacgagctcactagtcggggggccgccttttttttttttttttggggggagaacgctgtgggttcccaccccgcggaagagtcaaatcaaaacacgggctttaaaagggggggcaaaacacggaaaaatattttggcccgggaaccacttcaaccaacaaccgataacattgaaaggaggggggccactcacttccttaactatttttgggggaacccccccgcaaaggcaggcaaacctcccagggggggggaacccccccccggcttaaacgaaacaaacctcatttggggccaggcccaccgggttttttatacacaacccgggaaaatttttcccaaggggggcggccacactccgcagcgaaagggggagtgcctccgaagaaggaggatcaaactttgcccgagaagggacagggccaacacagagaggggggcccctctattgccacccccttcaagaaaaaacatcttaa

SEQ ID NO: 121970 - DNA, 464 bp, Arabidopsis thaliana columbia
gccgcgtacgtaagcttggatcctctagagcggtcgccctttggtttttttttttaatgcaaattataacattctattgatgataaaggaaagaaaaaccccacaagaaatgtgagaaaaaatggcgctaatttatcagccagatattatatttagaaaagtctcaatccaaagctcccacatagggttcttcattactatggggggggagatcatcctcatgaacaatgatggctaatccccccttttttttcctttctttaaaaaccttccttaggtaaataaaaattctttagaaaaaaaagggagagggaccccttggaaaaaaagcccacacctaaggtcttatacacaacggggcaaccttgggtcccttttaattggggaatgggcatttgtaattttaagcgggaaggggttttgtccaaagaggccaaactttttccctcgactgggggagaaac

SEQ ID NO: 121971 - DNA, 439 bp, Arabidopsis thaliana columbia
  unsure (1)..(439): unsure at all n locations
tccacacctcccattacctctcccatcacacttcttactcaacatctatatactaaccatccacccctcttactcactcccttttctaactcttatttttcttccatcgcgggggtggggtcacccctcacctatcgcctccttctctaaaaaataaaaaccttcctactctcctcgttcctcccctcccctatcccactcccctcatattaaacatatccctcatttttatcacccatttctatctctcccctccacaaatatctttgactatataatacatccccttcccctncccctctctattctactcctcacgtccctattcttttctacttcctcccacctctattccattaccttcgccccactctcttattatcttacactttactatttctcctctccccattatacttccacattcttcttatatatc

SEQ ID NO: 121972 - DNA, 507 bp, Arabidopsis thaliana columbia
  unsure (1)..(507): unsure at all n locations
nnnnnnnnnnnnnnnnnnnnnnnnnnnnnnnnnnnnnnnnnnnnnnnnnnnnnnnnnnnnnnnnnnnnnnnnncttcgggtttttttttttttttttttttttttttttttttttttttttttttttttttttttttttttttcaacttntttttgaggggggaaagggcccaaaaacatattttttattctcttcccaacaaaaggtcccatgggaaaaatccccccccccccggtgggggaaacaaaaattcccccccccttttttttttttttttttgggccccccccccaacaataaaaatcctttttagcttggaaaaataaacaaaatttccggcccaaaacctttccgggttttttatcacaagcgccccccccccaagggaaaaaaggtctttcccccctttttttatggccggagggaaaatggaggggttcccaccacctaaaaggtggggggctccccccaacaagggggggcccaaaatttaaagcgcccccccc

SEQ ID NO: 121973 - DNA, 483 bp, Arabidopsis thaliana columbia
atgatttatggtgacactatagaagagctatgacgtcgcatgcacgcgtacgtaagctcggattctgtatagagctctgcctctctgttgcgctcccaggttctacgccggcgggaaggccatgtggcacttggcatggtacagtcacctttctcatctacacctactcacatttagaacctaacatctccttccgtacaacatgatgaagatctctatcctatattaccaaagaatttaaaggggggggaccagatccttcccagagatcgaatgattatggattccagaggatcagcaaacgtactgtgtaaggataaagacaaagctaacaatatcaggggcaaggcttgctggattatcctgttatgccacaaaaattcctgttcgctctggcgaaatatgcggcctactctggataattttcccgggggaagatgtgccggccctaactctctgagcccggaacacctaagaatccgg

SEQ ID NO: 121974 - DNA, 497 bp, Arabidopsis thaliana columbia
atgatttatgtgaactatacaagagcttgacgtggcatgcacgcgtacgtaagcttggatcctctagagcggccgccctttttttttttttttacacaaacccatatgtttcattagattgattagagaaagaagtaagaggaagaggccttattagagcttagtagaggctggtttaagaaagatcaaacatcactcctagcacacaaacacacaagaatacttcaaaacaaaatggctatgggggggcttaaaaacatattttttcaaatcatatattatcacataaaagggcttttcctagttcctgcttctgcacttatccatcacccttggaggtaaacccatagcctcacagctcttaatgattctcagcctcttgcaggagcatattaacattttcccaagggacatctccaccagcatcccagcactgtgtttatcttattagggtacaacatactcaaaaccacgcaagagatcaatcaagccacttt

SEQ ID NO: 121975 - DNA, 517 bp, Arabidopsis thaliana columbia
  unsure (1)..(517): unsure at all n locations
aannnnnnnnnnnnnnnnnnnnnnnnnnnnnnnnnnnnnnnnnnnnnnnnnnnnnnnnnnnnnnnnnnnnnnnnnnnnnnctttttttttttttttaatacagaataaaatttatggttttctaaaagaggaccaaaactccactcttctaccaagtggtccacgtccttccatattcctccaatgattcaaatgtaaagtttaagaacaaaatgtataagctgtctttgtagagcttgtgggatcatcagccttgtttttgcagcttgttagggcaagctgaagaaagatgacctttttctccgcactcgtaacagtttctctttttgatcttaccagtgctaaccgcagatgttaagcttgcatcaatagctccatttgtcacatcaatggatatcggaacaggagcatagctctcatccatgaacgaaccaccattggtttcaggggctcttgtttttttttggaagactataacttggttacctgaggcgggcctgccttaacagtttgggga

SEQ ID NO: 121976 - DNA, 516 bp, Arabidopsis thaliana columbia
  unsure (1)..(516): unsure at all n locations
annnnnnnnnnnnnnnnnnnnnnnnnnnnnnnnnnnnnnnnnnnnnnnnnnnnnnnnnnnnnnnnnnnnnnnnnnnnnnctttgttttttttttttttttttttttttttttttttttttttttttttttttttttttttttttttcgggaacaaaaaaattttgggaagctttggacattgaaggtttggacccttccaaaacgggggaaaggaacccaattaattgtggaggttatttttttcttggggtttaaaaggaacctaccccttttgttaagagataaaggcctttttaatttaaaacaactttaagtttccgaaaagaactttttaagacgggttttaattttttatccccattttttggtttatcttttgagaaaattaaatatacgtggcccagtctatgggactccttacccacgtcggtttttgggggggggggcccaaacttaaatgggggggttttgttttggatttaacccagacttttttcaaaaaaggcgttacccaa

SEQ ID NO: 121977 - DNA, 519 bp, Arabidopsis thaliana columbia
  unsure (1)..(519): unsure at all n locations
annnnnnnnnnnnnnnnnnnnnnnnnnnnnnnnnnnnnnnnnnnnnnnnnnnnnnnnnnnnnnnnnnnnnnnnnnnnnnctttnttttttttttttttttttttttttataccctcataataatttacatggatacattatcacaaaagagcttttatatgtgctttcaacatcaatcattttcttctaacaagccaaaaccaaaagaaaaaaaggaataattttacataatggtacacaactgcaggagaaatatgctaagactgatatatatatgccccgatctcacctgaatcaatcatagccagaggaagagtatttccctgcgccaggaggtggcgctggtcgtgggaagaataattgaattgttcatctccaagtttgaattcttccacgtaggggctttgtggttcctgaggaccagaggtggagggagatgcttcactggattttggngatggagaagtatcctcatcggggttctttccatttcccgttaactgtggagggtcactattt

SEQ ID NO: 121978 - DNA, 476 bp, Arabidopsis thaliana columbia
tttacctaacccaaccacaaccttataactatcccaaccactttttacttccaacccactccacaaacactttatctattttctcatcacattacccccaacaccaaatttttttaacgggggggggactaccacaggtgctcaaaaaaaaaaaattaaatccctcccttctcttccatctcaattcatttccgtcttctatctacctatatccattacctaccttcccccccttcttttactataattccgacatcaacaacacatttattctaccatataccgcatcccaatacctaccttatacaacatccctctcccacatactaccgttacattaaatcaccctcacctaaatcaacaatccaaaccacaattaaaccaatccatacccccgtttctactattcaaatctattcgctcctagcattaaaaatacttaacaacattatttatcaataacacagttttcacat

SEQ ID NO: 121979 - DNA, 534 bp, Arabidopsis thaliana columbia
  unsure (1)..(534): unsure at all n locations
nnnnnnnnnnnnnnnnnnnnnnnnnnnnnnnnnnnnnnnnnnnnnnnnnnnnnnnnnnnnnnnnnnnnnnnnnnnnnnncttttttttttttttttttagagattaaattttgtttccctttctacgcttattagaggtctcgaaataaaagtagttgattgtgaatagaaaataaatgcgttgtcgaatcaaaagataggaaatatttcatcttctggccacactaataataacactttatggaagggtggctcccaaagggcctttaaagttctaagaagatcgaccccttcttttttggtcacaattggagattgcaccggataaccgcagttaatatgactcccccggggttatttctttttggtggcaaaccaattttttttcgggtccagtgaacccccctccggcgaccttaaaaaggggggcggcttttggactttataagctttaaaccccggtgaaaccttgggggctcccccatactacgtttttgcccagattccaattggggttagaaccaccttttatac

SEQ ID NO: 121980 - DNA, 493 bp, Arabidopsis thaliana columbia
aggtccaactatacaagactatgacgtcgcatgcacgcgtacgtaagcttggatcctctagagcggccgcccttcgtgtttgtttttttttttttttttttttttttttttttttttttttttctttttttttttttgccaaaaaaggacatgggtaaaggagccccccccacaccacgcccggagggaaaaaagccaattcgggcttttacggggcgattggacgggcaattcccgggggggggacgctcgggcagggttcacaacgagcaaataaccttgacaacggagtggcggggggttcccacgctgaaaaaaccctttccaaagacccacctttctacgtatttataaggaacgggggggaagggccaacagtcccgggcggctgtccccaaagggggaaaattccggaagcccccgcggcggggggggggcggggttaaaaatttgaaggtcaccccgggctcggcgctgggccaaaaatcccttt

SEQ ID NO: 121981 - DNA, 496 bp, Arabidopsis thaliana columbia
  unsure (1)..(496): unsure at all n locations
nnnnnnnnnnnnnnnnnnnnnnnnnnnnnnnnnnnnnnnnnnnnnnnnnnnnnnnnnnnnnnnnnnnnnncttttttttttttttttaagatcagaagaaacaaatcaaattaatcaatcaaatccaagtctcctaaattactgtatgatttccaccaaaattcgatgtccaaaagatgataaaccctaaactcaagtagagacaagaagccaaccacttttgccttatacctcctaacatcacctaacctgagtgagtttttgttgtcctatagatagatgctcagattaagcttttagtttcctcagctaacttgttgctgatgaccaccgtacattggatagtaaggtgcagcaggatacattctcgggtcaggttgaggtaccatgtatccatacccattgtaaactggcctccataggacggatcaccccatgggttccatacctatctctaggctggttattggctggattacgggccccaggaaagccg

SEQ ID NO: 121982 - DNA, 503 bp, Arabidopsis thaliana columbia
tttgacgtggcatgcacgcgtacgtaagcttggatcctctagagcggccgcccttcgtgttttttttttttttttttaattttattgttatatcttgtgctttcttctaattatgacggacgcggtacaaatcaaactgtgtctggaacacgtgacaaagccccacaaaataaaaaggagagcgaggtcggttatgtaaaaaaagccatctttattcggggggggggggaaacccctttacatttcaccaagaaaaatctttggattgaggacgagagaaataggggctttcttgcccacgctgttgttggggtcccgtttagggggggggtggggttgggtaaacccccaaccatgcatcctattgggaaacacgtttcaataaacagggggttggacagacggaaaacccgttaatttactcatcccgcctttgatagctgcctgccaagtgggcgcaccgtttcctataagaacgggtccaaaagaggccattaaaggga

SEQ ID NO: 121983 - DNA, 520 bp, Arabidopsis thaliana columbia
gtgtcactatagcagagctttgacgtggcatgcacgcgtacgtaagcttggatcctctagagcggccgccctttgtttttttttttttttttttttttttttttttttttgtattttattttttttttattttttttttttttttttgttttttgggtttttggggggcaacaaaaggaggggggcccccccttttttttttttgattttccccaagcctttgaacatttttcttcgggggggaaaaacgagttgggtttttttgttgggaaaggcaaaaaggggtgatcttggtttttttgcacgggatgattacaaataaatttttggggggggaaaaaaattttctcaacagacatttttttttggggcgggttttgaaaaatacttcgggggcccaatttccaaagagaagggcgcttttggcaacccttttttaacacccccaggaaggcccacgggggggggtgaaacaaattttcttttccctccccaaaattgggagggtttggggggtgtc

SEQ ID NO: 121984 - DNA, 492 bp, Arabidopsis thaliana columbia
  unsure (1)..(492): unsure at all n locations
annnnnnnnnnnnnnnnnnnnnnnnnnnnnnnnnnnnnnnnnnnnnnnnnnnnnnnnnnnnnnnnnnnnnnnnnnnnnnctttttttttttttttttaagtttagacaccgacataactctttctcttcttcactaattacgggcttacaatacaattggttaagtagtagaaaataaagagtggcaataacattaaaaaagaaaaaaaagggttttagggtggcctaaagtttccagcacacctggtggtaggatagagagtaataagtaataaggccctccctcattgccaagtagaatgggcggagaagtaaccgagaaggcccatagtggggcattgatataagtcgggggctcagactgctgaaagtaaggtcttgaatccgaaaagcatcagtgacattagggccaccgactacagcaccaaccaaaaggtttgggttaggatttgggcttaaaaaaaagagagagctttttttgcacctatgtgg

SEQ ID NO: 121985 - DNA, 511 bp, Arabidopsis thaliana columbia
  unsure (1)..(511): unsure at all n locations
tgnnnnnnnnnnnnnnnnnnnnnnnnnnnnnnnnnnnnnnnnnnnnnnnnnnnnnnnnnnnnnnnnnnnnnnnnnnncttttttttttttttttatccataagaaaaacctagatatgaaattcaaacaagttcaacataagatccacaacatccaaaaacaacttccaaattccaaaaaaaaagcagtattcaattcaaaatgatagagatcgagatgaaaatcattcctgagctccttcgggtggggaaacgtaggggagaccacacttaccacagtagtgacgatcgaaatgactcgccatgaaaggcccagcaccacaggttgggttagggcactccttcctcaaacgctgaaccttacctgaaccatcaaccttgtagaactgaaaaacagcgagctttgccctttttgggcttgtggttgggacttcttaggggggggggaggggcttttttttctttttttagcacctccaccgggaccaaagacaaggggaacccgttatttc

SEQ ID NO: 121986 - DNA, 514 bp, Arabidopsis thaliana columbia
  unsure (1)..(514): unsure at all n locations
atgnnnnnnnnnnnnnnnnnnnnnnnnnnnnnnnnnnnnnnnnnnnnnnnnnnnnnnnnnnnnnnnnnnnnnnnnnnnctttttttttttttttttgagctataaaacggcagaaaagttattaatttgaaccttgaacttagtaacagctttgaagcaaagaagagtttaatacatgtagaagatgattaatataatacaggaatataaacaatgtgcatcattttagttgccacaagacgtattgagatatctagagacactgcgcaccaaatcaggacaatatgagacgaagtatctcaccagaatacttgaacgatttctcagtctcttccaaacaatgattcttttcttctctagtccactcctctgcaaccttgttcagtttctccctaacgttctgcaacaattgagaaagttcgccgtcccatttgtagaactcgagttctttattatcgagtatccggtctgccacctttttgccaatcattcgtccaccagcactatgagcaaa

SEQ ID NO: 121987 - DNA, 470 bp, Arabidopsis thaliana columbia
  unsure (1)..(470): unsure at all n locations
nnnnnnnnnnnnnnnnnnnnnnnnnnnnnnnnnnnnnnnnnnnnnnnnnnnnnnnnnnnnnnnnnnnnnnnncttttttttttttttttttttcgtttagtacgagatggcttcacacctcgcggggcttccacctctcgcctatcgaagttctgttctaaaacctgttccgagaacttgtatagagaaggatttcccgctaagcagcagttcttccataccaacttatctgcccggcgcnnnnnnnnnnnnnnnnnnnnnnnnnnnnnnnnnnnnnnnnnnnnnnnnnnnnnnnnnnnnnnnnnnnnnnnnnnnnnnnnnnnnnnnnnnnnnnnnnnnnnnnnnnnnnnnnnnnnnnnnnnnnnnnnnnnnnnnnnnnnnnnnnnnnnnnnnnnnnnnnnnnnnnnnnnnnnnnnnnnnnnnnnnnnnnnnnnnnnnnnnnnnnnnnnnnnnnnnnnnnnnntcccccg

SEQ ID NO: 121988 - DNA, 302 bp, Arabidopsis thaliana columbia
  unsure (1)..(302): unsure at all n locations
nnnnnnnnnnnnnnnnnnnnnnnnnnnnnnnnnnnnnnnnnnnnnnnnnnnnnnnnnnnnnnnnnnnnnnnnnnnnnnnctttttttttttttttttttttttggaaaaaccgttatattttattagcacgcgtagccttaaattgaacatacgtatttcctaaatcattgcatttgaagacgagaaacaaaggctgagcggagggcccaaattgattctgttgttgctcaaccatccgaaggcgggagttcgtttagagaacatacccgcgggaacagattacatcggagaagctcgagct

SEQ ID NO: 121989 - DNA, 482 bp, Arabidopsis thaliana columbia
atgaattatgtgacctctacaagagcttgacgtcgcatgcacgcgtacgtaagcttggatcctctagagcggccgcccttcgtgttttttttcttttttttttttttttttttttttttttttatttttttttttctttttttattgcctttttttttttttttttaaaaaacccaaaaatttttttttttttccggggtggaaggggccacaaacaaaccacacaaatggcccaaatttaaagaggggggtttttttaacccccggtttttcgcctaaagtaaaacaggggaggggtgtttaaaaccgcctcctcttaaaaattctccccaccgggtgggccgagagtgttttttcttttggccccaggatccgggggagaaaattttccacccccactttgggaaaaaaaaaagaaaggtccccccctgtgggaacggttttttttataaaaaaaactttttttgagaaatgcccccccc

SEQ ID NO: 121990 - DNA, 406 bp, Arabidopsis thaliana columbia
  unsure (1)..(406): unsure at all n locations
nnnnnnnnnnnnnnnnnnnnnnnnnnnnnnnnnnnnnnnnnnnnnnnnnnnnnnnnnnnnnnnnnnnnnnnnnnnnnncctcgcgtttggtgtttttttttttttttttttttttttttttttttttaggggcaaaacaataaccacttaataaatcatataatggggcatgtgctgggcttaaagcttttgacaacaaacaacgggatttttaacttttcaacatataaccatcacttttaaacgggggtggaccaaacaaatgaaaaatctggggggaaaaatacttaatgaaaggaatgttggaattaccgctcccccacaaagaggaatttacactttttccccattttttttcctttttgggttagaggggggccctacttttttccccttcaaacttaaa

SEQ ID NO: 121991 - DNA, 527 bp, Arabidopsis thaliana columbia
  unsure (1)..(527): unsure at all n locations
nnnnnnnnnnnnnnnnnnnnnnnnnnnnnnnnnnnnnnnnnnnnnnnnnnnnnnnnnnnnnnnnnnnnnnnnnnnnnnnnctatgttttttttttttttatatttttttttttttttttttttttttttttttttttattatatatgttggagtagtttttggtgaataatgttgctctttttgttgaaaggattaaagggggggaaaaaagaaaaagtttaaatttttttatgcggtatgacaaagggggagttctcaaactttttgggcgaaaaataaatccaaaaaaggtggcgcggagaaccccggaaccttataaccataaaaaaatctggggggtaaaaaacacaacttaatggggtgttttatctacaggatggatgtatccagggggggaaaaaaagcccccaaatttcggccttcaaacactaatcttatattaaaaaaaaaaaaggccccaacctggcgcaggggggaggcctctttccatccgcaagaaaacgcggtcacactacgttgggggggg

SEQ ID NO: 121992 - DNA, 496 bp, Arabidopsis thaliana columbia
  unsure (1)..(496): unsure at all n locations
annnnnnnnnnnnnnnnnnnnnnnnnnnnnnnnnnnnnnnnnnnnnnnnnnnnnnnnnnnnnnnnnnnnnnnnnnnnnnncttttttttttttttttttttttagggataaattattcatatgatatattatgccatgtcccataatagaaagacatagtgacaaaaattatatagaaaaaacaaacgacgtgacaccaccaaatactactcctagctctatctcccctttgaagatggctataggggcttctataacacactcaccgacacatcacacacacacaaatccacatcacaagaaggaagaggagagaacgcaatagccggtgattcggatgtacttttcttactgtttccatcctacgggcagcagtcaccggacgcgtgggttcgacccggaatttcggaccgggacctggaggcggaccagcttttcctatagtggaggcgattagagcttggggaaataagggccatactggttccctggggaa

SEQ ID NO: 121993 - DNA, 533 bp, Arabidopsis thaliana columbia
  unsure (1)..(533): unsure at all n locations
atgnnnnnnnnnnnnnnnnnnnnnnnnnnnnnnnnnnnnnnnnnnnnnnnnnnnnnnnnnnnnnnnnnnnnnnnnnnnncttcgttttttgtttttttttttttttttttttttttttttttttttttttttttttttttttggggcaaaaaataaacggaaagaggggttttttttcccgccccctttttgggggaaaagggggggttttggtgttttcttttaagaaaaaccctttttaaaagggggtgtgcactttttaaaaacacttaatgtactggaggaatgcccctccccttgggggggggaaaagggatggttttttggttgggcccctccctttaaaacccctttttggcccctacaaaagcccatgaccttcttttttaaaaatttttgagtacattttggtggaacaataccgggtttttccccgccctttggaagactcttgggccaacttaggtttctggggggagggggggggggtgggtcccccggcggcggggcgcccccgggtggcacaaggaggg

SEQ ID NO: 121994 - DNA, 493 bp, Arabidopsis thaliana columbia
atgacgtcgcacgcacgcgtacgtaagcttggatcctctagagcggccgccctatgtgtttgttttttttttttttatattttttaatattttgtttttttttttttttttttgcttgggggcccaagagattataccaaccttttttttttaaagttcggggacaaaaattacaccaaaaccctttagaaaaaatttttaaccacatttttgggagggggggggccaaaaaaggccgtaggaaaattaaaggggcacccggcaccccaaaatgtttttttgaagaaacccacacggcgaaagggctttttgatgtgatcaacggaaccccgacactaaattttgtgtgggtgacgaggacagaaacccacctaagaaatggtcggggattaaaaaaccgcaaaaacagcaactgggggggagaaaaggacacacctggcctagggggatgatccccccggggagagaagccgaaaataaaaccgctttcggg

SEQ ID NO: 121995 - DNA, 471 bp, Arabidopsis thaliana columbia
ggtgcactatagaagactatgacgtcgcacgcacgcgtacgtaagcttggatcctctagagcggccgcccttcgggttttgtttttttttttttttttttttttttttttttgtttttttttttttttttttttttaaataaaaagattgggacatgtttacttattattacatcgggatacatgataccccacaccttccattaaattatacctcctttccattttttttatgcggggcccccccccaaccccaaatcaacgaagagcccacttttaaattaaataactcaaaggccctaacatcataattaaagcgtgaggggtgaacacacaaaagaagggggggggccctcccagggagggtttaaaaacaccctttttttgattaaaccaaaagattttttttttatttgggtccggcccaggcggaaacttacccccccggccccggggttttttaattttttca

SEQ ID NO: 121996 - DNA, 509 bp, Arabidopsis thaliana columbia
  unsure (1)..(509): unsure at all n locations
atagaagagctttgacgtggcatgcacgcgtacgtaagcttggatcctctagagcggccgcccttngggggtttggtctttttttttttcttttttttttcgcaaggagagcaaacgatatatatccatattcagatctaaatctcaaccatgtatgaatgaaaagagatccgattgaagttagactgatgatgattgatcacatttaagaaaaaaagatttcttagggggggggttatttttattcccgaaatccagatctaaaatttggaaaactccctaaggtgaaagggggagcgggggttcctttggttgtggagggaaaaaaaaacagggattattttctgaaaccttttaaaataaaaattccattcgccgtaatattccacggggcgggtcttacgggtccagttttaacaaagaaaaaaatcccgaaggggtaaacccctggggaacctcaagggggggagacacccgttttttccctgtccgaaagatccaaccgtcct

SEQ ID NO: 121997 - DNA, 534 bp, Arabidopsis thaliana columbia
  unsure (1)..(534): unsure at all n locations
agnnnnnnnnnnnnnnnnnnnnnnnnnnnnnnnnnnnnnnnnnnnnnnnnnnnnnnnnnnnnnnnnnnnnnnnnnnnnnnnnncttttttttttttttttttttttttttttttttttttttttttttttttttttttttttttggggggcctggacattgacacaaaacaattttcattatttgaacaaatgaacaagagggatttttaagctaaaaatttgggagggaaccaaacagattttttataggggcatccaacattacagctcatgaatctgaaaacttaaaattcaaagggctatcatgaatccttggttctttcttgctggatttttggctctcccgcaaagaaccccaatttgggaaaagaattcaaagaatcttgtctccgaaaaaactttaaaatttggaaaggaaaaaaaaaaaactaatattttttttctctcactgggagggggttcctaaaagctgggggtgaaaaaaccccctcaaaaaaaaaaagaaacttgggttttagattttaaacgggaat

SEQ ID NO: 121998 - DNA, 512 bp, Arabidopsis thaliana columbia
ttgacgtggcatgcacgcgtacgtaagcttggatcctctagagcggccgcccttcgggtttgtatatttttattttatgttttgtgtataatcttttttttttttagaaaacatatgctttgggcacattatatgagccttaactggatagtatagaactttacttttcacgtaccgggaaagggttgtctttgggaagaaaaaaaatttttttcccggggggggggtaatgaggtccgtgtctttaaaaaaaatgcctaaggggaataccaaaaaagaaggaaattgggttaccatcttctaacacacacccttcttcttgggtacaaagcaggggagagggccccgacgggggcgggtcttctttcaaaataaaaactcgagaaaggggagggccccccccccccggggtgtttgacgatcatccttaagaaaaaacatgaagcggggggggggggtagttggaaggcccggcgccggttcatcggttctgtatttgccatcgagggggc

SEQ ID NO: 121999 - DNA, 480 bp, Arabidopsis thaliana columbia
  unsure (1)..(480): unsure at all n locations
nnnnnnnnnnnnnnnnnnnnnnnnnnnnnnnnnnnnnnnnnnnnnnnnnnnnnnnnnnnnnnnnnnnnnnnnnnnnnnncttngggtttggtgattttttttttttttttctttttctttttttctttttcgggaaaaaggtttcttttttctggcgactattgaggggcaaccatattatttggaaacataaccatacagaggtaaaaaacaattactccgaaggccctaggggtattaattgggggggggtcaaccattcatcccaagtaaccaaaagccttaaccccttggaagggggaaacagggttaaacataagccttagggttcaaccggattccgaggaaaatgggtgcaacaccaccaaaaggtcttttcccatttccatgttggaaggggccattgggtccccccttaacctccccctggggttctttttaaaccaagacggggagcgcgctttttaaactccataaccc

SEQ ID NO: 122000 - DNA, 517 bp, Arabidopsis thaliana columbia
  unsure (1)..(517): unsure at all n locations
tggnnnnnnnnnnnnnnnnnnnnnnnnnnnnnnnnnnnnnnnnnnnnnnnnnnnnnnnnnnnnnnnnnnnnnnnnnnnnctttgttttttttttttttttttttttttttttttatttttttttttttttttttttttgtgtttttttttttttggttcttcttttgggggaagggccggagagactttaaaaacaaaaaaaggactggcaaacattttgagggccacacaattctgtttttaagggggggagggaccccttaagggggtcgacaaaataagagcctgcgaaaagtgggaggggaaaaaaacccgggtcacggggacaaaggactccggccctttttgagtccgccgacagttttgttggcaacggcttacttccaaaaaaaaaaaaaaaccttttcaggcccgaagctgtatcatggcaaacacgcaacacaacggagtacgagggggggccttaccccggatgggaccccccaaaccgcaatgcccatcccgcttacaaaaaaaa

SEQ ID NO: 122001 - DNA, 511 bp, Arabidopsis thaliana columbia
  unsure (1)..(511): unsure at all n locations
nnnnnnnnnnnnnnnnnnnnnnnnnnnnnnnnnnnnnnnnnnnnnnnnnnnnnnnnnnnnnnnnnnnnnnnncttcggggttgggttattttattttattctttcttcttatcaagactgcgaaaaaaacacaaactcttattagtttcattggggtgtacatgaaccttgctaataacaatagaatccatgaataaatctctctataagcaggggaaactgaaagccttttcacaggggggggagaaggaacaacttaacatctaaaaaacgggcttatgggctaaggattcttcaacttggttctgagctttatagggataagggaggcttttggataaacgggacgtttggggttataaaaaaaatgtttttttccacccatttaacaattttgaaaaaagagacgggggaacctttttaaaaaatggatgatttggggccttaaattttttaaccctttttcaaaagccttttttataaactccacaaaaaaatggggggttttttt

SEQ ID NO: 122002 - DNA, 417 bp, Arabidopsis thaliana columbia
  unsure (1)..(417): unsure at all n locations
nnnnnnnnnnnnnnnnnnnnnnnnnnnnnnnnnnnnnnnnnnnnnnnnnnnnnnnnnnnnnnnnnnnnnncttttttttttttttttgggtctactagggggttttcttttttcacattgaacaaagagacgattcgtgtctactacataaccatttaaagagcaaacatacacatgctgtgggctgctccctaataataaacaatagagataagtgagagagaaagagaacataatgcggtcttgaagaattgaagttaaagcttaatcccacgcactagccactccaggaccatacccttggttaggaacggttccatatcctccaggaccatagtaagccccaccacctctaccataaggggcataaccaccacccnggaacatttncatatccaccacctgggacggggccgt

SEQ ID NO: 122003 - DNA, 526 bp, Arabidopsis thaliana columbia
tagaagagctttgacgtcgcatgcacgcgtacgtaagcttggatcctctagagcggccgcccttcgtgtttttttttttttttttttttttttttttttttttttctttttcttttttttttctctttatctttttttcgctgaaagaaccccatatttgggaattaaggaaaatattccaatgtgtctttttggtaaaaaaaaaacaaattcctttttatttaaaaaggggggtcttttaaaaccttttttttttttttttgtaacccaaatccctggtgaaaaaaaaaaaacccccttttggacaaaaacaattttgagaaaaacaataacctttttcccctttctttttttttttggactttcttttggaggttttttttaaacacaaaaattttttccccaggaaatataaatatttttgggaacccaaaaacaaggggtaaacccctttttgttccgtttcacccaaaaaccgcctgaagggcggagttttttttttccaaggtgaattttgttttgaacc

SEQ ID NO: 122004 - DNA, 487 bp, Arabidopsis thaliana columbia
  unsure (1)..(487): unsure at all n locations
gtgnnnnnnnnnnnnnnnnnnnnnnnnnnnnnnnnnnnnnnnnnnnnnnnnnnnnnnnnnnnnnnnnnctttttttttttttttttttttttgaaaaaatcggtttggtacctctacaactataaatgattttcccaaggttacaaatatgttttattttttgtaacaaggctacaaagtaccatcaatgatatttgcaaatatatgattccaaaaataagggaagttagcaaagaaaaagaattagtgaggcgaaaacagaacccaaacactagctgtctaactcttgagttcacacctccagggtactgttttgttgtggccataatttagcggatctgccaaatttctccaacaacactggtgggtccctttttccaccactttccctttttccattactattatctcataacatctgcatacgcagggggcaacctatgtgccaatgaaaaaggcatgtttctggtactcccttgccaacctg

SEQ ID NO: 122005 - DNA, 503 bp, Arabidopsis thaliana columbia
  unsure (1)..(503): unsure at all n locations
atgnnnnnnnnnnnnnnnnnnnnnnnnnnnnnnnnnnnnnnnnnnnnnnnnnnnnnnnnnnnnnnnnnnnnnnnnnnncttttttttttttttttaacaaaagcaaaagtttaaattaaagtcattctcgtcctcctccctgcaaacatttttattgcaacaaaccttgggatatataactcaagtctctggtgttaccagatttattgtttgatcaagttcctgataacgtattgcaaaatccctgcgtgatcgaaataagccaactccacctctgtgtcaaatcggagtgtacatgtgaaagatttgccattgtttgtgacgactgttacatcttgtcctgggttgatctcactaacattgtttgggagctcaatggtgtaaagctcctgacccgttaggccaagggtctcagcatcttctcccgccttgaagcacaaaggattgatcccattcccaccaaattgcttcggtgaattcgctccaagctttttgaatcacag

SEQ ID NO: 122006 - DNA, 483 bp, Arabidopsis thaliana columbia
  unsure (1)..(483): unsure at all n locations
cccccctccccgaccccctcccttttcccnntgtaaaggggccattaaaaaaacncncccttttttnaatttttattttctaaaactcacaaaaaaccacacctttttaaaaaacctctctttccttcacacctttaaaaaataaaaantccccacaacccctccttcaggggggaggggaaaaccccaagggggaccccaaataaaaaaacccccaatccncccccctttttctttcccctctcttttctccgtcccctccctcccccccctttccccctctcctccctttttcttcccccctctttttccataattctatctaaatttctcgccgtcgtccttgagcccaacattaaaaaccctctcataccacaccaccaaacaacacctcgtcccactaatctacctaaccctcccccaccactcacacaacccccccaccaccctctaccacacacaacccctttactccatcccccc

SEQ ID NO: 122007 - DNA, 464 bp, Arabidopsis thaliana columbia
  unsure (1)..(464): unsure at all n locations
aatgaannnnnnnnnnnnnnnnnnnnnnnnnnnnnnnnnnnnnnnnnnnnnnnnnnnnnnnnnnnnnnnnnnnnnnnnctttttttttttttttttctttaaaaaataatatataataacaattttaacttcttaatacactttgaaaataataataaatatatacataattatttaataaggataaaacaaggaaaaagttttaaaatttacattggagatataaaacttctatctttgtaagagggatgttttttctaaaaatttatctttgaaagacgaaaggagtatatttttttattttacctaagggctcgttgcaaatgatacattgaagaacatcacgaaaagatttataatagatttccttcatgaaataagcctttttctcttgaaatgatgatgattcgctttgctcatcgacggagaaagaacatttcttataaaaaagattcaaaaaaaat

SEQ ID NO: 122008 - DNA, 503 bp, Arabidopsis thaliana columbia
  unsure (1)..(503): unsure at all n locations
atgtgcactatagaagagcttgacgtcgcatcgcacgcgtacgtaagcttggatcctctagagcggccgcccttngggtttttttttttttttttattttttttttttttttttttttttttttttttttcgggcacagaaaccaaaaataaaatttttgaatcccaaaagaggaatatggatccgaacctcaacaagcaaaatccttcttttggtccaaaagaaaaatttttccgtggggggccgattataaaaggctgaaccaaactatacaaattacaccaaaaggggttcatgttttcttggtaaaaacatcccatccttttttataaaggtgggacccttttaaggcccttcctataataaactttgaaaagaagcttttggcttaaaacttcaaacccatttctttttttttttcctcatccaagggttaacccatttttccaaggggtgaaggaagacccccctaccggggggtccaaaatcgcaaggatttcacc

SEQ ID NO: 122009 - DNA, 470 bp, Arabidopsis thaliana columbia
  unsure (1)..(470): unsure at all n locations
aatgtnnnnnnnnnnnnnnnnnnnnnnnnnnnnnnnnnnnnnnnnnnnnnnnnnnnnnnnnnnnnnnnnnnnnnnnnnnnncttcgtttttttttttttttttttttttttttttttttctcaagagaactaattaaggggcttactatctttcatttttttactggggcactttactttattccacattttccgaagttaccaaacccttttttccttgaaattaattggccgcctatgtaccaaaaccttcaatttatcttcacatttgtaaaaattttatatataaacgggtcaccacaaaaataaataaagcccctccccaacccaataacttggttggccatctcaatatatataagcttaatactccggaagcgcttttcttttatcctggagaaacacctttttactcttcccccgcagttttattgacattttcgntaagccgggaatggtatttaaaaact

SEQ ID NO: 122010 - DNA, 406 bp, Arabidopsis thaliana columbia
  unsure (1)..(406): unsure at all n locations
nnnnnnnnnnnnnnnnnnnnnnnnnnnnnnnnnnnnnnnnnnnnnnnnnnnnnnnnnnnnnnnnnnnnnnnnctttgtgtttttttttttttttttttttttttttttttattctggcgcgacccaatcattgacgagaaaaaaaaaaaagacaattgtcaagagatactcgatgggaataccttcttattaatcatcaaaacaaaaccaaaattaatacatacatattgaaaaaagcaggagaaaacacagatcaagtgtttccaaaaggaccaaaaccgaacaaaggttggtttgtgattcactaaactttggggtatccatagtatatacggaattatcctcggcgtacgtaaccggggccttacttcaccattgggtaaaggtcctccgacatttaaattct

SEQ ID NO: 122011 - DNA, 518 bp, Arabidopsis thaliana columbia
  unsure (1)..(518): unsure at all n locations
atgnnnnnnnnnnnnnnnnnnnnnnnnnnnnnnnnnnnnnnnnnnnnnnnnnnnnnnnnnnnnnnnnnnnnnnnnnncttcgggtttggtttttttttttttttttaagggggaaggggttcatcaaatataccaaatataatagtaataacaagcctaaacaaaaggattagtttcataaattaaaacgaaaagtgggcattatttactaaacaataaagatcattcagacaggtgggattctggggttttttttaataagaccaaacagctttgctttttcagttttgggtgtgaaaaaaaggagaaaataaaacttggtaccaaatcctttatatagggtgaaggtcttggtcagctactatagcttcataaacaggcttggatggaattgatgtttgtttccgtttcatatcaaccaaactctataggtggttacccgacaattacagggatgattccaaatcggaaacgaaaaggttggtattcggccgtttttttggaggtccagtttgaat

SEQ ID NO: 122012 - DNA, 515 bp, Arabidopsis thaliana columbia
  unsure (1)..(515): unsure at all n locations
ggtgnnnnnnnnnnnnnnnnnnnnnnnnnnnnnnnnnnnnnnnnnnnnnnnnnnnnnnnnnnnnnnnnnncttcgggtttgtgtttttttttttttttttttttttttttttttttttttctcacccgcaatcaactatttttttatacaaaaattagcaaaagcaattggtttatagacatttttaaaactttggaaataaagaaaggttgaaagaaagaaaaaaagaaacggggggggctgatctcaatttgggggtcaagaattaacgaacaaccttgaacaagaacaaggaagaagaagtgtaaaaagggggggaaggggggtccacactattcaaaaaattggaactgggccccaaacatattgaaatcaatcaatttaaacccccaaaaaatcagtcggatccaggagtgggggggccagataaaagaaaaaccccctcaagggggggggggacttcagccattgaagggccgactttgtgggaactgggcccgaccggtaatacccgg

SEQ ID NO: 122013 - DNA, 346 bp, Arabidopsis thaliana columbia
  unsure (1)..(346): unsure at all n locations
nnnnnnnnnnnnnnnnnnnnnnnnnnnnnnnnnnnnnnnnnnnnnnnnnnnnnnnnnnnnnnnnnnnnnnnnnnnnnnctttgtgttttttttttttttttttttttttttttttttttttttttttttttttttggggggaaaaattaaaggttttggaaaaagaaaacccaatgttgacttgggaggctaaaaaaaaaaaactgccccaccccgatgaaaacaaacttcttttttttccctgggggggggtaaaaaaccttgacatattaaaatcataagccaaacgggtattgtgaaccattcaaacaagttttctttttcctttgaaaaacataagtttctt

SEQ ID NO: 122014 - DNA, 286 bp, Arabidopsis thaliana columbia
aaaaaaaattctttccaccattcttaaccccaattattctatccctccggtttttccttatctaaacctccttcccctcacaaaaaccttccccccccccttttcctttttcccctaaagaaaaaaaaacctttaatttccacaccctcttaatcccaacccaaaaactttttcaaacccccctcaaaaatatccccggctattttccctccttctccaaaaaaatttcccccccctcctcctttccctcccccttcttttagaaaaaaaaaaatttcttccaccc

SEQ ID NO: 122015 - DNA, 529 bp, Arabidopsis thaliana columbia
  unsure (1)..(529): unsure at all n locations
atgnnnnnnnnnnnnnnnnnnnnnnnnnnnnnnnnnnnnnnnnnnnnnnnnnnnnnnnnnnnnnnnnnnnnnnnnnnnctttgtgttttttttttttttttggcttatcatatcaacattctatttctctttttttcttactgaaagggctatctgaacactaaagggtggtattcagttcctctactcttttggtttaagtacgtgtagagtttgaagaggcaaatgcaatttctttcagatacttctgctctgatcgggtcattcttttctgaaacattggccattcccgtttacatctctctcttaccccttggaacgcggttttcccttcctgcgcggttccctggctgcctaaagaaggaatcttttgatgaatgatccattgagaatccacaacaccaatcttttgatgtgcaggctcgacgcattttttttagcgcaaaggaaagacccccaaccgtgaaccaagtcatttctgaatcatatggcacacacaagggcctggcttttctaaaaaaaactggag

SEQ ID NO: 122016 - DNA, 487 bp, Arabidopsis thaliana columbia
  unsure (1)..(487): unsure at all n locations
gcccccccccctgggggggcggccccttttccccggggagaggggcggaaaaaaaaaaaaaatccccaacccccttttttaaaaaaaaaaacaatcttaaaaaatttnctcctctatctcccttctaataaaaaaactcccccaaaccaaattattttcttctttcccccccttctcctctctagggagtggggcaaccaaaggggggggcctaaaataaaaatccccatactcccaccccgcccggccgcccccgccgcccctctctcccttcgcggggggatactctctagccctttctttaggccccttctcccctccctcgcgcccagcatgagggaattttcccatccaaacctttccgcccctggggcccggcccacacaaaaacgtgggccccccgcacacttccttccgcgccgctccacaaggccgggtcgtgtccccacctctccccggcggcgcggctcccctccagccccggggg

SEQ ID NO: 122017 - DNA, 513 bp, Arabidopsis thaliana columbia
  unsure (1)..(513): unsure at all n locations
annnnnnnnnnnnnnnnnnnnnnnnnnnnnnnnnnnnnnnnnnnnnnnnnnnnnnnnnnnnnnnnnnnnnnnnnnnnnctttttttttttttttcccgcagattcgtctaaaggaatcctttttctagcggcacacatgtgaacatttccccagttaaagaaagctaaagcagcgactttttggaatttcgcagaagctttatcgaataggggctgagctttctcgcttgtcacattttcttcaggggcctttgagcaaaggtccattcccaactcatgtaaatcaatatgagcctcaggggcaataccgacatgagtccggaacagatgagcaaatcaaacaaccgggcggcccttttcaattccttgggctaaggatcttcagaagaacttggttttttccttttcacctcccctatcctgcctctcaagggtggacctctgtctccaatagccaatcttgaggagacgaaacaattttttttataaacagggtttttttccccttcctcc

SEQ ID NO: 122018 - DNA, 378 bp, Arabidopsis thaliana columbia
ccccctctctccatctattaaaaaaataacccccctaaatcttaaaattttcacccccttttttccatacaaaaaaaaacccaaaatgtgcaaaccctccgaaataaaaataaaaaacaaacgcgccccccacaattcaattcccacaacaaatcactttctcccaaacccctaacgtttctccccaaccccacaccatatttctcaagacccgctatttacctcaccaccctccaatattctccacaaacccccaccttccccttacaaaaaaaatatccataaaaattctcaacccacaaccattcctctttcccctttaaacacaaaccaacaatcctcttctacctttctccccacaaaacccactccaaacaa

SEQ ID NO: 122019 - DNA, 482 bp, Arabidopsis thaliana columbia
  unsure (1)..(482): unsure at all n locations
annnnnnnnnnnnnnnnnnnnnnnnnnnnnnnnnnnnnnnnnnnnnnnnnnnnnnnnnnnnnnnnnnnnnnnnnnnnnncttngttttttttttttttttttttttttttttttttttttttttttttttttttttttttttttttcccccccaacccttttgttcccagggggaaaacttaaaaaaaaaactttttttttttttccccaatttttgaggggatttacaggggcgggaaacaccaagggttaacccaatttaaaattttttgcccttagaagggccaaaaataaagggtttttccaggggaccctgtttttggaaaataaaaatttaaaaaaaaaaaacttttggggggggggcccaggaaagctttgccttcagcattggccccaacttaagaaaaaggctttgttttttctaaaaggaagggcccgacatattggggcaaggatttgtacacccaaaacttttgggggga

SEQ ID NO: 122020 - DNA, 491 bp, Arabidopsis thaliana columbia
  unsure (1)..(491): unsure at all n locations
nnnnnnnnnnnnnnnnnnnnnnnnnnnnnnnnnnnnnnnnnnnnnnnnnnnnnnnnnnnnnnnnnnnnnnnnncttttttttttttttttttttttaaaaaaatgctccttctaaaatcattttcggagcatttcaagaatagttttcgtatttgcccaatgcgtaaatccaaaaacaagaacattatacaaagttctacataacttcacctatcctgatcaaacagacaacattgagggggggggaagaattcatctccgatccaactgggccatatcgaccattcgcagggtcaaagggttcttttcaagcttgtttaccgcggatcctaaagcattaatgccaggggcttagggatcttagggtgactgatgttcaaaaggcaagataatgacactgggaattgccggaccaagaaaacccataattggcgcctaggggaaccccaaatttaattttggggttaggcattttcaagggcagggggaaa

SEQ ID NO: 122021 - DNA, 336 bp, Arabidopsis thaliana columbia
  unsure (1)..(336): unsure at all n locations
atgnnnnnnnnnnnnnnnnnnnnnnnnnnnnnnnnnnnnnnnnnnnnnnnnnnnnnnnnnnnnnnnnnnnnnnnnnnnncttttttttttttttttttttaagtggaaaccaaatttgacattagaatagagagctattacattacttcacaatgatcatacaacatgattcttattctaagatcatcgngaaggggaaaccagattgataaacatttcttattgcacaaattaagaagcaagtgtttcaataatcgaaccatttaaggttcaggtagctcttgtttcatccatcatacgctcacgtggatacaggggagcatgtattttgtgact

SEQ ID NO: 122022 - DNA, 515 bp, Arabidopsis thaliana columbia
  unsure (1)..(515): unsure at all n locations
aatgnnnnnnnnnnnnnnnnnnnnnnnnnnnnnnnnnnnnnnnnnnnnnnnnnnnnnnnnnnnnnnnnnnnnnnnnnnnctttttttttttttttattctttagacaaattttataaataccaaaggttttgaccagaagaggagtgaaaaatgttcacgtatgtcaaagacaaaactagtgttctaacaaaataagacataacaatacagaaatgaatccaaagacaaaagtcaacttcaaacgcttgttccaatccagaaatcatgttccagaagctaactagacaaaagcaaggttttttaagttgctgttcctccactatagtttatctctctgcttcagatcatggaggatagcctctttaccggggatatcgaaagagcttcaagatcctgcgagtctttgtgttagttagcatttggttgtgtgtctctgaatgattcaaagatggtgttttgataagatttttgacttacaaacaatgtcttgttttgtgcttcaggcgaagctggg

SEQ ID NO: 122023 - DNA, 468 bp, Arabidopsis thaliana columbia
  unsure (1)..(468): unsure at all n locations
aatgaannnnnnnnnnnnnnnnnnnnnnnnnnnnnnnnnnnnnnnnnnnnnnnnnnnnnnnnnnnnnnnnnnnnnnnnctttttttttttttttataacaattaacaatcatattcacaagtttttattgcaattgtattaaacaatcaaaaacaaagacataacatagctttgtgtacatatgttacatgctccacaaaaaacaaatcaccacccaaatattaaatgaaaaaggaaaggatacacgggcatcacaaagaagagagatcaatggagataacaagtggagtgtctcctttttcgacaacgaacgttttgagaacaatcccagctggagtacaaaattggacggcataagtcccatgggagccttgaaatggaactgtgactcatcattgatgatcccatatgcatgagataaccattcttttttcaccttaaaaaacttttttccggttgaattacttt

SEQ ID NO: 122024 - DNA, 495 bp, Arabidopsis thaliana columbia
  unsure (1)..(495): unsure at all n locations
annnnnnnnnnnnnnnnnnnnnnnnnnnnnnnnnnnnnnnnnnnnnnnnnnnnnnnnnnnnnnnnnnnnnnnnnnnnnnctttgttttttttttttttttttttttttttttttttttttttttcccaggctatatcaaatttatcatttatttttagttgcagcattttacaagggctccttgttttttttatgttgggagccacaagttacaatacctttggtccaaaaaaaaattatgggaagagggacacacccaaaaagcaccccttggggggttctttacaaattcatacttttttgaggaataatttcataaaaaaataaacctatctttctattttatataaataagaggaaacactcccctttggaaaaggctttccttattggggggtttttttatgcccccccaaaaggcgcggttgcaccaaaataatttgtttaggggcccccaaggggcaccttatgcctccccaatgggagatctccttt

SEQ ID NO: 122025 - DNA, 543 bp, Arabidopsis thaliana columbia
tacacccccctctttttcagccccctctcacatccccatccctccactcactccttttttctccgagggggaagggtatacaaaaaaaaaatcccctacttacacctattccaaccaaattcatcactctctctcttcacacttagtactccccctgcctattttaatttatcttctaattatcttttctattattctctatatatctattctacccaccccccctctcttcttctctcctctgggtggttggtggctatcctattcattctgcgcttccccataaaaaaaaaacaatgctatataatcctgctccattcacgtctctctccaaattgttcttcctctcttttttacatcatattcacctcctcttctccataatcactctatatttcacatctaacccttcctctccctaaccgaatatccatagataaccatcctctctcctcaccatctacctcatatctcaactactctctacctataattattcccttttccatttttcttctccctgcttctattctccccaaatca

SEQ ID NO: 122026 - DNA, 647 bp, Arabidopsis thaliana columbia
  unsure (1)..(647): unsure at all n locations
ccccccccccgnctctttatccggcggcgtctttgccgggggggtgttggggggggnccccccgcggcncttggcgccctccgcctctccccctttctccccggaggggatgggtgttctcttaccccccntcctncccccccnccccccccctcccctcccccccnccnctttctccccnncccccccccctccttccccctcttctcccctcccccccctccttcctccctctttcctttctccccccccctccctctcttctcccccccccccttccctcnnttcctgtaagtnggggnccccccccccggggggggcccncttgggagggctacctcccccctcgccgtccccccctcccccgcgcctccccccctcccgtngtcgcgccgcccctcccggcccctcgcgcggctccgcgtcgctctttccccgcggcgcgcgcccggcgcccccgccgcgcgccgctggccgccgccccgggcgggggggggggggggttgctccgcctcgggcgttgcgctcgccgttgccgctcggcgcggtctgctcgcgctgtgcgccccgcggcgcccggcgcgcccgctggtggcgcgcccggcgcgggccggtgcgcgcgcggcctcggcgcgcccgtgtgggcg

SEQ ID NO: 122027 - DNA, 587 bp, Arabidopsis thaliana columbia
  unsure (1)..(587): unsure at all n locations
cccacctctaattccactaattagggaaactcctccccttcattcccctcccaaattcccgttccacccccgggtacgctctattaactaaattaaactcccttttncttttcctatcaaaaaacattcttcttcctttcctttctctcnaaaaaccattaaatttaattactcttttccctcttaacttcactccaaaaaaaaaaacttagcgtctttttcttcccttttattttttaaaagggggggggagntcttttcccncangggaaaaatttttataaaaaaaactcccccacaaattncttttttttttttcccttaccttccccttcntcttccctcncccttttctcattcaaaaaacaccacaacccctcactttctttaccttccctccctcctccttacaaccccttctttctctccaatccttcccccattctccacaacaaccaaacacaaccccacattttttcacaaaccctcccctccttccccccacacttttccccacaccttccacntccactttttactaccatctcccaccccccctctctctatctactatataacaccccctc

SEQ ID NO: 122028 - DNA, 249 bp, Arabidopsis thaliana columbia
  unsure (1)..(249): unsure at all n locations
atccccacaaaatccaagcgccttttnattcccccntgntttttcccttatnttcacaattaacattaaaaaaccaacctccccaaaccatttggaaaaggcctttattggagataatcttttaatcaacaaaaaaaatatacttttccattctaccaaatatttgcgcccaacatccttaaaaattttcccaagaagaaagtttctaaacccccccccacaatcccccaaaatcctnaaaccccctac

SEQ ID NO: 122029 - DNA, 501 bp, Arabidopsis thaliana columbia
  unsure (1)..(501): unsure at all n locations
ccctcccccctacctaaccttgatcctcttaacgccgcccttttttttttttaattntaaaaatataaccacccttttcttttgcctctttaaaaaggtttcacccccttaaacccgtttatagaaaacattgacataaactttttttcttttttcacaancccatttttaacaaaagtagaagacaaaaaaccctttgttctcaaaatattcccctctccacaaccaccccttatccttttccttcataaattcccccagttttaaaaacccacagcttcaacataaccaacctttatacctaaataaaaagtcaccctcaagtaaaattcctcaacccctcaatcccaaaatcccaaattcaaaacaacaacaactcccaaaaaatcaaacctttcctctccctcccttcctttccttctcaccaaacttgttaaataaaattaaatttcaaaaacccctttttcaaaaaccccaaacccccccaaacccccaataatt

SEQ ID NO: 122030 - DNA, 449 bp, Arabidopsis thaliana columbia
  unsure (1)..(449): unsure at all n locations
attccccnctccncttcccccccccccaaacaccaaatttcttttattttttttntctttcccctaaacccccaaaattttttcttacaaaaaccaaaatttctaagctcttttccaagccgctttgtcccaaaaatcttcgcctttctcaaccacaataaccccccctcccccctttttttcttaaaaaaaaattttccctttttgcccttcccccccaccccttaaatctttcttttcttaaaaaaaccctctcccggatttttctttttcccggctccccccccttctttttattaccggctcaccctcttttctttgcggtataaacctcttcttttttcgaaattcccccccttttttaaaaccccccccctttcccacccccanagcccctttaaaagccccctccttactaatacacctttcaaaccccttttttttccccc

SEQ ID NO: 122031 - DNA, 321 bp, Arabidopsis thaliana columbia
  unsure (1)..(321): unsure at all n locations
ctacctaagcttggatcctctanagcgggcgccactgtggtgttttattttatattttatnaaattaaaggggagagacctattttaccctcttttctacaaaataaaataataatttacaaactanttctttttctcaaacccagcaatcccacctgaaaaacaaaggggggaattggaaaagataccatctatggggggtgttacccttggtgagcataggtaaaaaatcttcctactaangaaaatgccacccaaaaaaaaaaaaattaattttttaagtaataaaattaaacgatttactactattcaacaagctgc

SEQ ID NO: 122032 - DNA, 448 bp, Arabidopsis thaliana columbia
ttatacttaccctccctctactatcttacccgcctcttaaaattttcttttcttattctttcaaaaaaaaaaacccttttttcaaactacatttaataacctaatttattctcaatttgtttcctacccccaaaaaaaccccacttttcccccaaataaaaagtgttttattaacccccccaacctaaaacccctttctttttcttgataaaaaaaaaaaacccctcgttcccctttcctaaagccctttaaaaatccacccttcccataaatacacttaatatatcgctcttcaaacatttctttttttctcatctttccttttcccccctttttctcacccccatatccctctattttgattccctcctccacacccttaacacaaaccctcccctctaccccctcccttttccgggcccaattttataatttaacaaccctcccc

SEQ ID NO: 122033 - DNA, 696 bp, Arabidopsis thaliana columbia
  unsure (1)..(696): unsure at all n locations
cccccccccgcccccccccggggggggaggaatttcccggggtaacgaaccccccatgaattanaagnggaaaagaacccggcccccctcccaaggaccccgnncccaaatttccccgtttcccacccccggggcttaggagtccttataaactaaaatttntacacccccccntaattcttcctccttcctcccacccacaatnnccccacccctaatcttccccccacccacccattttaaacccccctctccccccccaaaaaaacacaaaaccccaaccgaanttttttccttcccttttccccctccccccctttcttttttttgctatagtttgggcccncccccccagggggcttttttctcacagccagtgaaattccccccaaactcccaccctccctgcgcggcgcccccccccttattttaaatatgacccccccccccccctttacccaatacaaccctcttacaccttgacacccggtctttccnccctctcttctcccaaacaatatacaaaaccccccctcttctgccacaacacccctcctccgctccccctttctttcccccccgcccacaaaacacgcgcggcccccccgcccctcctcctcccgtatgcttttcattttctttcccccccaaccctctccccccgcccacgcggcctctatcacagccgccctcttt

SEQ ID NO: 122034 - DNA, 295 bp, Arabidopsis thaliana columbia
caaaaaacctttttttcctttttataaaagggggggcccctccggtccttctcacaacaccgagggctaaattcctccgctcgggcggcgtcaacaacacagaatcttcgtgaggagagcgcccgtccacctccacccacaaaggaagggggcgaccacgctcaggaacatacatccaaaaaaccaccatttctctcttctctgttggtgcgtcggggggggcgctattctcaaaccagacacacaccacacaaaggagtggagtgcgccccctacccgcttttatcctcttccc

SEQ ID NO: 122035 - DNA, 534 bp, Arabidopsis thaliana columbia
  unsure (1)..(534): unsure at all n locations
ctcacattagggaaagctcgtacgcctgcaggtaccggtccggaattcccgggtcnacccactggtnctgcgccgcgtacaaacacncntncnaaaggagggaaaaaaaaanttatgttccaaaccaaagtaaacctagtttagggtgaaaaggcgaaaccaccacccaccagagcattgggccccttgctctcccgcgttacaccgaaatctcacccccccttttttctcgggaggtggctcctacaaaaggcgttccttctgataaaaaggaacttcaatcaccccgttttacacccctcttcctttgcctgtggtataaagggacctttcaaaatccgcaaggggcccctctattccccccgccagaaatacaaaaaaaataacaaaatttttttcccggttctatttgggccccccctcacgtgcgcgcgggtttcaaaacaagaaccccccttcccccggacccgaatattaagaagtggtggtttttttccacggaggcgcccccccctggggccccaattttttttt

SEQ ID NO: 122036 - DNA, 322 bp, Arabidopsis thaliana columbia
  unsure (1)..(322): unsure at all n locations
accccccacctccaacggagagaacaaccgcagaaacagacnaccgcaccaccctttcccccgagggggggaggggggcacaacacaaaacaggagggacaaccagagacaggagaggccggcgcaagcgacgagcggagaaccacaccacacacacagacgacgcanaaacggggaccgcagagacggacagcgcgagaccgcccgcacagcacgagacgatctcctgcccgcggggggggggacccacccacaacgggaggcagcacaaaaaacgcacgaacagcgcagagacgggcaccgccgcgcaacccagccaagg

SEQ ID NO: 122037 - DNA, 655 bp, Arabidopsis thaliana columbia
  unsure (1)..(655): unsure at all n locations
ccccccccccccgccccctcccccccccccccccccccnccccccccnnnnnnnnnnnnnnnnngggggggggggtgctaaatatgggagactctttctnccggcttttcttnngcggggnccctccccccccctccctttgaagctctcccaaatttncccnnctccccactccttttnntcttcttgtttttaagccgcccccgccaaatattaaaaaccaccnnnnttnntataaaaccccctctttgcccccctcctttggaaaaagggccccctcccccccccccccttttttccaccccccccccccttcctccctttttttccccccccttaccctccccccttcccccccccccactttctttccaaaattctcttctttccctcttttttccacatttttttttaagagaggccgcctgtctttctttttttttttctcccccccgctttaaaccccacccacatttttcttcgcccttcttttttccccccttccttccccccccctcttcctcccaaccccccccctctctccccacaccccctcccccacccccttttcctccccaaaccctcttttctcccccacccaccaaccccctcccctcccccccctttctctcccacactcttcccccccccccct

SEQ ID NO: 122038 - DNA, 657 bp, Arabidopsis thaliana columbia
  unsure (1)..(657): unsure at all n locations
ccccccccccccaaaactactaataacaaaaaaaaaccccctactcactttttttcaacccaaattaaataataaataactatcatactcctatactctaacttcaacaccctccctatatttactccccccccccttttgttgtaaaaatatttcctcaaaaaaacaaaaaaaacaaccccttcncccttctttcctctcttactcattaacaacatcnccaaatctcacgtctaacttccctctccataatgcatcgcacctaataatttatttatacaacttaatctcactacataaaccaattctcacaaactacaaaacacctctacatacacacaatcccacaatatctacatgcctaatctaaaacacttacacaaacccaacaacaacatttcttattattcaaaaacaatatctgttatttcttaaaatttatctaaatcatattttttttcttaaaaataaaaaaaaaaaaatcttctgccctcctcttgtctcctccccccttctctctcttcctctcctacattttctcttctacataaacaaattcccaccatacactctccactaacaataaatacataccaacactaactcatcaactaaaaacaaacctataccacacactatatatccatatacaatcaa

SEQ ID NO: 122039 - DNA, 744 bp, Arabidopsis thaliana columbia
  unsure (1)..(744): unsure at all n locations
cccccccacccccacgccgcacccgaacaccaaacggcgaaccggaccaccccacccgcccccccaccgacaaaccaacaagcggaaaggaaacctcnagaaacagaaaaagccccccccccacccctcaccgccggaacgagaaagaccccacaacaccacccggcgcaccacccgccaacgagaacaccacatttctagcacaacccgaagcaggaaacagcgccccccaaaacaaaaaacacccgggaaccccccccaaccccacagcaccgaaccgcccacacccgacacacgcacacaccccgccagcccacagcaaccccaccaccccgtcaccccgccccagacagcccacgcacgccccacacaccacccacaccccggacgaaaccaccgccgccaccacaacacaacgcacaaagcaccagaacctctttcttatagctcgaacgggggaggcgggccaccacaacccaccgaacagaccaccccgaccccagccacacacacacactccaccaccacccccgcgcaccacccgcggaccagcacgccacgcacagccacccaccccaccgaaccgcacaccccgcaaagacgacaaccaaaagcaacagaccagccgcaccccgccgaccgaccacacagagacagcaccacccacacgacccacccccgccaccgccccccacacacaagacccaccacaacacacaccccacaccaccccgccgacaccac

SEQ ID NO: 122040 - DNA, 621 bp, Arabidopsis thaliana columbia
  unsure (1)..(621): unsure at all n locations
aaaaaaaaaaaacacaaccccccccccccccacacacacccacaccttttttcncncgcggggaaagcggccctaaataatatcccccccccnncccccctctcnnncccccctccctcttttcttttttccaaactcccccccccctctttccttttttaaaaaaacccccctctcttaaaagcctcacaccccatctctctcttctacaaaaaaaatccctcctttnctccgggtcgtagcgcccaccccaacagcgggcncccataaattgattttaacccccacacttcctctccccccccccctcctcccttttccncacccttccncaccccccctctcctctctttcccccccacccacccccaccttccctccacccccacaccttcccccacccctctacaccacaatcccctcctcctttttctccccctcccccacaattccctccctctatacccacaacaacccctcccctcttctcctctctctctcccaccacccccccccacccccctcccccccacccaaatttccttatacactcttatctctcttcactttcaaccccaatctctccttccccacccacataccctttccctcaccccccca

SEQ ID NO: 122041 - DNA, 319 bp, Arabidopsis thaliana columbia
ccccccccccaattcacggccggaaggaacagcagccccccgcccaccccgcagacggggcgccgcggcgcggcaattttgcggccccgggggggccacacagccacaaaaacaacaagccggcgacgcgcgcccatctcgcacgcgcgcgcgacacagcccacccgccaggagccaacaggccctcactgcggcccggacgcgcgcaccgcgaccgtgcggcgaaagccgagcaggcagcaggaccgccgcaacgcaacgagcgcccaccgcaagcaccgcgcgcgcgccgaacaagaaggcatttttttttcggcgg

SEQ ID NO: 122042 - DNA, 378 bp, Arabidopsis thaliana columbia
aaaaaaaaagccgagcgcgcgcgcgcagcgggaaaggccagaaacccacccagccaacgcacggagaacagaagaaaaccgacgacgggccagacagcgcgcgggaagccgagaccgccgacacacgcacgaaaatttttttttcagggggggggagcaggaacgcgggcgcacaacgcagaaaaagaccgacgacggggccgagaacaggcgaggcgcaggagcacagcgacacgaacgaagcgccgcccaaggaccgcaaaagaagagcgaagaacaaggacgagagaagggcgacacagaaagaagggcgcgcggcgaaagacaacacaacaagggacacagaggcgacaacaacccaaaaaggcggcacaaaga

SEQ ID NO: 122043 - DNA, 327 bp, Arabidopsis thaliana columbia
  unsure (1)..(327): unsure at all n locations
ccccccccccccccccccccccncccccttttttttggggtgttggggcccccccccgggggggctcccaaaaaaaaaccccccccgcggggtcggttggtctnttctttttcttcgcttccctgctcccctctttttgtgtctcttgcgttctccgtgtccgctgcttgtcccgtttctgcgttctcgcgtccctctgggttggcgttgtgcctctttcgtttcgtttctgttttcttcctgcccgtccgcttctcgcccgttctcgtcctgtgtggccccgtctgtctgttcgctgccgcggtttctcctctgcgtttgtgggct

SEQ ID NO: 122044 - DNA, 430 bp, Arabidopsis thaliana columbia
gcgcaggcgacgttaggggcggagatgcgatataagatgtgcgtaagaaccgatgcacactatgcggtctctatttcacggttgaacgcttgattgggtaagagaatgtgtctttgagcccggacggtcgcgggacccgcgaagtagtttttttgggagggggacgagcaagcgacgcaccaacgctctggagagagcgcccaagaacatagaacgtggtatgagaagtggatctaccagtagtactattgaatgaggtgcacgaggcacaagatcatgaaatcaaatgacagttctagccatacgtatttagttatatgtccacaccacacgagaggggagcgtatgatcgagcgagccggcatggtccgcccagccggtcccgtacgggtcgagacaaggctagttgacaaggacaactggccgtggg

SEQ ID NO: 122045 - DNA, 674 bp, Arabidopsis thaliana columbia
ggacagaagcgagcgcgagcggcgggaggagattttggggggaacgggcccccgaaattcaagagaaaaaagggccccccccgggcggccggcggcggcagggaattccgagccgggcgggagggcgcgcaaaaacaacagccgcggcccgaccgacagccgcgccccaggcgcgggagagacgaaccgcgccgcagccccgcggcacccagggagacggcgcaagacgacagaaagcgcagcagacccacaacaccagcacaacggaaaggccaaagccgctcttttttgtaggggggggggggggccaaccaaaaacgaccagacgacgcacgaggaaaacgcgaaggaaaccgcgaccggagacggagcaaaaggcgcggggacagcgcggagccaggcgcacggcgggcgcgcgcgaaggccgcaacaaagacccgcaccaacccaggccgggaggcaaggcggccaggcgagccacaagacgacggaccacagagcagccgaaagcagcggccaccaggacggaccgcggcaacaccgcagaggagcgcgaagcggaccggcggagccggacgaggacggagcggacacacacgacgaccgccagagcgacgacggcggccagaacaaggccgacgcacccgagggcgcaggcgagacgcgccgacgcg

SEQ ID NO: 122046 - DNA, 401 bp, Arabidopsis thaliana columbia
  unsure (1)..(401): unsure at all n locations
cccaccctccattctctccctccctcttcttctcggcaccgaccttctttttttattcgggggtgtgtttttccancccacccccactcgcccctcttttccatcatacaaaatgtctctccctctctctttccgggcctccacgcgctctccactatcgcttccgctctccctctctccctcttcctttcttgtcttttttgctcccccctactaccttttgtcctccgatttcctactcccgttcccttccgcccgcccgcttttatcactgtttcctcgcggcttgttccctccctccttcctccttccgctctcgccgcctacgccctctccgctctcgccctccctccgcgtccgtcgtctccccccccgccctcttcctgcccctctttttgctc

SEQ ID NO: 122047 - DNA, 410 bp, Arabidopsis thaliana columbia
cggctcgtcgctttctaggagattccaggatgtgagatttaggtctaacagacgacggtatcttctggggcgggcgcccgtccctctcggcgctcgccccatgcgagtgccacctcgacccagtcggagctcccttccccctcggttttccacctccagccgtcttgcgccctcctccttgcaccacgcgctttatgtccttcgggtgccgccccttcggcgtgggaggtgtgagcgcgtgtgctttattggtccgagtcgccgctctgttctcggtccgatactcttttcccctctctggcccgcttctttttttatgagggggggggtcgcggctcgccgaggcgctcgctacttcccctcgatacaccccctctggccccggcacccgcacattcgatatagcgcaa

SEQ ID NO: 122048 - DNA, 667 bp, Arabidopsis thaliana columbia
  unsure (1)..(667): unsure at all n locations
gggggggggggggattggttgcgggccggcccccgccggtttcgaggggcgggcgccgcccccccccccctgcggcgccccggccgcgtgccttttttccggcgggcagttttgggtgggncctcacncccccccctttctttttcctttctctctttttcctcctcctttcgcgctgccccgcctgcgcgcgccgctccccctgtgtccgctctgttcgccctgtcttttctctgccgctgcgggccgcgcgtcccttcctgcgccccgctccgcccgcccgcccctttttttttcgggtttgtttgggccccccccccgggggcgcgccctcccgtcacaaactcccctccgctgtgctcctctctccctctcgcctctcctntgttgtctggggccgcccgcgctcctgttcctcctccccgctcctccgtgtttgcttggtccgtggtctctccacgctcgctcttccgtcgtgttgttgccgtgtcccttcgcctccgttccgccgcttctcccgcgcgcctcccgtgcggctctctccccctcccgtccggccgcggcgtcgctcgccgtcccctcccgtcgtcgctgcgcgtggtgtgtgcttgcgccctttcgtgctcgccgcgcctgccgccccgggccgtcgccttgccgtggggcg

SEQ ID NO: 122049 - DNA, 348 bp, Arabidopsis thaliana columbia
gcgccccgcgcggtccggggtgtgcgtcattcctttctggtcctgtgcgcgtgacacttccacgtgtatgctgctttcccgctcttccgcgagcgttttttttttttgcgggtttgttgcccgccgcacggtgtgccgcgttccttaataaatacgctacagtcatcctcttctttgttccttctctactcctatttcgtggatcccggccctaacacctgtgtattaccgctttcttcgcgtcgcaccttctttcttgcaccggtagtgacatctttgtgggtctctggcctgcgcgtgttcgctgccatatggtggctgactggtgtgacggtgtccgtctctctc

SEQ ID NO: 122050 - DNA, 542 bp, Arabidopsis thaliana columbia
  unsure (1)..(542): unsure at all n locations
gaggagaacgcacgcgtacgtaagctnggaattaagttttactgtttggatgggagtgagacagttacanaagaggttctattatattttgaaagagcctcccaatagaagatcacgcttggggtttatacttttttggggggaatttttttaaactttttgggggatggaaaataaatatttttcttttttggtcttgaacaaaaagagatatttttggtgggtgagtgggagtacggcctaatcttgcattccatagaaaaaaatttgttgtttgggagggtgggaacaagaaacacctttttggtgggttctcataacaaaaaaggttggggggggaacccgctttgaggttttattttatgaagaacacctgctcatgtgtgttggtctaaagaaaaaagcgtcattttttctttgtttattataaaaaaagaaaataaggggtgtgtggtacgcaccatttctagcgggcaggggttgagagacaggaatgatgttatttgtggatttgtattagaacgcggcgtgcgccgcatgtt

SEQ ID NO: 122051 - DNA, 523 bp, Arabidopsis thaliana columbia
  unsure (1)..(523): unsure at all n locations
ctacaaaactatgacgtcgcacgcacgcgtacgtaagctcggaattcggctcgagttcaaatccgagagcttagcgtgaagagaagaaaagtttcaatggcggcgattntttctctcttccttttcttcattctcttcatcggctctcttctcatcatcttatctttcatcggacgggcaagatccgtcacgatccccataaagtttcgccacgttttcattacgggggggagcaagcgggatcggtcttgtttcttgtaacccgggccggtttcgagaggggctaaagtctccctcctcccctcgtaaaactaaaaatcttgccgaaacccaaacgatccttccaagttatttcccgggggtagaaggtccccacctttttctgcgggactttcgccaataccaaccccgtttttaaaagggattgatgtattccgcgccccctctcttgggttgtttgccaacaaagggtgttttttttgggaaaaaacttagaaaaaagagccctgaggggggatatttt

SEQ ID NO: 122052 - DNA, 375 bp, Arabidopsis thaliana columbia
gacgtaggaacgcacgcctacgtaagctcggaattaggctcgagctattcctccaggaaaagcctccagaagtatcatgtgttgatgatcaaagtaggatgaaaatgatgtaactaaagagaaacattttcataggggaaggaagagagagcggttcaatggacaaagacagaaagagggtgaaaatggagaaggaagatgaccatttttaaagggggggggagttgtccaccagggtttaaaaacgcaaagggaaatgcggaaatatttttacagctcctttggagaaaaagacgccgggagaaacaacaaacgggcggggttcgtttattcctcttgttttaaaccagattattttattttttacgaattaag

SEQ ID NO: 122053 - DNA, 514 bp, Arabidopsis thaliana columbia
ggacgaagaaagagagaagattttaaagaaggagaagagggggagaaaagacccaacgaaagaaaataagaggagaagcaagagacgtacagaacaagagaaggacgaagagtgaaatagaagagaaggagaaaggaagtacagagcgaacgggaaacgatgcaagcgaaacaaggtgggaaaaagacagaaagagcgagcaaggcaaggacatgagagagcgagagggaagggcaagaggacagacaaacgaagaaaaagaataaaataagacaaaaaaagcgacagcgagagagaagtatcgaacgaggaagaaggaggaaagggaaagggagagggcaggggggacggctagggaataagtgaagaggaagtagagaagagggacgggcgagcagaaagagacaaaggaagagaaggaagaggaagagcaaagaacaagaatgagcgcaaaacgggtgagaatacagcataagcaagaagagaaaatacaaaagtaagcaaggagaagaaa

SEQ ID NO: 122054 - DNA, 566 bp, Arabidopsis thaliana columbia
gacgtcgcccgcgcgccgtcgtaagctcggaattctgctctagggaaggaagggggagtgagagatgatgggtctggccaggaaaataaacaaaaaggaagttttttagaaccttaaggacgaccggatattttttatccccctcccggctcaaaaataattccccccgcctcaaaagaaacaccgagggtgttacggggaataatattgattattcctgttctgttaaaggggggggggcggtttttttgaaaacgaacctggggggctccaaaaaaagagaaaacacacggccccctcttctgttggggattattccaaaaaaatcggggaggcaacatcgcttaagccccctttttaaaaggggttttggggggtatatttacatcccgaaggccgggtagaaaaactggattttaaataaaccgggtctttcctttcttccgcacattttttttaaccccgggaggggtaaaaacccggaacctccccttggaaaaatcggactcttttctccccacgcccaaaaaaagacgctgaacttgtttcccgcccccctcccacgg

SEQ ID NO: 122055 - DNA, 522 bp, Arabidopsis thaliana columbia
aggtgcactctagaagactatgacgtcgtacgccgcctgcgtaagctcggaattcggctcgagctcgagccgaaggggctcccgacaaaaaaggctctctcacttctttcagtctttatctttttccatgtctttaccaatagttgtttttagctgcttcaaatagaggaatccaacgccttatttttctttaccaacgccaacactttcatcgccatctgcggctaccaaaccggcggggggggttcttaaaccggcgacgccgttgtacaagccccccacgctggccacctattcttttataccacccaccaaaaaacctccggacaaacctccaactatttccggtgacaccagtaaaacctcccgggttcaactccctccgataaaactaccgccgggtcaacccccctacttacaatcctcccatcgccaacatttaaacctctcgtcgcgcccaacacctttcgtacaaaccccccaatccaaacggtttaacccccccccttactccccggggta

SEQ ID NO: 122056 - DNA, 184 bp, Arabidopsis thaliana columbia
ggtgaaaaacccaacaactcaaataatataccctttaccctcgcacccaaatgggaacccgttgacgaaggtggaaccaaaaaccccatgtcgcgaggtttcaactaacccattcccacccccctttgtgtaccgtggcaaatgggggcagagaatgggaaaaaaaaggcctgtgttcttactg

SEQ ID NO: 122057 - DNA, 239 bp, Arabidopsis thaliana columbia
ggggagaaaaccaggtgagtacggagatgagagttaaggatataaagaagtagtaggaaatgagggtgtgtgtagtgaatgagttttatgtgttaaaatgatagaagaagggaattagaggtgtaaagaagtgataggagaagtgcataatttggaaaataggctaagaatgagaggtaagaaagaataagagtgagtggtgatttgttataaggtgggggaggaggggagaggagaga

SEQ ID NO: 122058 - DNA, 620 bp, Arabidopsis thaliana columbia
cgggccaaccgcccccccccccgagaaggaattattttttaaaggccccccccaatcgagggcccaccacccccccccccgccacacgcccccccccccaccaatttctccgggggggggggagggcccacaccaacctcccccccctcccccctccgcccaacccccccccatctagtcgtgcccgtccccccactcgcgagcccctagccccgcacaccccgctcccaacgtgttgtatccgctgccccgcgcgtaccccccccgcccccccccgcgacattatttttttttaggggcgggggggcccccccaccaccgcccgcgcctgccccgcaaaaaaagagagtcatatccctcacgcccctcgttcccccgccctatacctttcgcccccctctccaatccacacagtctcctcatccgccgccgctcctatctctccatcgtcctccgcgcctcctccccgcctgcgtccccctccttagcacgcgcgcgcgcttgctgtcgaccctcccgcgttcccgacaccctccctcctcttactccctcactgcacatccgacgaaatccctcccgccccgtttccgccccgcccttatcccgccgccgttcacccc

SEQ ID NO: 122059 - DNA, 556 bp, Arabidopsis thaliana columbia
aggtgcactctacaagagcttgacgtcgcatcgcacgcgtacgtaagctcggaattcggctcgagtgaaacatcatcgccttcagatagtgccgctgttccctctgaagaaacgcaactttctttccagtctcctccttcagtagaaactccacagaacttcattgatactgatgatctattgggtctgcatgatgatacacctgatccgttagcaatcctggaccaaaatgcactaggtgtggccttagtttccaatgatgttgattcttcgccgtttagtttgtgggcaaccaagaaatttggatcccgcaggaggggagcttgcgttggtcacaacaccctagcattgatttatttgggagccccagagagacaggtggggggggggatataaccccctccccttgaacagttctatatgacgaggggggcctttgatagaagcccaaccagcctggctatgagagtcccaagctttccattcgcgttgggaggctcaaagacctgtgttggttttttaagacaagggttttaccccgctgttgagcggtaaa

SEQ ID NO: 122060 - DNA, 337 bp, Arabidopsis thaliana columbia
  unsure (1)..(337): unsure at all n locations
agagaaagataatgcggggataaagnggaagctattagtgaactctacaagatctatgacgtggcaccgccgcctacgtaagctcggaattaggctcgagcttgaaattgcggtcttattctttaggttgagctttaggttttgagagcaaaaaaaaacgaagacgccgtgaaaggggctggaaagtggatatcgcttcttgctgttggggtatgaagaccctacgacatttttaagaagggtgagttggtttaaagagactagtttgttagttaagggaactgatgcacttcttcgggtctgttaaaaaattacacactgggtagagataatacca

SEQ ID NO: 122061 - DNA, 528 bp, Arabidopsis thaliana columbia
gacgtcgtacgcacgcgtacgtaagctcggaattcggctcgagttggttctggagatcgactcatatattactactttttcacctacaatatcatttggagatagtggagtctatgcgcctttaattgaaggaagcactccgtggattgggctattagactttttcccaaatatattggtcgccgttgcacaactatatatccagggggactgggcattaggttacttgcaaggaaccatattaccagcaaaatctttggaatgggaatctgggcttatggcgaataaaaatattgatgacagggaccccgaaaccagcttcaaaacttttagggaaagagcttcagacatgccagggcccgggggaatcaatgaggaaaacccctctctgagaattacacctggatcagctacgccgtggttgaaaaatcttcctctcaagaaccctcctaggtgaaaggggggtaaaaaagcctttttactacaaaaaccctcttgagactcgggcaacacagacctattttatat

SEQ ID NO: 122062 - DNA, 360 bp, Arabidopsis thaliana columbia
atttaatagaggtatattataaaatggaatatgaatggaacaaaagagaggtttgaatgacggatcgaagctagtgttaatatggaagtcgtagggagatcgctctagataaatccgacagttttttcattagcgggtgaggaaagagcaaggggagcggggtcggtgtaagagtaagtttattaatatatgcatctaagcgatcgaagtcgatatcacgaagggaagatgtagggtggtaacgatagtctgatacatataagatagaccgcaagaggtgagatatatatgtgagtatactagagcctagtcgaagaacactagtgaataaatgaattgcgcgttggtagtatatgggaa

SEQ ID NO: 122063 - DNA, 524 bp, Arabidopsis thaliana columbia
  unsure (1)..(524): unsure at all n locations
ttaggtgacactatagnaagatctatgacgtcgcacgcacgcgtacgtaagctcggaattcggctcgagttcataaccttgctttgccagggaactcgggcatctcgaggtcggcgagtttagtttcttcaaccctgcaaagatgggtcaggcctttttcagctgaaactggagataccgtggaagcagttgtgcctcatatgggggaatcaattactgatggcaccttggccacctttgtgaagaaacctggtgagagagtccaggctgatgaggctattgcacaaattgaaactgataaggtgacaatagatattgctagcccagcaagtggtgtaatccaagagtttctagtcaacgaaggagatactgtttaaccaggaaccaagggcgctattatatcaaagtctgaggatactgcatctcaggttaccccctctcagaagataccagagacaactgatacccaacccttttcctcctggtgaagataagcagaagcccagagtggaaagtgctcctgt

SEQ ID NO: 122064 - DNA, 482 bp, Arabidopsis thaliana columbia
  unsure (1)..(482): unsure at all n locations
cacgcgnacgtaagctcggaattaggctcctttacggggggagtcgaaagccatctggattctttgattcttcttaattaccaaacacaacttactttgttttttgggtggggctggggggaaaatgagcttagggttctatgtaacagcttggcttacctcataaggccgggtaaaaagctccaactttgtcttcctaaggagggggggactcaatcgtggggatggatgtctccttaaggggccccctttaccgggagcgtccccctagaacccccccgggttgaaaatgtgaggggttaatgttctgcgcaaaagcaagacgaggtttccggggggggacgactttagcaatgggagccgctccgcaacgctgggagcaaaggggtgtcttcggggcgccccaccacccttcttaagacaagaaaagggcccttgcgcggcaaaacaccagcgcgtacccggaacctggggtacgtccg

SEQ ID NO: 122065 - DNA, 532 bp, Arabidopsis thaliana columbia
cccacgcggcatcgtgcaacccgcccgccgcccgccgccaaatcattttataaaggccccccccgaatgacgccgcggacccccagccgccgcgcccccggcgccacccggaccatctctccccggggggggaagggagaaaaaaaaaacacccccccgtgcgactgcgcgccgggccgcccactgtctactcagccactcgcccatcagatcatacatgggaccgccgtccggccgtgcgtgtcgtaattgtcgcgcgcccgagcgttgccgcacccccacacccgaaaatattttttttaagggggggtggcgacccgacagctatcgccccatgctataaaaaaacattgtgtgaaatggcagtcccgccaacaccctccgtcaacccgatcccccccacagactctacacccacgctcaagccacacccccacgtcaaaagactaacctcacctcctctactacgccgcggcctccggcgctcattcaccgacccggccgcccccccacacaggccgctgtcggccac

SEQ ID NO: 122066 - DNA, 532 bp, Arabidopsis thaliana columbia
acgcctgcagtaaagctgcgtgaattcaggcttcgagctttaaaaacaaagcttccttcaccagaaccaaattttagatttttaaacaacataagctctaatggggggaccaaagtcacccacaagaccaacccaacaaaacgcacaacccaatttccacggatttttttctaccctggccggaaaccttagggggagaaagtttgttcggaggggttttccacagctttcagcttttgaaggaacaaaaaaaaggagttatctattcgaaaaggttcccctatgagcgttcgggctgagttggtggttcttttaattacccggttctcgccttccgcgcttgtgtgcagatcaacggagtatcttttggtctctgggcttgtgatgtgaggcgggttgggaggtctacaatcgtgacgacttagatctgtctttcgagaaggtcttcacgcgcgagaggcttaaaagtgaatctgtgtagaggtggtccgttcctacacgtaaggagggagatgtaagataaacttataca

SEQ ID NO: 122067 - DNA, 498 bp, Arabidopsis thaliana columbia
  unsure (1)..(498): unsure at all n locations
aagcgccccacaaaccaaaacanccggggcgcccgcccggccccgcgccgcgcccggcaaccccgacccccccccgacgggggcgcgccccccgccgcacccgcgccgccgcaaaggagaaaagcgcgggccgcgggccccccccccccgcccgccccgaaagacgaagtattatcggggggggggggggaccgcagctcccccacccggagccaaggaaaaaaagactcggcgcgggccggacgagagccccccgcgaacacaaacgcccaaacaaaaaaaacaaaaggcgaaagccgcaggcggagggcgaggagccgcagacagaaacacaacagcacccggacgcgagcaaccaaccgacccgccaaccggagatcgacggaccgcgcgagcgaacggacgcgggaaacgtcgcgaggcccgaggacccgagcaccacccgccctcgcccgccgcctctgaagacacccacaaaaggacccacacccgaccgca

SEQ ID NO: 122068 - DNA, 607 bp, Arabidopsis thaliana columbia
cgcgcgcccgcgcccccgagcggggagagagaattaggtggggggaggggcgccccgggaattggggccggccggggaccggcgccccgagtccgactgacggccgggcccgcgccgcgttatccacacacgggagagggagagggcccccaacacacaaacaccccaagctcggcgcgcgcccggcgccccccgcgcgcgagaggtgcgctgccccgcgcgagacgcgttgttgcgtgcgcgcaggcgccgcccgcggccgtgcggaggggtggacgcggcgcggctgtgcccgcccgccgcgcgcgcgcgggggccggggtgaggggggttttttcggccgggggggggggctcccgcgcacccgcgccggtgcgcgactacgtgaaaataacggggacggccgcatggcgcgcccgctatgccgctccgcccccgtcgcgtcgggatcaccgcggcgcggtccccacgcccgcgtctcgcattcgcctctcggctgtcgtcggcgtgcgttcgcgggggccggcggtgtctccgaccgtcgccgtccggcccgcccgcgcccgcgagccccgcgagcacgccacgccccccgctccgtcggccg

SEQ ID NO: 122069 - DNA, 460 bp, Arabidopsis thaliana columbia
aggtgacactactagaagagctatgacgtcgcacgcacgcgtacgtaagctcggaattcggctcgagttttttttttgtgtttattttttaaacctaaaatctttttgtatgctttaagaaatgatcctgttacataaaaacgacatacatgaaagcgcaaataacaaggcttctctatttctaacagtagttaaatagaaaaattcttttttcgaaatgtaaagaaatataaaactccctgatatccacatgattttcccaaacccccccaacaaaatacagataaagaacatagaaaaactctttcggatatatgtgtttatataatcaacccttcttcttcttttttttagtctgcttcgctctgctctgcttccagatgatgtataaattcttcacctttgggtggttaatcatttacaaagaaacttccattcaaaaatcctccttcccggaagg

SEQ ID NO: 122070 - DNA, 532 bp, Arabidopsis thaliana columbia
aggtgacactctagcaagagttatgacgtcgcatgcacgcgtacgtaagctcggaattcggctcgaggaaaggaacaagctttggtgctccttgtctcttggagaatgttttagctgagatggttatatcagctgttcccagcattgaaatggttcggtttgttaattctggtactgaagcgtgtatgggtgtgcttcgtcttgccagagctttcactaacaaagagaagttcattaagtttgaagggtgttatcacgggcatgctaacgccttccttgttaaagctggtagtggggttgccactttggggctaccggactctccaagtgtgccttaagcagctactttagatactttaacagcttcgttcaatgatcttgaagctggtaaaagctttttgctgccctaaaggggagatttctgcggtaattcttcaacctggtgttggtaactgcggattcctccctcctactccggaattcattaacggtttacgcccactttactaaaaaccattggtggttttttttt

SEQ ID NO: 122071 - DNA, 438 bp, Arabidopsis thaliana columbia
gccgcgtacgtaagctcggaattcggctcgcctcgaagttgaggtctagacagggcaacaaaccatgtcgtatcaaggccgtgagcttggtttcggacagtacaccgcgtactaccgtgagatgaggaagatgtgtatggtgaaccttttcagcccgaaccgtgtagcaagtttcagaccggttatagaacaatagtgtcgacgggtgatggacaatatctatgaagccgctgatcattcaggcaccgtggatctaagtgagcttctcttgtctttaactaactgggtgagatgaagacaagcttttgggaaacgggtcaatgaggtcgggacatagatgaagagattcattgacttggttgcacgaaatccaagctcttttggggccttttgttttctgggacctttgccgttatttcggagctgctggacaacttt

SEQ ID NO: 122072 - DNA, 508 bp, Arabidopsis thaliana columbia
ggggggagggggggggaaaaaaacaaaactccccggagaaacaaacacgcgcgaaaacccccccgcggagacagcaatcccatagcccggcattagagtgaccgtagaccccaccacccgcgcatcgagaataaaggacgcggcataaggcggcggcccccgcgcaccagacaaagaatttttttttaggggggggggcgcccacccagccatcgccggcccaacccacaaaaaagaaataaggatatatagtgcgcgctgagcgagtgacgcacgcacacgcgcggcgcccgcctccacgaggcgcacgacagccagcgtaggggacagcgcagggaagaggtcgagggcaggctgagactgcggaggccgggagacgcacaatataggaagccactctccgaggcgcggcgatggtcgagcgcgtagaggcgagtcggccaatatgcagtcggaagagaggaccggtcgagggagcggacccgcagcgcgtacgctgggcggcgca

SEQ ID NO: 122073 - DNA, 526 bp, Arabidopsis thaliana columbia
gacgtcgcacgcacgcctacctaagctcggaattcggctcgagtgtctctgcccgggacctcacacagatatcagagtctcggcgattgaagtgaactctcatccttataatttcattccgaaagattttggattaagttttgatttttttggttcacaataaccctgttcgaagctttctccaacgccgtagccaatcaagacaatgtttactcgggggggcgattttcccattccctttttaccaagagaggtattttttcaaaacctgaaaccgaaagctagaaaacccctaattgtggggacccttggtgaatccaattgtcggggtgggggaattcctttgaaagtcgtggttgaaattcttcgttttggggaaaaaaggcctaatcttgagcttgaaaggggcgctcttggcctcccaacggtttttgtcaagaaacacgtttgggaaaaatggtaagagcacttgcttcaaaaaaattgggtgaaaaagcttgagattttcaaggacctgatccgaaaa

SEQ ID NO: 122074 - DNA, 474 bp, Arabidopsis thaliana columbia
cgcacgcgtgcgtaagcgtcggaattcaagctctgattataattctgggggttaaaacaaaaaagaagcaaacctcactgttctttcatcgtttccgagagaggagagacggacctggaaagaggaactgtgcactacacccctcgaactgtggaaaaagtctttctagattttaagggccgccgagctggcataattcttttcctcaccgggggatgaggaaaattttttccagcaatgcaaccctgagaagcagaaatcttgcttgtgtgggttcccaaatgaatgtgggggaagtaactcccccactgaaaaaaagggcctctaaagcttcccaaaccttcactagaggttaactttgccagaagagggaagacaggaaagaaactggctttttctcattcgttgtccccagaaggcaggggtttctttcggggggcttttcctttggcgtcaagaattgggtttcaaata

SEQ ID NO: 122075 - DNA, 404 bp, Arabidopsis thaliana columbia
  unsure (1)..(404): unsure at all n locations
gccccccccgcgcgaccggaccgcccaacaccccactcctaccncccgnagatgaggggcggcacaacaaaacccctcccnccgggagagccacccagccgaacgccccgcacaacggggcaggccatgacccccacctgactatttccctcagagccccctcccgcccccataccttcttacttccgccgcgcctttcgtttccccccgcccgccgccgcccttttttttttttaaggtttgtgtggagcgcccccccgccatctttgctctctccttacaaaaaaaatgctttgtgtcagtgttgtctgactccccgcccttggttaccactctcgttcgctcttcccccgcctctatctattactgggcgcttccctcttatcccttcgcccctcagtatc

SEQ ID NO: 122076 - DNA, 490 bp, Arabidopsis thaliana columbia
gtggaacgcacgcgtacgtaagctcggaattcagctcgagttgcttttctgtgatcagaaccaaaaagttttcaactttctaaatttttttagttctaaggaaaaaacctctccgagaatggttttatcggtgaagcaaacactctctccgaaaatcggactttttcgacgaaacccttcatcctcactaggaagaactcctgtttttctgtgggggcatcgacggagcttccaaaacgcaccgttttaaccgggtcaaagcccgcttcatctcttttcttgtttgagacctaagtctccggtggtgagatgtgaagcttatgaatctgaccgatcagagccttttcctagcgggatgatgctgcggtgggcgaaccaaaatcagaggcggctagaaattggagatcgggttttcctttgcttttggggggcttgaacggggaggccatgtctaaccgggaaggtttgtcggttatccttccccgggctt

SEQ ID NO: 122077 - DNA, 303 bp, Arabidopsis thaliana columbia
cgagcgaagagggagatagggggggagggcccttgttgttgaccccccccgggggcctgttgggggggaccaaggaaggggaaagtgtgaaatgatggaatgaggtttttataggcgaaggggtaaccccacagaggactgtgaggctggtacaggcaggcgtcgcgagtagtggaaaagtatagttacaatcgcgcgcggcagtccggtcgcaagaaagacgaacggcagaggctgcaccgccctgtcaaagagcagagagtggaagagtgaagcatgcacgaagctgagcaggatcttcgc

SEQ ID NO: 122078 - DNA, 510 bp, Arabidopsis thaliana columbia
tttaataaaatttaccaatttgagcagccggagcacaacagcgtgatcacgccaaattctccacggggaaggatacgaaaaaacaaaatcctttactcctgcatcattccccctataaatatacctactcaactaacatatttatggcccccaaccctcagacccatataaaaacaccattacatgtcccgccaacccccgagaaaaatagttttttttacggggggggcggccgcaaacaccaaacggaccaccgaaaattttgatgtgccgcccgaaaaacccatcagtatatccgccgtgtaaattgcataccaaatcgtaactcataatcattgtattgtcctatgtaatgagtatccgtaaataatcttcaccttaaatacacccaaacaaacaaatcatacagagcagtaacaactaaccgcgatacgaccccatacacattaacagagtgaggttaaaaacccaacccccaaatagtctcacgattaagatcgccaaccaaac

SEQ ID NO: 122079 - DNA, 499 bp, Arabidopsis thaliana columbia
gaggggggaacgcacgcgggcgagagcgaagtgttatgtcattttttccgggggggttaaaaccaccaatttttatcttcacgtggggttcagtgaaaggtagctgacgaatgtctcgatgtggcattatcaaatagctaggtgaccaataggtttaggtggctgcgggtttattgaagcttcaggaggcaaggttaatcattaagacctcccatttctttatgagggggggtgtcaatataccaccggcattgtatctacgaatgtggtatcctgcaggacattctagaggcgcggattaaacgataatgggtggggggcagacagactttttacggtagcgtgggtgccaggtgtacagggtacacggttagagaagagagaacgagaaatgggtgattaatatgtggtatatcggagtgtggtattgtgtgtttatgtgaccgctgtacatgcacttagttatgcgtgggtaatctaagggggagtagaggggagg

SEQ ID NO: 122080 - DNA, 535 bp, Arabidopsis thaliana columbia
gacgtggcaccccgcgtacgtaagctcggaattcggctcgatcttgagatggggctcaaatttccagacagaatcaggctgttctcccaacaatctctgttcctattcgtttaactacggggatggaagtggcacttttaggttctacatcgcaaatttcatggactttgatactggtattaccaaatccttggggtatacattccctctgctccgtggtgttttagattatagccatttaacaatctggagatttccagaggcctataataacattagattacctcttttagtgtaagaacaagaaaatttataggcaaatctctcagctgagctgagcaaaggactatgcccccaaaaacatcactctcattacacaaaaaggcgaaattacacaccgagagagtcttacagaacactcaggccaatactatcgtcgtcgcaagtccgaatatttttccgtcaaattctcttcattacaaattttgtgtggaggagctgtcgctaagtgatcaaaagaaaataataatacaac

SEQ ID NO: 122081 - DNA, 470 bp, Arabidopsis thaliana columbia
cgcgtgcgtaagctcggaattaggttagagttttactctgagggtcaagacctgttagaataaccagcactggagtgtgctagaattttcaacatatttccaccggaaaggagctctccttgcctggcttggatgccaaaattatcatattggaagcaaactgaagctaccgagattagctcagagtcgtatgatttctagagcagggggggagacgtcttcgagagggccaaggaggaaagggaaaaagtcatatgggcaattgctgggaaggacaaattggtgtaggaaaatcctaagagctttaaaattgggtccatgaagggagagatatatttaaaaagaacgtctgcttttaaatgtggtcgtttatgatggtatttgaaacacataaacggccaactaagctaacggtgcgtctataagcgctgcagtatcaatcggttcataacgctatacgatccgcaaga

SEQ ID NO: 122082 - DNA, 474 bp, Arabidopsis thaliana columbia
cacgcgtacgtaagctcggaattcggctcgagcttttttggatgggtaaacaacaagccaggatgaagctggaacagcagctgtcaagacagttgaacttgatgcagctcttggaggccgagctgtccaatatcgtgaaattcaaggtcatgaatctgacaaattcttgtcttacttcaagccttgcattataccactagaggggggtgttgcgtctggatttaaaaaaccggaagaggaggagtttgaaacccggctgtatacctgcaaaggaaaacgtgctgtccacttgaagcaggttccttttgcacgctcatctgtgaatcatgatgatgtgtttatcttggacaccaaggaaaagatttatcagtttaatggtgcaaatttcaatatccaagaaagagctaaagcggtggtagtcattcaatatttgaaagacaggtttcttgaaggaacttctgactttgctattgt

SEQ ID NO: 122083 - DNA, 308 bp, Arabidopsis thaliana columbia
ttttaaaggactcgcgggaaatacaggggcggacaggcgagcacgacgaggaaaccgggaagggcacaggcagcttttttccgatgggagggaaagagcgcggaaaaaaacgcgggggcggcggtggggacgcgcggccgaatgccccccgcaacttatagcggcttgccgccgtgtttcttatatccgtatcccgcaggctgcccgcttacgtgcagcttagtgagcggttggcggctgccgcgagccccgcagacaagtattttttttaaggggggggggcccgagactgccatcgcgccgacgga

SEQ ID NO: 122084 - DNA, 537 bp, Arabidopsis thaliana columbia
ctagaagagctaagacgtcgcacgcacgcgtacgtaagctcggaattcggctcgagctggaggtttgcgctagaagcagccacccttgaaagagtgcgtaatagctcactgatcgagcgctcttgcgccgaagatgaacggggctaagcgatctgccgaagctgtgggatgtcaaaatgcatcggtaggggagcgttccgccttagggggaagcaaccgtgcgagcggggggggacgaagcggaagcgataatgtcggcttgagtaacgcaaacattggggagaatccaatgccccgaaaacccaagggttccttcgcaaggttcgtccacggggggtgagttagggcctaatatcaggccgaaaggcggatgtcgatggacaacaggtgaatattcctgtactaccccttggttggtcccgaggggacggaggaggctaggttaacccaaagaatggtattgggtcaagggacgcacgggggccccggtttttcatgggaaagatggggggaaagaaaatgcgcccaagccaatgt

SEQ ID NO: 122085 - DNA, 526 bp, Arabidopsis thaliana columbia
acgtcgcatcgcacgcgtacgtaagctcggaattcggctcgaggtgtcttgatagagaagacgactctaaacccaagtgaagtaggtgacattgttgtgggtactgttttggcacctggatctcagagagccagtgaatgcaggatggctgcgttctatgctggtttccctgaaaccgtggctgtcaaaactgtgaatagacagtgctcatctgggcttaaggctgttgctgatgtagccgctgccattaaagcgggattttatggacattggtattgggagctggtttggaatccatgactaccaatccaatggcatgggaagggtcattcaacccagcgggtgaagaaggttgcacaagccgcagaatttggcttcttccatgggtggtacttaagaaattgtccacaactgtttggtgttttaagggtagaaccataataaagctggttggtgactcccaaaaaaaggcacctggtgcttattgctgtgggtaaattaagggatagaatccttccctgggaag

SEQ ID NO: 122086 - DNA, 536 bp, Arabidopsis thaliana columbia
gacgtggcacccacgcgtacgtaagctcggaattcggctcgagatcaaattgacactctctaccccgggcacagactcaccgacaccaccaataataggttcttctccggcgattctttccgtaaccaaccagcaagcagccactcaatgtcaacctccaatcaattctcacgccttccgtgctttcctctcacgcctctcgggcttttttcgggaagggctctcttaacgccgtccatggctataactagaagattcggggctcctttgctagacctagctcttataccgattcctttttccaggatccggaaaaaacgtcgcttactttaaaagacaaattcctccgcaaatagtctcatcaagcccttgggtttctccctcctcatccgaactcttgctgtgtttatgaggatatcgtttttttattaggggccctggatagtttgcctaactctttaccagagttaagaataataacttggggttctcttaaggcggaagccttctaaagatcgaaggacatttggtagggc

SEQ ID NO: 122087 - DNA, 429 bp, Arabidopsis thaliana columbia
ggggtggaggtaggggatagggggagtttttagggggggtttaaaccttgaataaggattattgtagagagatttgagtatggagatttagtggtgagtggggagtaagaggagggtgtataagaggaatgatttgaggaagagggggatagtggatggatagagtgagggttttggtggatgataagtgatgtggaaagtttttttttttaggggggggggggaaaagagtgatagttatagggtggtgtgaatttaattttatgtgaaggtgagagatagtggttgtgtaggaggaaattattgatggggttgggtatgtggattagtattgggtaggaagaggtggtgagtaggggaaatggagttgtgtagagtttggttgagtgtgggagtaagggaatgtggaaatgattaaggagtgtttat

SEQ ID NO: 122088 - DNA, 481 bp, Arabidopsis thaliana columbia
aaaagggggggggttgttggggggaacaggggggagggtgtatattagtggatgagtttttagggaggggtaaaaccggaaaatgttgttgagtatgggggggatatgtgtgttattggggggtggtgttggtgtggtttgatgagaagagaatgttgagtaagagttagaggagggagaaggtaggtaagatggatttgattggtgatgggtatattgttgttttggagggggtgtggtgataaagtttaatatgtttagttagagagaatgtgtgtgttgtgttggatgataagtatgaaatgagtgagaggagatagtgaaaagatgagggaaggtggagagtggtatagtagtggaaagttaagagagcgaataaagatattgaggatgtaaaatgtatttgtgtaattaggtaaggttagtatagataatggttatgtggttgtaagttttaagaagtgtaaaagagaggtgtggg

SEQ ID NO: 122089 - DNA, 496 bp, Arabidopsis thaliana columbia
gggccgcccgcaccgcccccccccacgaccggaacgcccgcccgcggcattttcgcgcgcgggggggaaggtccggcaaaacaccccgcccgcgggcgaccgcgccacctgactcccccgccaagcccgaccgctccccgctgacacgatcgacggactcccggcccccgccgatacgtctaaagagacaccgcgtgatcgacccgcccccgcccgcgacacggcaactcgtttttttcggggggggggtggggagggggcccccacatgcgcgggtaaagaaaaacagcagagatgacgcccccaccaaccccccccgcgcgtatcccccgccgtcatggtcgcgcgcgacgccgcaagccttgcgccggcgtcaatttaacctgcaacactggaaccaggcacacccggcggctcgacatacccgccgagcgccgcgtccagcgtccgtccatccgccgacgccccactccgcacccgacgaagcggccacggg

SEQ ID NO: 122090 - DNA, 548 bp, Arabidopsis thaliana columbia
gttcgtaaactcggaaatttgggtctggtatagaataaaagaggatattccgtgacaaggtgcccacccttcttttgtcttttttggctacatttaccgaccatttaaggccttcccaccgggaaactaggggcattctaacgggcctccggtgtactttttggaaaataaagctgaagggaaggaaaatattcgtggtttttaaagaaggggggggggttgataaaacaaaaaccctaactacaaaaaaataatggtcgtttcaatgggtttcacacaacctccaaaagaacacaagaatttctcccacccccagaaggatagaattgagagagagccttggggaaattttctgtggtggtctctaccactagaaaccgtgaattttggagaaaaaagagatcccccctcccctccaccccacgtggataaaaaggagagaaactctggaacttttaaaaaaactgggacgtataacgtgaaagacggggccacaaaagtgtgatagggcgagggagatgaaaaaaggggggccaacatcatggata

SEQ ID NO: 122091 - DNA, 523 bp, Arabidopsis thaliana columbia
  unsure (1)..(523): unsure at all n locations
aggtgcactctagaagactatgacgtcgcacgcacgcgtacgtaagctcggaattcggctcgagtgtttaagttgcggtcgggtctcgaagaagattgtcccaagtggatgcagggctatgattggacaagttgctggaggtggaagaactgagaagccgatgctcaaggcaggaaacgcgtaccacaagtaccgtgtgaagaggaactcatggcctaaggttcgtggtgtggctatgaatccactggagcatcctcatggaggaggtaaccatcagcacattggtcacgccagtactgttaggcgtgatgcacctcctggacagaaggttggtcttattgctgcaaggaggactggtcatttaaaaggtgaagctgctgtttaacctgccaaggcagactanagttaaaaaaaaaaactttggttctcttgcttctatgttacaaggtttgttggctggggtttcttatgaacctctttctggaaatctaaaagatttttatgataaaaaaaaaaaaagagg

SEQ ID NO: 122092 - DNA, 374 bp, Arabidopsis thaliana columbia
ttacaagattatgacgtggcacgcacgcgtacgtaagctcggaattatgctcgagtttagacagggggggaagggcctatcggcggaattagcttctttaaaaacgccggtaaaaacaattggtttcccggtcctatggcttgcagctaccccgcgccattcgttaaccggcctgaacctcttcagaactgatagtcgaagtatgtcgacgcctcggatatcctttggttttcgggggaggggatacctctctttccgaaattgttagctaatagtctattctacgtgctctgccaactatagagggtgtgctacgcgcacgtttggtcttcaatagatagggcctcgtggatttggtgaggctccgcgctaat

SEQ ID NO: 122093 - DNA, 379 bp, Arabidopsis thaliana columbia
cgtcgctacgcgtgtcccgcacgattggtgtcacgccgcgccgccgtcatcttgtgatacggcagcagccccccccgcgcaacgttcattctttaccgacacggcatgatcccccgccccccacggaccaaatttttttttaaagggggggtagcggcgcgagaccgtcgcccgctgcagcaaacgagaatgggagaaccagacgccccagaccgacgccgacaacggataacgcggcgagaaggtagcgaaccccggttaccaaccacagagagcgcggaagagcgcaaggacgaacgcaaccacgcccgcctcgtgcgaacaggggggatgagtggagagttgtgacggcagcgatcagacggacacaagatgacga

SEQ ID NO: 122094 - DNA, 400 bp, Arabidopsis thaliana columbia
cccagcgcgcgcccgccgccgaggggaatttgatgaaggaggagaaggaggagcaatttcgggagggaggggacagaggccaggcccgcgtcgaatacacgagggcgccctcgcacgcttttagcagcgcgggggcacggtctcataaaaaataatccaccgacgatgctcgccgttcgacgcggtcgcatgactataaccgcccccgtagcatcgacatacgtcatcccaacgtaaaagcacatatactcgaacacgcaccacataccgcccctgatactagaaaatgaagcgcgacctgctaggagaggccccgccccaccagggaagatttttttattaagggtgtggtaaccgaccccaccaccgacgatgcgcgggagataacgagtggagatag

SEQ ID NO: 122095 - DNA, 441 bp, Arabidopsis thaliana columbia
  unsure (1)..(441): unsure at all n locations
ttctggtgtgttgcccggcgcgggggccggnggggagagttagggtgggggggggggggggcggaatttaggggtagaggggaccgcgcgcggatgtcgatgtgcgatgccgcccgtgcatttttccagagcgggggggcggtgtgggataaaaaggcctgcgcccgcgtgtcgtgcgcgcctccttattcgcccgctctcgagctgctcccgcttcccccgcgttcgtgtacggagagcgcccggctgctcgcggcgccgtcgtttatatttctagccgttcgttttctgcgccgcggtccgcaatcatattggtgaattttttttatgcgggggcggggggcgcgcagctgacgcacctcactcgccgcctgctcgaataattcgtgatacgctgtctcccccgattgtgcccctccttcttgcggtatcccccggcgc

SEQ ID NO: 122096 - DNA, 550 bp, Arabidopsis thaliana columbia
ccgcgtgcgtaagcccggaattaagggtcgtgttaaatattagggggaggcctatctacttgtagagtgtatgaaagttccctttttaaaacatgtgagtgtgtgaaaacaaaattaaccaaaaaatggccgggattgttgttgaactttcttgggcactggaaataaagggtgggtggacaaactttgaccattggagttttttttgctttgggggggaaaatcctggaatctttttttcatggagtgaaaggggcactccaaaaaaccgtttttggttcttttatggggtgggacccacaaattttggatttttataaaagtgttcgaaaaaacccaggaccaccttgggagtattgggttgtttgatacaaaaaaccattgtctcttaaattgtgttgggggccacccccgttggggggtggtttaaaaattttgttgctagatgcggttcatatggttttcgtttggcggcgaaaagattggagaatgatggaagccctggcatttgataggtaaaataaaaatatcgcgttattagataaaataa

SEQ ID NO: 122097 - DNA, 502 bp, Arabidopsis thaliana columbia
  unsure (1)..(502): unsure at all n locations
ttaggtccactctagaagaccatgacgtcgcccgcacgcgtacgtaagctcggaattcggctcgagtgtaaaacaatgggagagacagcgaaagcaaatgtgttagtcttctcatttccgatacaaggtcacataaaccctctcctccaattctcaaaacgcctactctctaaaaacgtcaacgtcacattcctcaccacttcctccacccacaactccatcctccgccgtgccatcaccggcggagccactgctcttcctctctcttttgtccccattgacgatggattcgaggaagatcacccatctacggacacatntcccgactacttggcaaagttccaaaaaaacgtatctcaaaccctctcagagcttatctcctcgatggacccaaaaccaaacgccgtggttaacaactcgggcctgccttatgtccttgacgtttggccagaaacatcctggcgttgctgcggcgtacctttttacctcaatcctccaccgg

SEQ ID NO: 122098 - DNA, 142 bp, Arabidopsis thaliana columbia
aaaaatcgacaggtcacagagcacgacgccgcacggcacgaattttttagatgagaagggagatgtgcgagattgaatgggcgtggggcgagcaggcggagacagagcggagacggcagagacgcaggatttgagcgggggg

SEQ ID NO: 122099 - DNA, 516 bp, Arabidopsis thaliana columbia
acgcgtacgtaagcttggatcctctagagcgtttcgcctttggttttggtctttttttgagaaaagaaaaaggtttatcataaaaatcttttaagatttcagaatgaggttcaaaaggaaacaccgacaccataacttgaaacctagaaaacaggagaaaccaagtttttctttctttaactctagtctgccttggcagctgaggggggggctagacctttgaaactaccatttcctctgttgcgcaataacaccacccttttggcccgcgaaggtgcatcccgcttaacatccttggcgttgacccatgggcggaagggtcccccccccatgaagaggccccccctggtttcataaccccccccccaacacttcttggccctgagtatcctcttcacacaggtccttggggggaccccttttccccgcttggaaacagcgggtttttcagttctttacacctcactccagctgggcaccgtttcgtacccttctctcccctggggaacgattctt

SEQ ID NO: 122100 - DNA, 596 bp, Arabidopsis thaliana columbia
  unsure (1)..(596): unsure at all n locations
ggggagggnggggagaggggtttttgtgggaggggggggggaaaagccaaatgnagaagnatgagggagggttgggatgtggagagagaggatggatagagggtggtggtgattttggaagggatagatattatgtattatgatgttgtatgtgagataatgtgaggataattggatgagatgtgaagtgaaggtggatataaggaggatatatgttagggtgagggatgttttttttctnggagaggggtggggagagaaaatgaggattgatatgagatatgataatgtgtgtggattaggttttagagggtgagggggagtgtgttgtgtttttatgtagtaagatatgatagagtatagtagagtatatggggatgatagttttgtgatgtttagtgagtagtgttatgtaggtaagtgtaagtgatggaagcggtggggtgttgaagtgagggtagggaatttagagttggtgaggagggtggttgtggtggggagnagagggtatatatgagtttcagagatgggtggagattgagggtagaagaggtgagagtaggtagtagagtgtggagtttgagaggttggtaaga

SEQ ID NO: 122101 - DNA, 508 bp, Arabidopsis thaliana columbia
  unsure (1)..(508): unsure at all n locations
ccgcctgcgtaagctcggaattaggctcgagctgctcgagcgggttaccccttcttcttcttanctctcttcctccattatcgtattatgcggagcttctccattcgaaggatttgatgctgaaaaagacgacgttaccgacgattcctcttaccttgttaaccactcactgcctgcggcttttctgactgagtttaactggggggggtccgaacccgatgcggagcgcgaaccttctctcgccgaaggtaaatccgagctgatcactggaatcaaagtctggggcctcaagcgcgagtcgaaacctcccctcggttacaccctgtggaggacctgggacggaagacgagttcaaaggactacccagttggggatggggaacccttggatcctcccattggttacaaagaaaaccggaactggatgctggatccaaagaacgcgccgatctggaagaatttgtgtgggaaggcttaggggacgcaccttattgatcagagcgaaagaa

SEQ ID NO: 122102 - DNA, 529 bp, Arabidopsis thaliana columbia
ggggggttgggggggaacctaataggtgcactctccaagactatgacgtcgtacgcacgcctacgtaagctcggaattcggctcgagctcgagccgagggggaagcgcgggatcagaagcccaaggtttaggctgtggtgtatgagatatatcttcaagaaatctaacagagacacaaaagaacttgaagaaaaatagagtttcttttggctcaaagaaatctctgcctgtgcttgggttggcagggtttccttgggcaggagcgtgtgtcattgcattgaatccaattcataaactttatttacctcatcgggtaaaattaaaatggaaacatgcttatggggcttaaccctaagaaactggaaccctattacattttggtttaaaaaacggggcaaaaggggcgcccttaaatctttgggtatggggatgaccttaattaaaagggttttaaagattggagaaggtaaaaaaaaaaaaacgagggcggggccgccgacctatgccctcctggacccgaggaataagt

SEQ ID NO: 122103 - DNA, 574 bp, Arabidopsis thaliana columbia
agtagttgttagatggagggggaggagaaggggaggggttttattggggaacaggggggggggtttattgagggtggaaacaaagagggaggagaggatgacgagggagaattgaagtttttagaagggggggggaaaggcggggagggatgtgaggagggagggttgagtgatggaataagatagtgatatgtagagtgggggatagaatgtagggataagtgattgtgagatatgcgtgtagggaggggagggaattgtagggagatgagtaaggagtggtcggtaggttgaatagtagtggggtttttttaggaaaagaggtgggtatatggctattaggggtgaagattaggtggagacacgtttgtaaagtcgagggtttgttcgtatgtgatagagtagtaggatgagtagtggagagaggaacgtgatgtgtgatgctagaagagagaacaacgggagtatgtaaggtgggtaatggagtaagcgatggattgagagtgtagaagcggataagtcatgagttggttgacagtcgaggggtgagttgagtaagagaatggattagatg

SEQ ID NO: 122104 - DNA, 283 bp, Arabidopsis thaliana columbia
  unsure (1)..(283): unsure at all n locations
ccaccccccaaacggcgcggaggcccgccacgcctatttttcacaccagagcggatggtggcctgtgtgataaataaaacaaanaccacacccgccctacatatcctacaccctttttttttaataacaactccgttcggtccccggggtgtttgtacgttagcgagtggttatttgcacaccctctcctatcccatctcttattctcttcgcacttgctccgactacatatgcacccaccccccactttttttttttcccgcggggtgttcccagacataaa

SEQ ID NO: 122105 - DNA, 433 bp, Arabidopsis thaliana columbia
gccccccaccaaacgcgcgggccgggggattgtttaagacccccccaatcgacgcaaagaccccgcccccgccatgccccctttctcggggggggggggtaaaaacaccaacatcccccagaccctcgcaacgtggttagaggcgagaatggcagaaggcctaacgcacaatctttgccaattcgcccgaggccgactccaacccgattttttggggggggcaccccacaccacgcgtacaacaaaaagctaccacggcaaagggaaagtcgagcgcaccacacgcgcgccgcccaacctcaacggcagaaacgcgccaatggatcacctcaccaaccccaaccgccgaagcaccccacgctcgacgacactccaacccagctctcaaagataatgcgaggatcgacagtcgtttgcgtgaagcgcctcagtt

SEQ ID NO: 122106 - DNA, 490 bp, Arabidopsis thaliana columbia
  unsure (1)..(490): unsure at all n locations
aagcttggatcctctanagcggccccccctggggttttgttttttttttttttaagcacaaacctttcttgcgtactttattggatctgggatgaaccaataataatagtacccccatttatctcgtccctggccggaaatgctgtaatagaaagaaaagaccaaaatttttctaataaagtttttgggggggggggggggcttcatttgctgagacggctttggaaacaaccactatgttagggtctgcaagggtgaggacaaattttaatattaaaccaaccctgcttattctgccgtaagatgtcatggcgatgtgggcctcttctatcatgaaggaaaacttggcctggtttaacccttgtgaaggtaacatcccaatcctggttcatgagggacctcccccttccaaggagtggctagagtacagaatggcttcgaaaagtttcttcctactgctgaaaaaccaacaagcctcggggctttcata

SEQ ID NO: 122107 - DNA, 621 bp, Arabidopsis thaliana columbia
  unsure (1)..(621): unsure at all n locations
ggcggggggggggggagaattttggcgagggactcnatccttcctaaattaagagggaaaaccctttccccccctcccctttccccccccccccaatttccccttttcccccccgtgccttgggctttacctccaccaaatcccctttttccccnatttctttttttttttaagtgccctaacgggcccctcccttttccctttttcaccccttggttcctccttccaaaccttttcccccacccgttttttttttttccccaaaccaaaccttttttttttgcggtggtgggcttcccccacgagggccccctttttacaccataaccccccaacaagggggcctcttcttttcggcccccctccccccttctctttttcccacccctttccccccctttttcacctatcgctctccctctcttgccgttattggaacaaacctccccttttcttcccacctctcccttcctctcctccccccccccccaacccccccattttcgccccctctaactcctctgtcctcccttctccccccactccccccaaattaggccccccaccaccccccctcccccccaccttctccccacttcttccccccccccccttcttctt

SEQ ID NO: 122108 - DNA, 433 bp, Arabidopsis thaliana columbia
  unsure (1)..(433): unsure at all n locations
cgccccgcaacacgccggcggaggaagggggaggcctatttttttaaacccgccccccccgcgttttgnagtcacagaacgcgctgctttggttcggtgctaggcgcgagatacaagccatttttaacgagggggggaggggggcgtgagaaaagaactgcatgtaactcacgagtggcccgtaagctgctggtgccacgaatcgaccttgtcccccaatctgaatcagccgacgccgacaacagacccaacagggaaaggatgatcccaacgggtcacactaagtggccgatagcaaaacaaaagaggaagcgcttttttttttgagcggggagcggcaccagacctgaatcgctaggcgaaatttccaccataacatggcgacgaaagtcacgcgatatacgacgtgcacatgacccatacacacagggga

SEQ ID NO: 122109 - DNA, 548 bp, Arabidopsis thaliana columbia
  unsure (1)..(548): unsure at all n locations
ctatgacgtcgcatgcacgcgtacgtaagcttggatcctctaaagcggccgcccttgggtgtggggggtttttaataaaaattctattcttccttttcttttttttttttttttcttttctcctccttaactaccagctcctttttttccccccccaccccgcggggttacccaaaaaaacccccctctttaccccccttttgggaggttttttttttgggggggggaacacctttacatggtgttcccttccaaaagaaaaaagaactcccttcctcttccccaaagcaataaccccccaatttttctacttttttttgtgggggtgccaaacacaaaataaccccctgccaagaggagaaaacccccctctcctagggctctttaccctaacaaccctcgtttctggccgctcccagtgngcaacacataacaataccccaagagatccccctcctccccccccccttttgtcgccctctctcacccccttcccgcctaattttttttttcttaagggatctccttcacgctcttttaccccgccc

SEQ ID NO: 122110 - DNA, 638 bp, Arabidopsis thaliana columbia
  unsure (1)..(638): unsure at all n locations
atctccccctccccctaccccccacgccaccccagggggggggtaataatagttcccacgacttaacccccactgtatataagggaaaaaacccctccccccctcttcttacctttccccaattcccctctacccccggggtacgcgttcttaaaaaaaaaatcttacccccccccacctcctcttcacttcccttctttacttccccaacaaaccccccccttcctttccttcccacccttaacaccccaacaaccctccttccttcctttttcccttaattctcccttctcaataatttttataaggggggggggacacacaccccccccatcggctcttccacaaaaacaaatacaacccccttctcaccttccaaacaccccctcttcntctctccaattcaaaacccccttccccccactctattcaccactacaataaacctctctcctagtctttaaaccctcaaccttatccaacctctcccaccttcttctttccacaatcaccccactctttttcaccaccccactcctcttcaaatcaaacaaaattttttccactatcccccccgctcatccctcctccacactttctatttttcatcattttctacataccttacactcacatca

SEQ ID NO: 122111 - DNA, 541 bp, Arabidopsis thaliana columbia
tgacgtcgcctgcacgcgtacgtaagcttggatcctctagagcggccgcccttggggggggcggtctctattattttctctttttcctcctcttctttttatttttttttcttttctcctttattcttccctcaaaacaaaaaattggatcttttcccttccccttgtgacagggagaatccctctggaaacccccccccccccttttttttttaaaaggggggcgggggccccccctttttgttacaccccaccccaaaaatatttcttacctttctccgcgcccccccccccccccacggggctccttctttttgcccgcacgacagaccctttcctataccaccccgggcgaacaatctccccggcctatcaattgtggttgggccctcgacacccacccacaaccctccatttttttttttttggagaaaaacccccctcgttgttgaaaacttttcgtctcctcttcccccacacaccctttctttccctcgggaatgcgccccccgttatattttcctccaacacccctccccgc

SEQ ID NO: 122112 - DNA, 502 bp, Arabidopsis thaliana columbia
tctagaagatctatgacgtcgcctgcacgcgtacgtaagcttggatcctctagagcggccgccctgggggttgggtttataccttttatataagcctttttagatccaggcgactttcttctaagtgacttttcaaagttttgccgggcgggaatttggccctaaattttaggagcgctctttttttttatccctcaaacccccctttttccgggaactcccccggggggggcccagaatacggtgttttttaaaggctttttcttggggggagggttaattaaaatttttttttgggggggagaactcctgaccgggggggggtttttcccttgggatcttttttttttttgaaggggattgccagattcgggggggggttttgggggggcgattaccccccgcccccttttttggaagaacccccccctttgggggactcccctcttttgccgtggagaacctccgggggccccaaaactggttcccgaagaaaggcccg

SEQ ID NO: 122113 - DNA, 590 bp, Arabidopsis thaliana columbia
ccccgcgcccgcggcgggggggggtaatattctccaagtctcatccccatcattataagggaaaccctttcgccttcaaatacccttccccgattccccttttcacccaggcgtgcgtttaaaactataaaaaaaacacttaaaaaatccaacccactttttttttaaataacttttcaaaaatttaaccccaccaccctctttttcccactaaacatttccaaaccattttaaaaggttttcctcctcaaaccccccatttccttttttttttttgagggggagaatcctcaacaacctaaggggaaaaaaacaaaaaacccttacatggggtgtttcgtaaacccaagccttaaaaaattccaaccctaaacttttgggccccattttgccctttaaaacccccgcttttctacaaccctttaacctccacttttcccagcacttttctaaccacaaagttatcaaaacctttccccttagaaaatccccccctctttttccaaattttttaacctcgaatcccggagaaatcacccccccacagaatactttttttatcctatcaaaccttctaaccaccaaaaaca

SEQ ID NO: 122114 - DNA, 486 bp, Arabidopsis thaliana columbia
tgacgtcccctgcccgcctacgtaagcttggatcctctaaagcggccgccctttggttttttttttaaaagggtcacaactttgatataataaaagggttgaaaagttgacacaaaacagaaaccaaaaatagtgttcaaaatggcgttctaatgtttcggggagcaacttaaatacgacccgaaacaaactagagagaaagaattttcttagggggggggcagtttaagcagcaacggttttagcaagagcagaaaagagtctaaacctcttcttggccaaacttttactacggcgatcaccctgctcctttaatctggaggcaagaagcttttggtaaacagctgcatcaaaattaagccttggccattctttttttcttgcaagaaattctagttttcttcctctggaggggcaagggagtccaagcctctggatcttaagacctttgtaacctttttgcctttctttgtttgaaaaagcccc

SEQ ID NO: 122115 - DNA, 430 bp, Arabidopsis thaliana columbia
ccacttttaattatctctaaatcatttctttacccgaggcttgttttaccacaacctgttctttatctgaagccattaaatttaaacggcccccatccccccccccggggtgtaaaaacacaactcccagaacctttttttttcggggggggggggggcccttttttgggggggaggttaatataaaaaaatctacccggcattcctccttggggcgacgtcacaggggctccttttttcaacattactgggggggagcgcaccagcctccttcttccaaaacaaaccaggagttcttctacttgcggggggttctccttttttttcccttccccggaaggctttctctcttctctacccgcccggtccgagatccttgtacaagaaccacccactctctacccccccctcccattccgggaccccctct

SEQ ID NO: 122116 - DNA, 623 bp, Arabidopsis thaliana columbia
ggggggggggggggagatatctccgagtactatcccactgaataaagggggggccggtgcccccttcggtccccgctccggatttcccttttccccccgggggtggggggaaccaaacaataactttttcccttcttaaaaactccttctatttctttctttacaaaaaaaaaacctttttttctccccccgtggtttttttgggtgtctcccccacttcttacttgaaaaaaaccaaagaaatacttttcttccgtgggggcaggcccctttttctattgcgggggggggggcctctcttttttgtgggccaggacagaaaaaaaaatttttttttcaaggtccctcaaaccttttttggggagccccctcccaaacccatttctttttttttttttagggtggtccaccccatgggcggggtggaaaattttcttccacttttttcgcccatttccgcccccttttcttagttcctatcgagcgaaatttggcctcttcgaatttcccgtttggacaacacttttttctttcttcaaagggggattgtctttaccctttctctctcccgcgcgtgtaacctcttgtgtccccccccctcttccagctgtctttcggtccct

SEQ ID NO: 122117 - DNA, 187 bp, Arabidopsis thaliana columbia
gcgcgaacaactcaccaagccatcatagtcgcgtcatgtgatgaatggcgaggtcggtcggagggaggaggagcgcacggaagccgacgagacagtaggcgtggctagcaacacccgacacaattaaagcggagctgatcatctggacccccgtgccccggcacgcatcccgcgcctacagccacgt

SEQ ID NO: 122118 - DNA, 645 bp, Arabidopsis thaliana columbia
gcattagacgagatttttatcatgaggggtcggtgtggtttagaaatagaaatatttgcgacgctgagctggtcgggatagttccactatcaaattttcatcagcccatcgccgtgagtttgcgcctccatccacatacggagcgcaggcgagaaagatggtacgtcgttcggagtatcaactgattagtatgaggcgggctcatgtatgcacgcgacggccgtttttttttctggagggggagtgcgaacacaacaacaatatactcccctatgataaagaaaacgatcgttgcttacgcccataatgactctgagggatatatatatcgctagagtagtacgcacgacggacggtcttattgtagagagactaacagcgacatcaattcgttatctatacatgttctattgatatcatgctaccgatctagcagacctatcattcttcggccccgcaacgatactgacttccctttaccggtcgtacgacgacactacatatttacgatacacatctcacactcgagtgcagcctacatactacattgtagcatcacaatactgtctcgtttatcgtacagaagagtggtgagaagtattgtgttcacgagatactcgtgtacactcgtgcggacagcgcggt

SEQ ID NO: 122119 - DNA, 448 bp, Arabidopsis thaliana columbia
acaattagaaaaggttcgacgacccacgccggcgcagtgatcgcgcaccgtggagagcgatataaggtgaggggagacagcactgaagtgccaatgtgataaattatcaatcaaccgaatactcatgaaaaggaaaggacaagcaggatagtaccccaccaccacgctcacccgcactcgcacaaccataagagcaatacaggaactgtgaacggagcgaagggattaacgataacgcacatcgacgccacgcggtgccgacgttcgataagtgtcatagctgagagagaaagggtgggggacaagtcaagaagtctagttacgacaaggagaatcatgtaagaatacgacatcgcaaaatcgcacagaaaacgtattcactctcgctcgccactgctcttatgcagctgagacgggagaagtcgagcaatcttactatacagcgcaa

SEQ ID NO: 122120 - DNA, 303 bp, Arabidopsis thaliana columbia
tgcacggccgtaccgtgaaggctgtgtgagtccttatagaagctggcccgcccttgtggggtgtgggttttattatattttcatctactatttctacgctgcgtgtttcttttccgtctttatttttgttctttttgtttggccgcacaagaaaagagggctttttttttttgtttgttacaacacgcggggcgggcagggtggaaagacagactaaaaccacggacgggggtccgcccgggggtgggaaatgttgtttgggggggtggggggcacatttctctgtggggggggcgtcgcgag

SEQ ID NO: 122121 - DNA, 452 bp, Arabidopsis thaliana columbia
cgcggaagtaggccgaatctatcctaaaccggggggggggttaaattaagcaaataacacgccccactactacttctcgaaccacccccgttccctctcaaaaacttccacaaactgagatccgttaggctaggggccagatttttttccgagccttacctcaaatctcacaataacgaggggggggacaccacgcgcgcgtaacattcaaaaaaactccattctatatgacccgtggagacgcgcgctacccttcacacaactctaacggctaaccctatatccttctacactacgcctatccagtcacataccaccctgtcacacctacctccccatcatatcagtctcccgcctatgcaatatctcttggacaagtttatctcaaccatcaccgtccacatcccgctaacggatgtacagtagttgccggcctccccgcgtctggttct

SEQ ID NO: 122122 - DNA, 513 bp, Arabidopsis thaliana columbia
tatgacgtcgacatgccgcgtacgtaagcttggatcctctaaagcggccgcccttggggtaggggtttttattctttacatacttttttgggagaaaaatttcttttaaaaacagggaagttgaaacctatttttttttttaaaaagtttcaaaagattataatttttgggggccacaaaaaaatcataaataaccgtttattcccttttttcggggggggtgaccaaaccaggggcaaaaccctaaaacaaaaattttgtccagcacaacaaaaagcccccaagaggcgggacccccgcggccaccaaaaaaattattccccggcacccccccttggaacaaaaggcgtaaaatcttgaaggacgccccccccaccttgtttcaattaaaagaaatccttttgtggaaacagcccaatcttttttgcaaggctaaagggtgcattcttctttcgagaacaaaaattttgtgtctagaaaatgtcccaaaaggacctggtttttaataaaaaa

SEQ ID NO: 122123 - DNA, 454 bp, Arabidopsis thaliana columbia
gggggggggggggaataagtttggaacgcaccccggaaaattacagaggcaacaagaaggcggacacggagcaaagggggggagcgctcattttcccgcggggggggggcggtaataataggttacaaggaaaaacccgcagaggcgctatcgcggccctttcatcttaacacaacatgcggcgccgggacgacgagtccgtgaccgtacaggatgcgatctatcgcgcaccagtgaatgtgcagctgaggcagcgaggcgggaggcggggttttataattttagggggggggcagtcaggaagacgcttacagatctcgcatcccttaaactaaggcaaaacgggagcaggagccgggaggcgaaccccgggtgtgtagcgtggttaatgtgcggcagaaatatggtaccgaagactatcacagacgactgggagcccgcggggcgcaccgga

SEQ ID NO: 122124 - DNA, 297 bp, Arabidopsis thaliana columbia
ttttacacccggggggtgggcggtcgtacacaaaaaccaaaaatcagacgcccgggtcgagcgcgggctgaagaatccacccgctctcacggcgcgttgagggggggcgctcgcgggcggtacgcgaaggatgcggttgtcgcaggcaccaggacgacacttcgcaccgggttcgagctacgagcagcgaccacggtttttttttttagcggggggggacggacacaccagagtcgcacgtttataccgcctgcagtacatgcgaggcgtcaacatctaatgtgtgacaagacacaa

SEQ ID NO: 122125 - DNA, 401 bp, Arabidopsis thaliana columbia
gccgccagtgccgcccgaggcgaattttttacgccccccttcagagaaaagaccacccccccgacagaactttttcttggggggggcgaaacaaacagagaagcctagccaagacttttagtgtttacgctgtagcgccaacattgttctgccatcctcacaccctcaacgctttcgaccgcgaaaatttttttagggtggaaaacacgaatcattattaaataacttccgacctggaatcttgtaacccggcttccacattgtatcctgtacccaactgccgtattccgcgggttgtagtttgttacggtgcatattcttaatctgacctaaataaaaagcgccgctcgtgtagtcgtgagcataggaatgaaccctccgcctgtcgtacggtgttttaa

SEQ ID NO: 122126 - DNA, 375 bp, Arabidopsis thaliana columbia
agggaaaactctttttacaccccccagactaaaagagagaaagggcccgcaagacccgcggacccggatatcttttacagagggggtgggtcgaccaacaaacacagaccgcgccccgctgggcaggcgacatgcgtaccgacccccatataggtacgcgcgcgagagcaatagaaaatataccgactggccaaacagagtgaactatatcacaacggaacagaccacggttttttttttaggggaggggcggcacagcggggcagtctagtaaacgcgtatgaaaacgatgccacggactggtatgcggtcaccaacacccaacaactcagccctcttaccgaggcaataccgcgcaggtcggtggtgatgcta

SEQ ID NO: 122127 - DNA, 219 bp, Arabidopsis thaliana columbia
agagggggggggctacttttttaaacctaccccaccagaattgcgcccggtggataccaaatgttcctatcctgcttcaccgcggacccccgcctttttttacgcggggtgtcgaggcgccgtgaacgacaaaaaaacacgccggacagccatacgaagcctggtttccgcgagagacagtattcagagatcacactgacatgtccggtgtgtcggccg

SEQ ID NO: 122128 - DNA, 526 bp, Arabidopsis thaliana columbia
tttgaaacatcgcctccccaatttgttaaaatagaaaagaccactctcctctatgcccgcgcgcggccctgaggactttttcgccggggggggcggagcgtcactacaaaaagactgtttattggtaaggtaccgtacaagctcggcgaggtatgcgtgcgtggtttaaggcgcgaggcgcgagcgagcagtataacgtacatcaactggtcacatcggatatacgcgtgaatttcgacatggaatgtcagagaggaaaggacaactttttttttgtgaggggggcggagaggtgcgacatctctcccgctccttcgcctagtataacccctcgcttttgttgcgtaagtcatggttatacaataagctgaggactcgcccctccgcgcccctcgtaacaccccaccaccccgcaattgttcccaagtatcatggtggtataatacggttagttgtaccatcacttgttgcagaccctaggcacttagaagcatttgtacgattatggcccgcgtgttagagagat

SEQ ID NO: 122129 - DNA, 528 bp, Arabidopsis thaliana columbia
aggtacactatagaagatttatgacgtcgcatcgccgcgtacgtaagcttggatcctctagagcggtcgccctacgggtttggtttctatcattgtacttttgttaaaaccttaattttttggggttgggggaacacttaaactgaattgaaaaaattgaaacctctacaagaacgtagttgttgtaatttccttcaacaatgacaatgatagaactcggggtgataagaagagtgtatgtagccgatccccggaggttgggaagatatcaataccctcagcgagatcccaaaaaaaaagagcttgctttccaaaaaataccattgtttcccaacttcacaagtgacataaaaaaggggccactacaaaatagtggctttaaagctcattgtataatcaaaagcctctttcatagaaaagggggggggtggatggtcccttttgttttttactttaaatggaccatttggccaaaatttttgccggaagagggaatagcatttttgcctggggaaaactttttattcc

SEQ ID NO: 122130 - DNA, 675 bp, Arabidopsis thaliana columbia
gacacccccctccgcgcccgccgcccgccgccgattatttgtaaccggccccccaatttcgaacaggacacacctttacacctaccgcgcgagacccaaactgccatcttttgcactaagagggtgagagatgaattaataacttataaatcccccttaatccctgtcgcgcctttccgcatccccccacaccacttaccccgccccccgacccccgcctcgctcggagcagactaccaacaacacacgcgctcgcggtctatattctcacatataccacatacgaaaagtgctcactcacgaacaacaacttttatacggctggggggggcatgagaaaaagaaacacacagctaaaagaaaaaaaacatcataataaaacacaaacacaccaaaaatacagtagtgacaaccatagaagagccgagcaagttgcaaagaggaaaataatagatgacatagatagaattattacagcccccacgaaaaattaatatagcccgcgtgaaagcgaaaatacagtgcatggtaaccccgcacatccagtactgcaaagaagcacccacgaccctgtccacaacggctacccccacctacctatcctcaatcatattataacttaacagtcgaacgcagatagtagccgtacgactaccacccgccacgtacagcaac

SEQ ID NO: 122131 - DNA, 525 bp, Arabidopsis thaliana columbia
ccgggcgaatcaaccaggccccgcgcgccccggaaatattgggaacacccccccaagtttatgacagaaactgcgcgccttacgaagcttggatcctataaagcggccgcccttggggtttggtttttaaagagacaccaaaacaggaccgaggctcttcctccttttaatctaaaatccgccggtcttactgacgcgattcaccaaagcgtgggggaaaaaattggcgacggaagaaaaatagatcggataattttgggtcgcgaaaagggtttttttttgggggggggggtgcaaaacgtgtagagcataggacaagatacaaaaatgcctgtaggagagacgccatcagccgccaaccttaagagcttcggaacggcctcaaacatggttgaaaacaagactaccaaacgcaacacgggcgcacccaaatccccgtactcgaggggcaccgcctaaagcgggaccgcggaggcccggcgcccgaccgttctcactagtgggggaagcagccaacccgcggta

SEQ ID NO: 122132 - DNA, 591 bp, Arabidopsis thaliana columbia
tccccccacaccaactccacaccccaccaccccccccggcaaaaaatacattccgcgaaaccatcccctccccaccaatttttataaagaaaaaaaaacacccaacaaccccattccctactcatatatactactcccaaatctcactttatcttttactccagtgtgggatagggtggcccttacaataaacacataacaaccacactctccctcctacccaatacacactccacatacatcacactctttcacttccctccttatcatactaacttcccacatctctccatctcctaaacactcaccaaatctacctctcactcaatctctaatataacacataaactaataaacgtctcatcaaatctacatcatacataatattacaactattttttcaaccgcgggcgggtgcagccaccccctctcccgcggcttcactccccacaccaaaaaaaacactcctcctcatctccctatcctcataatacctaactccccccattatccacactatattattacacacatctccccaaaactcacaacaacaaataactaaaatatacaatctaatcatctaaataa

SEQ ID NO: 122133 - DNA, 520 bp, Arabidopsis thaliana columbia
ctctagaagatctatgacgtcgcctgcacgcgtacgtaagcttggatcctctagagcggccgccctttgtttttttttttagtgaaaacataacaggaatctctggaaagcaaaaattgcttccttaaaatgagttcctgagctcctcatccaaaggatcctgtcctagtaaatatttaacaatctgagtagttttcttcttcatcaaagaatccctattttatacgggtgggttcttggggcataatttcagaaagtagaaagttagatccaagtaaaaaagaagctaatacataaagcaagcatttagggatcagatcttttaaaaaaggggcctattcaactcttatcttctttttgctcaccatcatgggattttcaacctccatgaatcatcatcttccctctcgacgttctctgattctttcttataaatactggccctcgggctcagagagtttttcttttcttagaaaccgggctcggatcctgaggaacctttttgtaacatcaactgggt

SEQ ID NO: 122134 - DNA, 515 bp, Arabidopsis thaliana columbia
  unsure (1)..(515): unsure at all n locations
ttaggacaactatagaagatctatgacgtcgcctgcacgcgtacgtaagcttggatcctctagagcggccgcccttgggtttttttttatatatttatttattttttttccttttttttctggcatgatatttttttataaaaaaaaaaactttacgcaggatggatttttntggttcccccatcaaaattactatacaagagattatgagggaaaagaaaaagaaaattttttaggggggggagattcaaaacataaaactcaaatttttcatttgcaatcttttattaccaaaattacaaacccctggcctgtgttcccaaaaacaaatgggaatggtgccaatgcagaaccttttttttttaactccttcgcaataataatgggataaggataagctcccacctggtggggggaggacttaaataatattttggaattgccagctttgtttttggcaaaggcctcttggttgagggggattgaaaccctccaaaagaaggcggggtcatcaa

SEQ ID NO: 122135 - DNA, 568 bp, Arabidopsis thaliana columbia
  unsure (1)..(568): unsure at all n locations
tacccccgcgcccngccccccccccggccggggggggtagataatcctccaagaacttaatccccactngactattaggggaaaaactccgtccccccttccaggtcaccgttgccccaaatttccccttttccacccagggggttcgggaccaacaaaaaaccaatcccccccccccattttactcactttttctcaaaaaaaccctcttctctttcttccctataccttcatttttctccccccaaactccatccccacctctcttcccttttacttcctttaaaaaaatttttaaccgggggggtttccctccaatgccgcattgaaaaaaaacccccccccctttttaacccattttttacccccaccctttctccttcttacaacaaaatcctaaaacccactcccgttttaatcattcccccaaaaccaacatgtcaatcccttttcccgaaaatcccttccccctcaacaaatctcctctcagaaaatcttttcaccccctcccacacaaattcgctttcatcccccctaccgcccccctcacccttcacccatccaccct

SEQ ID NO: 122136 - DNA, 569 bp, Arabidopsis thaliana columbia
  unsure (1)..(569): unsure at all n locations
cgcggccgggggggggggaactaattgtgtaccacccccagcaattcatnggggcaacccgcccccccccctcaagcctggattctttataatttccgccctcggggggggtgtttttttatttttatacctaattcccccttctgccgttcacacattccacaaccaccacccccccaccacaaaaacgtttaaaacgataaaaaaaataacacaccctcctcatacaaatacttttcttccaaccgaacctagccaccgcaattcttttattaggagggtggggtccataccttcagagcattcccataataaaagaaattttttcaaacacccccgcctcccatgagcaagcaatcctctcttctcatccatgtagtcactagataaacaccacacagcattatttctcttacttttaataaacaaataccctcaggcgacgacagatcccccccctttcctcaatgtcccgagtttgtcctacaacaattcttccctttgccatcacttcatgcataaataattatataataattaatctattatcccctatcactcccgatccc

SEQ ID NO: 122137 - DNA, 235 bp, Arabidopsis thaliana columbia
caaaaccgcaccgccgacgccggcgtccgtaaacctcccttttttctccccggggggggagggggcgaaaaaaaaaaaaatcacaatccctcatactctctcttttcgtcacccctcttctctcgcgccgagttaatattgagatcacttgcgcttcgcagtaaccgtacatacgtcactttccttaaccatcgcacctgtaacagccgatacccgaaagacgactttttttttc

SEQ ID NO: 122138 - DNA, 685 bp, Arabidopsis thaliana columbia
  unsure (1)..(685): unsure at all n locations
ttttccccccccaaaggcccccggagagaaaaacctcgtttgatacaccccccccccacctanagnagaaaaaacccgacaccctcccaacaccaccccccccaaatatactcttttttntcccccgtggggtgggtggcgtcttataatatcaaaacaanccacaaatccacaatcccctccaccctctctccctcccccacttttctcctcacctcctcttcctctcatatttcccccacacctaccgaatcattcaacaatattcattaaaaattttttattcatcttttcaaaatttccttaatccacccacacctctttctttcaaaggggggttggcttctacaccccccctatgcctcttttcacaaaactacccaccccccccctcccaccaacacatttattatttttccctctcccctctcctctcactccacaccactatccctctttcccacccactcctcctccactcttaactacaccccctttttcctctccattccctcctcttccctcaccctccctcctctcttcttactcaactacccctctcctctctcacctcactcacccctccccttttctatttttactcccctactatacctcctccctccctcacctccctccactctctccttctctctccctctctaccaatactaacctcccttcc

SEQ ID NO: 122139 - DNA, 538 bp, Arabidopsis thaliana columbia
  unsure (1)..(538): unsure at all n locations
gacgtggacctgccgcctacgtaagcttggatcctctatagcggtcgcccccggggggggggggaataaaaatatttttttttatcccccatcacctttttttttttgctttgttttttttgtccccgcggtggggcgggttattgcaacacaaaaaaaaaggggggggggggggggtccaccccttgcttttttttttttttagagaaaagggggttttttttccggaaagatagggcaccccacccctcggcgggncgacaaaaaaatatttttttatttggatggggtttaaaacatacgggctcaaaaaatggtcaccacgattttctcccggcggaaaagaaagtatactaccaccnatctaacagaaaacaaatatcaacccgtgacaaaaaaaactatttttatccgtccggtgtgtgcctcctcaaagcgaaaaacaacccccacatctaattttggccgtggggcgcaaaacagcgctgctcctatcaaaaaaagaaaaaaacacacctcgccccactgatacattaaa

SEQ ID NO: 122140 - DNA, 606 bp, Arabidopsis thaliana columbia
  unsure (1)..(606): unsure at all n locations
ccctccccaatgaccccctccccccaattttccccttttccccccactgcgttaggtggaaaaaaaaaaaaaaaaccttttccaacccccccaccccccctccttttttttgtttctaaataaacccctcaatccccccgcccaaaaaaaaaaaaaacactcccaataatacttccctccgcttttctctccacttctctcttcctctccctattttcctctcccnnncgccccctttatcttcttctaggatgatgagggacacctctttctccttggccgcttccacaaacgtcatttacaaactctctctttttttatttttcctacccctatatatacccctccctctctctcccccaatcttcatataatacttcgacgtaacaaccaaaaaaccccgcgcctcacatccatcacaatattacgtgtacccccacccacccccttttctttcatctccctatctaacaatataaataaaaacacccttctactatcctcttctttacttcattattttcacccactattttttaaaaacatacacccctcctcactatcatctctcctataaacacccgcgcctcatttttactttctcct

SEQ ID NO: 122141 - DNA, 255 bp, Arabidopsis thaliana columbia
ttttttaaacggggggggggcgtgcgcacaaaaaacacagaccacaatgtagcgggccctggagatggagagagagcaggatgctgattatatccgtcgcactgttaagactagctcccactagcgttcgacccgggacaaatgacgacaaaatacggctatctaacattttatattccgcattcgacacgcgatttttttttacaggggggtgacatccgcgccagcacccgtgcgatgattccctgtatacac

SEQ ID NO: 122142 - DNA, 394 bp, Arabidopsis thaliana columbia
aggtaccctctagaagattatgacgtggcactgccgcgtacgtaagcttggatcctctagagcggtcgcccttcgggtttgggcttcttttctttcattcgttctatgcaccattgcctgtattggggaggcgcataaaagcaagcttaaatttccttattcaattttgacaagactttatgggcaatgggtaaactggtgtacaaaatcataccacacaagaggattctcttgagggtttgaaggacaaacaacaaaatgggaatggaatatttaatctcctaggattctatgtcaagcctatttcaaatcttttggatgcttataaaaaaaagaggaatctaacactttcacaaacccaatttttgtttaggtttatgggccgaaccttccc

SEQ ID NO: 122143 - DNA, 319 bp, Arabidopsis thaliana columbia
  unsure (1)..(319): unsure at all n locations
ctgcaggtaccggtccggaattcccgggtcgacccacgggtcgggcacgcgtacnaacacacgttcaatgcaccagtgcctggatggcaagctggtccacctcatgctatgcactatgggatgcagcantataataaaccccgtgccgtatcaaaatgttccgcagccaggcaaatcaatgaaccctttttacttggggggggggccggcatcacaaacacaaacggaaaaaatgttccccttccatgggtccctctggaagggggcatttaccttctttcaggcatgatgcccttctaaagggagtacacaattaaat

SEQ ID NO: 122144 - DNA, 442 bp, Arabidopsis thaliana columbia
tttatgacgtcacctgcacgcgtacgtaagcttggatcctctaaagcggccgcccttgggggtgggttttttttttctttttttttttttctttttttcttttccgggaaaagaatcacaagagtgttttttttggacaagaggtggagccggccaaacaaaagatgaagcttttgccaccttccaagtggacgccccacccacacattttaattgggtggtgggggccgcccctctgccgactcaaaaaaaatatcgtttcgtctctcacccccccacgacctttttccgtgtttgttgtctcataaaaaactcccttcacctttttgcaccctagtctcgacgttcgcctttaaactcccctggggaggctctctcttcaacgcggcccgttttcctttcgagcttcccccccagcccctcactctccctgtcgggcccc

SEQ ID NO: 122145 - DNA, 545 bp, Arabidopsis thaliana columbia
  unsure (1)..(545): unsure at all n locations
ctccgcgggcccggggggggggataatattgggactcacttcgnagatctatgacgtgacctgcacgcgtgcgtgagcttggatcctatagagctggccgccctttggttatggtttttaataacaatatataatatgaatttcagagttccaaggggaaaccattacacaccgatatttcaatatgagcttgagagtatgaagaagaataagagagttacaacaatgaagacactcaggagagacattatgagacaatttttttaccggacgtgggatgggtttgctgcgttccccctaagaagaaatatttttttttgactatgacactgcgggggagacaccagcccatcttggaagccaaatacttaatactctcattaaagattgcggaccgttttacgcggacatcctcgtttggcttccttggaacggccttttgggatagataaccccgttggctttgctttggagttctgttggagggtaaaacaccccttccggttcgaaactgatttggcgtggactagtatagacattttcct

SEQ ID NO: 122146 - DNA, 607 bp, Arabidopsis thaliana columbia
  unsure (1)..(607): unsure at all n locations
cccccccccctctcaccccccccacgcggcgggggggggtagaaaataacttttaaaactccacccccacatcaataataagggaagaaaccccgtcccccctcccccctccacccctcccgctaattctcctttttacaaaccctagggaacaatgcctctcctaaaacaaaactacaaacaacacacaacctttccattctaaacaacttactccacatccccccttttacttaatatcccccattctcccttctgaatttcaccactccacctcccctctttctccaaacaataaataacctctccccccacacaacctcttcgaaccattcccattttatttttcaacggtgggcgcgcccccccaattcaaccttttactcactcaaaaaaaaaacatactctccccaatatctatcctccacctctaaccaccttctttatttctctcctaaacacacctctatcaccacaccaactcaaaaactccctatcatctcacccttcattaaaaaactctcttcantaccaccttttctccttctccccaactaattttcccacaacccaccaccactctctcaaacaatcttcactccccacc

SEQ ID NO: 122147 - DNA, 627 bp, Arabidopsis thaliana columbia
  unsure (1)..(627): unsure at all n locations
ctccccccccccccccccccccccccccccccgggtaagattatcctagatactaaccccccctgcattataaggggaaaacccgttcccccctcccacgtaaccccgtcccccaaattccctttttccaacccccggggtcccgggaaatttaaaaaaaaaaaactttcncaattacccttccccctcctcttccccccgaatttacttcccttctttttaactccccttcccacccccaccaaaccgttcattaaaatatttccacaaccccccttcccatcgtccacccttttttttaggaaatttttaaccgcgggggggaaccacacctcttccgtcgttttttcaaaaaaaactaagatttaccccccacacccccacgttctcccccgcttcccctttctaaatcttcccccccctaatctgttttttttttcttttcccccacaacctacaatcttctccctcctcctccctccccacaaaaaccacccccccaaaacaccccctccccctccccacccccccaccctaccccttccttatcatccccaccccctctattacaccccacccccccttttttccactcactttttttttaccccacccttcccccccccc

SEQ ID NO: 122148 - DNA, 207 bp, Arabidopsis thaliana columbia
cccgcggagacgcggcgaatatttgtacaacagcctccacgcttttaggcgaaaccggggcaacgggcaaagctttaatcgcacccgttttccaaccggggaggaggcgactcaactcctcctatttgctgctccgacagctcctctcatgagctatctgcacggataagcgcactctactacgcgccgctcccgcgctactaccct

SEQ ID NO: 122149 - DNA, 404 bp, Arabidopsis thaliana columbia
tttttattaaaaaaacaaaacattctaatcaacacattatcacaccacaaccaaatacttcattaaacaacaacaaaacaaaccccactccactcaacaatatactctaaaataatccctcctcatctccttttaccacttctaccacccaatcctaagaccaaaccactccccacacatttatttctataggggggagggcacccacaccatcaaaaccgactactcctcacaaacaaaaatatcatgctccatcccttctctatccccaaccacaaatcccctacaaatcttatctaacccaacaatcaaacccacccttcccccacatctccacctaaacaccccccctctataccccacaccaccacccgtccttcaactccactccatacaaccacacc

SEQ ID NO: 122150 - DNA, 567 bp, Arabidopsis thaliana columbia
ctcacacggcgccggggggggggggtaatataccaagactataccactgattataggaaagacggtcccccttccagtacccggtccccaatttccctttcccacccgggtgggggggactatattaataaaaaacccccataattctccgcccataggttttctttatttccgaaacaccccctaactaattgttcccaacaacaaccacatacacaggtttctgccctttcctctgctaatacttggcaaccttttttagtgggggggggtcctaaaagcgaattcctccaaaaaaaaaattaaattcacccctttccccgaatgtaaaactgtttttcactctttccctcccaacattcctctcggaacaatacatacctattcacaccccatttggtcctttacctggccccatctaacaaatctccttcccatctcagggggtttatacattggcggccaacattctacaaccggatgttcccttttcctcaaactccagctccctccccctctcacgcctcacgaggagaaaactcatccccccccctccttcttttaaaa

SEQ ID NO: 122151 - DNA, 471 bp, Arabidopsis thaliana columbia
tgacgtggactgcacgcctacgtaagcttggatcctctagagcggccgcccttggggtttgttttttttttaacaaaatcactattggattggactctttaagagcattaatacacactaaaaaggtggaaaagggaaaaagaaggaagagaaccaccctcgggcattatgattttagagggatatatcttataaaaacaggggggagaaaataagttttttacagggggggggggctaattacaggagaagttgaaaaaaaaaaatcatgaactgaaaaaatcagagataaaactaattttcgagccccacttttacccggaccttgattggaaaaagggtggttaaatggggcgttaaggaagaaaactaaccccataccctatttctgtagggggggcgaagggagggaaagaccgcaaactttggtctccactcttgaaaaaaaaagattcacggtgcgccttcaaa

SEQ ID NO: 122152 - DNA, 566 bp, Arabidopsis thaliana columbia
  unsure (1)..(566): unsure at all n locations
aaacccttccccctctccgctacccctcccccaaattccccttttacccccggggggcgggtggattacccaaaaaacccccattttttttnagncgattaaaaaaaaaaaaatttctttctttttcaaaccttcttttaaaaaaaaaattcctcccttttcttcaccccataatcaccctctaactcgcttttatttctattctctaaatcccaacaaacccaacttttctttctcaccgacgtgggagccactctcctcttttttcgccccaaaaatcacaaaagattttttccctttataaattttttaaccacaacttcctcccttttctccgccacctcttcttttctccccccctttcttttgaatcctacaactcccctctgttctcctcttttaaccatcccttcctttttccttctccccccaccccttaaatctttaaatacactttatctcttttcttctccaacccccccttcccccacctctttccctttcgccccccttcccccttcaaaaccatcttaccccctccctcccataaaaatacacccctctct

SEQ ID NO: 122153 - DNA, 397 bp, Arabidopsis thaliana columbia
tttctaaacaaaaaaaaaaaaagaaaacttttttattctctctccccaatgagaaaagaaaacccagagattcccaatcatcttcttgcaaaacccccatcaaagaaattactttggaataggaaaccaatcctgggggggtggaaaaacaaatcgttaaaaaaggcaaaaactttttttggttaaaattttaaaaatttgattttttatttttcttatcttggcgatccaatccctatcccaaaaaattaaaacttgggaagggcgttaaggaaattaatggccccacaacggccaggaaaccttgacccttttttctcacaaatattcctgctttactttattacccaaaccttaagctgggaccaaaaagctttcctcaacaatttttaaaacc

SEQ ID NO: 122154 - DNA, 381 bp, Arabidopsis thaliana columbia
  unsure (1)..(381): unsure at all n locations
gttgggatggaaaacatcctttttttttcctttacccttatttttccgcggggggggggctaaaacaacatttttttttttaaaaaaaaattttttttttttttcaacaaaaaaaaacccgggggtttttatttccttcttctcaaaacccccccacaaaaatgcgtttttttttttttaaaaaaacccgaatttaaccttttttacctttttgggaaaaacttttttctacaggggacacaataaattttaaaccgttttaacttctacgcagatcgtcacctttggtctcggtgtcttcttttttttcgatgattttaataaaagaaacccttaataattcatctcccncggagaaaaaacacgcgcacattctttttt

SEQ ID NO: 122155 - DNA, 563 bp, Arabidopsis thaliana columbia
  unsure (1)..(563): unsure at all n locations
ccaccctttgtgtttttgtttttctataaaaaaacaacacctctccactccttcttaaaacacaaatttaaaaaaaaaaacctttacatccacaaaaatattacccctataacccaaaaccaacataccccccccacctccactcatactccccaaaggcatgcccccacacccctcccctcctcctctttatttataaaagggggggcgcgatttcaactccacctcttcccttccccaataaaacaaactcnctctcaaacacaatttactcactcccaatcaacgcccccactaccctcttctacaacacaccccaaaacccaccaccctcccacacacaaccacgcccattaactaccatccccccccttacccacccaccacaatactcccaaaaacttcactcaaccccctccatactaatactcacaccaccacccctccctctcccaccaataacttcacccacttatcacaccctcacaccacaacccacctaatccatactcaatacctcctctccatataacacccctctcccccatccccccccccccccc

SEQ ID NO: 122156 - DNA, 551 bp, Arabidopsis thaliana columbia
cggcccccccccgggggggggaaataattgaggtacacactatacaagattatgacgtcgcatgcacgcgtacgtaagcttggatcctctagagcggccgcccttgggggggggggatttataatttttcttcatttacttctttcttctatgtggttttgcgtgcatttagggagtgattagggtaacgtcttcttttttgttctcgccgccgggcccccaaggggccctattaattatataaaaaggcaaggggggtttttttttggggggggcaaaaaacagggcgggggaaaaaaaaaacgccaccctttatgaaaaagactccaaaaagaaaaaagaagtctggagaactcctctaaaaaaacaactttattaggtgggagcaaagggagacgggtgtgatttttataaggctgggctagagagggagacgagcaaactattttttttttcttattgagaaaaaaccaacaaatctcgaaacaacgcaccgttttgtggtgaacacacataaaaacagagggaaccttttcctattataaccaggg

SEQ ID NO: 122157 - DNA, 379 bp, Arabidopsis thaliana columbia
cccccctccccgccccgccccggggtaaaatcccacactatcccatattaggaaccttccctcctccctccaatccttcaccggtcggattaaatatttccttcttccccattaattcctcttctccccataccctccttcaatctccatttacaccccttcccctccacccaaaagattacctcctatgacaacatataaacccctttttctagggggggggcaatttttccacgcgcgcttaccaaaaaaaaaacacattcttttaactatcctccttgcttcccccttttaccctcgtccttaccctaaaatatttaacccaattccctactttttatttaaccccattcaccccgccacaatttctactcctctc

SEQ ID NO: 122158 - DNA, 613 bp, Arabidopsis thaliana columbia
aatcccgccctataccgccccccccccctagaatacccgaacatcccccataattaagggaaaactggtccccccccacgtcccctcccccaaattccctttgtcaacccagggggacgggccacacaaaacaattaaactttccttctctcctttcctaaactcaatttttctttccctcttctttaaaaatcttcttttttctccaaataccctcccttaatccctcctgtttttttattcctacaggtgtttttttttccgacgaaagaaaatcccctatattcttttcggggggggtttttctcccccaaggtgtttttcttaaaaaaaaaaaaaccttccgcccaacttcttcaaattcttatttcctcttaccgtttcccctttctttttttccatcaaccaccatcaatatccccaaacttaaccatctctcttgttctcaccacaatataacaccaaaaattcttcgccccttatttaacaccctatactctacccttctctcaaaagaacatattacgccctaactgcccgacgttctctaacgctttcttttcccaaaacaaaacgtattatttcccccactccacccgacccttcccacctc

SEQ ID NO: 122159 - DNA, 574 bp, Arabidopsis thaliana columbia
  unsure (1)..(574): unsure at all n locations
nnnnnnnnnnnnnnnnnnnnnnnnnnnnnnnnnnnnnnnnnnnnnnnnnnnnnnnnnnnnnnnnnnnnnnnnncttggggttgggtttttttatattttttttttttttcccttattttgaggtcgattgtttcattaaccacagaaaaaacaattttttttttttcccgggaaaaggggaggtgttttttttataaaagaaacaacaggcctttttttttttttgattttttaaaggggaggggggggcgtttattagggggggactcccctgagaaaaataacaactggtgaccggggccccgcggggtttttgggtttcggctaggaaaacccagggggacgactcccccctaagaacataatccctctttgttgtttttatgcccaagggttttgttttattccccccacacaccggcgaaaaggggaattgctgtctccggttttaaacaagaagggtggggccaccaaccgcgcgtaatcggaaacaagtgtttgtgggcttttttggtcaaaaaggaggggggggtccccccccggggaacatttggagggggggggcgagttcttt

SEQ ID NO: 122160 - DNA, 569 bp, Arabidopsis thaliana columbia
  unsure (1)..(569): unsure at all n locations
gacggggggggggggggtagtatcgccgggtactatacgactnatttaggggaaagctcggtccccctgcaggtaccgggtcccgagttcccgtttcaacccagggggggggggggtggaggattctctggattgttcccacattcgagttacgatgcttacaatttcccatttctgacaagtgtaccaaatgctggtctatggggtgatgttcaactaaccaaagatgctcttggtttttgcttccctgatttatcaatggggagggggtcatctattggaggtggttaccctaataaacaaaaatcttacccgggtaacggagttcctacttccgggggggtcaaccattgatttcttcttgaaagaacttaaaagatgttaacttgatccgggggtattttattttgcggaaaaaaaggtccattggtaattttaaccccaattttgaccggtcaaaagggttttccagccagaaaaaaacccttcattctttgtggttaaattgtgcaccaccgatgggtttctaccggccagcaaatttggggcatgagccgttttttggttta

SEQ ID NO: 122161 - DNA, 450 bp, Arabidopsis thaliana columbia
gcacgcctacctaagcttggatcctctatagcggccgccctggggtttttttttttggtttaagggcttaaacccgatcgatggaagattatatggggcctatttgggggtctctccaataggggcgcacaagagttaaataaaaaatggttttcaagaatgagagatatccgaaatctacaacaaagaggtttttttttgtgggggggggggtttttttttggggggctcgttcaaaaattaaaaaccccctttcttggtgaaaaaacttacaccttttagggattgagaaccccgttaaaataatctcgtagctttgaactattaatgctttttctccagggaacgaggagacctcttgggcttgtaataagaataatctctcctggagagatcgcgtccttgagagatgaatcatcttaaccaggggccaaagttggttttgttctt

SEQ ID NO: 122162 - DNA, 522 bp, Arabidopsis thaliana columbia
ttcctcaccccggggggaacggggaaaacaataaaacaatactttcctttcctctcccttccccacgtttttttcattcaccacattccaacccattttcccccccctattcttcacccccttaaaaacctttcttacagcaaaaccaaactttcccaacaacccattttcaacacactaaccacttttactctttttttttttgggggggggacaccccctatctcgggggtgttcaaaaaaaaaaaataacccctttcccacttacctcaaattcccccacactccctccacaaaccctctccctccaacctcctacccatccacaatcacctctccacccttacacactattatccacacccccactcattccccatattacctcatcaattacatcttttcccctcccacttcccaataaccctcaacacatttctccctcactcaccctcgacccctccctcttctacctcttactttttaaaaaaaagaatactcctacccccccttctatatcca

SEQ ID NO: 122163 - DNA, 522 bp, Arabidopsis thaliana columbia
atgacgtcgcctgcgcgcgtacgtaagcttggatcctctatagcgggcgcccttggtggtggggaaatttaataattatcacctaatagctctttttttttgtttataggatgtttgttggtacggttttttgggaggaagcgtcgttgttttgggaaaatgttgtgacaagagataatgcccgctttttacaaaacacaacccccattttttcttggggggggggggaaacccaggttggaggagaacaaaaaaaaaaaagccccccccccaaaaagaaaaagtctctaaataaaaaaaacgcaacgacgtgggggggaaattctctgcccaacacaacttggtcaaaagggggggcagacacgactgtcacccaaatccccccaaataaaaaaagggaatgcgaatatcaaaaacaaaaaccgttaaaaacaaaacacacaacgggtgttgtgtggttgaataattcaacaaagaagctccgttttcattaaaaagggaaggcgcgggagaggaaaaaaa

SEQ ID NO: 122164 - DNA, 582 bp, Arabidopsis thaliana columbia
  unsure (1)..(582): unsure at all n locations
gtgggctggaggggggggggggnnngnnngggaagtattgggtagcaactctacaagatttttgacgtggcctgcacgcgtgcgtgagcttggatcctctagagggggcggccttggggttggttttttaattaaagaaccttcataaacactccaaaagcttgattatgtacacctattcatattatgggtataggccatagaaatcttcccaaattaaagttttaatctaagaaaaatgtcccccaccgggtttttgggtttaatttttgatgaggggggggatcctatggggggggaagtggaaaggactgaataagctccctctggtcgggtaaccagctttgagaggtggcttgctccacaatcgggcgggttggattacaccacgggaggtaacaccctcttagggggggaaagggggggggcagctccacgggggggcgggcgttgtagtgggggctctttaacgcctgttgggcgggcgccctttttgattttgcggctaggggggctgtggggtcttccgcgcagagggagacagcgggggggggggtctgagagcaccaggtctttggtttc

SEQ ID NO: 122165 - DNA, 582 bp, Arabidopsis thaliana columbia
tgacgtggcctgcacgcgtgcgtaagcttggatcctctatagcggccgccctttggttttgggttttttttttaactattttaaaacattagcttacaacaaaaagggagtattttttctttttccccctttatatatggagaggggaatacacgaggttttcctgtttaacaacaacccacccccttttcctttatttttaaaagaaaacacaaaacattattcccggaggggggggtggtttaaaatttccttggggaaaaaaaaaaacgaggaatcttgtttttacctaccaagaacccttgttttatttccctcgcgaaaaacaccacctttgttgtgttcttccgggaaataaaaaaaaaaaataaacacactttctttatttggtgtttttctctgggggggggggaccccccgcgggaaaaaaaacaaaaatttattttttgtgttggcctggaaagagttaacaatgccacagttctttttaccccccccccgtgttgttttttttcatctccgctccccgacaaaaaaatggtcggcaaagaattcaccagggaggggggggctatcttaccc

SEQ ID NO: 122166 - DNA, 334 bp, Arabidopsis thaliana columbia
acttaacccctaaacaatacatttaggacattatggttttcaattgggggttggaccatggcgcttactaaaaatttcaccgcttttttcctttatattcccctttttcataaaaacctcttaaatttaccaaaacaaaataaaaccccttttcttaaaacaacaaaatgctctttcttttttttgcatcccctctgggtgggttaatatcacactattaaacctctttgtatttttctaaaaaaatgttttgggagggcactaaccaaaatttttttaaatatttttttttaaaaaaaaaaaaaaaaaagggggccgccccctttttaaaaaa

SEQ ID NO: 122167 - DNA, 598 bp, Arabidopsis thaliana columbia
acaaccccgccccccccaccgccccgccgggcgggcggaaataattgggtacacactctcacaagatatatgacgtggactgcacgcgtacgtaagcttggatcctatacagctgccgccctttggtgttggtttttttttcgaaacggacctcgcaaggcaaactttattgatggccaatccaaaagtttcgaaaagcgcttgttaaaattcggctgttgacgaaaaacaaacaccaggatgttttctgccttataagaaaacatgagcctcaccgagttattttatgagggggggggtcccccaccacggggggttcttttaaaaaaaaagagacctgcgcagcgagtttctgaaagaatatccttcctttattgcacactctccaccccaattgggattgtgatatgcgaaccctttaacatggctctgcttcaaggagttttatcctgcggagggtttggatcttggcggaaagacactcctcgcgttcgttcgggttagacaaacggacccccaccggcgatgccgctggccttatgaggcgttataacgaaaaacccgcagaccccaacggttgtcccacaatccccccccc

SEQ ID NO: 122168 - DNA, 546 bp, Arabidopsis thaliana columbia
  unsure (1)..(546): unsure at all n locations
nnnnnnnnnnnnnnnnnnnnnnnnnnnnnnnnnnnnnnnnnnnnnnnnnnnnnnnnnnnnnnnnnnnnnnnnncttgggggtgtggttttttatttttattatattttttttttttgggggaactatctttttcagaaaccaatttgaaatttttaggggaacattttatacccaaaaacacttgggaacttttttataatgcgaaagagaccctaaggaattggaattttttctgggagtggggggaaccccttgggggggaaaggatctttaattttattttttcccaaggatttgggggccaagaattttgtatcttcatttaaaaggatctttttttaaactacccctgaggtcttaaagtatgtttctcggggtgggggagggccccaccccccacaaagttagtttccccagggtgttgtcaaaccccttccaaaaccttttttattttccggggttttttgttcccccgaaaaaaaaacgctcttttgcacttaaacaaaagtttagctggggtaacaaggaaaaaaatccatcctttt

SEQ ID NO: 122169 - DNA, 516 bp, Arabidopsis thaliana columbia
  unsure (1)..(516): unsure at all n locations
nnnnnnnnnnnnnnnnnnnnnnnnnnnnnnnnnnnnnnnnnnnnnnnnnnnnnnnnnnnnnnnnnnnnnnnnnncttgtggttttttttttttttaggcaaacataaacatatatattccttttttcaaattaaaaatacgttaagtttgaaactgattcatcgtcctaattagcaaggatgttttgctaaacgtcagaagcaaaatatgattaaatatggactttggtttgtgagttggtgaagtttcaggaaactaagatcttggaggtgtgaaacgcgaacacttgttcttccttccgctgcttttactgaggccacagacacaagtctcgagcaggtgatagtcctcttcccagaacaagagtgatgctttctcaggttgctctattagtttcttagctggcaagaaacccgcttgggcccaagtctggaaaagccttgattggtttcccaaaaaccttccggtttttggggaataatactcaggccactaattttcctttagccttttttc

SEQ ID NO: 122170 - DNA, 416 bp, Arabidopsis thaliana columbia
tttacaggggttgatccagcgggcagggaccccacgggggagggaatcctgcaaatgcgaggcttttgctttcagcgggcagagagctggggggaacatcagccttattctggggggggggggcaccctcttgggggactccaacttaaagaaaaaggagcaggtgagaaaccaattaccgggaacaaggaacccaacagattccctctaaggggccgggcttaagaaggtggggggctggggttcggaaatggggggagggacttggataatctggagccagggggcctggtaaaaatgggtttacctatgggggggaattggggggaaaaaaactttttaacctcgggcaaaggagaagatggtgcttggcaaagaaccgaagggggggggggccagtgggcgtgggtatgggc

SEQ ID NO: 122171 - DNA, 506 bp, Arabidopsis thaliana columbia
gacgtcgacctgcccgccctacgtaagcttggatcctctatagcggccgccctttgtttttttttttttgtcacacaacttttatatcacctttgtactatattggaagatgatttgatctttcaaaaacccaaaaagggtcaaagctttctacgatggggataaaataaaaaccaaacttaaccagttgtttccaaccaactttttttggggagggggatcccaattttgcgcacaggtactgaaaaaaaaaacttaacactttttttttatcttcaacattttttaataacaccggagttttaacattttaactcaaaccttcaacgatttagcttggtccctggacctaaaaatctggcctctcttccctccttgggattaaaacattccaaaatgttattacactggaaaccatttcactcctccccggaatacacaatttaaaagatggggggattggcccaccacacccctcatgcctaagggtaaaacttatttttctt

SEQ ID NO: 122172 - DNA, 643 bp, Arabidopsis thaliana columbia
cccgcacccggggggggaaatattgatcccaaaaacttactcccccaataattattaagggaaaaaccttttgcgcccctccctgttaccccatctcccaaatttccccttttttcaccccccggcgttagtggggtctcaaaaaaaaaaaaaaaataatactctccccccccataaaaacactttacccccccttttttcttcttctcctaaacacttttcttttcaattaaataaaaataaaaaaaaaaaccttctttttaaaagctttattaaccttcaccaccctttttaacaaaaaattttttttccaagggggggaaaccctcttcttgggccaattcttataaaactatcaaaccctccccattctctttttacctaatctccccccctctctttaaaacaaattttacacttccccctatacaaaaacccccacaatcctcacttctttttttaacccctcttctttatctaccaccccacttaccactttatctccccccctctttttttctcccccctccccccttctcctatccctccaaaaacacccactctttctttccttcttctttaccatacttacacacaaaattcacaatctcttccctcccccttccttcaccccaacattttt

SEQ ID NO: 122173 - DNA, 697 bp, Arabidopsis thaliana columbia
  unsure (1)..(697): unsure at all n locations
ctccacccccccgcgggggggnnggggggtaatattcccagctctattcccattactttagggaaaacccgtgtcgctctctccggttacccctcccccgaatttccccctttcccacccccggggtgggggtttttttaaacaaacttcaaaaaaaaaaaaaaaactttttttaaaaaaacctttttaaaaattccattggccgatttcttccttttcccccccccttttcctactccctcccccccaaataacttcctcttttcctttaaccccgccttttgcgggggcgcccccctttaaatatttcctatattcctccccgggcgggagggtggncaaccctatttccgcggacccctccaatataaaaaatgttgggtctcctccccttcttcgttggggccctctccacaaaacccccccccccttgttcttattaatatttatttccgcgttttttcaacaaccaaaaaaccttcccccccgcagaaacccctcttttgttccctttccctcttttaaaaaaatgggaaattttcccccccccctttttaaaaacccctcccacaccttctctcagtgtggaagctccctcgttcacattccacaaccctacaatttcacccttccccccacccctttaatcttcacctctttcccaccccttttttttttttccttctaaaaagacaaa

SEQ ID NO: 122174 - DNA, 542 bp, Arabidopsis thaliana columbia
  unsure (1)..(542): unsure at all n locations
atgacgtggcactgccgcgtacgtaagcttggatcctctagagcggtcgcccccgggggnggggggtttctaattattttttttgagggggggaataaaccatcttattgcagatttgttataccggggggatttcctttgataaagactgaaaaaaggtttggctcggcctgagaaaaaagacgttgaaacaggaaccccttggcatattttcactgggagggcgttttactttcaaaaacctgggttaataaatgattgggaatcgcggaaggcttgagcgctgaaatcccgaaacccttttttggccattttttgtttttttgaaaaaggggggagggggtaaaccagtcgttccttttttgggaagttttccccctaaaatccctgggagctagggggtttaatggcgccataaaaaggggggtgcccgctccctggggaaacaaactgggggttttgtttaacccctgccccctaccagtttatggaaaatagggggcgaaaggaacccccccaggtcttttcattagggggcccgg

SEQ ID NO: 122175 - DNA, 603 bp, Arabidopsis thaliana columbia
gccccccgccccccccccccccggggggggaaatattgggacgcctctcccagattttgacgcgcctgccccctacgtaacttggtcctttataccttcccccttgtgtttggggtgttttaagaaatttttctatccttttagagaggaaagaattacacacgccttctcgagaaagggcctatctcttcccacacccgcaaattggacaaccaccccccggaatttaattcttcccctgatttatctttaaccccaactttttttttttcgggggggggggcacaaccccggcggttctttttaaaaaaaaacccccgcacctgttccccttgtgttccccctttcactggccgtctttcggggtgccaccagctcccaatctgcacgatttttttgccctttcattaacccgcgtcttccacgcacctacaccagctcctggagcgacaagaccgctccttctgctttttttcctgctaagaccgcggggggggaacgggtattgggcactcttgctgcaacgccctttggttggccggtgtggagaacgcagacgcgagccccgtccccgcacgctgtacaccgattcccctctctctc

SEQ ID NO: 122176 - DNA, 616 bp, Arabidopsis thaliana columbia
  unsure (1)..(616): unsure at all n locations
aaaccccgcgccnncggccccccccgggggggcgataataattgggtacacactctcacaanatctatgacgtcgcctgcacgcctacgtaagcttggatcctctanagctgccgcccttgtgattgggggtttttacatccactttttttctatttatcttaacaaaatgacaaaataggttggtgcccgtactaaatgggcagacccatacaaattaggacatgccattttcaggctcaaaaaaacagaagggggcactaaaccgagtctttttccatggggggggggcccntttcccccggggaaaaaaaaaaaaaaggtccctttctgataaattttatttaattgcgccctgaagcttgattttttttatttattcccgtgaaacccggtctcgcaggcttgttggggttcgcctctccaccacccacctttgtgtgagaatttttccagggggggtttgttacaaaaggtttgacccacccatttaccaatgtggtccgagggttgtttgttcgtttctcccttcttattcaagaaggcaaaagtttggtttgttgcatctcggatgggcgggggaaaatctccgtcgctcgattttaaatcagcgggcg

SEQ ID NO: 122177 - DNA, 461 bp, Arabidopsis thaliana columbia
cttggacctctaaactttccccttgggtggtgttataaaaaaccataaatccacacctctcattcccctcaattcccacccacacccccaacccacctttttttaaccctcttttcctttttaacaacctaatttcgccctgttaaaaaacaaacttttttttttgggggggggcctttttatcttcaccctcgataaaaaaatttccaaaacccccggtgtgttttccccctttccttatctctctccacattccaataaaattccaaactccttttttattcccgtacaaactccccccctttctacccaaatatatatatcccacccacaactttcaaaccctgcgaaaatctaactcttttttttcccatttttcctccctaattattacaactatccctccttcccttcaaaccaaccccgcccatctatcccccctactatttctccataaccat

SEQ ID NO: 122178 - DNA, 565 bp, Arabidopsis thaliana columbia
  unsure (1)..(565): unsure at all n locations
gacgtcgcctgcacgcgtacgtaagcttggatcctctanagcggccgccctggggtngtgggggttttaaaataaaattatttttttttttaattttttttcttttttnntatttggggccgggaaacctggattttttattttgtcaaagaggggggccgtgtaacacaattcctccgtttaccaaaactggaacacattttttttcccttctttaccgcggggggcgccgccccaaaaagaggagggttttccctaaataacaaataccttttaaaacgttggggggacccaaaacttttctttctggttaccccggaggcccctccagggctcctttcttttctggggttggccaccgggagggtttcccccaaatattaccgttcttttccccaagattttttttaacttttggaagcccctttgccacacctcacttgggcgttaattcaaaagaaaggagaaatgtcccccccctttctcccccaaaacttaaaacactttttttcgcgggggccccctttttttgcgcagggggtgtgtctctttttctcccaaaaga

SEQ ID NO: 122179 - DNA, 389 bp, Arabidopsis thaliana columbia
ttttaaattaaacaccccaaaaaacaacacgagggggtggagaagggttatccaaaaccaacttctcatcccgctttacacgacgacacgccatggggaacacaagataaaaactggaattaatgtgtctcaaagggaaacatatcgcgcgtttttttttaggggggggggcgccctcattttggcggtatcccccacaaaaaaaactgcccccggtatcgacatcttcgtcgccgcacgcatgcgttcctgttttttggcggcgacatttacgcctaaaggttgacactctttttttttaatcactctcccctgctcatccacgctcttttcgtccctccacaccgcgtgggtaagtacagaatacaactcgtcaaacaaagccggtc

SEQ ID NO: 122180 - DNA, 293 bp, Arabidopsis thaliana columbia
ttttttttaggggtgtgggggagagggaacaaccaagcgcttaagaaagaagaagtgtacgggagcttgggggggagcgtggtggagcagaaggacgcgcgaacgcggggcagtgcgggcacggaagaggcgatagaaaaggtgccttgaaaagtacaatagataggggccgcatcagagagaaggggaaaagtcgcgcgcgtacacgtagagtaacgaaccgagagtgaaggaagggaggggcacacaagaggcaaacgggggggacgaaagcaacaggaagagaagaacga

SEQ ID NO: 122181 - DNA, 502 bp, Arabidopsis thaliana columbia
tgacgtcgcctgcacgcctacgtaagcttggatcctctagagcgtcccccctgtgttttgtgggttttgcttttttctggccgtcaagcctgatcgactcgactctttttcttgccccccgggctctcacttggtttcggtcttcttctgtatcggggcttgaatgaagacacttaatcggcccggctttcccaaatgtggtccaccacctggcggtgtgggtttccaggactaggtttttcacctaaaaaacacgccgggggccaccgggaacaaagaaccgatgaatttttcttttaggaaaatgtgaaaaaattccacctacccaaaccaaagccgaaggggaggctcctgggggggccttatcaaaccgaaataaagaactcagattgacattttgggccccaaatttaccctaataataaagggaggccagaggggaccccccccgaaaaagagcccctttatttttttgcttggaggggggggctcccattaaacc

SEQ ID NO: 122182 - DNA, 574 bp, Arabidopsis thaliana columbia
  unsure (1)..(574): unsure at all n locations
ccctccccgtacccgttcccaaattccccttttcnaccccacgcgttcggggttcctaaaaaccttttcccaaaacccacccccccctccccccccaataaaaaatccccacttttctttccccaccccccgggttcccctcactttaggtttaaaaagggcctttcccccctctcattttttacttaaccctcccgttgttttaatccaaccatagtttttcttttttttcacgggcgtggttggaaataaaaaaatccttggattttttctataacacgaaaatttttttttttcctttcaaggcccccttctngccccttttttttttttttccaaacccaaaaacaacttttttaaccttataaggagaaaataaaacactccccttaaccataaccccttcaaaagctcctcttcactttttcccaaccccaacccttctcccctcttaaccttaaactcttacctcctcttaccaaacactcttctcttcccccacgaaaaaacccttttcaactctattccccgccaaatacacacccctctttctttcttttttttcccccaaacc

SEQ ID NO: 122183 - DNA, 315 bp, Arabidopsis thaliana columbia
actcgggggggcggagggcgcgcgaaaaaaaaaaaacaaaccacagagccgagcagacgaggaggagcaggacgacagaatgagaccgccgcgctcgctcggcgggcccgccccgacgaacgcaccacacaccgacaatgagacaagtcaggaccacaagaggaggagatgaaacgcaacgcagacaggacctttttttttaggggggggggggggacggcccagagacgggaaagataacaaaaaacaaagaccacgagaaacagagaacgccagaaaggcgataaggaggagaaagaaacgcacctagaaagg

SEQ ID NO: 122184 - DNA, 359 bp, Arabidopsis thaliana columbia
ttttgaacacccccccgcccccttgtaggggggccacgggccccttcccgggccacggcgctgggtcgcttttttctcctgggggtttggtggctcacaaatcaaccggcgcgtaggggtcgtatccgggtgttgtccttcttctgtgcgctttcgtttctctctccctctttgcctatttcctgtctgctcttgtccgtttctcttggtccctcgtgtttttgttttccttgtccgctgttatctctccgtctcaggcggcctttttttctctcggggtgtgtgatgggagactgcgccctttctcttgttgtctgcataaagaaggtgcgcctcgtggtcgacggtcgtcgttttgg

SEQ ID NO: 122185 - DNA, 561 bp, Arabidopsis thaliana columbia
  unsure (1)..(561): unsure at all n locations
gacgtcgcctgcacgcctacgtaagcttggatcctctagagcggccgccccgggggttggggtttttaaaaaatatctctttttctgtttgatcccgagggtcctcccnattttaaaaatttggccaaccccaacttcatttggctattttttattacaacaacaaaatggggggttccggggggctaaactaaaaagaaaaaaaaaattttttctgggtgggggggcacccggacccccccccccgatatcattattatttccccccacccccccctgtcggggggcctccaatttccttcccccctcccggcccctttggggccccccaccacaaacaacttggcggaaaaaggggttccccctgtctcccctcccccccccgggggaaaaaaaccccccccccccaaaaaaatgggtccctgccccccataaaaaaatttcccccttcctgcgcccctttttttccccaaaaatgggttgccccccgaggaggggcaaaaacacattcccccccccccctttgttttttttttaaacacccccttgcgggggaagcaa

SEQ ID NO: 122186 - DNA, 462 bp, Arabidopsis thaliana columbia
  unsure (1)..(462): unsure at all n locations
ctttaataaattcananntccccccaaaaattacgggttttaaagacagtggagagttaacaaacagaaatagacgtaaggaatattaaattacaaaaagttgttattaattgaaacaaataactcctaaagcttttttgagggagaggggctctttttctttggggccctacaaaaaaaaatcgggagttttgcgagggtgtcccggattcaacttgccgggtatcttgatcaaactgaaagaaaatttttggcaatgtttctcaccggtttcttaaaattgggaagctatttgaccacaagaggcacaaattggttttggggcaatttataaccctccacaaaagtttttttttcttggaccctatttaaaacctttcaataaacaggtttggtgaggttcctaaaaaaaacaaatagggacgcctttggggggccgttaaaccttgggtcactcttttt

SEQ ID NO: 122187 - DNA, 180 bp, Arabidopsis thaliana columbia
acagagcatgtcttctgaccctagtcttctgtggcggtcgctagctatcacgcgcgtttgtagggaatgtgagtggaacgtcgttggagatctgtgtagctgtacgggcgtctgccgtcgtctctatttgtctcacataacacaagtatgtgtttaacaggatgatagggcattcataga

SEQ ID NO: 122188 - DNA, 409 bp, Arabidopsis thaliana columbia
  unsure (1)..(409): unsure at all n locations
gggggggagggcgccctcgtctgcgtgttttttggngcggggcagggacaggcgcgcccgtccgctgttacgcggcagccgggtcagcggcgcgtatttttgtagctccggggggtgttgggcgcgncctaaaaacaatatgntctggactgcgcgtagccgctctgtgcgttccgtctctcccttgctctcttccgctttctttctctttttgtcgctcgtggtcgttcggtggtgtgtcgttggcttctattttcgttatttcgtgcgctatctcgtcttcctgtgttatccgtatcgttccgaatgagagggtttttttttgcggggtttgtttagacgcacgctcctcggcggtgttgttgtcgcgggatgccatttccgccgttttgctatcatgttgtgtggt

SEQ ID NO: 122189 - DNA, 452 bp, Arabidopsis thaliana columbia
ggcgcgcccccgccaatttatgaggatgaacgcgccggccgcccctcctggttccgccgcgccgcgtcacgcacttctatcacctggggggggacgtggcgctaataaaactccgcggggcagacaacacggcacaagatgagcgtcgcgagcgcgccgcgcttgcccggccaccacgtcatattagagaacggaggggcggatcaccgtgggtcggtagtgcggcacacgccgtcgcgtccacttaccgcgatgacggtccaccgggcgcttttttttttccggggttggtggctccgcgcgtgcgttgtgagtgtgtgtgcgaggagcgagaagcggcgtaccgcgtgcatacaccgatgaatgtgtcccgctatccgtgataagccatgatcctcgcctatcaggacgccaggagagatgcgcgacggcccgtcagcactgtgcccagg

SEQ ID NO: 122190 - DNA, 386 bp, Arabidopsis thaliana columbia
  unsure (1)..(386): unsure at all n locations
attacaccactactactcttcctcattatcacatccatcgccggccgttttttttggggggtttttccacaaccacgagagcgattcttaaaaaaatactttaccctatcacttttttctcttgtttctcattttttatttcctaatgctatgcattacactcctttgattgttcttcatccatgtgtcgcgttgtgtcctatgttttagtattccgctttttatgcttcttgttcttatctcttcttcctgtcattccccctttgtctttccgctctgtatccttttttcaatncttctccccacttcacgacaatattcctccctaataaatatttctgctcgctctattgacccaatgattattctttcttcttctcgatata

SEQ ID NO: 122191 - DNA, 575 bp, Arabidopsis thaliana columbia
cgccgcgcgggacggcggggaatttttacgagcgaggcgccgcccgcggccttttccccgggcggatgccgccgccggcgggggggcgcgcgtcggattttttcggggggtggttgccccaaaatccctgcgggccccgcgcccctccacccatcttgtgttgcgctcccggtcgtgtccgatcccttgcggcgtggttctggtcccgccgcgctgtcgttacgtcttgttccgtctgacttcctacgaccagcagcgcaacggtttttttttgcggggggttttgcagccacgcttcgtggcggcggggtgagagaaaacggtcgttccctggccgtacgttccgcgccgttgtcgcctcttgacggtacactccgtacgcccgggccggcgcggtagttgttccgcgcagccctcgtggacgcgacgcacctgcaacgcacgctcccttctgcgacgtcgcgcgtctgactggtgggcggccgcgcgtggccgtaccgcgggaatctgccctgaggacgccagtccatagctccgcgtggtgggtgggcgagccccgcggacgagtgtacgcc

SEQ ID NO: 122192 - DNA, 710 bp, Arabidopsis thaliana columbia
  unsure (1)..(710): unsure at all n locations
cctcccgcgggggggggctgaacggagagggggggagctggttttgggacagcccccctccgcacctctgtggggggaggaccggcccccgccccgtagactcttctctccttcttcacgtttttcctctcggcggtttgggggcgtttaaaataatacttttcttccctccgcctcccccccttctcttctcccccccctccccccccttctctcccnccctctccctttcctcccccctccgccgctcggtctcgccccgtcctttctcggctccttccccgtctaagcccgtgngcgcgctccttcttttttttgggggggggcggggttttctttccctggggggttcgtccttaaaataaaaacccttcgccgcgcgcgctccctcgttccgctcctcccgcccccccgtgtgctcttcgtgtctgcgcgccgctcccccctgctcccgctctcccgctttctttgcccgctcgccgcccccccccgcgcccgcccgcgtcttcgcgcccgtcggcgcctcacgttcgctccctgctcctctgtccccctgcgccccgccgcctctgngctcgttcgtcgtcgcgcgcgtcgtcactctccgtgncttctgtcgctcctcggcgggtcgctggctcgtgcgcccccttctcttctgcggtcgtctggtcgttgtcctgtggctcgccgtcgcgcgttcctctccg

SEQ ID NO: 122193 - DNA, 310 bp, Arabidopsis thaliana columbia
aaaaaaaaaataattctccacacctttcttcctcccccttctccctccccaccctatttctgacttactccccctcccaccacatcattcatcataccccctaccttccctcacatactacaacctccagctatcttttttccccccacatcaatacactcttacctccatcctcctctcacctctatatacatacctcacaacttcatcatcttcccattcatcattttattcttttatacctcattgtcgtccctctacttcactctaacccactagtactcacaccatctactctactcaactccct

SEQ ID NO: 122194 - DNA, 459 bp, Arabidopsis thaliana columbia
  unsure (1)..(459): unsure at all n locations
ttacccaagaggaaaacagacccccaccacgggcacggagaaggacgagggaaatttcaccgggggggagaggcgcgcacacaaaacgccgnccgcgcacgcccagcgccgccgccgaagcgcacccgaacgaggagcgagcaggcacaggacgaaaaagaagagagagcccagacgcccacaccccagcgcgaacgcgcgcacggagcggaacaggacttttttagagagggggaggaaagcacaccacgcaggcgggcgggcaccacacaaactcgcgcagaccgccgaaaccccaccgaccgcgcacgacgacacgcgcggggcggcgccgaccgcacccacgggcgcacagccacgcgagagcgcaacaaccgaggcccgacaacccggggaacggcgacccaggcgacggccggcgaagaaaccgaacccgacagcgaaaggcgaacaacgcca

SEQ ID NO: 122195 - DNA, 187 bp, Arabidopsis thaliana columbia
gggggggccgccaaaaagacagacgcagcacaccaatccgtcacactatctgaccgcataagctccgagatctgcgtgacagctggccaacgatatagaagaccgggacaacgggaggctgtcgttgactgctgctgagtagtcgaaacgggaagagcgaaaggtttttttgtagcggggggggaag

SEQ ID NO: 122196 - DNA, 361 bp, Arabidopsis thaliana columbia
ttttttaaacagccccccccaattttcacatgggggagcgcaccaccgcccgagagcagcggcggcgctggagcttttttcccaccgggggggagttgtcctaccgaagaatagagagcgcgggccccgcagacatgcgcacagtgattgctaggagtacttattacgagtcgtgcacggcgcgcatgtaagggacgcatagcgagaaagccgcactgcaaacgcgctgcggacgataacgcgctgctcagaaaacaaccacgctattttattcggcggggggtggctgcacacatatccaaatcggaggagacagtctatatacacaggtcccggatgtgaagcgaatgccccgcattgc

SEQ ID NO: 122197 - DNA, 359 bp, Arabidopsis thaliana columbia
ccgccggggggcggggggggccaaaagaataagcttgcgcccgtggcgcgccgtcgcgctgttggcgccaccgagacgatcgtgcgggtgaggactgcgcgttgctcgggtatgcgttaggccgtgccggcccgctccgacagtccgccgtccattctgacggttggcaacacagccgggttttttttttttacggggggggagcgggaaaaggacgcctatggtacttcaaatccagctccccccttgctctactagccgggtgtggccaggtgatgggtgacggggcgagacgggcgagccatgcgaggagcgctggggcaatcgccggggggcgcggcgctagtctatggagtgcc

SEQ ID NO: 122198 - DNA, 202 bp, Arabidopsis thaliana columbia
cccactctgccgcctcttacttaagtgggggcatatgtcctctatgattaacgcagactgctctctcgatagtagtaatggtagacacaacctagcgcatagctcgagaatcgacaggcttggatgtagaacgttggacagaccacgtccacatttacatgcgtatagtgacatctctacgttgtactttgagagcggatat

SEQ ID NO: 122199 - DNA, 473 bp, Arabidopsis thaliana columbia
atgtgttttacataaaaatcccgtccgcgttactcgccggcgagtcgcgcccaatcttgtatacagagcgcgtggtatacacttgatcgttgtagtcgcgacatggatccacgactgtcgtttagctgcctggtccgcatatctgcggtggagggcaagaacagagattttttttccggcggggggggaagaggcatcggcgggttgttgtagttggagccgcccactgcgccacattcagggtttcgccccatgacaagtccttttatgatactgatagcggcgccgtgcagcgattatgacatactcgttcgatgcgggagttatgctggtcataggcgcgcgcggtcggattttatgctttgtccgccatgagccgcaaccagcgactgctccattcgacgtcgctctccccatgttaacgcctacgtaggtacagacacggcggcaactaattgatgaatcagcgcctc

SEQ ID NO: 122200 - DNA, 504 bp, Arabidopsis thaliana columbia
aaaacaacagacaacaggagcggctctggcgcgagacaatgaataaggtagagcacggcgaatacatctacctcatacataaccccacatccgaccgctgaaccaccactagcgcgaatatattgcagcttgagagcgaaccgcgagaaaggtattttttattcggggtgtgttggcccgacccgccacaagggagatctaaaacaaacgaagcccataatccccgaatggacgaatacacattagacgcccacccttcgacacacaccgacagcaccacccccccctaagatgtctaaatgcgagagccgacgatttccgagcgtctttctctccggagaactagcgcaggcagcatatgcgagcccgtatgtcacgatcacgatttagtgtatatggtcactctccgacaccctatatgaaaagcgagaagcagagtaggacgtacgaatgacctcacgccttgagacagaactaacacctaccatctccgacataatcatg

SEQ ID NO: 122201 - DNA, 522 bp, Arabidopsis thaliana columbia
ttttagcccgccgggggggagaggggcgggtccagaacaaaaactggtcgctatggtgtgcggagtatatcataccttgcagaacgggtaggtgagcggaaggcacgcaagttaaatgctcagactcggttggtacgaacccgtggtggctgctcgagctcggcgtttccctgaacgttttcacagaaagccgagacaatctttttatgagggggtggggaccacacccgcggggcccttatccctaaaaacattatatccttatttttattttgttcagaatgctctttatggtctgtgactgactcgttcggcgcgacgtgcgcgcggtaagcagttcatacagtgagtctcagttgtagacttaacagaccaccttgatttaagaatagattgatctggatgtagctggagggctggattagatataccgccacgtccgcctcgcatccctggtgtagatacctctccgccgtacggccgcgcggggccgttacctctggcgtgcgtcgggcgtgagcc

SEQ ID NO: 122202 - DNA, 448 bp, Arabidopsis thaliana columbia
cccgacactctgctcgcgcgcgaggcggcgaattcctccgcggagagccggtccccttctcccgtagtggtggcttgggtgcccggccttcgcgcgcacggtcaatttttcggtggggggaggattgaccaaaaaataacctactcgcctcagaccctaaccttgcccaccatcttaggtcgattacaaccatgtatttcagacgtgcgactgtacaacagttcaccagcatttacacagccacaaccgcgaaacgctatcatcgcggtctgttaagcgccccccagcttgcaatcctttttcttcgaggggtggggttccactcctctatcctcaggcccggactgaaacaacaaccaccgaacaccccacagtgttacaccatttccccatttagcgcgccccacgtcagcacctccgcgtctgcgtacgagttgtcgggccctga

SEQ ID NO: 122203 - DNA, 503 bp, Arabidopsis thaliana columbia
cccccccctatctaggccttatttcttttccacattttttctcttccggggggggatggggttttaaaattaatttccttccactttcttcctctcccctacttcgacgtctcgttcgcttcgttcctctctcagactacgctccactcgctcccccacatcatatctgcttacttctcagcgcttttacaccctttacttctattgtgttgtcacctttcgcctatctccccacgcaatcactcctttttttctttcttgcgggggggagagggtcatctagtacctctcccggttcgtcacatacaaaaaaaaaaaaattctcctcttatcgtgtccacttcttacttaaccatattctaattcttgtccctccccctactaatagcgtcatcttgctttaccaccacatcatctttctcgtactaccccaacacttctaacacgataattctactttctacttcttagctccaccgaccaattccgggtcaacacttcat

SEQ ID NO: 122204 - DNA, 448 bp, Arabidopsis thaliana columbia
acggttcaccccttgggggggtgggggcgttttatattaaaaacaaaataacacttcttttttttacccccttgtctttgtgtgacacagcgaccattttttttcccttgcaaaaatagaaaacgcgttcgccttgggtcacaaccagcgctgtgtccacaacttttcttttctagaccacgggtgtttttgatgtaaccttttcttcgggggggggggggccaccccttgcggcggtgttttcttaaaaaaaaacgtcggggggggggggggggacacacccccggctatccctcctcgctccgcacgcgctgctttccctggttcatacgaccttctttcggcgccctggcgcctcttccggcgctcgtctcccaaccgccgggctgtcgtggggcgtcgcgcctcatacaggctgtctgggcggcggggtcgcggtgcctgccgc

SEQ ID NO: 122205 - DNA, 157 bp, Arabidopsis thaliana columbia
atttccatttatatacgtcaattgtgtgtagttaaaatgtcttctacttgctaactgtagaaaaagaagctcgtaggacttgtctaatgagatctccgggcgtacttacatcatctttttttatagggggaggcgtttcccatgtagatttataaaa

SEQ ID NO: 122206 - DNA, 539 bp, Arabidopsis thaliana columbia
cccccgcccgagcgtgcgcccggcgccacgagaggcgcgagatcgccgcgggaacggcccccccgggaattctccgggaggcaggcggcgcccgggcggccgccggggcagagcggcgcaccgaattttcccgcccgggggggagaggcacgccgaaaacgcctgaggcggtggaccgcgagccatgcccacatcagtgttgccgcgcgcacagcaagtgtgcgccgcgcgggcccgcacaggctgcggcccccagccgcgtagacagcgccagcccagcgggagaggcggggcagagtaagagacgggaccgcttttttttcggggggggggggacgccgcaacacgagccaggatcgaggcacccagagcgcagcgccccgtcgtgccaaacggccgcggtccgccccgtgcccccccacgcgtctcgccgccacaccccgcggacgacccccaccatgcagaggcaccggcccatcggtacacgagacccgccgcccccgcaccacggtgaagggggcggccgggcgtgcgcgcag

SEQ ID NO: 122207 - DNA, 270 bp, Arabidopsis thaliana columbia
caagagttttgaagataccgcatataacggacccagatatgtacagtcacgacgataatggccttcttacaccagggggggtcgtggttcgttgccacatacgtgcagaagggcgagtatagtgcgttacctcatactacacaatcatcgagcctttcctccgaactctgactcgcgcgcgtctgctacctcattttagacaacaccaagtgctctcgatgcgcagacgaaattcgtcatgtttcatagccagtgttatctttttgttgt

SEQ ID NO: 122208 - DNA, 230 bp, Arabidopsis thaliana columbia
tctctcaacgtatcctcttacacccttctttcataactacataacactaatacctctttattaatcatctcccacccccataccaccgtcccatctcctccggtgactcgtctctctttctcccccctccatctctcgcatcctttcactcttccgtctcaccccctctttctctcttccctctcttccactcgtccatctacatagactcttaaatccattctcttcta

SEQ ID NO: 122209 - DNA, 483 bp, Arabidopsis thaliana columbia
cactgggtatgtgcggagggccatcaactctttacatcaggggggagggtggctcaaaaaaaatcacttatcatcctatgttaaattattgcacacctgactcagagtcttctctcacggccttttctcggaagcgtgccgccacggagcttttttgaacgctcttaccttctcttgcactaacgcagacatttttcttatgggggggggagataaatatcttatgatatttcaaaaaaaacaaacgtccttccacccagctatacgggatgatatacgcaacttgtgaggatagacgtaacgaaggaagatgatgtcacgtcccacatcgatcagtagaagtggctcttcagttagttatttactgtaagttgaatcactgcctttgtcgttcacgtgtgttacgtatttaccacggtcgctaactcttgagagttcgtaaatcataatttaagacgcagagatccagtacgataagtgtac

SEQ ID NO: 122210 - DNA, 366 bp, Arabidopsis thaliana columbia
aatcatctcactctccattatcttctcctccccccaaaactcttttttttcaaggaggggggctactttcttaccggaaacctccaaaaaaaaaaacctcacggggccctctcctctctcccccgcctctacatcatcctcctcactcactactacctcattcctatcttccttcttcacaatcctccatacctcttcatacacttatttactcaccttcactcccctcaatccctcccatctccaccctccttccactcatccatcactcctttcaattcttaatccctatatcaccacttttccacctatcaaccatatacatctttacgagcaaatttaactattccaatcaatctttactct

SEQ ID NO: 122211 - DNA, 652 bp, Arabidopsis thaliana columbia
  unsure (1)..(652): unsure at all n locations
ctgcggggggagggaaaggggggggggagctagttgggccncttctcaacctcttaaggagccgccccctccttaactttattccttttaaacctttcccctttaaggattagggggtttaaaaaaaaaattnttttctgtttctcccttctcccctttcctcaccacacaaccatcctcttcccaacatttttaaaccccgtctttttaaccctctttttttttataatttcccacatacaaattgttttttcccgcggggtttttctttttctccccttctttctttctttacgggggagtgaggggtttctttttttgtgggggggtttctttttttataaaaaaaataagcctctttttgtgtggtttagaaaatattttttcctcccttttttttttctttcacggcgttttcccccccccttctcttgcaatgtatttttttttcttcgcaatccctcccctgttttctgccgcgcttttttttttcttctcttttttttttcctgtgtcatcccgctttttcttggttctcttcttaaataatcacttttttctctcttcagggggtttcttttttacttcttttctcctctgcaagttgggccgccctctataattccttttctctccttaccacccccttttt

SEQ ID NO: 122212 - DNA, 137 bp, Arabidopsis thaliana columbia
cggcgtcgtggcgcgtttttttttttcgtggaggggggggggagccgccgtgcacggccgcgagggtcgtatgatctccatcacactcgtgttccgtcatgatctcttcgtagcttgtccgcgcggtcgttacgtgg

SEQ ID NO: 122213 - DNA, 420 bp, Arabidopsis thaliana columbia
  unsure (1)..(420): unsure at all n locations
aaaaaaaaaaacccaccccccccccccgaagggggaggaaagcgaggagcaaaagcttttcaccacacaaggacgaagagagggggggggacacaaaacaaaaaaacaccnacaaacaacccgcaaagaagaggaggaagacaagacacaaagcgaacagaagncaaacaaaagaacgaagacacacgaagaagccaaccacaacaccagacccaccgcccacgaccagcgcaaccacaacaacacgcaaacacacacgacaacagcgacgaacaaaacgcccttttacaacaaagaggaggtgggcgacaccgacaccaccgcaacgcggcacccgaaaaaaaaaaaaaacgaggcccgacggcactccagcacaaggaaggacagcacaaagacacaccccgcaagagacgaaaaaga

SEQ ID NO: 122214 - DNA, 296 bp, Arabidopsis thaliana columbia
ttcctcctctctcccgcgtcgtccgctcgccaagctgcgcacgagcgcacccgatcctttttttttggggggggggggccgtgctctcctggtcggcagtctttcgttcgcaataatctcgcgtaccaccttgttccgggttgcaggaggtgctcgatcgcgggctactctgcgttccctccgtgtctacctgccctcctccgcgcccgccgcctccgcgcgcgccgcgcggtggccctgggcgtccgcgtccggacgcctattgattctcttttcaaggctactacgctccgcgt

SEQ ID NO: 122215 - DNA, 456 bp, Arabidopsis thaliana columbia
caccccccccacccccgggcacgccccacccacccctccgagccaggacaagacgcacacgaacaccaccattcaccgcacgagaaacccacccccccccccacttcaacagcgaacaacccccccccccacgcccgacccgccccgtcaccggcccagactccccacacactttccccacacccccccgggcggggaacgagcgccccccaaaaaaaacaacaacgacacccgcccacaaacaacaccaccaccttatcagaaacaccgccatgacacacgagcagcgccaacaccgcccgcccccccccgcgcgatctagacgcaacaagcactcacacacccaccccacaagaaaccgagaaacaaacacacacaaccacggacacaagacagacgaggcacccagttttttctgacaaaccaaggaggggggccccacagctcaaaacccac

SEQ ID NO: 122216 - DNA, 230 bp, Arabidopsis thaliana columbia
tattaatcttctgaagtcttgtactaagttattgtgaagctatttagtgagttaactgaatcatcatttttttgaaacgggggggagtaccctaatatacccgccttactcaacgaatgcgttgaatacaataaaataattgataggagcgtgtatcagagaactgtctgtagcagctattctggacgtggtactccaggctcctgttctcgagaccatcttcttatcca

SEQ ID NO: 122217 - DNA, 556 bp, Arabidopsis thaliana columbia
cgcgcaactctgcaaccgccggacacaggcaggacctttttgtaaagggccgcacgctttgtacactcagacccgttctgatttactcgaaacgctcagtctctttttactttgggggatgttgtttaaactatgctgactgtccaatggatctaatgggcgtgttaccgtcacctcgatatgtgacgggcgcggaacgcactctacgtaggctggcggaagggtgggcttatacttgcggtcaggactgattttttttagagggggggaatccgtcgcacggtgctggcttgtctctgttggttgttcgctttgtggtctttgtttattagtatatataattacataacttttttctacgagatggtattcaatgaatgctgttagtcgtaggctctttcgcgatcgttgctacttgagaagtcccgcaaaactactctgatttacggtggttctgttcctcctcgactgatgcccacttcacatacagttcgtgacaaggtgtgcgtctcttggctgtctgggcctgtgaatcaattttttagttatccttgtg

SEQ ID NO: 122218 - DNA, 408 bp, Arabidopsis thaliana columbia
  unsure (1)..(408): unsure at all n locations
agaaccaaaaagccacacacgcccccgcaccgaccccaccgcacagccaccccaacaacagcccacacaccccaccagagacacgagaccaaacctcctcctcgtagaaaaaccaccccaccccccgcaccttcacgaccaaacgacgacaacgcacacccctcaaccaaccagagcagcgacgcagaccccaacagagaccttcttaaaaccaccccgggagggcaaccgncaacacaccaaaacaacaaaaaagcaacagcagcaccgcacacccgccacacaccagacgacaccacaaccaaccccgcacaaccagcgaccaaccagcgccccacccccgccaccgagacgcccacagacccaccccccccacgcaacaccaccaaccccgaccaccccaccccc

SEQ ID NO: 122219 - DNA, 384 bp, Arabidopsis thaliana columbia
cagtggagggcggctcgctctgtacacaaactaacttctcgttgttatgactgtgactacgcctaatgtacgtctacgtgcgatgctactcattcagcgagtggacgacttgactgtcgtgacctactgtctggttgcttcactgacgccactgttttagtccgctagatgcccttagtgaaaccccgccacatgatccacctccttctttttacggcgggtggctttccgcgttcggagtgcgctcgctcattcaagtataatagtcgacccggattccaacgcgatcggcgataggcgatcggcggactgacgcttaccacactccagccactctcgaatatacgacgcgaggcgctgcgtcaccccaatacgcaccgctgc

SEQ ID NO: 122220 - DNA, 291 bp, Arabidopsis thaliana columbia
  unsure (1)..(291): unsure at all n locations
tttagaaaaccggggggggagggggcgacacaaaaaaaaaaccacacaccnaccccccacaaggggacaaacacaggcgagagcgagagacacccaccaccgacgaccgcaaacgaggaancacacccgccgcggcaagagcgacgccgcgcgggcagcggaagcgaggggcgcagcacgcccgcgcagaaagagccgggggcgcggnagattttctctacacacggggggtgggaggtaaaacgccaccagaaaaaacaaccgccagaaaaaaaaaacaaaaaaaaacca

SEQ ID NO: 122221 - DNA, 642 bp, Arabidopsis thaliana columbia
aaaaaacaaaaaaagaaacccttcttttctaaaaaccccccccctcttttaggaaagcaaacccccccccgtcctactaccacacctcctttcccccctctttaaccctgcgggggggcaggctccccaaaaaaaaaaaacacaccctgttctgtacttcttcagacaactactacgcttcctctatattctcgccgttccacccactcacactctatcatcctttcttggtctatcacacgccctcaccccctctctactcaactctcgcacccgcgcacaccgcctcctaatcctttttttttttggcagggggcgatctctcatctttctccttgctacaacacaaaataaaacactcccctcctccttcatacctccctcactttctctcctctctcactcaccctccacacactctgtcttctctccccttattacaatcgctaccacctcctctcctctcttcaccctctcccccctctctctccttctctccactccctccatcacccatcctctaactttcgctcgcatctcaccctcccctcctacctacatacacatgctccattctcctatcactctattctttcctaatctatatcttacatattcccacccttctccctacccccctcc

SEQ ID NO: 122222 - DNA, 521 bp, Arabidopsis thaliana columbia
ctctacccacaaaaaaaaaaaaacctattaaaagccccccgtttcgacaacaacccccccccttctcaaccaacttacattttttcggagagaagggttaaaaaaaaatttttttctctttccttttttcctcctttcttttttcttccttactctttcccaacacaatctcgcttctctatatttcttatctccatatcttttcatcttatttttataaaccttttttttttgaggggggtctctttccttggcgctcaaaaaaaaaattctaactttccctcccattctccccaattccttcccctcctcaccccatccactccccccatttttatttttcctttccttgccttcctcatacatctatctttcatcgcttcatctataaatctacctccatctcactcccacctctccactacatctcccaacatctacccaaccatatcttcttcaatcactctcacctcccttaaatcttctcccctctcatccacctttatcgcttctattctcca

SEQ ID NO: 122223 - DNA, 480 bp, Arabidopsis thaliana columbia
  unsure (1)..(480): unsure at all n locations
aaacctccctcccccctttcaggtaaccccctcccccgaattcccccttttcaacccccccggtacccgggggaccccataaccaaccaccccttcctttttntccccccctctctctttccctttcctaaacccaaaaacctttttttaaatcctcccaaaaatttataggccacaaccccacaagataaaaaatccctaaccttaaaaaaaatttcctnaaaaaataattaaatttcccaatttttttccccaaggtcctcccaaaaaagtttccccgctaaaaaatttacaataactcccctccccttttatttccaattgggatcccaactcccccctgaaaaccctccaaccccccccccccccctttttttnnttcacttaaaatttcttttccccccctccccccgttttaattgttatttttcattctcccccccctacacaaaaatcttcaattgcccccttaaaacctaa

SEQ ID NO: 122224 - DNA, 167 bp, Arabidopsis thaliana columbia
cgagcgaagattgaacgaactctgagaaagaatcagcgatacagagctgcgactttgtttctacaggggggtcaaggccaagtacaaaaaaaacatcacacgtctcaaccatacgtactagtagaagagcagagacgtgacacacgtgaattcgacagcactacaga

SEQ ID NO: 122225 - DNA, 476 bp, Arabidopsis thaliana columbia
  unsure (1)..(476): unsure at all n locations
tctttgagcgtaacaaaaaaatgtctgtgcacgagtcttagtcttggtgcaccgggtcgcctcagagtgaggcgacttgcgcgtgcggcgataccgagtagtcgcggtaacgtcggcgcgctctacctctcctttacttcatatgcctgagcgcgccgaagtttgtgcgctttaatcgccgtgactttttttttttttgggggggagaggcgctcctctattagagttgagggtcaangacatacttgtggaccaacatctttctgacgtccgtattctcttctcctcgctacgtactttacttgctctttgctacgtcttactctctgtgacttctctccgagactgcgtggaggcggcctcccgtttcctattctaggcgtatctctgatcggcgcacattcagggtaacccggccgtctgtggactcggcatagcacggcaacgtggtagtgatgccagcgaccgcactgtcc

SEQ ID NO: 122226 - DNA, 120 bp, Arabidopsis thaliana columbia
acgttgcacccagagaacaataggatgtatctatacagcctcgtaccttcccacacaaaccactatctcatctcataccctcatcaagatctataagtctctcatagttaacgaagcacg

SEQ ID NO: 122227 - DNA, 108 bp, Arabidopsis thaliana columbia
taaagaaatattaatactaatctatcaactacaaaaatcgtagctgacgacctgacacgatggtcccaccattctctacctcgttcaatccttcaatttccaatagac

SEQ ID NO: 122228 - DNA, 585 bp, Arabidopsis thaliana columbia
  unsure (1)..(585): unsure at all n locations
ggggggggggggggggggaaaataccttgttcacatatcaatcccccccaaattaaangggaaaaccccgcccccctcccagtaccccctcccccaatttcccccttttnccccccacccgctttacggcccccccccaataaaaaaatcctttccccttccctaaaaaaaccaaacaagttttcaaaaaccctttccttgttccctttcccaagggccctcaaaagcccaaanntttttttcacaatttttacccctcccacaaaattggtttttatttccccttctccaaaaaaattcctcccccacggcaataatattttttaattttgggggccgcccgcccttaaaccctctttttggatattttcccnccctccttccaaaacacttaaaatatctttcccccccancccctcttcttctctttcttatataaaacatttcccccaaatcttccctctttttttcaaaaaaaaacaaaccctcaaggtcaccccccctttttttttcttaaaaaaaaaacctctcccctaacctcccccctctcaaaaaattcttttctccccacacccttttttcttc

SEQ ID NO: 122229 - DNA, 364 bp, Arabidopsis thaliana columbia
ttgggccgggtggggcccaaccggcgggcgcaaacattttcccccttccccattaatttttcccccctccggccttttattccctgggaaatttaaattattggggggagcccctacaacaaaatgggcccgcttttttctctactttgagaatatattctttattaccccgccttattgggcgccaccgcaaaagaaaaaaacctccccgcgaaccgtctgtgcgcatttaattgtgcaacccctttctttttttgcaaagtggtgtttttaacaaaaaaattgggacacatcctgttgcgcctgtgccactcaacactttaatgattgtttttttattttccgggggataccgccccccttt

SEQ ID NO: 122230 - DNA, 615 bp, Arabidopsis thaliana columbia
  unsure (1)..(615): unsure at all n locations
aggggggggctcgtgtgggggctccccccccccctttacggngcccgcccggccgcgcctggttcccctcttctctttttttntttttcttctcgcggctctgggggttttcacctatttttcttgtnggtgttggcgggctgtcctctgcccgccgcccgccggnnncgtcccccgccgcttctccctcctcttntcgcccccccccccccccncccgccgtgtcccgttggccctgctcctttccgcttctctcctccgctttcggggtttctttttttgggggggggggttttttttttttgggggggttctctcaccaaacatctgggcggcgtcgtggctcccctctcttgctcctcttctcctcgccctctttcttttccgcggcttccgcgtccggtgcgtgcctcggtttgtttttccccctccgcttgcgcgctcttcccttccgtttctccctcctcttgggggtgctgttctctctccctcgtctgccttctttctctctctccgcctgtgggttctcctcgcgccttcgcctcgttgcttctccgggcctcgctctcgtttccgccttctgccgctggcggctctctcccgtggctgccccgc

SEQ ID NO: 122231 - DNA, 574 bp, Arabidopsis thaliana columbia
ggggggtggggggcgtctttaaaaacaaaagtcgccacgcggcccgtgcgatcccgtgtgcgagtgctgtcgtgcggtcgcaccgcgctgaccttcgccgcctctcgcgccccttcgcacccagcgccgccctcctgctggcaccatcactcaccccgtccccccctgcgcccgggctcgggccttcttctttcttcgcggggggggggcgactacttgccggcggttctggcgcgctacacaacactctcttgttatccctgggcgcggcgccctcggccccgcggcttcatgcgtcatgtcggctccgcatctgacgctcgtgccctcgccgcgtcctggagtcgccgctgccgccccgcgggtgtccgccctctcgcctctttcctcagcccctccccgctgcccctctgcctgccccctctccctattgcgcccgcgcgctcttcaccctgcctctcttgcggctgcgggcggcagctgcctcgacggcatggcgtgcgcgtcgtgtgcccggcaccgtgcccacccgccgccccgcgtcgctcgcgtcgcccgtcgtgtgcccggctgc

SEQ ID NO: 122232 - DNA, 534 bp, Arabidopsis thaliana columbia
tttttctctccccgggggcttgacctcttctctcaaaaaaaactcgcccctgttcatacacctctcttgatccacctctcctttctcacacttacttttgctccatctttctatccctcttatccactcatttccccacatcctttcctctacctctcttcttcttttctcttcctcttttctcctctccatccccccaccctctcccttttttttttcttcggggtgtacccctccactccgctctccctcttcttaaaaacacttctctttattcgttctctttttctttcctatcctcccactcatcttactctcatccactccctcctttcttcttctctttctcttcttcctcccttccccacttccccttctaccctctttcctcctctccccctacccacttcctccctcctccccttttccacccgctccctctccccttcttctctcttctcattcttcccttttcatctactccttctttccttttctccctctcctcccctcctctccacttattcccacatt

SEQ ID NO: 122233 - DNA, 449 bp, Arabidopsis thaliana columbia
gtggtacgcacgcgtacgtaagcttggatcctctagagcggtcgacctttgtgttttttcttttgatacaaacacaatttttttattacaaaagatgggacatcgttcttgcacaagtaacaaccctgtgatgttatacaagataagcctattttacagcggttttattctcacgcattgaattacaaaacatattctacatggggaggagactaccgacctcgcaaacccattttatacagcgattattggatgttagggagatgttttgacatcacaacattaccgaccttatgattctggtcaatctcttggacgcaatcaactccaatctttgagaatgctacaaaaagttctgggtagagttttggagagcatgatcttgaaaccggcgggaattgtgggtgaagtcccctggcggttagctgaagatcctacagggccccttc

SEQ ID NO: 122234 - DNA, 380 bp, Arabidopsis thaliana columbia
  unsure (1)..(380): unsure at all n locations
actcaccttanggaaagctcgtccgcctgcaggtaccggtccggaattcccgggtcgacccacggcgttcgcggacgcgtgggttcaaacagtttgatatgggtaatgactgctcggaccatcatttcctttcttcggataaaggggtggctcactcccaggtcacaaagagtgtgggtgaagaaagtccccccaagaatggggccatttgggaggcaaatccttgcgggggggatatatgtgccgggggtgtgaaagaaaggatggacccttttgccttccagccctggtttgggggcccctagaacccccctattacagagggggttttcttttttccacactaatgctttccaccccaatattccccatggaccccc

SEQ ID NO: 122235 - DNA, 505 bp, Arabidopsis thaliana columbia
acaagactttgacgtcgcatgcacgcgtacgtaagcttggatcctctagagcggcctgcctttgggttttgtgttttttttttccacatgctttacatgcttttcgctttaaccaccttttatttctttaccgttaagaatcttatagtcttggggggccaatcaacttgatataataacccaacggtttttcaggtctataaacaaaaaaagggtttttggcccgggttggcttatcaacaaacccaaaaaaactttctttgttcttgggctaacccccccctggggttaaacaccttgttttttgggctccccctccctccccctgaaaaggcccccaacatgttggattagacatctccccccttcccaaaattcctaaaaaaaaaaccatttttttaaaaaaagacatttcggaaggggagaaaatcaaaaaccccccgtccccccctcttaaaaaggaatccatttgggactttattaaaaacccccccccaaatccaaa

SEQ ID NO: 122236 - DNA, 363 bp, Arabidopsis thaliana columbia
gtgacactatagcagaactttgacgtcgcatgcacgcgtacgtaagcttggatcctctagagcggtctgccctatgcgttttggaacttttttttttaataaactgattcatctgtagatttgaatcataatgttcaaatgatgaaccacccggttagcataccacttttattctatcaggaggcaatgttagtgcttccacttattaagattcctatagtgtagactataattggaggcgggcgggtcttttctataaccttttttgaaacaaacctccctttaaaagcacttcttttccaaaaaaaaccacggtgaataagactggctgtatagatttacggggtgggggccccccccccc

SEQ ID NO: 122237 - DNA, 354 bp, Arabidopsis thaliana columbia
  unsure (1)..(354): unsure at all n locations
ccaccccggtccagaaacctcaaaaaatgggcttgaaaaacaaactcccttacaagctggtggttcgcgtaatcaaccccctctgcccctcaccacctttttaaatttcctttttttttgtagagggggtgtggcccccccccctccgggcctcanttcccataagagaaaaaacccaatttattgtcctcggggcgcttcctctcaaacagagatatccttttaagcggtatgggtctcttaatatacaaccaaccaaacaccacaagcttgcgccagggcttttttggtttacccccaaaaaagttatgtggttacgcggagaaaattgtgctctcctcccacaaccccaca

SEQ ID NO: 122238 - DNA, 474 bp, Arabidopsis thaliana columbia
  unsure (1)..(474): unsure at all n locations
aaaaaggagttaacataacccttttgttttcaaaatgagggtgtttccaagtctcttattctcgattacccttatcggggtttgggggatattcctctcgccccgaaccttatggatcccaaattccccttttttttatttttgggggggggcntcccccccccctcacaaatggtgtttaaaaaaaaaatcggaagtttttcccaggggtccccaccccccccagggggcaaaaatttctttttttgtacggcctccaacccagcggggacaccacctatttataaaaatcccaatccccccctgccaccccctctcaatgtcccgtccacccctccccggggttaaaacccctttgggaaatatttcctcgcgccccgcactaacactttggcccccattattgggagaaaacccacccctttacaaaaccaccgctgggagcccaccttaataatctctttgtttttttgt

SEQ ID NO: 122239 - DNA, 490 bp, Arabidopsis thaliana columbia
  unsure (1)..(490): unsure at all n locations
annnnnnnnnnnnnnnnnnnnnnnnnnnnnnnnnnnnnnnnnnnnnnnnnnnnnnnnnnnnnnnnnnnnnnnnnnnnnctttttgttttttttttttaagtatcaaagctaggtgataacaaaaaaaaattctatcttgtataatgactataccaagcgtaacatatctccacataatcaacatccggagacagaaaatgttagtggtgaatagaacttttttcacggctgggcctgaggaggtaaatcactgcaccttgtaacacaaatacttgttccgaaacgtctcgggactctataggcgtcaaccctacttcatgttttgcctgcggaacgaacggcgaaaatttactacttagcacggcaattgccactgctggggtcatacgattgataactacatagtggttcatctttgtgggagacggatcaacgatttcagatgtcaacaaatgagctaagatacggttgctggctcgagtggcagaaa

SEQ ID NO: 122240 - DNA, 372 bp, Arabidopsis thaliana columbia
  unsure (1)..(372): unsure at all n locations
aaaaccctacttatcactcacttaggaaactctccctcagtccctcccattccgtcaccacggtcggccccaaaaatttcctccaatttacctagcatatctacatacatttcacttcattttttaccccagataaacttacctttccttctatactctattcacaaacctatctaggggttcacggccaaaatacattcataaataaaccacttcattttctatccaactcancccccaaaaggtctanattacttacatcaagactttaaccaacattattccccttaacataaaatctattaccttctcatcgataaaatttccaaaccccctgtgttaaaatttttgttaaaaaaaacttcttccaca

SEQ ID NO: 122241 - DNA, 471 bp, Arabidopsis thaliana columbia
  unsure (1)..(471): unsure at all n locations
atgnnnnnnnnnnnnnnnnnnnnnnnnnnnnnnnnnnnnnnnnnnnnnnnnnnnnnnnnnnnnnnnnnnnnnnnnnnctttgtgttttatctttttttttgttttttatattttgtttttttttttatattttgtatttgttgacctatgttttgtagtgggattttacccaagcgcctctttttaaaaaggataaagggattaggccatttttggggcaccattttttttttaaaaaaaaaagggggcgggaaaattttttcccccccctggggggaagttttttatttattttaaactctcaagggggggacggtgtttttttttttcgtgtggaaaaccaaaattttggaatacgagctagatacttgctttttttttttccttaaaaaaaaaaaatttataaaaggggtttgggggattcaccggtgggagacctcactcttgggggcggaataaggggttcccgga

SEQ ID NO: 122242 - DNA, 368 bp, Arabidopsis thaliana columbia
ccgaaaggcggagagaagaacggcgcgcggagcgagaagcagccgagaggcgaaagccgacaggagacacagaaaacgagagcggagagacaggagggagaggggaggacgggggcgatgcgcgggccgacaaaaaacgcgagcctgcgcgtaaccgccaggcgatgattttttcgggaggggcggggccaaaaaagggagcaagacaaagacgcacgaagtatgtgagcgtcacagcacacccaaacacgcgacagcgagagaataggcgaaacacccacaatcaaaagaagaagaaaaataacgagaaaacagccacaagacgatcacagctgaaagagaaaataaacagagacatagttgcggcg

SEQ ID NO: 122243 - DNA, 407 bp, Arabidopsis thaliana columbia
  unsure (1)..(407): unsure at all n locations
atgnnnnnnnnnnnnnnnnnnnnnnnnnnnnnnnnnnnnnnnnnnnnnnnnnnnnnnnnnnnnnnnnnnnnnnnntgcccttgtgttttattttttttttttttttttctttattacacttgtttattatttgttgtttcttagaaggaaacatagggtcctttttttatttacccgaaacccaacaggtggtttttttatggttctagttatggcataaccaacaacattaaaaagcctctgatgaagcccttaaaaaagatcttttttttaatgagccaaagtccttttgaaaaaacaatgtttaggcaatgttctttctgccttgtgaccagaagggcgttgggggtttaccctttaaggccttaacactaaatgggctgttcttgctcaaaaaacaggttcct

SEQ ID NO: 122244 - DNA, 521 bp, Arabidopsis thaliana columbia
  unsure (1)..(521): unsure at all n locations
cgcgccgcgccccgggaacaaggagaaaggaaacgtttttttcccccccacccttttagggaaacccaccacagaaagcagggngaaaaaagcttcancacgggggaagaccccggacccaacaccggcgcggagaacaacacagaaaggaaggcccaacggcggcgagaggaccggggcgagcaaccagaagccaggccacaggcagaggggagaacacagaggacagaaccgcgaaaaacattcttttcccaggggggaaaacccaacacacccagggcgcgcgaagccacgccacccccgccacgaagagaagacaccggaaggaacagcgcgaggcaaagaccggcacccggccacggcgccgacctaacaccaagcccaaggaacgaacccccccaagaagaagaacagccgcacaaaccgagagaaacagcaggaagaaaacaacaccacaaacaaagacgcaaacccgagccgacacaggcgccctcgcaaacccccccacagagaccaaagac

SEQ ID NO: 122245 - DNA, 289 bp, Arabidopsis thaliana columbia
ggggcggccgagggccttcttttttttatttattcaacgcttttttgtacgcggcacggcccgcggacgattcggatatggtagagcgatttgagggcggcggggcgtggcgcgcgcaaacaatcgagtagagagattcacgaggaggtgtacaggtcgtcgctataaagccggaacagaatcccgatcgagacagcgattgtcgcacggctgctatcgagactcaatggttcgttaccccacccgtgatacgcacaaccgagatggcaatgctttttttttcgccgcg

SEQ ID NO: 122246 - DNA, 398 bp, Arabidopsis thaliana columbia
  unsure (1)..(398): unsure at all n locations
gnnnnnnnnnnnnnnnnnnnnnnnnnnnnnnnnnnnnnnnnnnnnnnnnnnnnnnnnnnnnnnnnnnnnnnnnnnnnnnctttgtttttttttttttttttttttttttttttcttttttattttttttttttgggccgggaaaagaaattttttcttttcaaaactgttccgtgccgttccttttgtttcaaaacggaaaaggacactaccctcttcttttccactcaaaaaacaaaatcaagctgtctgtttccccccttttttttttcaaaacttaagagaagggacgccccaccccaaacccctaactttattgcattgccatttctttgttcccccccttgcttttaacaacaacacacattgacccccacgaaaccatcccagtaagaaatt

SEQ ID NO: 122247 - DNA, 317 bp, Arabidopsis thaliana columbia
  unsure (1)..(317): unsure at all n locations
nnnnnnnnnnnnnnnnnnnnnnnnnnnnnnnnnnnnnnnnnnnnnnnnnnnnnnnnnnnnnnnnnnnnnnnnnnnnnnnnctttgttttttttttttttttttcttgttttctttttataggttttgctctttttcttgattttcaatttttgcttttaaaaaaaaccactggttcccttttccggtaacacatgcgggtacattttgggattcccccccaaagaaagaaggaaccctcctctctttgtagggccttaaggttcaccaatgctttaaaaaacaaccaaacgtgtgtttttcttagaaataaagcttt

SEQ ID NO: 122248 - DNA, 517 bp, Arabidopsis thaliana columbia
  unsure (1)..(517): unsure at all n locations
atgnnnnnnnnnnnnnnnnnnnnnnnnnnnnnnnnnnnnnnnnnnnnnnnnnnnnnnnnnnnnnnnnnnnnnnnnnnnnctttttttttttttttttttttttttttttttttttttttttttttttttttttgggaacattttgttttttatttcggcattcacggaatgagactaaacgtaatgggaatagatggatgcatcaaaagtttaagttattcaatcaatctccatcaaccactcacatggggatggtggggggggtggtaattaacatggcgngcgctaaaaatattttttgattaactcctgaacaacctttaccgctgtgacgacagccttgtcatctacttttgaagcacaggtcctgggtatactaacttaggaaagaagcaatccttaggggatctgagagaccacctaaaagacaaatgttctaaccttcaagccggagtccccgaattacttatgcttctattgacacgaaagggtgactactttcttttacacacactaa

SEQ ID NO: 122249 - DNA, 358 bp, Arabidopsis thaliana columbia
ccccccttttttagaacgaggacacgacccggagccgcagagccgcgatgaggttcggtttttacaatctggggtagcccccgccgggcgaccaacgacggattgcgggcaggcgtagatcttcccctcaacgaatgacggttcccctacgccaccgagaagtccgcccgtacatcacgggccatggagtaatgaaccccccagaacacacgtccggacgaagaagttttttttagcagggtaaaaaacccccggcccgtccgtaatatcacaccaatacgtccggttaaggagcccgatcgcttcgtctactccctcgcgccttaatcacacgacgacgccagaaggacgaacaatg

SEQ ID NO: 122250 - DNA, 487 bp, Arabidopsis thaliana columbia
  unsure (1)..(487): unsure at all n locations
aacgggaaaaacgggggacgagagaaaaccgaggagaaaagaagaaaattttttttttaccccaccaacccactgccgacggggaaacaaaccgaagaagagcgagacaggcccccggggcgaggtttacaacgaggggggagaaagcccggggaaaccacgaacaaaacgccggagggaagggacaaaggagacaggacaaaaaaagaaacgaggcgagggagaaagaaagccggggccgaagagaaagagcagagcccagagcaagaagaggagcaaaatacgcaagcgcagcagaaaccaaaaaaaaaagcgagtttttttttctgaggggggaggacaggcgacccacccccaggaaggggcnaaaggacaccaaacacgcacagagggagagagcagggcgcagcaccaacaaccgaaggagagagaagaaaagaaccgaccacggcgcccgagacagacgggagagaaaaagccgacgagc

SEQ ID NO: 122251 - DNA, 575 bp, Arabidopsis thaliana columbia
atgccacgcacaagcagaacaacaacaagaaaacaagcttcttttttttaaaaacacccgcacacttgtgcacggcaggacccggaagacaagaacgcaggatacaaaacaacgaccactttttccaaaaacgggagccacgcccaacaaaccaaaaaaacggaaccagcgaagcggggaaaagaagacaagccggagaagaagacgaacgcgagcaaccccaaccccgtcagcgtatgtacgcagcgccaagcataagaaagacgcgcgacggaggcgaacacgcgccccgaaaacaacgcaacaagacacgtggagcgggagcaaacttttttttttccaagaagcggccccccactaaccacccgcacgccccacgaagagaacccgtgacagggagtccgcgaaagccgagccacgacacccccagcatcaccgaagaaatcacacgcaaactcaccaagagacacgagcgacctgcccggcggtgcaaggcgaccggagaactcccacgcgccaggcacgcacagcagcgaaggagaccgaagcgccggagaaaaaagccacagacccag

SEQ ID NO: 122252 - DNA, 379 bp, Arabidopsis thaliana columbia
gggggggaaccccagacaggcgggaagggggagagggaggaagaaccagatttctggggggggggaaaaacccacaggcaccggaggagaaaagcaggacaaggcgggcgggggccgcggagcaggggaggacagcgcaggacccgacgggcgcgaggggaggcgagaagagcacgcaagaagacagaggcgggagggccaaaggcggcccaagaaagagaggagaaagagaagagggacaggcaggcagaaagaacgagttcttttttagccgagggggcgggcgagcaagagagcaacagcgagcagaagggaagggaacgaacgacgacgggagcaacggcgagacgggcaaaagaaaggcggggcgcacgcggga

SEQ ID NO: 122253 - DNA, 181 bp, Arabidopsis thaliana columbia
ggagggggtggaacgacgtttatcgatatacgcgtatgcgttaccgtatttgccggtgccaggcggtgtcgacgagcggattgaccctgtcgccgtccgaataagcgggcgacggaggaaggagatttttttttcttcggcgcgcgttcggtgatgccccgcccgccggtatccgtcatcc

SEQ ID NO: 122254 - DNA, 169 bp, Arabidopsis thaliana columbia
tcccggcagcacgaaatgcggtaagccgttacgctgcgtggtatcaaagcgcgttgtcatgcagcgccgttgtgctaaccccccaccgaatgccggcccgctgaacaaagttttttttcgaggaggtaattcccccactcgttccgtagtccgagaactaaacgcccga

SEQ ID NO: 122255 - DNA, 513 bp, Arabidopsis thaliana columbia
  unsure (1)..(513): unsure at all n locations
atgatacgtcnnnnnnnnnnnnnnnnnnnnnnnnnnnnnnnnnnnnnnnnnnnnnnnnnnnnnnnnnnnnnnnnnnnnnnnccacgcgtgcgtgtcctttgccctcgttttttttcggttctcgtctttcgttcttcacttttagacaagcaaatatgagacccccagttacaggaggacgtggtggtggaggattcanaggtggaagagatggtggtggaagaggttttggaggtggaagaagctgtggaggaggccgtantggtgacagaggccgtantgggcctcncggcaaaggacgtggtgcgcctcgtggtcgtggaggaccacctcgtggaggaatgaaaggaggaagcaaagtgattgttgagcctcacagacatgcgggagtgtttattgctaagggtaaagaagatgctcttgtcactaagaatttggttcctggtgaagctgtttacaatgagaagagaatctctgttcanaatgaagatggaactaagggtgaatacagag

SEQ ID NO: 122256 - DNA, 582 bp, Arabidopsis thaliana columbia
ggggacccggcgagcgccgcaccgccagaaagaaaaagagaaacttttttttaccccccccaccctgcttgtgggaacacacacccccggagcgaggaggcgcaaaggttttgcagggggggaaaacgaaagaagaaaaaaaaggaaaaaagaagaaagggagggagggagacagcacgaagcaaaaaagggaaagagagcggacacggcagcggcgaggggcccaagcacggagcgcaaaaaacgggacgaggagagacgaggaaacacgttttttcaccagagggggggacgcgacaagcaccgcagaaggaaaaacacgcgacacgcgcaaagagggaagaagagcaagcacaaccaaggggagaacaagagaagacaccgcgcccggggccaccgggggcgggctcaagacaacacgccagaagccgaaacccgaaccgggacgacagagacggacccgggaaaaaacggaacggccagggacacaacccagcacaaccagagacggaggaccagggcaaacgagcgcgcccaccgagcaacaccgcgaaaaagacgcagtcgagccaggggaggcaa

SEQ ID NO: 122257 - DNA, 638 bp, Arabidopsis thaliana columbia
ggcaacggaggaagggggcgggaaagagaggagaattttttttgccaccccacaactttttgggggaaacccccgcgcgagaggcggagaggaacagcggggcttttccggggggggagaaaaccggcaggggcagaaagagaggagacgaagaagagaaccgcgggaagaaagagggaacgagaaccgggaggggaaaagagaagcaggaacggagaggaaggagagagcgcgcaggcggggaacacgaaaaaggcgggggcgaaaggagcgagaagaagctttttttgaaggggggagaggaaaagccgcaaacaacaggggggggggaacaaaagaagcgggcacgccagagaggcgacaagagcgagggccgtagaaaccggaaaagagacagacggggaaaagcgacgaggaggaacagggggaggcagagatggaaaacgaaagcagcgagaaagccgaaccgcccgaccgaaggaaacgagcggagaggcccagaagagcaaaaggaagggccacaaggagagaggcgaagccgaggaggagccgggccgcggcagaggcaacgacggagcggaaggcagcagaaggcccgacatgcgcggccgcaggcgggcgaagaaaagcgggacgaa

SEQ ID NO: 122258 - DNA, 188 bp, Arabidopsis thaliana columbia
accaaagcaggcggagaggcaccgcccgcaggaaccgaccgaactgacagggagccaacgcggcagaccaacatacaggaaccaagccgctcgcaaaggcggtagaatcagaaaacagcggacacggagagcgggcgatgtagcggaccccagaacgacaacgccacgaacgggttgtgcggaagaac

SEQ ID NO: 122259 - DNA, 488 bp, Arabidopsis thaliana columbia
  unsure (1)..(488): unsure at all n locations
gcagaaggaagggagctttttttgtcaccccccccccttttcggggaaccaccccaagggaggggggggngcccagggcttttaaggaggggaaaccccacaaagcaacaacagaaaaaggagaagaaaagcaggagaaggacaaaaagggcacggggccgaaaaaggcgcccgcgccaggcgggaccggggccgaggcagcagggaaagacgaggagcgcggaacaagaaaaggtttttttacagggagcaagaacagccgcccccacggggacaaaaagacccacacaacagaagaagaagaccaacccccggaaacgaaaaaaccaagaagcagcaggcgcacgggacaagcagagagaagggacatagccagagagccaagacaccccccaaaacaacagcggcgaccaaacagaaaaagagggcggcgggcaccggcccggagagaggggaggccagccggacccgcaacgacaaccaccaga

SEQ ID NO: 122260 - DNA, 297 bp, Arabidopsis thaliana columbia
ttttttttagttcaattttccccttttttgtgaagcggcgtcaaccgggagcgatgtcccaaaaattagtaggaacttaattgtccaagaaatatacccgttatatccagacgtatatccgtatattggattccgcctgttagctagcatagcgcatgcgagctctggttagtcgatgaagcggattgcaaacgcgtctatatcgtgtcgcgaaactaagtccgaagcgcgcgtatatacagcgttcagcctccgccagtagctacagacacgtgtatgcagagttgccggttattt

SEQ ID NO: 122261 - DNA, 375 bp, Arabidopsis thaliana columbia
  unsure (1)..(375): unsure at all n locations
nnnnnnnnnnnnnnnnnnnnnnnnnnnnnnnnnnnnnnnnnnnnnnnnnnnnnnnnnnnnnnnnnnnnnnnnnnttgccctttgtgttttatccttttttttttttttttttttttttttttgtttttttttgttttttttttttttcccttcaaacctttggtttccatggggaaaacttaaaaaaaaaatcttttttttttttcaacaattttggaggggatttacaagggcggtaaacaacaatttttaagccaatttaaaattttttgcccttaggagggccaaagataaagggtttttccagaggaacctgtttttggaaaaacaaattttgaaaaaaaaaaattttggggaagggaccctatgaaagct

SEQ ID NO: 122262 - DNA, 430 bp, Arabidopsis thaliana columbia
cggagacggagagggggggggaagggagggaaaaaaaagcgaagggggaaaaggggggagggggagcagagggggaaggggaagaaaagaaagagcgttttttttacagggggtgggggaaagggggggtggctgcgggagaagaaaatgggggggcgaggcagtgatgggaggagaggggagcccgagggatggtggggtcggtcgtgagtggggagtccaaaccgggtggagcggaggggagggatggaggaaggtagctggtgaatccagtctcggactcggagaaagggtagttgtgtgggcgagtgagagttaggttggtgaaaaggaaggtgtgttcggaaggttgtctgtaattgttgcgtgacctggggaaaggggggaagggctcaattgtgcgtcgggtcatgaagcatggttgtgggtg

SEQ ID NO: 122263 - DNA, 266 bp, Arabidopsis thaliana columbia
tgcactatagaagactttgacgtcgcatgcacgcgtacgtaagcttggatcctctagagcggcctccctttttttttttttttttaaaaactttcacattcgttttataatcccaaaataaccacgaaaaaaataactttttttaaatgtgcaaaatatggtatgacctcaacgtcactttagacaccctaataaaactgttttttctttctttgttcgagaacttgtgatagatctccttctgatccagttgccaagcaatgact

SEQ ID NO: 122264 - DNA, 672 bp, Arabidopsis thaliana columbia
  unsure (1)..(672): unsure at all n locations
gaaagaacgagaggaaggaaggcttttttttttttcttctccgcgacttttttttcgaagnaggaccccccgcggcggggagcgcggtggctctcacccggtttttcttctattgtgttggatattcctcacgacgcccactcctaccgtcttagattacgtatccaagtgggaatgtgaactgtctggtgcgaattcagtatctacagacagataactacagatatatattacgagacggtatcgacaatctatgcaataataaatttacgtaaagcattcaaattgagaaaaagattgttttttttttcagcggtggttgttatattacgcgataccgcctccaactgtttaatattagttccagctaatcgctgagggcgttttgtacgacttcccctcaaatgaattccgtttgtgcatcgacgtatgaccaatcccaccttatcccgtcgtgagaagattcattatgtgtatgtaccgagtaatttccttgtcccccctcacccagccatcttatttgttcttctccgtataccttatgtgctgataacaactgttttgctacagacttcgattgtacgtattttgtcttttgcgtttgcccgcgcgcgttcctaccattcattttcctccgcttaaataatactacgttatactatcttctagcgg

SEQ ID NO: 122265 - DNA, 338 bp, Arabidopsis thaliana columbia
cggggcgaagagaaactttttttttttccaacccacccccttttaggcgcacgccccgcccgcgcgccgaagcgcataagacgaacgccgccatctataacatgggaacagccgccgaaccagacgagttccccgttacgggcaacccgcatcttaccaacggcccgacgacgtctccagaaccgctccggacccagctttcgccgccctccatctgcaaagccctacgcccacaccccccgcagccggcccaccccagaccgagacagcgtttttttcagcgtccgtggatcccccgcccctttttgcgcttccccactctcttacccccgtttctg

SEQ ID NO: 122266 - DNA, 200 bp, Arabidopsis thaliana columbia
gtccgtttgttattcagccccccatgacctgagacgcgcgagcattttcttttttcacccccaatcatctacccagccgcgttccggtgtaacacttataatctccaatttatatttgccaatccgctaacggtaccagactccccgtagatccgcgacggagcactcatcagatggcgcgaccgggcgtgagaccccct

SEQ ID NO: 122267 - DNA, 226 bp, Arabidopsis thaliana columbia
gggagctccgcaatttgtcccccaaacgaacagacaaacacttttttttttacacaccacccccttttttaagaaggaacagccccgcgcaatcgcggaaaaattgcgtccatttaacgaggggggaagcgcgccggaccaaacaaaatcgggagcacatagccgatacagaactaaccgggcgaagtcttaaagatgacgggatgaccgagccggtgtaagaggg

SEQ ID NO: 122268 - DNA, 639 bp, Arabidopsis thaliana columbia
  unsure (1)..(639): unsure at all n locations
ggaaacggagggaagggagacggcctttgttgcgcgcccacattttgtgaagggaacacaacaggggaggagggggcgggggganggaacacgttttctgggggggggggaaaaacccagggcacgcgaaggaccacacagagagagccggagggaagagcaggcggagaggggggcggaggacaaacccgaggagaggaaagaggccagagggagccggagggggcgagaggacggcagagagggaggaaagagagcgggacggcccgaagccgagaggttttttttggggggcggggagaccgcgaaaggcgcggaggccgccacggccgggacgagagacagccaccacggccgaagagggtgaagaaggggcggcccccccacgcacccgagacggcgagcaaaaacgacacgcgaccgcgagcaagggagggggaagagaaacgcggggagccaggggacccagagacgcgcgccggaggacgacgggaaggggaggcccagaggcggccaggagcaggcccgaaagaaagccggagagcccgaggcggggggggacggtgcccaagaccgggccgaggacaggcgcacaaggcccgcaagaagaaggcacacgacggcgcagcgcgagcgggc

SEQ ID NO: 122269 - DNA, 336 bp, Arabidopsis thaliana columbia
atctattgagccacaatggttgtgttcggcctccgtgagcggctcgtaccgtagaggtttttttcctaccgtgtgcccgccgcaattcgacgtagaggccatgcctccgaattggtgccagagcgcctcctccgccacccagcaccggatgccccccaaagctccgagtatagcgcaactacaaatgagaggttaaaagctgatacgtatgaacgcgaccatactggcgcgtcgagaaggtcgaccgggcacgcagcgaggacggatgagcattaagacagagagacacaaccagtagtaatcacagtgtgaccgaccggggtgtagagtagccac

SEQ ID NO: 122270 - DNA, 484 bp, Arabidopsis thaliana columbia
gacgtcgcatcgcacgcgtacgtaagcttggatcctctagagcggtcgccctttgtgtttaatctctttttttttttttaattttttttttacaaaactttgtaatatacaccctccttgtaaaaaaaagaaatgaatccaacactttcttggtaaaaaaggaacaaaccattacctgaactcaccctggaggaaaaaaaacaatgtatgccaaccgctgtgtgtaaaaaaaaaaaataaaatgccctaccgcatagaaagggaccgagcccattccggaagaaaacactctatgatcaaaataaaaaaactggcgcaaaattggaacacagcaggccaccttttttgctgtataaaaaacttcctgactctggccacttttattgtcttggagaatacaccacctctcccttaattttctttatgaaaacacgaagctggttactaaatatttctttaaggtggaatagaccctccaacattt

SEQ ID NO: 122271 - DNA, 392 bp, Arabidopsis thaliana columbia
  unsure (1)..(392): unsure at all n locations
gaccgccgcccgaacagagaaggaaaaattttttttttcccaccacccccctccctgggggaaacacacacccgggagcggggngncgcnggagccttttnaccggaggggaaagccccagacaaacaaaacccaaaccaggagaggcaacgcccgcgaggagcgcggagcaagaacgagggagaggagaagaggacgagccacgcgaggagcgggggacccgagccgcgggcggagaggcggaagcgaggcacgagacaggcgagaaccagccttttttccgagggggggatgccccggacgccaccgcaggggaaacagcagacaccgccacccggacaggagaggcgacccccccgtggctacacaagcggaacgcgaacccccccccc

SEQ ID NO: 122272 - DNA, 527 bp, Arabidopsis thaliana columbia
ccagtagcccctccagatccaacaagaagcctttttttttaacaaaacccccagttgagagggaacaaaacagccacgaaaccatattcgcatgaaagcaattttgctcttatgggacaggccaacactcaaattagattttactaagcgcaatagaacactcgagaatgtcctttcgttaaccctagggtccggtatagcaggcgatcagcggaaacgttttagaaatacgcaccaaacatacatcactcgggaaaacgaaaccttctttctttacaagtgcccccccccggttcggttttacgtctttttattccattaataagttccctaacgcttttctaataaattaaatgtataccgccaataaacacaatataaaaataatctagagtaggttaactaaattcacacgcataattcggtttgagaagagaacactctccatgataactaccagacagatctgtagggcgggagccatgaatacaagaagaacctgccatcgagaacacattgaggagaga

SEQ ID NO: 122273 - DNA, 518 bp, Arabidopsis thaliana columbia
  unsure (1)..(518): unsure at all n locations
cnnnnnnnnnnnnnnnnnnnnnnnnnnnnnnnnnnnnnnnnnnnnnnnnnnnnnnnnnnnnnnnnnnnnnnnnnnnnnnnnnnnnnnnnnnnnnnnnncctttnttttttttttttttttttttttttttttttttttttttttttttttttggggaaacatgcccttggattttttttgagagttgaaatacaaagggccgtttcaagcccaaacgaaggttctttaaagaaaagccgaaaatgaaaacgaaatcggtggggataagtttttccaactggcggaaacacaaactaccccaggggaaatagatcacctcccaagtgcgtgaaacacgaaccaaccccttatttttagatcacaaaaagcttagaagcttccaccccgaagacgaagaaccaagtgaagaggcgactccttttggatgtgtgaatctgcaagtgtgcgaccattcttaagctgttttccagcgaaaatgaatctctgttggtctggggggatcccttccttggcctgaa

SEQ ID NO: 122274 - DNA, 535 bp, Arabidopsis thaliana columbia
ttacaaaagaattttttttttttcagacaccctttggaggacgcgcagaactcgcgcccatgcgcctatacgtacaggttagcgtatgggggaacttccactcaaacaagcgataacgctagcgctaacgatctcgaaccatcagtcaactctgaaaggtcgcatactagaggatatcggacgcatgattcgactgctttgttcgttccccacgcaatcgcaggcgagtcagttcttttttttcccgcgttcaatatgaccccaaccgacgccatcacctttatacccccgttgtggtcacaatcgccgatccaccgccatccgtaaacccgcgaaacagctggaataaagcaagctacgcgcaagacccaaaacccacccatacaccctctctacgaacacgcccgaagacgtactatccaactcacggatacaagtatggcggcgattattaggacctcgtctcaattatatgccgacaactacgtgtgcaagccactcttataacttctcgctcgtccatcttatgttacgc

SEQ ID NO: 122275 - DNA, 427 bp, Arabidopsis thaliana columbia
gtgacactatagaagagctttgacgtcgcatgcacgcgtacgtaagctcggaattcggctcgaggtttacgaaggagaagtagccagtgtaatgtgttcgtacaaccaagtcaatggaaagcccacatgtgctgatgaaaatctcttaaagaacactattcgtggtcaatggcgtctcaatgggtacattgtctcagattgtgactctgttgatgttttcttcaaccaacaacattacactagcactccggaagaagccgccgccagatccattaaagccggtttggacttggactgcgggccgtttttggcgattttcacggaaggtgcagtgaagaaaggattgttaacggagaatgacatcaatttagcacttgctaatacattaacagtccaaatgagactttgtatgtttgatggtaacctt

SEQ ID NO: 122276 - DNA, 521 bp, Arabidopsis thaliana columbia
  unsure (1)..(521): unsure at all n locations
aatgatttatgtgaactatagaagagctttgacgtcgcatgcacgcgtacgtaagctcggaattcggctcgagattatgtcagtgtattcttcacagattatacaatttcagcaacacaggtttacccgaccctacactcaacactacttacctccaaactcttcgtggactatgcccccttaatggcaatcgaagtgccttggtagattttgatctacgtacgcctacggttttcgacaacaaatactacgtgaatctcaaagagcgaaaaggtcttatccagagcgaccaagagttgttctctagccccaatgccactgacacaatccccttggtgagagcatatgctgatggcacacaaacattcttcaatgcatttgtggaggcaatgaataggatgggaaacattacaccaactacaggaactcaaggacaaatcagattgaactgtagagttgtgaactccaactctctgctccatgatgtggtggatatcgntgactttgttagctctatgtga

SEQ ID NO: 122277 - DNA, 202 bp, Arabidopsis thaliana columbia
atcccgctctcccacagggtacacgaccaacgtaacaaaacaaagaccttttttttttttttaatccccaccccctttttcaacacacaccaacagctcgctcacacacaaacttcgtaattcaaatacagacatcttttaccacctggtgggactagggcccccccataaccaatccacacatacgccataacaggcagcg

SEQ ID NO: 122278 - DNA, 632 bp, Arabidopsis thaliana columbia
cacaccccccaagaaacgcacaccaaaagagaaaaaaaaagaccctcgtttttatcaccccccacccccttccaagagaaaaaacacaaacccccgagaaaaaacggaaaaaaaacgaaacacacccttccacaccggagggaggggggaggcccgcaccaaaacaaaacaacacaagcgggccggacacgcgaccaccgcccaccacaacgcaaaccgccgaaaacagacgacaacgaaacagcccaaaacccggccacagagagacgaggcccaacgcacaacgcagacaacgaaccgagaaaacacaccccgcaaaacacgaacacacaacagacgaaaaaaccatttctttccccagcgggcggaacaagcaccgcccaccgaaacagcgagcgacccacaagaagcccccagataaagccaagacaaaagacgacgcaccacaaccgacacacaaaaaaacccacccaaaaccaccacccgaaagaaccgaccaaaaacagcagaccacaaccaccgcacccgaaaaccccaccagaacaacgaaccacacgcaaaagaagaacgcacgcccaacatacgacacgcaacaagaaaaaccacaaaacccgcaaaaccacaccaacaag

SEQ ID NO: 122279 - DNA, 672 bp, Arabidopsis thaliana columbia
gcaacccccccaaaaagaacaccaacaaagaaaaaaaaaagaaagcctggtttttatcacacccccccacctcacaaggaagaaacaaagcccccggggaaaacacaaaaacaaagacacaccttacaagacgggggggagggcgcgcaaacaaacaaaacacgaaaaaaacagagccacagaagaaagaacgaagcaaaaaaaaaaacaagaaccccacacagacacagaaagagcaaaacaacgaaacaaaaaacaaagcaacaaagcccacccgccagaccacacacaacgaacaagaagccaactcttctaaccgagggggggacccagcacccaaagagccgacagccacgcggaacaaaacacaaagaacaacagaaccagaacgcgcgaacacaccacacccacacgccaaaacacgccccaaaacgacgcacagaagaaaacacgccaagaagacgaaggcgcggaaaacacaaacaagaaagacccagaaaacaggaaacagacgaacaagaaaaaacaaagaagaaggagcagacaggagaaaaaagaaaaaagcaaggaagcaccaaccaggaaggcacacagggaagaacaccacccgacgcccagcgaactcacaacaaccaaaaaacgacacgacccgagcagagaaacagacaaaga

SEQ ID NO: 122280 - DNA, 526 bp, Arabidopsis thaliana columbia
  unsure (1)..(526): unsure at all n locations
acgtcgcatgcacgcgtacgtaagctcggaattcggctcgaggcacaacgcgagtgaagtnnnnnnnnnnccncctttttttttttttttcttaaaactctcattaaaaacaatgataaatcaaacatggttttttccaccttgggtattgttcttgccccatctaggcgcattcccatactcacccatccttcacaaacttttttttttaccgggggggacctcacacttgacccctttccttttataaaaatcccttttcttcctgcggcaggaaaattgtcttcaaagaatcggcattccccccccccgaaagaaggggaaaacgtgggaattgcccaatttttaaaatgaccaactttccttacaaaataatttcccccaaaatgaaacgcgaataacatttttcacggaccccggtggatacttcttgccctgcctgactcttttttccgaaggggaaagatttcagctctggcgttaaacccccttttggggggcccccatgcatccccggaaagacccc

SEQ ID NO: 122281 - DNA, 703 bp, Arabidopsis thaliana columbia
acccatcccgcaataaccccccaaccaccgaccagaaccctcttctttttttccccccccccacatcccaaccacggaaccaaacccccccacaaaaaaagacacaagaaaaacaacccacctttacaaccgggggggggaggggccgcaaaaaataacatacacaccacaaccagctaagaccaccaaccttaactcccgtctccaacgaccatctgcaataacctacataccaccccctctttctcgcacccccatactactccccgcccataatatatcagacgccacccgcacttacccaacaccaagaacagacaaccaaatacatcttttttcaccgcggggtggctcgcccccatatacccaatccccaattgttaaaaacacaaatatccatccgcgtaaagcaaactcacctcaaccacctcacatatcccctctcaaaacaccctaaatattaaaacgacccactaccacaacacccaacaacactcatcacctaaagcaccgcatacaaaaccaaacataccccacaaataaaacactcagcgaccgcgacgttcagtagaacacacacaaacacacagaaaatcacctacaataatcctcccacaacagaacgacccacctcaaacgctgaagcacatcacgaacacaagctaaaaaccatagccaaagaaacccccaccacacaccccac

SEQ ID NO: 122282 - DNA, 432 bp, Arabidopsis thaliana columbia
  unsure (1)..(432): unsure at all n locations
cgtcgctatcacgcgtacgtaagctcggaattcggctcgagctattccaccaggtaatgacgcactcacagtggaattggcttcatgcacaggaagaggctgattcgaaatctggtgacactttacatatgcgtagaggatcaactgctcgagaanaannntnangnntcacacancattaacttaaattattggcctccttttctggttctgggcacacattgtctagaggcttttatagaatctacaaatcccgcttcctttcattgacagtaggtccccagactttggtgctccttttgcctntacataatcatagacctatcatgttggtggagctacttgagtttgtctataatacaccttcttggggttcctctgctccttgggacgagggtttcacccgcttgctttttttgctttcgggacctc

SEQ ID NO: 122283 - DNA, 510 bp, Arabidopsis thaliana columbia
  unsure (1)..(510): unsure at all n locations
agatactccnnnnnnnnnnnnnnnnnnnnnnnnnnnnnnnnnnnnnnnnnnnnnnnnnnnnnnnnnnnnnnnnnnnnnnnnnnnnnnnnnnnnnnnnnnnnnnnnccccttttttttttttttttttttcacagaaatgtattttccttgggaatatgctcacaatatatatatatccttgtgtttgagtttgagtttgatgtatcacaccagattagcctaaattatttggctcctttttctgggtggggggccccattgtctcggggggttttctgggatctttcgaaattcggcttccttttattgacgggaggggccccggcttttgtttttgcttttgccttaaaattttccttaaacttttcggggggggggggcccgctaaaagttggcctctaattcaaccttttttggggggccccttttcctcttggggggtgggttaaaccaagtttttttttttttttttttttngggaccctttatccctaaagcgctggggggagg

SEQ ID NO: 122284 - DNA, 718 bp, Arabidopsis thaliana columbia
tacctcccgtagtttccgagccacagacgcaagggggggactttttttttttttttaacaagggcacctctttatatcggggagtcgcacaacgctcgttgcccgctcgcatatcagtgggtccggatcttttctcaccccatggggggcagagagccctgaccaaaacaacctgtgatcacgccagtgccatttagacacgctaatctatcgtattctcacccccaatccatattctcgtccttaattcccactatgcgcatcgcttcccctgtattgtttcgcagccagccggctattctcttgatgttttacagacccgttgtgccaagcccgccggcgtttttttagtgagggggtggtgcgaagcagttcggtgagcccgcgccgcctcacgcaacatgaaatatagtatcatatccatactgttaatccgagtattgtatccattcacacgcattccagcccattcgtaaagtcacaatgattccagtgattcgccagttagacgcctccacacatgtttcacgatattcccccccccgcctgccacccgtacacttttcccccccaatgacccgatcatatgattatccctcgccgctcattgtttaacgtacgattataaccgagtccaccctatcctcaacgtatattacctccgccctacttattggactcatattatgtcccatcctatacccactagtcattgacc

SEQ ID NO: 122285 - DNA, 126 bp, Arabidopsis thaliana columbia
gagtcgcgatttacgcacgacgaccagatttttttccgttaccacagctctccctttcttgtcccggtgacccccggtgcgcctgtcatttaccgccgacggtgtgaccccgctctttttcccgct

SEQ ID NO: 122286 - DNA, 450 bp, Arabidopsis thaliana columbia
  unsure (1)..(450): unsure at all n locations
cctttgttttttggtcttttacatataaaacatttanatttaacttanatataataacttacaccaaccattactcctaatgcttataccagagaattctatttctttcttaaaacaactcaaactcaagattatcccctatggctttacattcaatatacctagggtgggtggcctcangcgagatccccctttaataaaattcacccccctacttataaaaattcccttactctaagcgggattcccccccctatcaaaaccccaattaaatcttttaaaaaaggtgttttttttatttttaaacaacctttctttaacccccacccttttttcttgtttcctaacaaaaaaatcccctaaacaaattttttccctggaaatctacacaacgcttttcaaaaaactttagtttttttaaccaacctttcccccaaaattccttttttt

SEQ ID NO: 122287 - DNA, 380 bp, Arabidopsis thaliana columbia
aaaacaagcgcccgaccccagagcgccccgcagccgaggcggatccgcccccgccaacacaagagccagcaccaggacacgggggacacatcacgggacgagaacagagaagccccgggacagcagaacacgaagcaggagccgcccccgggccccgcacaccacccacatatttttagtaggggaggggggaccagagcgaagacaacccgcagaaacccgcaacaaacaaacaagagcagaagacccgcgagcgagacccagcgaccccaccggtacgccctcaggccaacccaaacagagagccccaaatgagacccaagaaacccaagatagcactgacaacacgagagaccgacaacgcccccccaggccgaagc

SEQ ID NO: 122288 - DNA, 153 bp, Arabidopsis thaliana columbia
  unsure (1)..(153): unsure at all n locations
atatttgcgccgtagcaggcggagacgtttttctattccctaatgtttctccacgtattccgcgtgcagccccaggatggcnagtgattgtcgcggtgtattgccgcgcccgcgatttccctcttccgggggggtggggagcgtgagagaaaa

SEQ ID NO: 122289 - DNA, 424 bp, Arabidopsis thaliana columbia
  unsure (1)..(424): unsure at all n locations
aaataaactttcagcacaatcatatttgtttctcttacacacaatttcctagaagaaaaagaaacttccaaaagcctattttaaaagtagaaaaccctctccccataaacccccttttttcataagaggctccaaaaaaaaccaccggggggtttttgcctcaggggatggtattttcttaaaaaagccatgccccacaaaactcaaaccccaaccagtattatttccaagagaccaaccaataagagggagaccacacctcgtttaaaaattnaattaaaatttgttgcgaatgattctctttttttgggaggttgtttttaggggttgtttaaacttccctttacaacatcccggagttggttccccaagcctcatttttcttaactttctcttttcaccatatataattttttttttaccc

SEQ ID NO: 122290 - DNA, 160 bp, Arabidopsis thaliana columbia
  unsure (1)..(160): unsure at all n locations
gtacgtgagcttggatcctctaaagcgttcgcccttggggttatgggtgtcttaantgtaatctattacatanatcaaacatgaggacttgactacaaaatccatcaaaggggttggccaaagaactgagtgtgcanattcataaccagagggagacata

SEQ ID NO: 122291 - DNA, 632 bp, Arabidopsis thaliana columbia
cggcaggccacggcgtgaacccgggggaagggcttttttttttttacatcgcacctttctcgggtgagaccccccagcacggaccatccagggcatgagcgccagaggtttcctccctggggggggggggcgcgaaaacaacaacaaggagtgaggcaggcgcagatacaccgccgcataacgttcccacgccatgccatctgccgacattacacaccagccccgaggcgtacctgagtgatggacaacggtgagcggcagttgggccaagaccacccgcttatcccaagcccgcccattttttacagggggggggagagacacatcgatttcgcgtgctcgcccccgccagtagtcagtatcatggcgtcactacaatgtcgagtaaagagagctgaccccctcgacgcagcgctagcaatatcccgtgttacccatagaccatttgacgccagcgccgatgaagcgcgccgccccgccggccggatacccatccgcatgccacccaatacccgtttcagatattcagaccccgccatgaatgagtatagttgaaccctaccacccgtgtccttcgagacatcccccccccagccatgagagccaagtaagacgcggccgtgcccgcggca

SEQ ID NO: 122292 - DNA, 628 bp, Arabidopsis thaliana columbia
  unsure (1)..(628): unsure at all n locations
ccctaacattcctttccccaaccgccctttttttttcatttatcccctttttcccacccccccaaccaattaaaccccacctaattatcccccccccctttttcccactacggggggtaggtgtnttctaaaaaacaaacattccgcctctcgattctattttcctcccctaaccttacatatattaatttattcttccatatttccccccatttgccccccaccttcccctttatctctcaccctcctatacctcccactcttccctcattgccttctattataccctattccaccctttttttttttttactggggtgtcggcggacaattttccccctttgttttatataaaaataaaaccattctactttttctatttcttcttccccttccccatttccttttttaccattactgttcaccccatcgacacccttcacttactcataccattacgtcaatcatatttcccccccaccctaattttctccccaccacttcatctcatcccccgcccccctattattcccctaattcttcttattcccctatacccccccaatccccccagattccatctccttctactcctataatcaattactcccccacccttttacccccc

SEQ ID NO: 122293 - DNA, 258 bp, Arabidopsis thaliana columbia
gacgtcgcatccacgcgtacgtaagcttggatcctctagagcggtcgcccttttgggtttttttttttaaaaaaatagcaagctttgaacatcaatgtttcatctttctaaatacacgacaaatacaaaactcataaaatccatacaaaacccatatttcacagctaattcccattcacacaaaataaaaccaataatcgaatccatcgaatgacggggggagaaatcaaacccatgattcttacctatcaaacaggg

SEQ ID NO: 122294 - DNA, 427 bp, Arabidopsis thaliana columbia
ggcggtcccgcccggccggtcgcggtagcggcgagcccttttttttaaaacccccccccctttccggccgcaaacccccgcgcccgaccgacccccgcgacgccccctttttccccgggggggggggggcggtaaaacaaataagccgggccccgtcgcggctcttggcgcccggtgcgaaagcttcaggggagtcgccgtaccgcccgtgccgcccccgtcccgccttttggcacccctccccgaatctcacgcctgtgcgcgtggttcgcgtctcgtaagggcgcaggtttttttttgcggagggggggggcgccgagcccgcccgcggagcgttgggcgcaaaaaaaagcaagaggggctatccgcccggtaggcctgggcggcggggtgtttttccgcgtacccgggatgagctgcgtctggg

SEQ ID NO: 122295 - DNA, 457 bp, Arabidopsis thaliana columbia
tatccatttattcacaaagatattaagaaccccaaccaaacttaattggtcccaataattaaaatgaagaggggcactttggtcaatacaacctaataaccctctttttatggggggggccgcaactatttggccttaaccccccaaataatattcccaccccaccaccaccccccacccgggtttcccccttcaccacgtatccaccgggttggttttttccaatttctcccctctcatgcgggaggaaaataaaaaccttagcccttccccgtcctctccttttttgtgaacaaagaaccctcaaatttttatttcctgtggcaatccccacagcggagactttaacccactcccaaaatggcgtgtgcccctcctctcttcaatgggggacgggccttgcctccttttatacacattcctctacatttccgcggcgtttaagttcccaaaaaaa

SEQ ID NO: 122296 - DNA, 250 bp, Arabidopsis thaliana columbia
ccaagcgagctcccgtgggatcggtttcggattgaaataagagagaacaccagagaaccccgattaggcccgccgtcacgaaattcgtggaggggtgcctaatctgcggatgttaccaggggtggcaagaggaatggccaagcacgccgcgatttttttttttcggggggggggggccccccctttcccaggtaatggtgtaaacaaaaaaacaaccatttgagggtcagaggacagagaaccagcatcg

SEQ ID NO: 122297 - DNA, 570 bp, Arabidopsis thaliana columbia
gtggggagcacacccctcccgtacaccaccggatcctcaacacgcggtctcctcccggggggggggggggcgcgaaagaaaacatactttggcccacccactgtacctcctcatttcgctgcccccacaaataagttccagtcctttatcggcaaacacattaaatcctagttgttactccaaaatagaaaggctaatgcattgcacccccgtacccacccccctcttttttcgggggggggtgaaccaccaatagtaggccccacaacaaaaaaaaatgcacgacggttcaagccttatgcactcccatgcaaacacctcgccccctggccgcccagaataatactccattttaccctttaaccctgtttcaccttctcctggatgcgctcttccccccccatctttccccatccacaatccccccataacctacctgtaatatccatcgcgccctataatcatacctgttctccctcccccccttaccgatccattatccccaccctccttcatatatgtcccgggtatgatccacatctcaacccccacacctgcatcctattccgc

SEQ ID NO: 122298 - DNA, 333 bp, Arabidopsis thaliana columbia
ccccctttttcccgagggggggggacgatcgagcaaataaaaaaaaagaagcattccgcgctaacgcgacacgatggaacctgcggtactcgcttacagcatactttataatactctcctataatctcccgttatcccacccctatcccccccttatccacccctctgcctttcccccctcatcactcattcgcaattacgaaccctaacacccctttttttttgggggggcgggaacgccaccccaacggcttgacccccggaatactaaatattgatacccacccacccggtattcctgtgcacccaggacttataaccacttaccccatt

SEQ ID NO: 122299 - DNA, 463 bp, Arabidopsis thaliana columbia
  unsure (1)..(463): unsure at all n locations
ctttttttttctcatccaattnatatcacactttattgccaatgggtataacaaataaaaggggctgaaaataccaaatagagaggattataaatgtccctaaatatagaaattctcagaagacaaaccccccaaatccgcttattttctcaaacaaaaatattttccggggggggttttctcttccgagaaattttcaaaacaaaaaaccaacggttaattttagggaaaacattccccttttttttatctatgttatttccaagggggggaatacatcaaggataaaaaaacctcaccaaacaaaaaaaaaaacatttttccttaggagaataaaaaaaaataattccttttaaataaagaactgggggggggaattttttccctgggcccccttttttccgagaaggccggttttgcggctttaattttgaaatcttcccaacaccccaaaatgcttttc

SEQ ID NO: 122300 - DNA, 380 bp, Arabidopsis thaliana columbia
aaaaacacggagtacaatcttttattcccatgaacttttaccaaaccagcgaaaaggcgtggcaccccatttcatggggggggggaaaaaaaaagtatacgtggatacgggacccattcgaggggataaagtcccgtcttgacgtatccgcgcctccgactgcgtcgatgcgttcgtacgtatcaggttgctattgaagcaaaaaacttttttaggggggagcccacaacatggggacgtgagaaaaactacgaagtggagggggagggattcggacgcgtagtgtggttggtggtggatgcaggagggggtgcaagcaacatctatagctacgatattagtcgctcgcgcccgaatgtgtaacggcgacaacaataaga

SEQ ID NO: 122301 - DNA, 231 bp, Arabidopsis thaliana columbia
  unsure (1)..(231): unsure at all n locations
tttcccagagcccccgggggcgatgcgaagcccccctggatattacgcccacatcttttccccacaaaggtgcgggtggggnggttaatagaaaaaaaatgcaatcccagtggcggttccgtgtggcgtcgtttagatccccgtcttggttgtgtctccggtccaccccccattgcctgcccccggtcagctcgtcttcgtgtccccgtccgatttcgttcccgtttgtgt

SEQ ID NO: 122302 - DNA, 370 bp, Arabidopsis thaliana columbia
gggatagtccgacccattccaaagcgcagatgccggctcgcgaacgagacgctttcaatacccgaaaagtctttttttcgcgggtcccccgaccttacaagacgcgctcggtagccccgccctttcacctgggggggaaaaggtattaaaaaagaaactcgaggtggggtttatagtgtacactggcaaacaccagagaggattagacgcgcatcccccattatccccgacgttacacctaatttgcacaccagtccataatgtccgcgtgagtccacgggtatgcgataatactatagccgactcgccactttttttttgtggtggggtgcaccctcccaaaattattgcgcgcgatttcgaatataaa

SEQ ID NO: 122303 - DNA, 226 bp, Arabidopsis thaliana columbia
cgagacatagtcgagtggactttttttccctccggggggatggaggggcggacacaacgacaaaagacgaccccgaacccatatccccctcagcattgcgtatgcccacgcccggcggatttagcggtcctagagacctactattcaacgaccatgtgcacagtgtgttgcaacacacaacgagcgggctagtgttgataaatatccacgcagcgatgagccacgc

SEQ ID NO: 122304 - DNA, 555 bp, Arabidopsis thaliana columbia
tttttgcgggatgcgcgcgtcccagtcaacccgcgcaagtgtcgcgccccagtttcccactgggggttgtgggtcaggaaaataatacttcacgctgtcgtttcgtttgagcaagtcgacgcaagtctgatgatacacgatttatcgcgcattcgcccgcccgttcccccatttcattccccttcaatatcgtcccgtgattccgtgttaccatttagtagatcgaatatccacacgtttttttttgtcagctgtgggcagcgcaacgttgtcccccgggtgggttgataaacatgcgcccattgtcgaaagagaaagctttttgccgcttccgaggtgcggtatatgctttggcggcgacgccatgagaagcgcgatctatctatggatgcgttagattgtctatgtacgaccccgccgtatagggcgcgacctttcggtaggcggcgcgccgatattccccctagctgtggtcgcccatcgcccgccgagcggcgagtgcgcggtagattctggtcgtgtttccgcgccacagttccaccccttggggatcag

SEQ ID NO: 122305 - DNA, 224 bp, Arabidopsis thaliana columbia
caatttacccgagaccggcagtttctttttttatacacacactctatctctctatcccaagaaacgcgagatccatcaatacccggggtattatcgccgccttttacccaacgaggggcgacatttgaacataaaaaaaatatgaatacgcatggcagattctgtgcctccggattcgggtggtatgttgtggtacgatcatatatctcccaatttgcccctcc

SEQ ID NO: 122306 - DNA, 492 bp, Arabidopsis thaliana columbia
accccagggaacaagcaagacaaggggggttttttttaaaaaacccccttctggagaaaaaagccgcgcagggggaggaggcggaaactcccagggggaggaaggcggaaaaaaaaaaaaagccaagcagaagagccacgagagaagcccccccaaggagggcgcacaaaccggggcacagaagaccaggggaggcaacaggcaagaggcggggagcaccccacgggcgaaacacatttttttttagggggggggccaaacaagaacgcccaggacacccaaaaaaagaggaagaaccacagaacgaagaacacacgagcacgccgcgaccagcggaaacccgggagcccaggaggcagagacaccagcagagagggagcaacccccccgaaacccagcgaaacccccagagccgaaaaaaagaccacgcgcaaagcaagagcaaccgaccgaccccgcaaccggcatgagacaacacacggacagaaacaa

SEQ ID NO: 122307 - DNA, 638 bp, Arabidopsis thaliana columbia
cacaccaccggaatctttttcttttccccttgatatcccctttttcccctctcccccatccatactacccgcgccatttccccgcccttttccctcaagggggacatgttgagcttaaaaatatcctccgccttgcgtgattccttactccgtatcattagaatcttgtatgacatccgatcacccccattgtcccaccttccccttatttcatcccacatccggtcttccgactgattccctatatgcattatatctttcacaccacgccccttttttttaacgatcgaggacccacccaacttttgcctcagttttcggttagatgatctatcccaccatttttattctgtcgtcaaatttgtatctcacttcccaattttcattttttatcgtatacatatgaagcccaatgcgaaccccttaccagaccgaccgtccctagacgtagatgttttattccccacctccctttatttctcccaggccgtacatattgacgaagcccctcgttctttccccattttctttcatatccaccaaaccccccccatctgcaccttttattcctaattctaacatctctgctctagtagcacaccgcacatatcacctcctatcaagtataaccactgaac

SEQ ID NO: 122308 - DNA, 684 bp, Arabidopsis thaliana columbia
gcacccgaccctatctcattttccgaagacgacagatcgtttttttttcccatgtatcactttttaaccgcaatttccaccagtcccttataatcaaccactcaataccccgcctttttcccatatgggggctgtatggcgtctaaaataaacagacacatccccaccccattaatatattccacctctttcacccataacatatagttgacatcaatgcatcccccttatcctcccccattccccacatttattcgcaatcgcatttcgccacactttatacacgtatagcatatagtattttcgttttccaccttttttttatgagggggcggtgtacccccccacatttttacaccccgattttaataaaaaaacgatccacaccatgataaattgagtgccgcatatcttccgccttccccccagtattttcatcttcagtatcactggatatcaacggtagcgaagccagaaccagaacatccgatcctttatcatctttctactattccccccccgcgcctattattctccccacccctatcatattgcccagcacacgcagtcatatcccgctatttaggtccatacccactttatctccgcgattccacctatagtctacttactatgccctattggatgccacaacagactgcaacccattaccccccactatca

SEQ ID NO: 122309 - DNA, 595 bp, Arabidopsis thaliana columbia
  unsure (1)..(595): unsure at all n locations
ggagagggagggggaacggcaaggggccggggggggggttttttttgaaagggccacatttttggggggaaaccaccccggcgcccggaaggagcccgagaataccccggggggttgaggccgcacacccacaannaannnaaagccaagagacccaactaggcgggcgagcccggacagggggcggaagcggcggcaggccacacgagagcaagagagggagcccgggaggcgggaaggggcacaagcgcacccagaggccgggcgaccgggggtttttttttaggggggggggggacgaaaacaaaaaggcgagccggcacgccaagcaaaacaaaggagggcgggccagagacgagaccacaggaggagccagaggccggagagagcggccgaggcgaaaagcgccaagagagcccagaggagcccagagggcgcggcggcagatagagccagaagaacccgacccacgaaaccccgacagcgatccgcgcgaagggccggacgaacgaggacgcgcgccccgcgatcgcaaaggcgacagggagacccgtagccgccagagcagaaaaggagtccacgcgcgccagccggt

SEQ ID NO: 122310 - DNA, 505 bp, Arabidopsis thaliana columbia
atatcgattcggtgatcccggggcacacgaggccgttctgttccattaggacttttttcccagtacccccgggcgtgtcagccctcctgcattacgccgcgactttttccagtctggggggagatggccatgaaaaaaagatataccgcatgcgttcattttgtacggcgggtccgtatgaaatcgtataaattgtccagaagcgcccattggcgccgcggcgccgactttcgtccgcttccgtatagccgccatgtgacggtggtccctcttagtttttcggtgtacgccgaattttttttgtagggggtggcccccgcaacgattagaacaagttgaggtaaaaaaagagtggaccgacgggcgtagtttgggtcgatgtttctccaacgtcccgagattatgttatttggttgcatacggggccgcttgtagagcagcacaccgggcattacatgcgctattaatagactttcggtgcgtccgacgccggttatattcaccc

SEQ ID NO: 122311 - DNA, 254 bp, Arabidopsis thaliana columbia
cccgcctgtttccccctcgcgcggggggcgggtgggtcgattaaataaaacaatcagtccccgcgtccggcggcttctgtaggccaccgattgccgtggcgcgtgagagaaggtgacgaccagacaacgccccattgccgccgcccggtccccctcgttttgcgccgcgcttgcgtatccttccgcaatgttgcggggttgcctcttggtgtggccgatctcccggcgttttttttttggcgggggggccgcgc

SEQ ID NO: 122312 - DNA, 417 bp, Arabidopsis thaliana columbia
  unsure (1)..(417): unsure at all n locations
cgtaagctcggaattcggctcgagggttttcccttgtgtctgagcagtgagatcacctanagtgccttnaaggagaaaaaanaaacaaaaacaaaggagaatgggatacctttttcaagaaccttaagctctaaccctaaaactccaattgtttgatgatgataacgagttgggtttaatggccgtgaaacttgggggcgccnccncctttcctatggttctcaaagaccgcctcgagcttggtgtctttgacactctctacgccggagcctctcgcaccgactcattcctctcaccctatgaaataacaagtaagctaccaactacacctngtaaccctgaagcgccggttttggtggaccggatgcttcgtctactcgctagctactccatgggcaagggtggggaaggccttat

SEQ ID NO: 122313 - DNA, 351 bp, Arabidopsis thaliana columbia
  unsure (1)..(351): unsure at all n locations
ttccccgtgtgtttccctctcatcaacgggaataacatattaatctggttcctcacttctttgggggggttttcaaagggggtcaaccattttccccctcaggtaaaatccctttaaacgggggctccnttttgaaatcaaaaaaaattaaccnngccccctcccttttaaaaaatttttcacctcttggcagcccccacattaacatttattcacggggaaaacacctccccccattttcccccaaacttaagtccctttttttttccccccttcttcaaacaacaaagaaaaactcccaaaaaattttagacccccccgggaaacctcccaataacttaaaacccttcc

SEQ ID NO: 122314 - DNA, 560 bp, Arabidopsis thaliana columbia
cagggaggggtttttttgacaaaccccggccctttcctgcgggaaaacaaaccacccgagcccgggggggaaaggggccggcttcccacaggggagaggagggcggacacccaaacacacacaacgcacggacaagggaaaagccagcagggcgaggcagcccacaagaaggagagccggcaaggggcggcaggcggcgggcaggagaaggggcgcgcaccgagacgcgggcaggcggcgaaggagcgaccgggaggacgcggcggccttctttttaagggggggggggagagaaaccgaagaagagaccacgccaggaagaaacacaagaggaagaggagggagacaacggaagaacggagaaggaagcagcaccagcgccacaccgcaagagggaaagcccggagaagcccagcggacccaaaggacacggcgccaagaaggcgcggcgaaccgcagcgcagaagagcggcggggcaggaagccccacagaaacgcagagcaaggagggagcaaccgcggggggcgacagaggcgagacaagacgccccgcccgcagg

SEQ ID NO: 122315 - DNA, 561 bp, Arabidopsis thaliana columbia
cagacatacgcccagagagagaagctttttttgttatacacagccccccccttccagcgggggggaccagacgcgcggagcaccgcaggagaagacgcccgagctttaccccgcgggggaggagcgcgcacaacaaaagaacaaccaaagccaattgcacgacacaaagcgagcctccacccaacaacaaaacagcacaaccacacccaactaccagcccagaagacagcgccccaggacagcgaacaacgcgcaaggaccacaccgctaaccccgaccccccctctttttttttagaggggggaggggcaaaccgcaacgagagaccacggccacggccgcacaccaaacaaaaacaacgcggaccactccaaaacccaggagcacaccgcgccacgcgcaccgacaccaacgagaaacgcccagatacccagaacgacccacaagccgcaccaccacaatagccaagaaacccccacacccacacgcacaacagcaaacccccaaagacccaagcaaaaatatccgcccccccccaaacgagacggaccgaagaaaccc

SEQ ID NO: 122316 - DNA, 312 bp, Arabidopsis thaliana columbia
cccgctccaccgttgtcgcccactgtgaagtaataaataactcctctacccatttctcctgtcccccgcccgtattactcaccatcccgcatgtacatttttttcttttgcgtcaggagtgacataaacaagcccctatccaagtcgttccttcacttcgaataatcttttctttcctccacccccttaatttctgccacacctttcaagtagagcacgcgcacgcttcagaaccacatttcttagattcctctttccccccccctcccacccttgttcccgttattccacctcattgtatagtatcacctc

SEQ ID NO: 122317 - DNA, 382 bp, Arabidopsis thaliana columbia
  unsure (1)..(382): unsure at all n locations
atgaattaggtgcactatagaagagcttgacgtcgcatccacgcgtacgtaagctcggaattcggctcgaggttaatgagagggggtgagacagagataatgccnttcaatgcctgttttctacaccagagctcatttgctacatcagacgcacgatcatcatcttggtcctcatcccatcgatgggtgtcgatctgcaaacgctggacagatcatctagcgaagctcaccagtttcataaagagggggggtccncactctcccgagggattggtatcaatctcctgggaggcgccagtggtgtctgttccaaaggatcttctgctaatgccgtctacgggaaaacttgctacgggttcaggaacctcatgacgagcactga

SEQ ID NO: 122318 - DNA, 471 bp, Arabidopsis thaliana columbia
  unsure (1)..(471): unsure at all n locations
cgtcgcatccacgcgtacgtaagctcggaattcggctcnagcttgatgaatgcgtttaaggcagctgctaatggacctgactcattgaagagatatggatctggcggccatagccctcnttacagtgatccagcacagaatggtgaggattcttctggatctggtggcagctcccgtcgcaccacaccaaaccggctcccaccagctccgggggggggtggatcatcttacaggtattagaaacctgattggtttccaggattgttattgaaccaaccataaaacacattcttttctttctttttctgccctttcagattgggccctgtttctgggactatttttcttatgtctcactagtttccaaaaaacaaaacctttaaaaccaaaaaaggggcggccccccactaataaacccttccacccggaaataaattccggacccggacctggagggggacccacttttcc

SEQ ID NO: 122319 - DNA, 597 bp, Arabidopsis thaliana columbia
ggggggaacaacagccccgccccgagcggagaaagggcccgagaacatttccccccggggcggtgagggcgggcgacacacacaaaaacccacagcacccaaaacccccaccaacacgcgacgcccccccagcgaacgaggacgacagagagccggcagagcgcagaccggccaccgaagaggcgccccgcgggaggacgagacgcggcaaggccccccccaggcccggccccccaccagacagtattttaaaaggggggggggggaaccaaacaacacagccgcgcacccccccaaagaaaacaacacagcccaaacgagaaccggacacagacccgaacctcccccgccaaccagaaccgaggacccgggaggacccgaacagcacagaaagcgcgacacccgagaagccgagagcggccgcccacgaagccccgacccgaaaccccccggaacgcaaacagcgcaaagccgaccgccccacagagagacgagacggagacccacgcacgcgagcccgacacaccaaccccccccggagacggtacccgcacagggaaagccaacaaacacccccacgcacggacccgggagcac

SEQ ID NO: 122320 - DNA, 686 bp, Arabidopsis thaliana columbia
acctaccccaccccaaccaactccaaagacccccccacccccgaacttttttttttttcccaaacacaccaccttttttcccaacaacacacaagccccacaaaacccccatcgtcaccccccaccctttccacaacccgggcggaaaggccctaaaaaaaacaaaaaaccccaagacagacaccaatccccatcaacacaacacttaaaataaaccacccacccaacccccatacacccccccatcccccaatataaccccaccatacattactcaacccattcccccatcaacccccatcctaatcatcccccacacccccccaattttatttcatatcagggggcgcccaccccaatacactccacaaaaaacatataaaaaaaacaacccaagatactcacgccaccacaataataccgccatcccacgctacctcatctacgaatcccaaacacaccatctacacaccacctcccatacaaccaaacacacacctacaccctcatacccacccccaccaaaaatccaccaaccccatccaaaaaaccaccccccccaacatccccacatactattacaacccccaaacccccccaacactcacaaattcccatatcaacccacataaaactataaaactcacaccaaaacccccccacacaataaaccaccccacaccccc

SEQ ID NO: 122321 - DNA, 393 bp, Arabidopsis thaliana columbia
ccccccaaccccacccccgcacacccgacccacccgccccgcccgcgccccgagccgcgcgacccggagcacaagcccgcggcaaaacgccccccccaaaccgccgccccccgccgctttttttctaggggggttgcccaccccccccccccccccctccccccaataaaacccataatcgcctgggcacgaccctgtgcctcccctatccccccctccaacccattcctttacatcgcgtctaaactcctctcaatccctgtatcatccaccccactttttccctccacccccccccgccgcttcgcccaacctatttacgccccgattgccccacccgtaccattacccaccccccccttttacttctatgcgctctatgttcactccccc

SEQ ID NO: 122322 - DNA, 286 bp, Arabidopsis thaliana columbia
gccgtttcgcagcccgatccctgtccccgtatccgccatcgccgcatgttctttttttttttttcctccccacccttttttgccccggcaaccccccgccccaaacgatccccccaacacatccccccttttttccccggggggcgagggtggccaaaaaaaaaaataccgcccccttgtcggttcgtgttcgccatttcccttcccttcgtgttatatgccgccggtggtcgccgggtttcgcgcacccaggtccggctctattcctcccccctcccgtttccct

SEQ ID NO: 122323 - DNA, 465 bp, Arabidopsis thaliana columbia
  unsure (1)..(465): unsure at all n locations
gtaagctcggaattcggctcnagatttcctaccgggttgaggcgnataattcantccctcccccaaaaacaaaattggtagataacgagcaattgttttttttcagattagatcctgaatttttacatttttttttttgcaatctcccccctaatgtgggggggactccgtcggttcttcgtgggaatctttctgggggggggggggggaaacaacgagggagaaattccaatataaagggggttggttttttgcatacagaaaaaaaatcaaggcttatgaatttggggggtcaattttttcggtctaagggcgaaggggggggtttttttcagaacgagaatgctgtctttcaaaattccttctgattttacccttttttcttcttcttaaaatttcagggaaggggggggggagatttttggatccccctttttcgggatctacacaggggggggggtaatt

SEQ ID NO: 122324 - DNA, 466 bp, Arabidopsis thaliana columbia
  unsure (1)..(466): unsure at all n locations
cccacgggcggggggttttttttttttgccacccgccccaatcatttttggggaaacacccccccccgcccgaaggagggaagggggganggaaattccccccggggggggtgagggccccacacaccaaaaaaacanacccccagcgccaaaaaccaccccgacaaacggggccccccgccgcgccgacagccagccaaccgcccgccgcccacgcagcacccacaagggaagcgccccggcggaacgccggggagggaaggaccgcgcccaggagccccacgccgcggcctttttttatatcgggggggtggggcnccccacaacgatcccccacggcggcggccccaaacaaagagagggccgcagagaggacaacagcggcgacccactgggacggaaccgcggatcccgcgccagccccgtcccgatcaggtagacccacacagaagcccgacgcacgccc

SEQ ID NO: 122325 - DNA, 521 bp, Arabidopsis thaliana columbia
  unsure (1)..(521): unsure at all n locations
gtgaactatagaagactttgacgtggcatcacgcgtacgtaagctcggaattcggctagagcatttccaccgcgtattgaggcactcacagaggaattggcttcatgcacaggaggaggctgattcgaaatctggtgacactttacatatgcgtagaggatcaactgctcgagagnnnnnnttngggttaaataataaaaaaattgaaagagggggagtttatttttntaggttgtgggggaatctccaggggggaaaaacaaaaaaaaccaaattccggattgtcaaattaaattttggtatcacggggttaggggccccttggatcgttacctaaagatagagtgaatcaaatcccggggggcgatcttttgggggttgaaaataacaacgatggtacgggtcctttgacgggtgggggagggttcactagaatgggacttttgctgtttggggggcaaggaaccctctcattcaggaaaccctttcttgtaaaatttggaagagggggccataatggg

SEQ ID NO: 122326 - DNA, 589 bp, Arabidopsis thaliana columbia
tttttttgcagaataccccgctttatccgagggcccccgaacgccagcttcaccctcagttgccccgccgctttttttctccggggggtgggggtggacaaaaaaaatcccttgcggtatcaaggcccgtttccccgcctgcagatgaggtaagcagtaatccccatttgccccccgtccccccttttctatcccgctccgttttaccgcgtgtaccggcttgcgttacgtttttcgcttatccccccagcattttttttttcagggcggggggggaccgttgcgcgggggtgggggatttggacaaacaccattgcgttatcgtggcgagttttccccttccccgaatcgtcttttgaagtgacacgcatcgaccttactacccattctcatgttccatcccttacttgtatcatattcctccgcacccaatgttctatcccggcatcacgttgaaggaccccccatgtttccccaaatattttgctgcctccttcgccccccgtccacccgatgccacccggtggtcatcattaatgagatcggcgccccccaatcccccccctcccggttccagccccaaaccccc

SEQ ID NO: 122327 - DNA, 313 bp, Arabidopsis thaliana columbia
caaaaaaaacttgtttttttattaaaaaaaaaaagggggtgtcttatcattttatcccatttaaaagaaccatttatttgttacttaaaaaaaaagggggatctattaggggggttgtgtttacaccatgtagataacaaagtttttacctggatttgaggttccttgccattttgttcttttctctgattgcagcgtttttaaatacgccagcgatgaataagtagaaatattttttttgaaccgcccccaatttttctattttgtccatatataggtatgaactgtgccgagatcatggagggttgcatat

SEQ ID NO: 122328 - DNA, 381 bp, Arabidopsis thaliana columbia
  unsure (1)..(381): unsure at all n locations
taattcttcgaaaactcactgtggtggactctggaggttaaaaagagggntactttctttgggctcattagattttctagggggggggacaaagagaccttgtgtttttgagacaaaaaagggggattcccattttaatgccttgaaagaatagatggttattaccccaagaaaaagtgattttaaggggattagttaaccaaggttagaacaaggtgacggggattgaatacttgagcattataagatttctggtaatacgaaggtatgaaaccgagccgaaaaatgggaagaatatgcatttgaacccccacaattgcctttttttcatttctggataaattggcccgagacaagaagggtccagcatttttacacatt

SEQ ID NO: 122329 - DNA, 524 bp, Arabidopsis thaliana columbia
gcacgcgtgccgaagctgggatcctctacagctttcgacggggggtaaagcctttcttctatttacaccaaggaaaccacctcgaacttggattaagaagagatagctgatgttacaccatggctaacaatgtgccacctgccagacccagaaactggtgagttttctcaaagatgaaatttcttacaaaacatcttctttcagagtgtaacgcacaaaacaacccggaaccgtgataaaaaatgggcccccaataaaaaatgggcttctgcgctgcggggggccaaaagcgtttatttttgacgaggtatacgtggctgagcgtggcactcttgagaggtattatttaggcacccaataaagagagactaacattcccaagatagcaaaataaagaagtcccgaggggtaaatggacggagaattcctatacagccgattttaggggggaagagtaccgcgaatctcacacaaacatttaccccgtccagtctcaccatcgcaccgacgtatacttccaagaa

SEQ ID NO: 122330 - DNA, 649 bp, Arabidopsis thaliana columbia
  unsure (1)..(649): unsure at all n locations
ggggggagaggggggggaggaggagaactaatgataggaccaccccccccgatctttaggaagccaggccccgccctcccccctttgctccccccccagcctcctctctcctttttcatgaggggtggtggggttttttaataaaaatctgccggtccttttcttttctcttttttactcgtctcaattgcctccttcgcctctctctcttttctcgctttttttcccgatctcctcactcttccctcctctctcctactcctctctctctcctctatcccctcattacgtcctgcgcatttnttttttcttttaggggggggttgtgctcctttccctcgttgccgtctcttacaaaaaaaataaactcctctcttttcgcgtgtttctccttccttctccctcttcgtctatcctcttcctctccgttcctctgtattctcgtttgcctctcgctacctctctctcgccgttcccttttcctctccatttcttctgtcatcttttctgttcgtttatgccattcgttccctctcctctttcccacccctcctctcccctcctctgttccctctacctctcttcttctctcctctctgtcaccttcactctcacctctcctccttccctttcccgtccttcttagtct

SEQ ID NO: 122331 - DNA, 460 bp, Arabidopsis thaliana columbia
  unsure (1)..(460): unsure at all n locations
gcccaggggcgcggggggggcgggggggccttcgggggggggggtaaagcccagaaaggaggggngggggggcggggggggcagcgccggaaaaaggaaagccagggccgcgcagcgaggacgcccgggaagaggagggacgggggaggcgaggggacaggagaagagagggcacagcgagacgaacaggaggggagagcagcgttttttaggagaggtgggagacggcgcacgaggagcgaaccgcaggaagccggacgccacacagcggacgcgaacccaccaacacagacgaagagagagaacaacaccgaacaagacagaacgaccggcgagaaccgcgaagacacagacgagagagcgagcgcagagagaagacgagagggggagggagagagagaaggggagacggagaagggagcgcgcacacgggaggacacacagacggaagcggagccgg

SEQ ID NO: 122332 - DNA, 507 bp, Arabidopsis thaliana columbia
  unsure (1)..(507): unsure at all n locations
ccgcgtacgtaagcttggatcctctagagcggtcngcgcgggggttttaaaccatttaatttttttaggaagatattggaggatattgttccttttctgttgagaagggaaaaaaaaggacaattctttcccatcaaatgactgaggttgggattcccaacggagataaccttttggcccccattctagaggcttttcaatggggggggtccattgggaggacttttataataaaaaaggtttgcccacttgaaaaccaaccggggttctccaaattcctgggggagtttttttttaaaaaatttttttttttttaaaaacacccgtttcattaggttttggccgaaccagcaaacctctttctctttttttgttgggggccccttctcttgtgtggcctagctcccaagtttttttcccccaaaaaaaccccactttggacccaaccaatcggatattgatcttcttcaccccccttttttgaaacccatttttggccaattctcc

SEQ ID NO: 122333 - DNA, 378 bp, Arabidopsis thaliana columbia
ttgtttttatcctccattaaggcgcgcgcggggatttgtgggagatacccaagaggttgctgtttttttatcgatctaaatcgaaggacctcgctcccacctgtcgaacttcaggcccgaaattttgttagaggaggcttgcgtatatggagatgggtgtgggcgccatcatactaacgacccacatgacatcaatcccattacgattactgggccgagtatgtggacgtatagggctgtatggaacaatgtataaatgttaaccgtagttagcacctgcgtctacgtgcccgcacgtagtcatgtcgccgttagcacagggtcgatgattagcgtcggaatagagatgactgaagccatctgagatatccccgttct

SEQ ID NO: 122334 - DNA, 568 bp, Arabidopsis thaliana columbia
ccccccaggattgagaggggaaaccccggcgagtgcagataaatttcaacgattatctaaatttacagcccatggggtagcagatcagcatataaggagagagacgaatgcgggcggcttcttttccaaatcaagtagtaagcaatataagctgttcctacgccgccgccccgatgcttcacgtcggggactcttacacatggtctccctagtgcgatcagaccgatagcacgaacggcgcagtattttttttaatcaggggggggaacgaaccccacgtcgaggaattaggaggggtgagatttacccaccatataagggggggtaaagattagcagcacgatatttgaagatcgcgactgcacacagacaaaagaaatagtaaatagcgaggatgaatataacatagggataccgtgcagccacacacggaaaacaatggatggagaatgaaatccaaacacaacatatgaagattcacaccaggatcaaatgatatgtcgagataatcacatcaagtgaagtgccgagcaaagtgaagcctgggtagtgtgataattaatgtacc

SEQ ID NO: 122335 - DNA, 341 bp, Arabidopsis thaliana columbia
  unsure (1)..(341): unsure at all n locations
acccccgggacttttttgggaggagagcgcgcgcggggggccgcgcggcgggggtgtccgacgagttttatttgagggatggagtaccgccccaagctcaaccggcaacaggccgcagcgcgaggggacgccgttaggtagcgtctacgccgttatacttctaagtagcgtagaggcgagccggagagataacgagagggagtagacagcacgacacagtctatggtcgatctacacgtcgccacagcgaacaaaagccgagatcttttttttctgagacgggagcccagcaatanagtggcaccatcgcccgcccccacgcgtttccggccacaccgcgc

SEQ ID NO: 122336 - DNA, 435 bp, Arabidopsis thaliana columbia
  unsure (1)..(435): unsure at all n locations
caaaaaaaaatctcccccttctctctcccccttttctcaccacatacatcttactcctctccccctattttacaatccctccccctctcatttacacttctaatccctactcacccttctcttttccccacattttttttttttgggggggggtggcctccnccttctgggggnttataaaaaaaaaaaacccctctggccggctacctctgcttgttttctctcattagacgccgcccatttcttctccggattttttgcgtacctgatttgtgctcgcattcacatctaattcttgtagcgcggttgtcgtaatttatctgtacaccctttaccttcttattctcattctttttttactcttatcaacctctcaatcataccgacatgcaacgtgcgctctctttattcgacgcccctttcctcaccaacata

SEQ ID NO: 122337 - DNA, 510 bp, Arabidopsis thaliana columbia
  unsure (1)..(510): unsure at all n locations
aaaaggccaaaacgggaggacggcncggggcaaacgcagaccccaagaagacagaggggccggacgaaggaagagggagcaaaagcgacgagaccgaccgagcgagcggagagagagggaaaaagggacggcggggagagggaggaggaaggaggggggaggagacaagacaagagagggagagcgaaagaagggacgcgcagaaaggacagaggagaaaaggcgctcggagcgggaaagcgcccgaatagggcggcggagggagaagaccggaggagggggacaggaaaaagagaagaaacaggaacgggacgagagcacagacgagccacacggacagcgggggagggagaagggaggggggggggagggggaggaggagagggagcgagaaaggcgaagaacgcaggggacgaaagggggacgggaggaggcagggccgacggacgcgggaggaggacaggagaggaacagcgcgagaagaaaggccgggagaggagccgaggaaag

SEQ ID NO: 122338 - DNA, 256 bp, Arabidopsis thaliana columbia
  unsure (1)..(256): unsure at all n locations
ggggggaggggtaaacccccgaaaaagaggncgacaaagaaaaaaggaagcgaggggagaggcggcggcgcgcgggaccacgccacagaggagacgtgaccaaggcgcgcagacagcccgcgagaagggaacgaacaaaacgggcaaggaacacacgagaggcggagagaaaagcaggagaggaggatttttttttccacggcgggagagggaagacgcgcccggcgcgccgacaggcccgacgccgaggcccaac

SEQ ID NO: 122339 - DNA, 478 bp, Arabidopsis thaliana columbia
  unsure (1)..(478): unsure at all n locations
agctaggatcctatagagatgacggggggggggtaagccgaanacaagnaagcgccaggaggaggccaccacggagaaaaagggcaaacacaaaggcgggcggcttttaaaaccagataaggaaatatgggagcaaaggagaggggacccacggacaggggttgaaaacggagcgccacagacattttttagggggggggggatatatggggaggttatggccccggagttgacgcacgaacaaaggggaaagggagaactcgtgggaaaggggaacctttggcattgaaggggaaggaagcgaggtgggaaaccctcgcgatagaaaggcgaaggaaagagcacggaggagaataacaaaagcgccgtagcaacgcagaggggccgtggaaagccggggggggggagatttccgttcttgcccacaaccggcattttggacacgagaaaacaaaaggaaagatccagagacctgacg

SEQ ID NO: 122340 - DNA, 614 bp, Arabidopsis thaliana columbia
  unsure (1)..(614): unsure at all n locations
tttccccgggggngggggggggggggggggggtaattcctccccacttctcttcccctgatcttaagggaaacctcttcccccctccatataccccctcccccaatttcctcttttcaccccccgcgtcggggaccccaaatattccccccaatcccccaacctttttttcctcnntaaatctttcccttccatttcccttanaaacccctttttttctcctccacaaaacctcaaccttccctttatcctcccccccccttctcttttttctttccattcccaattttnatttatattttttttgggggggagggctttnatttcttcgcggggctttttctttaaaaaaaaaattcgacccctctcttccatcgattttaaataaaacccccctcgcaccgctgcttacttcccccccccccgctgctctttttccctccctcgccttcttcccaagggagcgcttttttccaacccacccctcttttattcccatacatccctttttctcccccaaaaaaccccctcttcccgcccttgcttctttctctctctttcacccggcgccctcttctcttcacccccgttttcaaccaccctctcccttccccc

SEQ ID NO: 122341 - DNA, 507 bp, Arabidopsis thaliana columbia
  unsure (1)..(507): unsure at all n locations
cggaagctcggatcctccgagttccgcccggggggtaaacccangacgaaaacaagaaatctagacaccctcctttctccagtacacagctaacaaggggaacaaacagaactaaccactgggtcgtggacatatccttacccacctgaagagtgatatagcctgtcgcagcgaacgccgattttttttccgggggggggtatcaatataatagggccaggaaggcaccaaggaaagaattttaaggccagcggtcaaaattccttacacaggagggcgccccccgataggaacctccattgggcctggggacaagggccaacgtgtattacgagggcagaatacaacgcggcaagtagaaactgggagaagccgggaactgtggagaccagccgccactcctccccaacgtccgccgcaaaaaaccaaacccgcggccgcagaatgacgaccggggaaaggcgtctgcgacaaccggagagcccgcttagcgaggcaggcgcgacc

SEQ ID NO: 122342 - DNA, 455 bp, Arabidopsis thaliana columbia
  unsure (1)..(455): unsure at all n locations
ccgcgtacggaagctgggatcctctagagcataacgcgggggggttaaaacggcgcgcagggaagnaccagtcaaaaccaggcgagggggggagaaaaaaaaagagaaacagctttttaagaggctacatcggttcgggggaaaaaagaagcttacgaggaggtgaaaaggcggacaaaaacacaccccaaggtttttttagggggggtgaaaagcagctgagccaaatttattactagacgtgggccctaaaacttaaccaggatggacatgcggctcataaaatacaaacagtattgggtgcccttcgggggaaactgagaaaacttgattttagctgaaaaggggggcagaaccctccacctgtcaaagagggagcggctcggtgcaatcaccgagggcaagcccccgtgtcggaatagatggttagtaaacaaacctgtgataggacacaa

SEQ ID NO: 122343 - DNA, 444 bp, Arabidopsis thaliana columbia
ccccagagttttaagggaaaagcaccgcccccctccccggtacccgacccccacattcccccatttccacccccgcggggcgggggagcccaaaaaaaatattttttttttcatttgacttaacaagggcagaaacatctccttacccgtccccttttttttccaaagagcctcagatcttcccgcttcgagaggcctctccgctcttcactgttgcggcggcaaacaaacacacaaaatacatgtcctccctcttcttcaaagggggggggggttgacctccttgtgggggtttctccaaaaaaaaattctcgcttcacgtccggtcgcgcgtttgcccccgcctcgtgctcaaaggcgactacacaccccctgcctgtttgccccgctgcagctctgcagaagaatgggccgccgcgataacgttactcgcccccgccccac

SEQ ID NO: 122344 - DNA, 471 bp, Arabidopsis thaliana columbia
  unsure (1)..(471): unsure at all n locations
agctaggatcctatagagctgncggcgtttgtgttaaacccttaagcacaaccataataggtttagtgaacactgatcaggaaatatctgttttcacaaactgtaaaatacagtaccaaaaaagggcaaaaacttgaacaaatctttagttatcaaacgcggagggaaccaaatgaaccttattttttcaggaggggacacaagctcggtggaaccattcggtgaattaccgaccatatttttggaactcccactccctgttatccaatggacaaacttgacaagtctttacccatctgctgatgccaaaaaagtggaaggcctgattccaaaccccccaagctacgtgcactctttacttggggaactgggctgcttaggctgatactcgataaaaaatccacgatggcgccgtcgcaaatacacaatagtacacaacgatttgaccagcccagaggacgacggggactg

SEQ ID NO: 122345 - DNA, 472 bp, Arabidopsis thaliana columbia
  unsure (1)..(472): unsure at all n locations
gtaagcttggatcctctagagctgccgcgcgggggttagcccannngnaaaagacactgggcttcataaccttttgtatacaaaacgcaggtacaacagaatcgcccaactgtttagtgtgaccaggctcgggcaagagttttcaaatcttccaaacgaccggttaaaataaaatcgatccctatttaagaggggggaacacagtgtcatcatatctggcttataaaaccccaccccgtccttaagggaacatatcccaattcaatctccaataccgattcccaacccacataagatgtgttatcaagactccaattaatcgcgactaaaacccctccctagagaacaaacgaaccatgactcattcccgattgatcccgccccactgggggccgctcaccctaccaacccagagaagggggtgatactgacactggacggctgagcgttttcgcaacactggccgctggct

SEQ ID NO: 122346 - DNA, 527 bp, Arabidopsis thaliana columbia
actatagaagagttatggcgtcgcacgcacgcgtacgtaagcttggatcctctagagcggtcgccctgtgggtttaatctcttttttttttttttgttttgattttttttttttttttttttttttttttttctttttttttgggtgggagcaaccaactttaacaaatttttttttaaattaaaaaaattgaccaccttaacaaattcccccacccgtccttgggcgggggggggcccccgggaatttcggaccgtgccctgggggggcacccatttttcttataggggggcggataaaagctgggggaaaaaggggcctaggtgttcccgggggaaattggtttccctttacaattccccacaaatacgggcggggagaaaaaaaggggaaagccgggggggccctttggggggggcccacctccctttaaaggggggggccctcacgggcccgttttccaggggggaaaacctgggggccccccttgtattaaagaaacgcccccgccggggggggagggggtt

SEQ ID NO: 122347 - DNA, 513 bp, Arabidopsis thaliana columbia
ttaggagcactatagaagatctatgacgtcgcacgcacgcgtacgtaagcttggatcctctagagcggtcgccctccgggttcgaaattttttgtcatatgggggttggcttgggaagattttacctttataggagacaaaggggcatttgtttttttccttttctcaagaagacgggggtccagaaaattggggagagcctttttggagaaaaaaaaggccttggccaattttaaaaggtggggggaacacccttttccgggacaccatgcctaaaaggagggttcaaaaggtttttcttaacaacccccggttcaagttttatttttaaagggaagggcccgtttcttttaacaaaaacctccttataaaatatgggacctccgctcttaaatttttacaaaagccccctttgtaacccggcttatttgggccaaaatggcttttggtgggtccccacatggacccttccgcaggggggaatggggttgaaaaaaaaacccccacgggccc

SEQ ID NO: 122348 - DNA, 614 bp, Arabidopsis thaliana columbia
  unsure (1)..(614): unsure at all n locations
ggcggggggggggggggggggaagactctcgggtacacaccccccgacttggggggaaggcccttcccctcccaggacccgtgcccgaatttcccttttcccccccggggtagggggtttttaaacaaaaannngttttccttttaaaaaaataacaccccgaaaccctgggagtccctttttactaatcccccattttttctttttggaaaaggatggtctctatattgtgggggatcgactttaaagaatggggcgggacccgccctttgggctattttttttcgggggggggggggatacacctctcttcgggggtgcggcccaaaaaaaacaaaaaggcggtggggggggtggcgaagttccctgccccctacccccccccgctactcaccaaaaaaccccagccgttgggggtgcgcttgcctctaaaaccccacaacaaccttctggtgttggggggggtgaccctcgcatttggctggcgcccccccccagggcctccctctcccgcgtctcctctctcttcgacccccgccgcgctctcgcacgtcctccctccccacccccgcccccgcggaagacagctgtatttaacactccgtcctccctcg

SEQ ID NO: 122349 - DNA, 479 bp, Arabidopsis thaliana columbia
agaaagaagggaagggaggaaggactcttttttacaaccccccgattctggggagggacgaaacccggagccatagggagtgtaagatctttttgaggggggaggggctcgtaataaaatctctctaaatatcggaggtgacgtaataattctcactaacgggttgtggggtgaactctgtgcatggcacgccaaacacctggaacggtaagtaacatataataaaagaagatgacgaaacaccgagaagtcatttcttttgacggggaggggagcgagataatcatgatgaagaccatctagtaattaaaagatcgaggtaccgtgacgaggatgagagcgattcagtgacctgaccgggaataatactgcgaaatactttacactttgcgttcatgagtggatgctatttataaggttacaagatatcaattcggatagaaagaacggtaacattgtgcgacccgtacgatgatgat

SEQ ID NO: 122350 - DNA, 331 bp, Arabidopsis thaliana columbia
gcgaacgaagcacgagacataaggacgagtattgtgtacgcgagccgtcccgaacgttttccctttgacaccgtcggggagggagcggagagacaaataaccagatcacctcgtcgctgcggataagcgacatgaaatcctatgtcatgagggacgtgtccgcaacgcagatggttagttagtcatacatggaggaagttcgccggtagttcaagtcaggcagtaaaggagaattacgacgccataagagaaaccaccaatgctataaaccagggtagcttgctctcaaacggggagcgagcaacacgatgactacgagcgccgtgccgag

SEQ ID NO: 122351 - DNA, 390 bp, Arabidopsis thaliana columbia
ttcttacaacctaatttcactcaatcaaatctttctctatccacctaatttttttatatatgagaggcaatactctttttaacaatatttcatcaaataaaaaaaaaacccccatactttaatctatctcatcacacctcttaacctacatccacctataatacatctagtcctacaaatcaattaacaaccactctctcactaattaattttaatacaatcttattattatattttcctccaaatagatctaatacatactcaacccttcattacccccataacactttcatcctacttcccctaccaacacctctacacatatcctcttaatatatatctattcattatattaataatatttattacattcacttacatacaatacat

SEQ ID NO: 122352 - DNA, 477 bp, Arabidopsis thaliana columbia
caatcttttcttttctttttccttttttttatacaaaaacactttatctctaaccttttttagctcatcctatcttagctctcaccctatgttttcatctcacccccaacatatctattacttcaatttccccctcctctacccactcccactcctcacctatttcttcttttttctgaaaggaggggggaaaaatcattctatctggtccacactaaaacaaaaaaacattctccttctcctctctattcttttttcttctcttccctactctccatttttctctcatcatattctgtcatatcctacacttccatcttactactatccctcctcaccctacaaataagtatttcagccttattatacatataactttacatatactctcaatatattaccacaatcacctctcatcctccaatcctctctccttcactttcttatctccactcatactcccatcttaactcttcc

SEQ ID NO: 122353 - DNA, 494 bp, Arabidopsis thaliana columbia
  unsure (1)..(494): unsure at all n locations
gcgcgccggggcngggagccgtagaggttcgggggggggtaaacccngacaggaaaaaaaagagagagagggaacgaccgctcggggaagcgagacgccgaaggggagaaaaaagggcactaccggcgggggcgccaaaagtggaggagggcgacgatagcccgtggggactcgccgacagttcttatgagggggggggcaagcgccaaattcgcgaaggaagaacaaaccaccgcgcccaacgtggggctcgcggaaaacccgcaagcgaggcacgggaggaaggaaggacacacgcgagggaggggaaagcgcgggggggcaggcggggaaagcgaagggacgggagaggcgcgcggggcggggggagaaggcgcccgaggaggcggggagggggggcgagggccgcggagggggggcaagacaagagcgccgtaaaagggagggccgaggcagcgcgcgaccaagggcgagggcacagggcccaaggaggg

SEQ ID NO: 122354 - DNA, 381 bp, Arabidopsis thaliana columbia
aaaacgcaagacaacagaaccggccaaccgggcaggggagccaggcgcgggcaaggagggacaaaaccaccaaacgaccggggaaaagaaaatgggcaacttttttttgaggggggtgaacccgcgcccctcataacctggcttatagaaaacccccccccggtgcttagggggaacatatcacatttcaatttttcccaataccacccccaacatccataaggagggggatataagaccccactaattcgggccttaaccctatttccagaaaaacaaccagactggagcctcacccccctttaccacctctccccggtggacgcataccctcccaaccgcaaagaacgggtcgttagcacgtacaggtacacccccgtc

SEQ ID NO: 122355 - DNA, 566 bp, Arabidopsis thaliana columbia
  unsure (1)..(566): unsure at all n locations
ggggggggggggggggggtaatacctggtgaggtgacaattcccataactttangggaaggtcgtgccccctccaggtacccggtcccggaattccctggtccaccccagggggcgggtgagtttaaaaaaaaaanaagttnnactttttaaatttcaaattataaaaacttnnataaaaggcttacctccttttccctgtgttactcanaaaacccgccttctgaagggggaaaccattattcctatttctaaaaacctttctttttgggggggggcgcataaaacggggggtgttttttataaaaaagatgtggggagattgtttggcccgtttttgctcttattggacactcccgaaacctaaataagaagaaaaggggcgccgaggggttgaaacctttttttttaaagaaacccccgccttttaagttttaaagaggggaatccttcctttgaacaagatcttttgaaaaattggagcgcgaaaactcacaaagccctgaactttgaaaaccccggtgaacgcaggtttttaggtaaaatccccagttttcccctcgtggt

SEQ ID NO: 122356 - DNA, 496 bp, Arabidopsis thaliana columbia
ctatagtagagttatgaggtcgaacgcacgcgtacgtaagcttggatcctctagagcggtcgccctgtgttttaatctattatttttttgatttttatatttttgttggatgtttttttaatgccactgggtggaatgcggtacaagattcttcttttgtgggagttcattggcgacacaaaagactacaaaaactttaaaccggctaatggaggaaattatttgctggagatgaagacgacgctgaccatagcccccggaagggggggcccaaaagactttgttgaacacattggttgtattgaacacaaaatgggcagtggatagcttgcgtgagcgatatttgttattttttttccacagccgctgcactttgccttagagaaaagagggaaattcttggctaaacctttttccacacggggctaaggaaaaaaaccccgtaaatgctacaaacaatgggccaattctgctaaaaaaaataacaaaagaaccc

SEQ ID NO: 122357 - DNA, 417 bp, Arabidopsis thaliana columbia
  unsure (1)..(417): unsure at all n locations
ggggggggngggggggggaatacctaccagctacaacccactactaanggaaactcgtcccttcagtacccgtccgaattccctttccaccacagctacggggatgaaataaanattttttaattttttntaccatcttcatgcactggatgaatcgcaacaaattctaccaggaggagtcattgacacacaaaaactactggaacattcaacgtgttaatcaacnaaactaactgatgggggggcatcttacctcagcataccctaaaaaaaataccccaanaaaattgtttgcccacttcttttaaaaaacataccattccattttttagcatcatgggggcttttgttcctttggggggagggtgaccgcattttggattgagccttttccatgggcccctctttggtctcccc

SEQ ID NO: 122358 - DNA, 545 bp, Arabidopsis thaliana columbia
  unsure (1)..(545): unsure at all n locations
cccgagagggggcgcgcgtggtaatatggggggggggaaggcggggncacgaaggccgccgagtgggcggcgggggggcgaggcgagccatccacacgcaccgcaggggagaggcggggggggcggggggaagggcggcgggggcggcgcgggcgcgggcgcagaggcgagcgcgagtgcggggagctgtgttttctaggggggtgggagagacaaccacggggagggcggagngggggggggagagcagggcgggttgtggtagcgttggagcggggaggggtagtgtggggtgcggcgtgcggtggcgtgcgggcgagcggggaaggggcggcggagtggtgtggggggaactgggtgagcggggagagtgggggtggaggcggttgggttgggcggcgtggggggcgggacggtgggttggggttggcgggtgccgagggtgcggcgagtgagttgtgacacagtaacgcgacgcgatgcggcgctgcgccagggggggggagggccgccgtgggggcgggggggggcgacggggggggcgg

SEQ ID NO: 122359 - DNA, 542 bp, Arabidopsis thaliana columbia
  unsure (1)..(542): unsure at all n locations
ccgagggggggaataaggggggggggtaaaccccgggggaggcagcaggngcgagaaaaacgcgacccggtcagcggcaaaccacacggggaggcgcaacagagacacaagaagcgaaccgcgagaagacgcgagaagggaagagacagggggacagggagaagggaaagggagactaaacattttttttttcgaggggtggggaagaagcgaacgggacggaagccatgggcgaaagataaggcagggagcaaaggaagggaagaagcagaaggactataacgcaagaacaagagggatggagggaccgacgcaaccggagtacaagggagagtgaagaagggtaagaggaagggaaggagcgcgagcgcgaggacggcacgagacaaacacaggagggccgcaaatgagaagagcggaactgcgcgggggggggaggagaggagaaggaggagatagagagagcgacaaggcaaaagagagaagagagaggagagaagaaggagacataaacagacaaaccaagagattcaataaatacg

SEQ ID NO: 122360 - DNA, 476 bp, Arabidopsis thaliana columbia
  unsure (1)..(476): unsure at all n locations
cggaagctcggacagcggctagatatgggggagggtaaaccagagtaaaggggganggactcgggaacccgaaaacgcacgaagacgacccaaactatcgcattccattccctcatggaatggcactaatttcagatgaactatacgagtcaattagggaagcctgcaaaggaaattatttttttgtgggggggggaaaacacaaaatgtttgaaacttgtcgaggaatttcataagtgagccgcaaactaaatgaattccatatactatcaccagattgcgacaggggatctcctgaacggtatctatattccatgtaggtaattaggcttttgggccaaagaaaaaagcgaaccggaggctcttgatgtgaaaaggagaagccacgtaaaacggggggatgcaactctgtggggaaaccatccaacagacaaatcaaaagacccggcacataccacaagaataaccgggggggg

SEQ ID NO: 122361 - DNA, 548 bp, Arabidopsis thaliana columbia
ccccccctccgcggtggcccccgcccgcggaattaatttcacccttttttttgggggcgcacgcgggtgggaaaaacaaaaacccttctctctttttcttttcttttttttctaacaaaaccccacagcgcgcaacgtcgggaaagattccaccccccccccccccgaaacagcactctcgtagtgggtgcgggaacaaaaagcgccgtcccgcgcgggcggagaatcgcgcgcgcaagacaacccacacctcttcttcccggcgggggggggctcttcccctccccggcgggagggcttcccaaaaaaaaacacgccgccgcgaccgcgcccccacacacgcagcagactcccactgccccctcgacggggccgcgcgccgaccacgcgcgtcgcctcgtcgggggcaccgcccccgcacctcgcgccgcgacggcacaagcgtcgggcaacctgagagcgcgctaagccgcagcatgtcgcgggcacgcgcacacgcgccgagcgcgggccgacgcgggccgccccctccggccgcccagcgagcg

SEQ ID NO: 122362 - DNA, 549 bp, Arabidopsis thaliana columbia
  unsure (1)..(549): unsure at all n locations
gggggnggggggaaaactctcagtacaaccccccaccttagggaaaccgccccccccgcaccccccccgataaattcctctttccagggggagaggggccaaaaaaaaaactttttttttttttttacctcccaaccaaccacaacacataaaaaagagggcgcaacccacacaaagaggaccttggggggaaggatttccaacccggcttcgcataaaacaacacctcttttcacatcaaaaaaaccacacacccggtctctcttctcgcggagggagggggtaacaaccctnctgcgggggtcttcccccaaaaacacacaacacgccacacccgtcgttgtgtgttctttgccgccgcacccagatattaagacgcagacgggaaaaatccctcctccaaaaggccctccagcgggtcccccctcctcctccaacagacggtgataaaccacacaatacgcgccacgcgctcttgctcagccaaatcacaaatcctagaccactatcccgcggaggtacacgcgggctttttcttgcatactaacg

SEQ ID NO: 122363 - DNA, 510 bp, Arabidopsis thaliana columbia
aggaacactctacaagactatgacgtcgcacgcacgcgtacgtaagctcggaattcggctcgaggtggttttgaaatttttaatggaaagaaatagcatatgtgctctacatggccagataactggaggaactcttattcttcaggattgtgctgagggcttgctgtttgctctcctgccagttcttggtggcacatctggtgtccttcaaggagtgttcgccatttgtgaaatcgggggctattttgattgccgttttgggagccttgtttgtattatcccgtacctgggtaccttggttttaaaacttatgaacagctttttttttaagactaatgagctttatcaattgggccgctgaaaaattttgtttacttggcgcttggagtaagacaagctcggtctaattctggaagtgggttcctttgcgggagggagtaagatttaaacaactgatctccttaaaatacttttagacaaggggaacccatccccatttttttcggccca

SEQ ID NO: 122364 - DNA, 428 bp, Arabidopsis thaliana columbia
ggggcgcgagggacggggagggggagaggacgcggacggaagcaaggaacgaacggacggggcgagcgggcaagcgagagaagcgcggcccacacgcacgcacggcggggagaagccgacaagagggagggcgccggagaggaggaagagaccgccgttttttcagaggggggggggcggcggagcacaacgaagacgagccccgcacaaaaaaccacccccaaccaagccaacgcgagacgagaagcaccccgaacgcaggcagaggataagggaggcgcaacgagaagcgacgaagccagacaaaggaggcggagacgacgggagacgaccagaggacgaggggcagcacggagaagacacgagggcagcccagcaggcgaaaaacgcagcgacccggacgcgcagagcgcgcgggggaacggcac

SEQ ID NO: 122365 - DNA, 551 bp, Arabidopsis thaliana columbia
  unsure (1)..(551): unsure at all n locations
ccccccctcatcccaaccgcgccccaaccccaccaaatctcacccccccccccccccccccccccgcccccccccgcccccgccccctttaagcccccgcggggtgtctnnnnnnnncnnccgcgctcactgaggacccncccgggttngggnnnacnnccgcccgagaggcccccccctctgccttttccggtgggggggcctataccccccccccccgccccccccccccctgtcctcccccccccgcgccccccccccccatcccctcccccccctcccaccaatacccccccccccccccccccctgtcccccgccagcgctctcgcgccccccccctcgcggggggcccccctcctcgcccccctcccccccccaaaaccctctctccccgtgccccccccacccccgttatttccccccccacccccccccccaccccactcatccctcccatcccaccccatcacccgccaccaacacccacgcgccccaccccctagccaactcttttccgccgaatgcctcgccccaccccccccccccccc

SEQ ID NO: 122366 - DNA, 600 bp, Arabidopsis thaliana columbia
cggggcggaaggaaacgaagaaaagacacaccccggcccgccttcaaaaaaagggaggaggggggccgaaacagaagaaggaaggcgcaaccaacagaaacgaaggaaagagagacggcaagacggggccaaaagggaggccacccaagaacagacccaaaggcgccaagggcggccccaggggaggggccccccccccccgggggggcgcacccacacaagagagggcaaagaacacacagagagaaggccccccgccgaaagcaagggaggggccacacaaagcaaagacaccaccacggcggaagaaaaacacaagcgagcgcaaacgcaagaagccaggggggccaccccacccagggggcgaagccacccacgacagggacccacagtgggggaacacggagaagacaagaaaacacaagagccgcccacaacccccagaaaacagcaccaggcaaagaggaggaggcaccacgaaacaaacagccaagcacaaggacacgggaagaaccgcaacggaaaagcaagaacagcggagaaggcggagaagaaaaataaaggcgacaaaggagaccccacccccaaccaacagaaaac

SEQ ID NO: 122367 - DNA, 157 bp, Arabidopsis thaliana columbia
  unsure (1)..(157): unsure at all n locations
gggggtttanggggggagaacgcggcgcgtcttattttattttaattatccccccctctattttgggggggaggccccatataaataaggttgcgaagaatatgtcacatcacaggtgagctgggcgtgccacataaagtgccccccactactgtat

SEQ ID NO: 122368 - DNA, 534 bp, Arabidopsis thaliana columbia
ccgccacggcgaggaggaacgagaaaagagaacgccccgcgccacaattaaggaaaaaaaagagggaggagccgcccaccaccaaagaaacaatcccacccaccgaaggcgacaggacggggagagcaagcgagcgcgaccgccaggagagacgccccaccaccgcaatcaccaaagaggcccacggaaggaccaggcggtgaggcagccccccccccccgcgcgggagcaacacaccgcgactagtgcgaggagaagaaccaaacaaaaaaaccccacgccagaggagacaaaccggggggcgagcgataacagacacacacaggcgcggcgacggagagagcgcaagcgcccacgaggaccgccaaccgacagaaccgctcaggggagaacgcacagccacccccccggcgggaagacccatcacagacgagacacacacctaggcagaaaatccgatggcacccagcacccgccacagagcgccaccccacccccccccccgagaacgcaccccccacgcatacaaagcga

SEQ ID NO: 122369 - DNA, 509 bp, Arabidopsis thaliana columbia
  unsure (1)..(509): unsure at all n locations
nnnnnnnnnnnnnnnnnnnnnnnnnnnnnnnnnnnnnnnnnnnnnnnnnnnnnnnnnnnnnnnnnnnnnnnnctttttttttttttttttacggagaagaaaataagaatctcatattatttcttaataaatctggacttgattacagactcgtttatataaggaacattaatacccggttcaatccggtttacagactcaatcatggtttattctaaaccatactctaatagcctccctcaagatggcaagtatattcattggagagccatcttgccaacaagagccttgaattgagtcggaaataagggcttggtaaaaacatctgcaacctgttgatcagttttaaggtgcaaagtcttaatcaaaccactcataaccttgtctctaaggatgtggcaatcaagttccacatgtttggttctttcgtgaaatactgcattatttgcaatatgtattgctgcagttgaatcacagaagaaagcaacggactttagctgaggtgcttg

SEQ ID NO: 122370 - DNA, 446 bp, Arabidopsis thaliana columbia
  unsure (1)..(446): unsure at all n locations
nnnnnnnnnnnnnnnnnnnnnnnnnnnnnnnnnnnnnnnnnnnnnnnnnnnnnnnnnnnnnnnnnnnnnnnnnntnnnnnnnnnnntnnntntntttgataaaaaatcgggaggttatttccttcttttcccggaagaaaccttcgaatcaattaccttccataaactttaaagcagccctaaaaaacataagggttttttgggggggaaaaaaaaaccaccttggaaaaggcggggcctttgacactttttccggttttttttttttaaaaaaaaatctcccccttggggcttttggagaaaaagaaaggacccccctgtttttttaaacaccaccagtggggcccccggggggggattttcggggggcgggtaaaaaaaacccccgggagggggcccccccaatagggggggggtgggcgccaaaacaaaaaaatggggggggg

SEQ ID NO: 122371 - DNA, 512 bp, Arabidopsis thaliana columbia
  unsure (1)..(512): unsure at all n locations
nnnnnnnnnnnnnnnnnnnnnnnnnnnnnnnnnnnnnnnnnnnnnnnnnnnnnnnnnnnnnnnnnnnnnnnnnctttttgttttttttttttttttttttttttttttttttttttttttttttgggtaaaagcctttattgtgctttttttttttttttttcttatctttttcggggggaaaagcccaaatggggaaaaacaaattggggcccccaaacatttctttttccattgggggggggggaataatcttaaagaaactaaaaaaaaatcctttaaaaaaacaatttttcttttaaaaccgaaaaacttgatatgaaaccctcgggcaaaacccattttgcgggttaaaggggaaaccctcctttaaaaataccaggacaaaaaaaaatgatgctggagaggctgaagtcctttttctagcaaaccagaaccttgttttcggtaccccgggggccgaggggcggaaccttgtaaaggatattcttttttacggggcccccggggaaa

SEQ ID NO: 122372 - DNA, 523 bp, Arabidopsis thaliana columbia
cgcgtacgtaagcttggatcctctagagcggttgccctttggggttggggccctttaaaagaagtaaaatattacaaacaaaaaaacacattatatccaattttatgaaactccaaccacaaaactttcacaaaggatcattgtttaaaagaaaaatctttgtcttacaagtcttggttggcagcccacttttcttttttcagggggggggggtttttaatctcgcggcgtatgtctaaaaaaaattctttgttctacaggcgagttcgcgtttattcaccttccggggctgttttccatttgcttgattacactttttattgagctttgatcgttgtcttacttttaagtatcatcatccctccttttttttcctgagtggtttctcttacgccgctcgtaatatttactcagtggctactatttacgttttttactctttgaagttttaattcggtttattgcgcattgataatattttttccctctttttgcccacgacccctgcctcgccccccccccg

SEQ ID NO: 122373 - DNA, 310 bp, Arabidopsis thaliana columbia
  unsure (1)..(310): unsure at all n locations
aaaaaaaaaaagaaccgcgccagcctaaagaaagggggggaggcgggccccccaaacacaaaggagaaacaacgacggagaccaagcaggaaagggggcagggcgaggaccgaaagaaggcccgcaccagangacacaaaggcccccgagccgccaggagggggagcgccgaccacccccggcgagggacaaacaaccagcgcgaagggaagaccaaaaggagcaaagagcgcgcggaacaaacaggggcggcgggcacaaaacaaacagagcggcgagcgggaacacccgcacccagagagaccagcaa

SEQ ID NO: 122374 - DNA, 558 bp, Arabidopsis thaliana columbia
  unsure (1)..(558): unsure at all n locations
cccccnnnntttnnnnngnnnaaccacccacggnggggaagatagtatttatccccgcggcttttaaaaaactgggggtgtgggccgcgagtccatgtgatgttccgtcctcatgtaggaggcaatgctatataaaatgagtcagatattatcgcccccccatatatttatattgtgccctttaggcacagtgtagtgggtgcccccaccccggggaggttaacccacacggggtagagagttgaacagaatagaggaaccggcgcaccctcttgagttggggggcggggattttcacgaaggggcggcgcagattgggttctcacaaccgtagcgggacaacagcatgggggcgtgttgcagtcgcgcgcgccgcgggagtgtgcccgtacgacgggagcccacgcgatcagatggcacgatgtggtcaagagtatgtcacgttcaccaccccacccgacaccccgtatatatttatcgggactgtagaacacacagtggccgcggagcaacatttcgtccgtgaggcagtctggctcggattcatcgcacgcatgc

SEQ ID NO: 122375 - DNA, 510 bp, Arabidopsis thaliana columbia
ccacgggggaggagggagaaagagaacccgccccgcacgaaagagggggggagagccccaccacccacggagaccgaccacaagagagacgacgcacgagacgacgcggcacggcaagcgcccccaaaagaaacagaggccacgggggcaagggggggggggcgccccccgcggggggggcacccaggggggaagaggcacaaaaaagaagcaacccgcgagagggagggaggacggaaaaagaagagagagccggaggggaggggccccacgaggagaaccaacagggcgagggaagaagaaaccacacggcggagacacacggaacgagggcccgcaaggagcggagtaagagaccagagcaacccaggaccacagcccacaccgcccaggagaaagaggccacagagagagcgagagcaggcggaggaaaaagcgccagcgagccaagggcaaaacaacgggaacgggccaaaaagaaggggaaggagcgggcaaaacaaagaagag

SEQ ID NO: 122376 - DNA, 618 bp, Arabidopsis thaliana columbia
  unsure (1)..(618): unsure at all n locations
aaaagaccccgcccccccgcgtttacataatgcggggggccccccccacgccgaccggcgccccccccgcgagagggtgcgccacgacgcagaaggcggggcccaggaggacgccccacgcccgcgcgccagatgagcccagggcgcccccgcggggggaggcgcccgcccccggccggggcgcccccacccggtgggtgtgatagaaagccagatagaggccggcacaaccggacgaagggcgggggggacacagccgcagaggggcgcgcggggcgggcgcggccgcgcgagcgacgacggaggagggcgcgagggcgagcggagcacaccccgcccgggcgagatgcgcgaccgaggccgagagcgccgccgtggaggcgaggcggggagcacccgacggcgccgcgagcggcccaccccagccaccccacgcgaggactaaccgcggcgacccgcgatagcaggccgggccgcgcagactgcagaccagcagcgagccgaagggcggtgactccgcgccagcgcacagagacagagcgcggcgaggacgggtggnacgcgcgtgaagggagcgcgccggggggggctcccgcgcccgcccgacgccccgcgcgg

SEQ ID NO: 122377 - DNA, 425 bp, Arabidopsis thaliana columbia
gtcttcatgcgatatcacatgttaacccccccactatttgtctatttgccacttggatacgggtggtggtgcccccccccctgggttttaccacccatgtgggggttttattatccataatgtgatcgccgcgcacataagagggggggaggcacaacacaggagcaccatgtttttaataatccaaggggccccgaagtgctcgtggtgccccgctcacccgggctgttaccccttttctagttcacacacttgttgtcaatatatgcccagtcagaccctttccccccccccccccatttatatgccagcttaattaggaaccgcgtctattgtccatgattacagacgtttgtggcataatcttgacgttcgggatatacaaataatatattttccccctttgccccccccccacccctcac

SEQ ID NO: 122378 - DNA, 414 bp, Arabidopsis thaliana columbia
  unsure (1)..(414): unsure at all n locations
nnnnnnnnnnnnnnnnnnnnnnnnnnnnnnnnnnnnnnnnnnnnnnnnnnnnnnnnnnnnnnnnnnnnnnnnnnctttttgtttttttttttttttttttttttttttttttttttttttttttcccaaggtttattccattaaccgaaacaccaacatgaaaagtatcccacttagataatntnctggtattaaacaacgggaatgatctttttttattgagtatgggacgataccttttttttcatgatctaaacacaacacacacttttaacacactagtttcgagtttcatcaaagttgaaaagagtttatctgcaatagccccagcttcagtaagtagaggcacaagcttgccttgcttgtgggctccatcactctatcggatccaccgatggggttttcttttgatga

SEQ ID NO: 122379 - DNA, 491 bp, Arabidopsis thaliana columbia
cggagcggaggaaagaaacacccccccgaattaaaaaaagggggacggggcccacgccagaggaccccccacggaaagaaggaagaaaagacagagggacaaagagacccccaacgaagaacagagccccgagggacgcgggggggccgcaccccgcgggcgcccccggaggggaggaacacacgagaacaccggcgaacggggggaggggggggcagaaaaaaggagggagaagagggaagaccaagaggggccgaccaggacgaggggacgccccccccgccgcgggggcaccccggcgggaccacgaggaggacacggggccccggagaaaagaggaagccccaacacgagaaagaacgcccaagaaggcaagggcggcgcaccaaaagaggaaaccggaggaaagagaacggagcagagaagagagggcgcacaaggcggaaaagaagagagggcggcaggggagaacgcccacgcgccgccgagcg

SEQ ID NO: 122380 - DNA, 543 bp, Arabidopsis thaliana columbia
aaaacatcccccccgcccttttattgctttgggtgtcgggcccaacgcctcttcttcttccccccctttgtgcgttgtttctgcctacttgcgcgtccctgtgggtccgccctctgattcgctctggtgcccgttgtgccctggtggtggggccccccccccgcgcctttgtcccgcctcttgttgtggtttgtttccatctttgggatacccccgcccgcccgcctctgccgccggggtgtaatcttccgcctgcgcgcgtcgtgtgtcgcccccgcccgtggagcgctcctgtgacgccgttggcccaccctccccccgcccgtgtgccgcggtctctgtcccccccgtgttgccctgtggcacttctctcccgtgtcccccccccctcccccgcttttatgccccgctcgatcgccctgcgcgcgcccgctttatctgccttccctctcctcttcattccgcgcggccccgctttgtcttcccccatctgcgatgacgttttttgcgccccgtttggacgcccccaccccgccccccccg

SEQ ID NO: 122381 - DNA, 510 bp, Arabidopsis thaliana columbia
aaaaaaaaccccccactttttaaaacaagggggaaggccccccccaaataacacaccaaaaagcaacaaaaaacagaccaccggaccaaaaacccccccccaaaatccaatggtccttttttcactcttttttccccaacacccttaattataaccccacaacttttgtttaaaaaatattatatcacgaaccaatttttattacgcgtgggatactatatatataatttcatacattaaacaattttaccacaattattattaatgatcattcaccactttatatatcacacctacattaccctccacatctctttacttattaaccttatatcccttatcccaccccccacccccttttttttaccttctttatattctttcttacctatttattttctttataatctattatcattcttcggcattttaaattatttatatcactattcacccaaaactatattatttcccatttatatcccccctcactaaacccccacaaccttt

SEQ ID NO: 122382 - DNA, 715 bp, Arabidopsis thaliana columbia
  unsure (1)..(715): unsure at all n locations
gaggaaagaaaagagnnggggggggctaaagaggggaaaccacccaccccnnnnaatttaagaagagaggagacacaccgacggcaaaaaagaggaagaagacaagccccccccgcggcgcaaaaaaagaagggggaggaggcgcgcccgccagcgccaggacgagccgcgcccaagaggacggcgagcgaaagagaagcgacggaggacccaggacgagcgcccccaagccaggcgaccaaaggggccccgagaggcacgaggaggagggggaccccaacccgagggggggggcgcccaccccggggaggcaggaagccaaaacacaaaaaaacgcacgaacgagacaggggggggacgcgaaacgacacacgagaagccgcgcgagcgggagccagcacgacaagatggacagagcgcagagcaagaggcgggacgaaaacaccccgccgcagagagaacaccacacagacgaggaagcgccaccaggcgggacaacacacagagggaccaggaaagcgcggagagccgccgcgcaacaacccaccagaaagagaacaacggcagagaacggaggaagcacggggcgaagagaaacaccgcccgcgagcgagcagccgcagcaaggccgaggggagccagaaggaaagcggcgaaaaagggagaaaaaggaaaaaagagaggccccaggggaggccgaacggccgagacaaca

SEQ ID NO: 122383 - DNA, 560 bp, Arabidopsis thaliana columbia
  unsure (1)..(560): unsure at all n locations
ccgccgcaggaaagaagagaagacaccccccccccccctctaccagcggagaacgaggggcggcgccaccaccccacgagccagcacccccccacgcaaaccgggcgcagaaccccgcgacgcaccagcaagggncccaacagaaccccccccccacccgccgccaggggccccgggggcccccggggcgggggccccccccccgccggggcgccccccccagagagggagggaggccccccgcagccccccgcccacccagccggcccgcccggcgcgccccgccccgcccccgccgcggccgcccgccgcccccaggaccgaaccaagcgcgcgcgggaggcccacggaaccccccgcgcggcacgccccaatcgcaaggggcacgccagtgcggaccccgcatgggccaccaggcaccgccccagagccccaccccaccgcccccccgatgaccacccccgcgccccaaggacaagcgcgccgcggctccaagggcgcgccgccgaagcgcggaccggtccggtccccgacgccaccccaaagaaacccgcggagaa

SEQ ID NO: 122384 - DNA, 486 bp, Arabidopsis thaliana columbia
aaccggggcataaaaaatagtctaccccgccactttttatatattgtatgccccgctcgcataggagtccaaacacagagtgagacagtgagcatcgtataaaaatccgcacacagatgtaaattggatatgagcagtgggtggtgccgccccaccggaggttaacaccacaggggtgattaggtacaatagaaaatagacaagcgtcgaagagaacggagcggagtaataatcctcgttcgcccagtagcacgcatctcccgtttgtcaaacacgagatcggttggtcacatccacaccgggagaagcccgataagtataacaccatatatggcggggggtaccagatatagatattcacactccaacaccactatgactacacgcgagttagtaggccgcagcgacaaaaataatacgagacatcaaatagcaattaagcgccagtgagagttatctaccgggaatacggggataaaagaaata

SEQ ID NO: 122385 - DNA, 510 bp, Arabidopsis thaliana columbia
  unsure (1)..(510): unsure at all n locations
nnnnnnnnnnnnnnnnnnnnnnnnnnnnnnnnnnnnnnnnnnnnnnnnnnnnnnnnnnnnnnnnnnnnnnnncttttttttttttttttagttaatcaacagggcgcacgttaacatttcaaaaggattcctgattgttacggatacaacttctaacccattatacacatataaaccaccgtaccggtcaatattaatacctgaatttatataaaaaaaaacaccggttttctatggagattaacagggatacatcgaaactcattcgatgcgcattaaggttccaccaatttccatcggaaccaaaggtataaaagaatgtcggacgtgtgtaattaacggcttataactcgtgtctggctgcacgcacaatatcctctctggaggtgcctgttaaacgctcacaaagtccactcgatcattaatcgcaggatctatgacgctcggaaacttgtttatattaccgagagatggtctagcccacactattatggattgtctttcagcgtg

SEQ ID NO: 122386 - DNA, 626 bp, Arabidopsis thaliana columbia
  unsure (1)..(626): unsure at all n locations
tgcccccataatatgaaaggaggcggggaagaaggggnngggggggctaaatgtgaaaacaaacccccnnnnttttaggaaaaaggaaacaggacgaggaagaaaagaacgacaacacaaccccacccgccttaataatatttagttttacggcccctagtaataagtgtgcgcgacccaaatgcggacgcatgctagtaaagtggagggaaaacggatcccccccctattagtcactatgtcgcaagtgagacacgtggggatcgccacacaccccgggaggtgacaacaaacatggtggggtgttgaacaacaagtataaccgccacgggggaaaagaacggcccgggcagctaaaagttatggttcccattataaatcaatacccaacgaggagacaaagcgataataggaaggatggcacaatccgccccgcggcgtatatcccaatgagcatgaacaccacaaagcaagtaaaagtgtgcgcacttgcacggataggtcactgccgcccacccccctatttatactccgatagataaagtatatcgcccgcgccaatatttacctaggtagaagttatttggtatagtcccgagtgaggtaaaaaagatagggggatacga

SEQ ID NO: 122387 - DNA, 553 bp, Arabidopsis thaliana columbia
  unsure (1)..(553): unsure at all n locations
cccgaaccgcaagaacgtttcccccaagagggggcgcccccacaccagggcagcgaaggagaagggaacagaaccccaaataaagtaagcaaaacaaacaccggccgcggacacccccgccgcaaaaacaaggcaagcccgccccacccgacccgcgacagccaacaaacaaaacacgccgacaggcagtacccccgcccaaaatcaccgaaggagaaccccccgcgcccccacggataagaaacccaggcccccacacgcgcgaagaaaagcgagcgaacccccgaagaccgcagaaccataacgcaaacgccagctacaaaaccatataagaaggcccaaaagccaaaagccccccagagcgccantgcgcgcaaacccgagagcggagaccccaggagcccccccgcccaacgagaaggaagcacccccccccacggaagagaccacacagcagcgcacgcccccccggggaagaccacgcacaccccgcgaaagcacaaagaaagacacgaaaccagccgcccgcccccacccggaaagggccaaaaag

SEQ ID NO: 122388 - DNA, 398 bp, Arabidopsis thaliana columbia
cccaaaacgccaattcccactttccccggggtgacccccacacccccaagggtgcgagcgccactttattatggtttatgggggttccaccgcgactttagagctttccggcgcctcgtcttctcaatgtgtacccaagataagcccccctttttgcgggggggcccccccccctcttttatttccgccccagcgcggttttttgtgtgtctcagggctcgcaaggaatcgttgacgataaaattagggccttcctattcccctcgatattcctatgcgataagttccctttacccagcccgtggatgaccccaaggttgttactccaccccccccaagttttacggcaattctccctccctcaaagttgataacccctgcccccccccatttccatt

SEQ ID NO: 122389 - DNA, 506 bp, Arabidopsis thaliana columbia
  unsure (1)..(506): unsure at all n locations
nnnnnnnnnnnnnnnnnnnnnnnnnnnnnnnnnnnnnnnnnnnnnnnnnnnnnnnnnnnnnnnnnnnnnntttttttgttttttttttttttttttttttccaaaacggctgcgttattaccgatatttaaaaaacatttgctcgttttgaatatcaacatgaagaacaacattgttcaaaccgtgtttacactatttacacacgcattgttttaagtctaaaaacagattttcgcgcagaaagacacccccaacgattgttgaagaccatgatccccgctttaatagtgttagacagacctgttataaattgttgaagaggcctaaaaacaacggttggtgggcggaggaccacccttaggagttatgtttaatgcaccacgagctcggaataaccggccagatgcctgtccccaagtggacagtgtgtttaacattctcccagggggccgtaaaaccaacaccttccctacctggataagagaaggaacctattgcaccaaatt

SEQ ID NO: 122390 - DNA, 351 bp, Arabidopsis thaliana columbia
  unsure (1)..(351): unsure at all n locations
ttccataattttaccttttttaaaatattttgggccaccttttttttttccctctccngtatttaattttaacccccaaggggtggaaaacccaaaatttaaatgantttaaacacacttataaaactcccccaataaataaaaacncaaccattaacaaatttcccaaatcccccccttcnctttaaaccaaccccccaattttcccaaacccacacttccctcccttaatttaattccccctttataattaaactcaccattctacaccccaccaaattaaattaaacaccccccccctatcccttttttacccaaaaaaaccctcctaaaaaaaaaaacaaacactac

SEQ ID NO: 122391 - DNA, 516 bp, Arabidopsis thaliana columbia
  unsure (1)..(516): unsure at all n locations
cgattaaannnnnnnnnnnnnnnnnnnnnnnnnnnnnnnnnnnnnnnnnnnnnnnnnnnnnnnnnnnnnnnnnnnnnnnnnnctttttttttttttttttttttttttttttttttttttttttttttttttttttttttttttttctttttttttttctaaaaaaacagattacccccaaaatattcaacaaaatcaatcaggtccccaacaaatccggggacggccccaaacaaggggcttttagttaagggctgaactcacaaaaaaaaaacaaactccacaaattcttaaaaaaccaaattagttttccggttaacaaactcaaatcaatttataacctttcaatcccccaaaaccggaaaatttagaaataaaaccctccaaaggtccataattttttaaggaagataaatggttaaaaccttttaagttttggaaaaaattttaatctggggctataaaattattatgggggtttaaaccaaggcaagggtgttttttccgccggggggt

SEQ ID NO: 122392 - DNA, 278 bp, Arabidopsis thaliana columbia
  unsure (1)..(278): unsure at all n locations
ccccccgccattcctccaaggtccgcttttttcccccctatgggggggtgcnccccctccnctctttctagcgcatagtcacattagcgcgagtttccccgccttttccctcctcttttctttataatatataaatagatcccatccgcgccccggcttcttcccctcccgcctcttatattcccttcctttattactccctcccccacacccgccctctccanttactctccttcactgtacatgtatttgnaccccgactcccatcttcttccccc

SEQ ID NO: 122393 - DNA, 601 bp, Arabidopsis thaliana columbia
  unsure (1)..(601): unsure at all n locations
gcgacaaccacgaagaaaagcgacaccagcagccttagccaagggcgcggggggaaaagcgccaagccaaaaagaagaagacggagagggcagccaccagaggcccccgcgacagaaccagagaagacgaagcgacgacaggaaggacgccagagaggtcacggacaccacaggacacgcacctcaacagagcagaggccaacccacaccaacgaaccacgagccgcagacgcccaccgacgaatctataatcaaacgcgcgggggagaacgaccacgatgaagaacgcgacacccgccaaacacacaaagctggaggaagaaggacacgcacatagacacgagacccacaagcgcccgacagaagaacgagggcggcgagaggcggtcgaacgagaaccagccgtagagagacgcaggggagacgcgggagaaacacaacgnagagagacggaacacgggagcaccctgacgggggcaaaagagccagccagcaggagacaggcaccaccgaagagcggcagcagactcgacaagagaacgctaagaggacctagcaacggagcaagacaccgagccgagcagcagaacaagcgaagccg

SEQ ID NO: 122394 - DNA, 607 bp, Arabidopsis thaliana columbia
aaaccccccgcccaccacacggggacctcactgacaccacccccccccaacttaacaacagccagcaccccgcccacaagcagagaagcacaccccccccctttcccgaccgcggggggacacccgccgaccaaagagcccgcaggaacgcccggggcgctgcccgaggccacgcccccgcggagagagcagaaccggccgcccccccaccagcgccagaagcccgcgccgacgcaacaccacggcgcagcaccacgcaggggcggccgcgacagcggcccaacacactaaacacaagccgggggccccccccacccacgcaaccccacggaccgccacccggccaagaccgcgccagcaccacccccccccaccccccagaggccagccgcacccacgaccccccccgccagacgaggagccgggcgccgccccaccacgcaccgcgccaccgcgggcgcgccaccccgaagccagccgcgccaccaccaaaacgcagcaccaccgcaccgcaccccgcacgcgcccgccgcgcgcaccccccggaggcccagacacccacgcccgccaacgcgcacgcccacgagcaccacgccggccccacgcc

SEQ ID NO: 122395 - DNA, 526 bp, Arabidopsis thaliana columbia
  unsure (1)..(526): unsure at all n locations
caaanaaaacccgccccaacagggaggcatctaacccccggggggaaagcccacccacagacgcggccccgaaaggaaaacgaaagacgcccccggaaaaaagacaaaacagcacacagcacagggcccaccgcgccagccaccaaaaaaatcacgagggcggcgacggagtgaaagacaagcaaaaagcgcgagggaaaagcccccgccaaaaaagaggggcgaaacacccccccccggcccaggaaaaacgccgccccccaccaacgccacgaaagagcggaggcgaagaccgccggagcgcccgcaacaagaccgcgcgcacgctggctaaaaaaacagggaaccaaggccggagaccccccgacacaagaagggaccaatagaaagacgacacgccgaaaaccccacccccccagggggaggccccccgcaggagggaagtctcgggcccgcaacgcccggagaggagacccggcaacccccccccaacccagaaagagcgcgaggagcccccggccccccc

SEQ ID NO: 122396 - DNA, 448 bp, Arabidopsis thaliana columbia
  unsure (1)..(448): unsure at all n locations
gagaaggagcatttcccccccntttttccctcccccccnncgggggggcacttatcttttttaccccccccccccccntttnnnnnngnccncccaccnacccaaccagccccccccaatccgccagacacgtttttcccatttgtgggggggcgcccccccantacaagctatagcaagtcgcgaatagaaaaagcgcgcccgatttaattgttcgtggcgacttctggtgcgcggggtgcccaacccactaaggggagatgcaggctcggggggccgcgcgcccgctggctaacaaataagataaaagcaccgagggtgttttcccgccatgatagcggcggaggggaagaccccggcccgccgcagtttcatatggcaggagcnccaacgcacagttatagagcaaacgagattttcgagggcgcccgggccggagcggaatcct

SEQ ID NO: 122397 - DNA, 516 bp, Arabidopsis thaliana columbia
  unsure (1)..(516): unsure at all n locations
ggtgacctatagnagagctatgacgtcgcatgcacgcgtacgctagcttggatcctctagagcggccgccccttttgttttttttttttttttttttttttttttttttttttttaattgccattttttttttttttttttataagttcccttttctcctttccccctttttttgggggcccaccataagctttttattctacttaaccccccaaaacttttaaattttgcgcggaaaaaccccccccaattgataaactatagggggccaccctaacccaaaaccccccttttttttccccccccccccccatattgtaaaccccccccccccccccaaaaaaaaaaaaaaatggaacccccccccccccaaaaaaaaaaaaatgcccgccctaaaaacccccccacaaaccgcggggggaccttgttttccccctggggaaagccccgggttgggtcacaataaaaaaaaacaccttggttggctccagaaaaaaaaaaaaacccgagggatcc

SEQ ID NO: 122398 - DNA, 601 bp, Arabidopsis thaliana columbia
  unsure (1)..(601): unsure at all n locations
tccccaatttccacttattaaggggacaagcttcttcacccccctctccacantaacccccctccccctttattccccccatacggacccacccccctccataattaaaataaaactcaacatttccccttcttttcctaacagacgccctcaccgcacaacaataaccctctttttttttctttaaccccatttcaaaattcaccctcagacctccccctcaaccctttcacccctttgttgttttttaacccttttttaaaactttccaccccttcttctctttaaccttttccctctttaccatttttatgctctttctctttttttcaaactttcaaccctttaaaacccctctcaattttacctttaaaaacccttttttcttcccctcccccctcatttaaacactccaccccctttaaccctttataaaaactggccccccctttttccctttccacctctttttttaatcccactttctcctctttaattcccctcccccccctacatacactcccaccaccatttttcctcactacacaccccccaaacccccaattttcaacctctttacccctcttttttttttcccccc

SEQ ID NO: 122399 - DNA, 513 bp, Arabidopsis thaliana columbia
  unsure (1)..(513): unsure at all n locations
gaacgccggaaagcgcgcgcgcaaaagagggggcgcggcgggggattgtgggagcggcccccaatttaaaggagagccagcccccngaaacaaaagaacggcaaactcgcaacacggggagagcggggccaaaaaaacgggcgcgcgcgcgagcacgacgcagcgcagcagcagaggagaaaacggagcacagagacccgggcgcgcgccgcccgagccaagccaggccgcgaggccggacgacgagcccaacgtttttcgaaaaagggggggcccccccgcaaaacacgaacacccgaaaaggaacgagacacagggacgggagaggacgaaagcgaacggacgagcaaagccgacaagaagcacaaggagcccgcaaagaaggcaccaaacgccgacgacaaaacggcaccgccaccccagagagcacggcgcgcagcagagaaccggcgcagacgaaagaaaagagcgacagacccacacgcaacagggacacgcaacgagggggggaga

SEQ ID NO: 122400 - DNA, 443 bp, Arabidopsis thaliana columbia
gcccccgaaagggggcggaacagggggcgggggaggcgagccggcgagcgacattccggggcggggggggagagcgaccccacaaaaaaagcgcgggggggcgcgccgcggcgagcggcgacagacgaggggggagaggaggaggagagaaggccgaggagagcccgacagagcccgccaggacggagacggcaacggagcagaaggagccccgggaggcaggacagaacgcaggggacgaaacttccgaggcggccgcgggggggggagaggacaggagagagagggaaggaggagccagaggaggaagaaacagaccggggccgacgggagaagccggcggaagggcagcgaggggggagacgcaggcgggcggcgccggccgacgaaaggcgcggcaagcgcgggcgcggaccggaacgcgcggcgcggccgcgaagcgc

SEQ ID NO: 122401 - DNA, 464 bp, Arabidopsis thaliana columbia
aaaaacgcccagaccgcaagtttgccggggggagggcgccgccaaagggcccaaaggaaacgaaagccccagaaacaaggcaaggggcacagggggggggaccccccgcaaaccaagaaaaaaaggagacgcaagggagcgcagcaaacgaaagacggagagaaaaacccccgattaaggcgggggaaaacccccccccccgcaaaaacaaagaagacccccaccgccagaaaggagaggaagacccccgaacgcagaccgaccgatgccaacacgaacaagagagagccaaacccgtacccctcaaagcgaagaaaccaaaccaaggaaagccccaaaccccacccaaaagaagaaggcacgaccgaggagagaaacacggccggcaacaaaggggaagacccacacaccccccgctcacaaaaaaggcaaataagcgccccgcccccccccagcgcacagga

SEQ ID NO: 122402 - DNA, 501 bp, Arabidopsis thaliana columbia
  unsure (1)..(501): unsure at all n locations
nnnnnnnnnnnnnnnnnnnnnnnnnnnnnnnnnnnnnnnnnnnnnnnnnnnnnnnnnnnnnnnnnnnnnncttcntttttttttttttttttttttttttttttttttttttttttttttttttttttttttttttcacaggtcagaggaacaaatttttaaaagcctccaagggtcaaaaaatcaattccccaagggggtttttgattttttataactcccgttttttttttttttagaaaatgaaaatttttttttttttgcaaagtctccggttccctttaacgtttttttggagataaaccacccggtgtttgtaaaaggaaatcaaaccaatttcactttagagccttcatttggttttgaagcctttgagctttccccacgtttgaaacatgacgacggaaaaaagcaagattttggtgatcggagggactggttacttgggaaaatttattgttgaagggagcgcgaaagccggtaaccccaactttgtttttg

SEQ ID NO: 122403 - DNA, 550 bp, Arabidopsis thaliana columbia
  unsure (1)..(550): unsure at all n locations
cgccgccgccggcccccccccccccccaatttacccccactttcctccccattcatatatgggacagctttttcgcccttccggtacccctcccctatttccccccntggggccggggggtncaatttataaaaattttctccttctgatatgggaagtccttctcaaagagactttccccatccttttttctccccccggggggcacccttttcctttcattccaataaaaatgtgtgtttagcgaagcaactaatcggcagaggggtttttttttcacgaggggggtgggggccctcccccccncccgtnaatccataaaaaaaaaaaatttttcccccccccaaaattattccccccttccccccttattattaaaaaaattacccccccccctccctcactcaaaccccccccccccccattcaaaaccccncccacacctttttttctcaccaacccananttccattccccctcctccttcacccctacactccccttcccccaaatcttcccccccccccttaaaaaaacaacatttttcccc

SEQ ID NO: 122404 - DNA, 516 bp, Arabidopsis thaliana columbia
  unsure (1)..(516): unsure at all n locations
ccagagggccattttcgtgtaggggcgtcgcctttcctgcccccaagtgaagtaccatagagcccccgtttttgtagttcattctctcttttntccttgtatcccctccgctccctgtattcatttttttatttaccatctccgtctacgctattaatacttgtaatagttatcacccgtacgttttttctcccccttatatgttctttgagggggggctcacccccccccctttatttattgccttgccccacacctcattttattctctgaggtgtaccccggagccccccgctccgtttgcagttctcctctcctttttcttttttattcccatttcctattcgccccgctgtcgtgttggtggtctgtccctttgcgagcncccatttcccccttcccccgatttttattgccctctcccagtgttatctcttccttcccttctctcgttgtagtttgccctaaagcgtccttatcttttatagtgnttttgggccccccgtcccttttcag

SEQ ID NO: 122405 - DNA, 568 bp, Arabidopsis thaliana columbia
  unsure (1)..(568): unsure at all n locations
aaaaaaaaggacttttcccccctattgtccnnanccggcgccatctttttacacccccccccttttnnnnncncacccnnnnggnnncccccccatccccaagacgtttctcctaggggcccccccatatcgaccccgttttagaacccacaaaccccaattttttatctcactcccccctccctcttccacccccaatactttctttatattcccccccgccccctacctcttttaatatatttatcccttatttttttccccctttttttaattagtgggtccccccccctcactttttctatccacacccctatcccttattttttccgccggtcttcaacccctcattaataagatatccactatataataattaataaagctattccttgccccccctccaatttaaccaaatatcaaatactctaccccttgtaaattcccaaatagaaaaatccccacacacaggatcatactttcagtccgtctatccaagatataatagccatgaatagccaagatatagcttatataacaatataagtaccccgtccccccaccccag

SEQ ID NO: 122406 - DNA, 333 bp, Arabidopsis thaliana columbia
  unsure (1)..(333): unsure at all n locations
aaaccacggcaacacaccacaccgcgcccacacaagcgggcgcacacgaacgacgcgagcgcattccagaggaaaacaacccccccgcgaatttaanaagggacgagaaccgagcgaggggcgacagaaaaagaaaggccacacagacctctttagcaaccacggggggggggaacgccaaagacgaaagaacagcacgcgagccccaaccgaccccaccccaaacgcaaggcagcccacagacacggaaacacaaagacaagaagacgacaacaagcggcaccgaaacacccaaacgagccccacgggacgggaccgacccgcgacaaccac

SEQ ID NO: 122407 - DNA, 450 bp, Arabidopsis thaliana columbia
  unsure (1)..(450): unsure at all n locations
ggagggggggggaagaccgcaacccacacacagaagcgcgacgcgccgcgagcaccacgccgccgcccgagcgcagcgcgcggcaagagacacacaacaccagaggacaagcgagcgagggcggccgcgcgggcgcgccggggcggagcgccacagcgacgagagagaggagcccagcacgcccgcaanaccgtcaaacagagagggggggggcgaacgcccacgagagccgcaaacgcaagagcgcgacaggacaggagaacaaaacaccacgccacgcagacacagccgaacaagcgcgagcgcacagacgcgccggggagcaggagagacgagaacaaaacacgaaacgagagcggccaccaagcccgcacgacagccgagagcagccaggcgacaacgcagcggaggcgcgcgcgagagaacaaaacggccagaggggagaccaaa

SEQ ID NO: 122408 - DNA, 523 bp, Arabidopsis thaliana columbia
caacaaaccggcccccccaggagacagaagaggaaggaacgcccccaagaaaaagagaagcaaagagagaaacccagaagcgcggggggaccccggccggccaaaagccacaaagaaaaggacaacggagaagcgaacaccgggagaaggtgcacgacgaacaagagacagcccgagccggaagacacccccccccaacaaaaaacagaaggggggcgccccccccccccaccgagacaagaaacggcagacgcccaaagccgccaaagataaagggcgggggaggaccccggcgccctcaagacaagaagaagatgcacgagagcagaaaaaaaaaagggccgaaagcggaagccaccaagaagagaagcgcgcaagcgagagacaaacccacgagacacacccacgggggaagggccaccccgaggggaggacaacagaccgccacacacgcgggatagaccccacacccgccagagaccaataaagcaaaaagggacgcccgcgcgcccgcccaagaaac

SEQ ID NO: 122409 - DNA, 506 bp, Arabidopsis thaliana columbia
  unsure (1)..(506): unsure at all n locations
nnnnnnnnnnnnnnnnnnnnnnnnnnnnnnnnnnnnnnnnnnnnnnnnnnnnnnnnnnnnnnnnnnnnnnnnncttttttttttttttttttttttttttttttttttttttttttttttttttttttttttttgggggttttttttttttttttttttttttttttttttggggaaaacaagtttttttaaccttttaatatacaagcttttaatttttataggacaaactttttttcttgggtccaaagcctaaaaaaaatggaaaagtttgttttaaaaagttgtctttttacgggacccaaaaaaatcccaaattttttttaccccttttgataaaacctccaaggatttttttatggggatacaccttaaaattaatccccccgacggggaaaaaatttttccctcctccggggaataatttacactcggttttacaaaaaccaacttttttttggggcacatcaaactcaacccaaaaattttggggaaaaacgttcccg

SEQ ID NO: 122410 - DNA, 251 bp, Arabidopsis thaliana columbia
  unsure (1)..(251): unsure at all n locations
ccccggncgcccgcccagacctcagtatttttcccgagggggggagggcccatttaaatcctcccaaaggtttgcctataccccccattataaatataatgaattctatagcggggcgatcgacccgccatataaaaagaatataatcgctgccgttatccgaactttaacatgattagtaagaggggttgagttaaccccccactagtttttcttatagagggggagagccccccccctttatgtttttc

SEQ ID NO: 122411 - DNA, 591 bp, Arabidopsis thaliana columbia
  unsure (1)..(591): unsure at all n locations
cccccccccccccntctcccccccccgccccccccccccccccccccctaattaacnccccacctttcctccccnattccacttttatgggacaaactttctccccccttcccggtaccccccccccccttattcccccnngntggaccccccccctcccaaaaaaaatccntcccccaccccaaanccaaatcccccnaancccattttccccactcctttnttcttagaatccattccgcatccaccttcctaccaaaataatggaaggtctcaaaaaattttccccgcatctttcactcgcgggaaatttaaaacaatttttttttcaaaaccccggggggggccccccccaacnaagggggagtccccctacaaaaaaaaaatcctccccccctaaaaaaacacaaatattttcctcccccatcccccccccttcaaaaccaccccttttcttttttttttcccccaaaaaattttcttcaaaaacccaccccccctctttacaaccaaatcaatatcccctccccccaccctccccaaacactttccccaaaactcccctctttccaaattttttacccccccccc

SEQ ID NO: 122412 - DNA, 155 bp, Arabidopsis thaliana columbia
  unsure (1)..(155): unsure at all n locations
ccaccacncatatagacggccccgtcgtccatgcaccccccagtccgctacactttcccttaaataggggactcgcttacagtcgacagtcagtttcatctaacccccgattttttttatagattatcacatgcggatagccctacccgctaaga

SEQ ID NO: 122413 - DNA, 511 bp, Arabidopsis thaliana columbia
  unsure (1)..(511): unsure at all n locations
cgattnnnnnnnnnnnnnnnnnnnnnnnnnnnnnnnnnnnnnnnnnnnnnnnnnnnnnnnnnnnnnnnnnnnnnnnnnnnnnctttnttttttttttttttttttttttttttttgggggcgaatataaataaataaaaagaagaaacaattttttttcaccaaaagaattaaacaagaaaataatcctcttggggggaatcttcaccttaatgactcagatcaggttttgactattaaagaacatcttatatatcaaacataaactaaacattagtattaatcttctggagtattgggtttactctatattaacaaccatcacagaagttcatcaagaaacgtcttccctttatatttctcgaccttaaatcccatctcctccatccgcaaccgttctgtttagagctcagcgagctctgctttaatttcctcgaccctaaacctggcctccgttacttccttataaatccgagccaaataagcttcttgaatctccatttcttgtttct

SEQ ID NO: 122414 - DNA, 591 bp, Arabidopsis thaliana columbia
  unsure (1)..(591): unsure at all n locations
ttgacggggcatcgccgcccccgtaaacttggatcctataaagaggttcgccccggggtttttttcctttaaataatccttcgtaacttttcgggggacgaaaattccccctttaaaaaattatttggagggttagatttttttggccccaaaaatttttaacagggggccggggggggaaaacaaaataaaaaaaagggtgtgccggggggggtttttttttctataaaaaaggggtggtggaagaaacacnccccaaacaagaagatgttaattttcttttaaaacaaccacccccgggatccgcagccgtttttttttttttaaaacccccggaaacacccctccatttttccttttttttttttaaaaaataaaatattcctctttattacacaaaaaaaaataattttccatagtttctgcgcgggagaaaaaacacccccctttggcgtttttaaaatctttgaagaaccacgtcacacccgtctatcattcgggcgattttttttttccacaaaaaaggctccccccccgccaaatctctttcttttctagcacccgtcgccgcaaacaaaaagaagggcgatt

SEQ ID NO: 122415 - DNA, 427 bp, Arabidopsis thaliana columbia
aatttgacgcgccgccgcgccccagccggaatcttagggggcccccttttttttttttttcacccaaaaaggggacccccttaaacccccggggaaagggaacaaccctcttcccaaacaaaaaccgaaaacagggccgttttaccggaaacccccaaaggggaccaaaaaatttacccccacgtgggccccatataaaaaaaaaggggccccctttaacgggcgggaagacccaaaagcccaccaaaaacccaccccccaaaaaaccccttgacaaaacccaaacccaaaaggcttttagagaagagcgcgaccccccccaaaagaagtggaccccaatgggaggatggagagaaagcgcgccggggaccccgcgggacaagaagccgaggcgccttggaggcccagccgccccaaacaacggaag

SEQ ID NO: 122416 - DNA, 400 bp, Arabidopsis thaliana columbia
agtggggggccccccccaccctccaacggtatcagaggccagtttttggttgggccatctcggggatccaccccaagcacaagaaggttaggaccgccccgtttttttctattaaaaccgaaaagaaaggaccgcttatggtgaaggagggccccccccccaattaaataagactccaacggatatttttgagtggaatttcgagagttagtggaagattccaatatcaaaataaaatatccattgcctaagccccaaagaatattaaagatatataggaatgccttatgcagcccaaagtagagagcagcccgcgtgtagactcggtgcatacccgggtaaaataccgctcgcccagaaccaaatagcgaatagagcaaccgccccacatcaacctatt

SEQ ID NO: 122417 - DNA, 619 bp, Arabidopsis thaliana columbia
  unsure (1)..(619): unsure at all n locations
tttatgcttgttttttttttttatacgacagttcccntgctaatggtcttacttttgtccaccacaagcactcctgttattttcttaacatccatcagacgcgtatattgtccttttctgttatttatttattttctattcttttctatatattttgggtaattttattatttttattctatgtctatcctttcttgctttcgttacgacttaattttttctgagttttatttatatccttctttcttttctttcttttttttatttgttgttttttcttctttctttttcttcttttcttttctttttctcgctaataatctctttttttttacttattatgtttttcctcttatttcctttttgtgcttgttatcgtttattttttctttgttttcaccttttattttttcttacgtttatggcgcttagttttttttactctgttttttgtttttttttttctgtttttcttaccgtcctttttcttttcttatatcatctaactatacttttctttctctatctttcctacttgtttttctctcctctttttttcttagtgttttccacttttttctttaagttttttcattttcccttttttgttttttttttt

SEQ ID NO: 122418 - DNA, 545 bp, Arabidopsis thaliana columbia
  unsure (1)..(545): unsure at all n locations
ccccccncggacaaaaagacgcccccatacccaagccttttccccccagggataacgccccgcacgtcacgcccccgaaccggataagaagaagcccccgttttatatcaaagaaaaccacaggggagggtcccccccccgcaatcataaaaaaggacttaccaccgcccctccggaagcactgttagctgttagcccggaggcggaaagcccccctccttagacgaggcgaaatccccccgcccccgcagtattctttgcgagccccccagcgcccgaatttgtcggcgagtattcgaggctcgaggtcaaggagcttcggcggaggcagaataattgaagggccgaatgaaagatccccccatacgtaaattcctcttaacccatatacaaaccccagatccccgagcccatgaaggaggggcccgcccccagcggaagatttcatcggctcggcacctgcgggatattatccccatacatccctccgtaacacagaaaaggccggataaggagcccgcccgcccaactgattacggcctaga

SEQ ID NO: 122419 - DNA, 549 bp, Arabidopsis thaliana columbia
  unsure (1)..(549): unsure at all n locations
cccctatcaacaggttcccccctctgtgtggtttttttctttttttaaaacaaaaaaaaaccagaacccccactacccccccattaaaaataaccaacacccaacaacaaaacccttctgccccccccccccctcttttttttttttttataaaaaacagacgacagactcgcttttctgtcttctttttgtatataaccacagaacaaaaatacgccccccccctcttctttcaacgggggggggcgcccccacccccccataaaaacaaaccccccccccccacaacggcgggttttttgtttatcttgttattcctacaacaaaccaaccccaccacatacccatatttcttccatacnaatacacctaaagtaatacaccccatataccccaatcacccccccagagaacaagagataacaaaaataccactaactctccgcccccccaggtcgccccgtnctcctaatatctcttatattcccctcaccccacagagagaaatattccgcccgaccccctaccaaccacaaagaaaaaaaacca

SEQ ID NO: 122420 - DNA, 509 bp, Arabidopsis thaliana columbia
  unsure (1)..(509): unsure at all n locations
ttttttttaacacaccacccaccgttttaagagcgacgccagagccactcgtgttttccccccatttcccctattaagtttttcccctattaattgtgcgcctcctatttataggccaccccaaatcctattatcaacagtccgccccgatatttttatctaatgagtgctcatcctgccgaagtagtcctcccgccgccttatcctcctcgaatttgtntcgtctgcctccagccctccccggatagtgtttcttttttctattattcccccgggcgtttatttaccccccctttttttttataatttcctttttcccccccccccccacattatttatttttccgctacccccactctgcccttttttatgttataggatattacagttcgcgtaccggtgatggcgtttcactattttggttttatttttttgtgcccttttccctatgtgcccccgatgcctatgattcgctatcccgtttttggtatccctggtagcccccccc

SEQ ID NO: 122421 - DNA, 154 bp, Arabidopsis thaliana columbia
ccgcgcccggcaactttgcgcgccgccccccaacggcggggcggatctgatgccacgggcccaggccacggagtttccacacagcaggcagcctgtgcgcaacgcccgtccaagacatcgcgcgcgcggcccgttttgctaagactgcgggggg

SEQ ID NO: 122422 - DNA, 569 bp, Arabidopsis thaliana columbia
  unsure (1)..(569): unsure at all n locations
cggggggaaaaagagccccnccaacaaacaagcgcgccccgaaagcgaaaaaccgagaaaccccccccggaaaacaaacccacaccaacaccaaaagggcgcagaatcccccacccgcccaaatacacaccagaagacacacccgagccggccgaaccggcaccaccaaacgaaaacacaagaaaccccgaccgagcaaaaagcaccccccccaaacagggcgcagcgaaaccccgcccccccccagcagaaatcgaaaagccaacacccccacccccggaatccaacgccgggagaggncggaggagacgcacgggcgaggaagcagaccgccaatgacacaaacaaaaaaataagaccgccaggccgaagacccccccagcggcacgagacgcgcccaaaaaccaagaacagacaccacacaagcccccgccccccagagagcaagaggccccacaccccagaggaaaagcgcaccggaaggggacacaaccgcgagagaagaacgcccaacaaacgccgcgacggacgcaaaaagccagagacaacagccgcccaccccccccccc

SEQ ID NO: 122423 - DNA, 507 bp, Arabidopsis thaliana columbia
  unsure (1)..(507): unsure at all n locations
nnnnnnnnnnnnnnnnnnnnnnnnnnnnnnnnnnnnnnnnnnnnnnnnnnnnnnnnnnnnnnnnnnnnnnnctttttggttttttttttttttttttttttttttttttttgttgcggaaacttttttttttttttttttttttttctttcggggaaaaactaaaattgaaaaataaaaagaatccccttcccattggggtttgtaacaatttttttaaaactccccctaattttaccactggtttttaagacgacccttgatttttcccccttttcctaaaggaaaccaaaaaaaccctcacgttattggaacttttttttggtaaaaccaatttttttaaaaacaacccccctttggaacacccattgggcccccaatttaagtggncacccgccccatcctcttgaagggaaatgggagccctcgggtccccccaccgttttggggagccggggggccacccgggatattcggacccggcccttggagggttcctttttttttt

SEQ ID NO: 122424 - DNA, 476 bp, Arabidopsis thaliana columbia
aatttacccccccccccccccaaaacccaaatttataccggggccgttttaaaaaatttaacccccccccaaccctttttttttttttcccagcaaccttaccccagccttcttccctccccccacaaaaccaacacaccccaactattttaattcccgggggcctccttccccggaaaccaaaaaaaatttttacatccccacacacacattaaactttccatccccccccacccactccttacacccatcaccactctcacaccctctacctccccaacctcacccctaacaaataataacaccttattcatacacccttcaataccacatcccatccccaccatttacataccccccattctaacaacctctcactcccttcaatctataaatactatcaacataacctccaacacaattaatacacacacaaaatactaaaaaccacacccccccctcactcaactcacccc

SEQ ID NO: 122425 - DNA, 497 bp, Arabidopsis thaliana columbia
  unsure (1)..(497): unsure at all n locations
ctttttaaattttactcctcccccttcctactttatcttttaacggggcctttttttaaattaaaccaaaattttttcttctcccttactttccttatttcaaaaaaaattttttcccaagttttccataccaaaaacccttgtgcccaaaataaaatttttctatcccggggggggaaccccctagggggctcccaaaaaaacccctggcgttctccanccctttttttacccgatccccccattactcaaccttttttattaagcccccccccttcctttttctttaataaaaaccccatttggaaactatccccccctccctttttacctcttttaattctaccttcttaaagaactttttttttcccaaacaaaaaaggttaaaaaaagtccccctattaaaccctttctctaacccccccaccttttttatcccaaaaaatccttttccccacaaaccctgatctacccacccttaaccccccctcttaaaa

SEQ ID NO: 122426 - DNA, 524 bp, Arabidopsis thaliana columbia
acgactcactataggggaaagctggtacgcctgcaggtaccgggccggaattcccgggtccacccagggctggggttactggtgactatagattccaccctcttggtctttcaaacccagaagggactggaggattcattgagcccagatgggtagcatacggagagatcatcaacggacgggtcgccatgttgggcgcagctggggctattgcttttccgagggggggggaggctgttctgagtccaccaaaaacaggtcttccttggctccaaacgggggtgaaccccccagcagggacatacacttactggggagacaataacacactgttttgttctccaaaacgcttctgaggggagctcgctgacccccggaaggccacaggactgggcacaaccccggaattcacgggaaaaccgcgatttcttgggggaaagagcagggtgtacgcgcgggtcagggaaccccgggttaccccggggggaactttattctaaacccttcttgggtatccggaaaaa

SEQ ID NO: 122427 - DNA, 515 bp, Arabidopsis thaliana columbia
  unsure (1)..(515): unsure at all n locations
atgaaatgccnnnnnnnnnnnnnnnnnnnnnnnnnnnnnnnnnnnnnnnnnnnnnnnnnnnnnnnnnnnnnnnnnnnnnnccacgcggtgcgcgggttttccatatactaataggggaggtttcataaatttcctctcctagggttagttctgttcctcgggctgaccggctcacttatcgccggcaatgagtatgcctgttctagtaccgatatacactttactccggccaatttttttaaagggggggggttttggcaccggagctggtgcttttaagggtgaaggagcttgaaatgaagggtgtagaggtccaagcatgggggacttatccccaagaaattcccaaataatgtaattatcccaatgccgacggtgctggccttttttaccatcggtaccagggagatttcaagttgaggaaaaaactcaacccctgaggggtttagaattttccttgggggggcccaaaaaatttcccccctggtaagagggggaaacaggaatacccaccg

SEQ ID NO: 122428 - DNA, 449 bp, Arabidopsis thaliana columbia
  unsure (1)..(449): unsure at all n locations
cagcactaatccactcacttagggaaagctggtacgcctgcaggtaccggtccggaattcccgggtcgacccacaggtgcgcccacgcgtaccatggagccatctccaatgtgactctccgccagtctgccacatccggtggaactgttacatatgaggggagatttgagattctgtctttatcgggatctttccatttgctggagaacactggtcaaagaatcatgacggggggggtgagcctntcattatcaattccggatggaaatgtcctccgtggcagggtaactggtctttttatagcaacatcacctgttcaaatggttgttgggagtttcttaccagacggggaaaaagaaccaaaacagcttgtggggacaatggggactgtcctcaccccttttaccgggtggtggccccaaccgcaggggctggatgactccaagtag

SEQ ID NO: 122429 - DNA, 718 bp, Arabidopsis thaliana columbia
  unsure (1)..(718): unsure at all n locations
aaaaaaaaaaagcctcattattaaaggaaacgttcccctaaaaaaccaaaaacaaccccccccccccctccctaaaacctctaccccttctaaaaacgggggcaacggtgttaaaaataaatttaaaanaaacaattcccttcccttctcctccccccacatattaaaaaaaccccacctttttctttacttcccaaaaaatactactcctctcctatacccctcccaaaaacataacatcacaacacctcaccacaactcttttttacccttagggagggggtgcgcnccacaaacagggcgcgtcttcccataaatttattctaaangcccaacttcctctccccttcttttngtcctcccaaacaccacactcaccacccaccccacacctctcatacncaactcccctctcccctctccaaaaaaccaccatacaaatacgacatccccctcctcgttaatcacaccataaacaccatcacccctccccccaccccctctcttccccctcctcccttacactcaaaccatctctcacaacaccaacactcttcctacccacccctttatccctcagctctccaacaccctcccccacccaaaatcattctccccctaacaacacacatacatactaaacccctccctctcccaccctcactacccttctcctcacctctcctcaccaactcaacactttctccaccccacacac

SEQ ID NO: 122430 - DNA, 578 bp, Arabidopsis thaliana columbia
  unsure (1)..(578): unsure at all n locations
ccggggngggggggaggattgtcggtcaaaccactgaattaggaaagtctcccctcagtccggcccattcccggtccccccggggtcgggcaatttataaaaactcttttctctttttgctgggtttgaagaaaaaacccccccggctaaattttgcggcacaacaccccccacttctgagtggaaaaaatttcctccttctttttccccccagaaaaacattccctcctccatcttcttttttacgggggcgggggacctcaatttgcgcgttttttttttaaaacaaaaaaatcctttcacaaaaatccatcccccaacgaaacaaaccccggactgcgctcgtttcctttgagcctctttccaaataaataccgggagaggaggcattcgcctccacctctccaacaaagagggcgcccccccccagggggtcgcgaactcacaccccaaccttccacaaacaattacacctcgtctccttcaggggggatgagcggcgaataacacatggggccacctcgtccgcggcccttccaagctctccacccccctctacccttgccctaccaaaaaac

SEQ ID NO: 122431 - DNA, 584 bp, Arabidopsis thaliana columbia
gtcgagcccccgacgtccgccggccccgggggggtagtattggccgctctaaacgactcatatagggaaagctggtacgcctgcaggtaccggtccggaattcccttttccacccaggggtgcggggaaaggaacctccaactcacagaaattgagagaagagagaagaatcatgggacaaggaccatctgggaggattgaatcggcaaggagatcggaaacctgatgggtggagatagaaagagaacaagtttgagcccgggggcccacctggtggggggggggaggaaccaagggaagccataaaggggcaaagggcggcagcaaaacttcccaacggggactccggttactagggggaaggctccggttactgagattggaacgggtccacgatttattcggttggtggaggaacgacgtttggcgcccaccccaaaagaggctgcgaaacctaggggaagagaaagcttgtgggacgatcgagtctaaggcgtgagtgaccctcccgcgccccgcttggaggggttgcaaatttcggagcggggtgattgggcgaaaccccgcccatttggtgtcttttt

SEQ ID NO: 122432 - DNA, 390 bp, Arabidopsis thaliana columbia
gggcgggtttttttttaggaaaaagaaggggtacattttaaacaactcctttgtggtctgggatatataaagggaacaatacataaactgggttataccttccttaacataaaaaaaacagaaaaacccccatggtgggggggggcctccctttggggttataaacggagagggtggttttaaaataaaaataaggcgtggggtatataataaatgcaggggggggccttcttttttttcctggacaagctttttaaaaatgggtcctgtaaccttctcgggtgggtaacccaattcctaaaaaacctatttattctgggggggggcgtgggtttattgccccaatcatacacacacccccttttttttattaaaaaatccggttttttt

SEQ ID NO: 122433 - DNA, 443 bp, Arabidopsis thaliana columbia
gatcatttagggaaagctggtacgcctgcaggtaccggtccggaattaccgggtccacccaggggtggggggagagtataaacactgtggtaaaaaaaaatatagacttttatatatgggtgagtaaaataacattaggggttaactctattttccaggtatttcatatcaacagatgctgggaatggatcatttccttggcttttgggttttttttattagggggggggactggcacagcaattttttctgaattttatgaagggggatttgtggccttatgggggggaggttacgcatgagaaggggcgacaggaacaattttgaactggaagaagtttcttttgatatagctcgtcaaggggttagggcaaaaagaaaaatttttccggcttttcggaaagtgggtacaatttttcagagggacccttaaaagtgggggt

SEQ ID NO: 122434 - DNA, 579 bp, Arabidopsis thaliana columbia
ttcgtgcgcgcggggggggggggggagtatcgccgggtccataccactcatttagggaaagcccgtacccctgcagtaccggtccggattaccttgtccacccccgtgttcgcgggctctaataaaatatattggctcccaatttttcattgagataatcctccttagaaaatacaaaggggttttttcccaatccattcttaaattccctttaccatgtgcttgtttagtcttaccatggaccaacactttgtttttttttttggggggggggggccccacccttagtgatttggatataaaaagggtggctaccacaatttagtatgaccccaaaccttttttcccaagtcttaaacttaaaaaaaattcgaatctcccccccctttttttttgggggcgggacgccttccaaaactgcggggggggagggggggctcatagtttcagagcaaggccaccctcttattctaaaagttcgcccgggggtctttcttctttgtttcaaaaaaaggggggcccacccccagtctccaacaacgcatttctattttcctttcgctggagaaagataaaaag

SEQ ID NO: 122435 - DNA, 184 bp, Arabidopsis thaliana columbia
  unsure (1)..(184): unsure at all n locations
ctacttgatctctaacgggggctttttttttttaaanaaaacttatcattcattttccttgtaatgtacataccatttatatacatggtacattttatttgatacaatttgtaaaactagagggaagattccacagcctttaaaacacaataagggggtaggaaaaaacatattgattcattac

SEQ ID NO: 122436 - DNA, 333 bp, Arabidopsis thaliana columbia
  unsure (1)..(333): unsure at all n locations
cgcctgcacgcgtacctaagcttggatcctctagagcgggggggctgggttttttttttttntaataattttattttaaaaatatgattaatatagtttttacaataaccaaaaatgttctacagcccgctgctgtttaacaaagcagggctggctccatataattggacatattttcttgtttaccttgggaggggttttcnttngaaggattanagctcaaataacatcctctatgaaaacagggccccgttctaaaggtaccttttccttttccgaaattggttttcataatcaattccaaagggggctgaatcaatagattttccttta

SEQ ID NO: 122437 - DNA, 516 bp, Arabidopsis thaliana columbia
  unsure (1)..(516): unsure at all n locations
ccttattaattaccccatcacctactaacttgatctctaacgcggggccttggggtttaaanaaatttttttttttttttttaaaagctgaatttttctaattaataaataaaatttggagcccataatttacattgctatatctctctatagctcctggcttcgaaaaaattttatcatcctccacacaaaaaggggctatttcnattttgccaactactaataaaataggaaccactgtgcccatttttcttttctataagaaaactaaatcagcccgtgttttcttttacaattacatcctccagtgtaacacacaacgccaaaattttaaccccatttgaaaaaaaaatccaccacctctttcaagtgaaaatattaatcccgtttaattttttccttgacaaaaaattattcaaattttttttaaactccggttccttcccaaaaaccctgttatttgttctggcctacgcttaaaaaaaaaaaagaacccccattattccccaaaaaacc

SEQ ID NO: 122438 - DNA, 536 bp, Arabidopsis thaliana columbia
  unsure (1)..(536): unsure at all n locations
ccgtaagggccgacgggggggagtattgccgggtctaaaccatcaattaggggaagctggtgcccctgcaggtaccggtccggaatttccttttccacccggtggtgggggggcactcaatatttcnagatcctctcggcttgttccttcttcgtgcaacgatcccatctttttgtttctccctaggctagattcactactttgaatctcccaactcaaaaaccctccttctttttttttccccctatttttctctgcggggggggggggggacctccaagggggggtgtctcacaagaaaaaaagagggaaaaccctccgagtgatgggcctcctttttcgcgtggtacaaaccgttcttccatcgatctcggttaaggttccctcttaggggccaaaggggcgcgggcataaaagtcttgccgctttactgcggagaaggggcgatgcgggtcacgtgttacctaaccgatgggtgcctcctaattttgccaggcgcctttgcaaataaaaccaccccctgggcggctaacgtg

SEQ ID NO: 122439 - DNA, 461 bp, Arabidopsis thaliana columbia
tttaactgccccttataaacttgacctcctgccccctcctaacttgatcctttaacggcggccgggtttttattatattacacttactcttaggagatcaacataaacaaccaaccaacttaacaaataagaatttccccctatttaatattttttttacaaaaccaatcttcaattccggggggctaaaccaatggttaaaaaaaaaacatactttataacttccaaaaccacttttaaccatttttaaaatcaacttgtttacctcacttcccataaaccaaaaccctctacccttttttgtaaaaataaaacttaaccaccacttctcccaaatcatttcaacccaattcataaacctattaaaacttcgccaaataacccccctataaaaaaaccctaactttcttccaaaaattttttaataaaacccccccccccgtgtaaaaaaaaacaaaaca

SEQ ID NO: 122440 - DNA, 547 bp, Arabidopsis thaliana columbia
  unsure (1)..(547): unsure at all n locations
nnnnnnnnnnnnnnnnnnnnnnnnnnnnnnnnnnnnnnnnnnnnnnnnnnnnnnnnnnnnnnnnnnnnnnnnnnccacgggtgcggccagagaaactcccaatcaagaccgctccttgcggaagggaaactcgtgctcttctgaagaatataaagctctagccttagacatatgaaaaactcacagctcttctattaaacctggtgtagatggagacagaagcgaatatttttttttggggggggggggattatagcagaggttggcgatgagggaaaattcccgcgcccaacgttttatttcctgccttggagacattatgtaaagtaagtgaaccaccctcataaagacgggggacaactgatttggcccatttttcaatgccactgtctaagattggttttagggagtttttccgaatgaccttttgtaagctccggttaatttcaatacagccggtaaaaagccggcggtaatcatattggttacaaaggatttgggtgccacccctccaccgatactgtgtttggccctcgaggcaaagttg

SEQ ID NO: 122441 - DNA, 174 bp, Arabidopsis thaliana columbia
  unsure (1)..(174): unsure at all n locations
ttattaaaatttntttttttatttttttttatttttctctntcttttgggaaagaattttttacaaataaaacacaccggccactttggtttaaacatgggccttttgtattggggattcttaactaaaccccgattggggggtgtttcaaaaatttgtgagaaaaacacaaaa

SEQ ID NO: 122442 - DNA, 298 bp, Arabidopsis thaliana columbia
  unsure (1)..(298): unsure at all n locations
atttaacatgacactactattaaaactatgacctcgcatgcacgcgtacgtaagcttggatcctctaaagcggcggcgctgtgtttttttttttttgggcaaacttaaagataacaacatttccggttttttttcaaattattacaaatcaaactgatatattagacacaacaccgattaccacgtgatgaaaaaagaaaaagataaaaagataaattaagggatcgggggtgtttngcctgggttaatgagattaaaaaaaaagcttttccttaaaagaatgcctttttaaaccggg

SEQ ID NO: 122443 - DNA, 315 bp, Arabidopsis thaliana columbia
atagattatagcggcgaagggaaggaggagggggggactcatttgtgacacagacccccacagttttatgagagagaaaagagcacgaccacgcatcgacgtcggtctagctattttttaccccagggggggaggggcggggcacaaaatctatgtcgacatacctacccctcttatgttggttcatccgcgtaggagtggcatagcccagatattttaatgcaggcagcccgtgcgtagttcccgtaggatatttggaccagcgcaacaatacactagccacgagcgccacgcccagacgcccgagatcttttt

SEQ ID NO: 122444 - DNA, 475 bp, Arabidopsis thaliana columbia
  unsure (1)..(475): unsure at all n locations
aatttacgtgcactatataanactatgacctcgcatgcacgcgtacgtaagcttggatcctctagagcgggggcgctgcggggtttatataattattttttttttttttttttttttttttccaaaccaaaccaaatttttttttttttttgggaaaaaacaaaatcttttttttatttgtttggcccccaaccctaaaaaggggtgttccaaactatttgggggggtggtcccttcgcgggggaaatttatatataaactttggtgccccccaaattatttttttcttgaaaaagggggttgggtttaaacccccctggggggaacacaaaccccctaaaagcctcattttttaaaaaacaaagagggtgggttttaattttctgaaaccccaacagggaggtgttccgtggcccacccaggaaaaaaaatttttaagggttttttccaccccctttccttttaaaaggggggg

SEQ ID NO: 122445 - DNA, 464 bp, Arabidopsis thaliana columbia
  unsure (1)..(464): unsure at all n locations
aactttacccccctccccctcctacctgatccttaaccccgccttttttttttattatttctatcaattaaaaatatanacattccttttttttatcaacaactaaaatccataaatatttctccaacccaaaacaacttatcccctatttttaccccaggtgaaaaaaaaacccaaaccactaaatataaccccttgggaaaaatttttncccctacacaaacccaaataattaacccttaacctctttcctttagccaataaacttacccccttaacttaacggtgtttctcaatcccttatcctaaaaaacccttgggaactcctcttccctttacacttctttaaacttaaccaactcccccaacccacaaaaaaacttcactctttcaatcccctacttttattttccgataatcaccccctcaaaaaaaaaaaacccccctcaactcaaaaaacaaaa

SEQ ID NO: 122446 - DNA, 234 bp, Arabidopsis thaliana columbia
  unsure (1)..(234): unsure at all n locations
nnnnnnnnnnnnnnnnnnnnnnnnnnnnnnnnnnnnnnnnnnnnnnnnnnnnnnnnnnnnnnnnnccacgggtncgggcacgcgtgcgcccacgcgtncggaacaatggcttcctctatgctctcttccgctactatggggtgcctctccggctcaagccactatggtcgctcctttcaacggacttaagtgctccggtgccttcccagccacccggaagggtaacaacggggg

SEQ ID NO: 122447 - DNA, 484 bp, Arabidopsis thaliana columbia
  unsure (1)..(484): unsure at all n locations
aaaaaaaatttttttntttttccttaaaaaaaccttcctttcctttntcataaaaacccaatatttccaaaataaactcttttcaaaatcaatacaaaccttaaattttttttataacaaccccctattttttaaacaagggggggggcacccaaaaaaacgggaacccatattaaatatttgcccctttctatcccaaattccttccaaattttttttgtaaaccctttcaaaaagaaaaaaacccttcttttttgaaaaaaaaaacctacaaattcccctacccttacattccttttccccttggtccaaaaaaatcttttttatattcctttttagagcaaacctctacttcatcctctgttttaaacaaataaattttcttcccttcccaacaaaccattttttttatattatcaaaaaaaacaactttttacagaacaaactcttttctttctcccatcaccctttattttaaaaattt

SEQ ID NO: 122448 - DNA, 685 bp, Arabidopsis thaliana columbia
  unsure (1)..(685): unsure at all n locations
tttctattttctcccccacaccacccctcccccccccccccgtaaatattcgcccaacctacaaanaccgactctctgtaannggaaaactctctacccccttccaaataccccttcccctaatttccctttttccaacccacggggtaccgccccaatactaaaaaaacccctaacatcccaccaacaccccccacccccacccccacaaatttcaaaatattttctcctctcccccatatccccttttttcaatccctccccataacccctcccccctaacaaacaagacacaacaacccccttctcctttccccccctttacctttcggtgtgcacacctctcccaatcttttccccctctaaacaaaacaactctctcacctttccctccacattttccccccacccttcccaaacaacatccctatctaccatttacaacaactccaaaaccacttccttttaacttccacaccaccctttttctccaaacactcaccctctctacccccaccccttattctacccccaaccactctcccccctctcttccccccacctttcctctccaattctattcccacaacacacacaaaatacttatctcttataaccacccacccctcatactcccacctcaccccaccactccatccaccccctcaacctccttacaacactc

SEQ ID NO: 122449 - DNA, 301 bp, Arabidopsis thaliana columbia
  unsure (1)..(301): unsure at all n locations
gacctcgcatgcacgcgtcgtaagcttggatcctctagagcgggggggcgggggnncaataaaattttttttttttctatttttttttaaagnccaaatgcaacagaaacaatgttgaaacaaagaccttgtttaatttaaccccatttttccggaaaaccttccggggggaaagctggttttttttaaaaaggagggtattctccttcctggggagctttttttaaaaaagattcaatattccccaaccaattctcttttttggtttgaattggaaagagaagggttcttttaaaaccaa

SEQ ID NO: 122450 - DNA, 533 bp, Arabidopsis thaliana columbia
ccctcccccccccccggggggggggggagtattgccggctctaaaccactcatttagggaagcctggtccctgcaggtccggtcccgattccctttccaccccgggtcgggttcacaaatactacccaatttttttaataaaaagccacctcccaaaaacatccattatagaacaccctctccccacacacaaaaatacaaccaacttctccccctccttacatggcatatcagcacccgcttctcttttttaggggggggggggtccccctggtggcggcctaatacacaaatgctccccgccccctttttttcctcctccgctctttgacccctcctctttccccgttccgttgaaactttcttcaagggaatggctgccgaaacgattgaattgtgcaaaaacaagcacgtttttagaaacgcacctctcctctcggtcccccccgtcctcactcccgcgtttgaaagggaaagggggggatgctcttcaacaccacctctccctcgccttcctgaccgggcgacggccc

SEQ ID NO: 122451 - DNA, 286 bp, Arabidopsis thaliana columbia
  unsure (1)..(286): unsure at all n locations
actatactccctcaccctactaacttgtccttaaacgcgcgccttttttttttttattttaaataataagctttatagaaagtaatccccataattcattactttattttattttactcccattaaggttggaaaagggaagaaaacacccacaaaatccttctcctaacttccggggatcacctnaacaagggggttaaaacaaagaatttttttggtaaaacaaaacaaaccgaccttttttttcatggtggagaaaaaaacctttcttttttaaacctcattc

SEQ ID NO: 122452 - DNA, 549 bp, Arabidopsis thaliana columbia
agcactaatacgactcactttagggaaagctcgtacgcctgcaggtaccggtccggaattcccgtgtcgacccactggtccgaaaaccacaagaagatgtgtctgacaacttcagagccaccattcccagacactgacacaccaactatgagatctgcttcgtaccatatcaaacataaatctaagacacaaacccatcttcgtatccttaatctcaccacgatttttatattcgggggggaacacaaggagatggagatgaagaactaaaaacttttcttaaagaatcaaagcctcataccagagaatgaacctttaaaaaagaaaactctttcttcttcaccattaaaaacaatgctctgtttggctctgctttaacccaaaaaaactcccctgtttcaaacctcctttgtttaaatgatccttggggaacctttggttaattgaatttttcttcgggtttctttctcttcctttttccaacccttttaatgggccctaaaaataaaaatcaaaacttactgaattttttggggggaaatttacctc

SEQ ID NO: 122453 - DNA, 532 bp, Arabidopsis thaliana columbia
  unsure (1)..(532): unsure at all n locations
tactaaacttgacctcctgccgcctcctaacttggtcctctanacggcggcccgggggtttaatttattttatttttttttttttttttataaaccaaattttttatatttttcttttttcattttaaaaggggaaaacctttaaaaaaatctttttttttcccccccctcttaaatcccccaaaattttaaaacccgggggggggcgaaaaaaatgggggcccccccccctttgggtttaacctacccttggttcccaccccccccccccgggcaatttttttaactttttttaaaattctaaaagttaaacccgaagccctcttatgtttttacaacaataaaccccccaaggccaaaaaaccttgtttctttacccccggggggaaaaaaatttttaactttttttatcctccccattatttcctgtcccccctccccctaaaaatattttttaaaagggggggcccccccccctttcccccccgttttttcagggacaaaaattttttgaaagccgacaaaatttccc

SEQ ID NO: 122454 - DNA, 472 bp, Arabidopsis thaliana columbia
ctatgacctcgcatgcacgcgtacgtaagcttggatcctctaaagcgggggggctgtttttttttttttgataaaaaacacatcaaagtctcaaaacttgagaagcaaatcgttttaacttccaaaaaagtaacaaactaaaagcaaaagaaaactccataacattgtttaaaggataacatctcctgatataagtagcagggggaggaccaaacatgaggctttctaagaagaattgggataaaacaactcttacttcgtgacacggttgtaaaacctcatcttctcaagggaggtctggaagcgaccatgtccaaaaatggagggggggtcaataaacttgagtttgatcccctccaaggcagacgggaagtttgattgagaagtgacttgtttaaaattacaaatccggacgcgggggtcaccccgaaattccggaccggaccttcaggcgaacaacttttctataggg

SEQ ID NO: 122455 - DNA, 467 bp, Arabidopsis thaliana columbia
  unsure (1)..(467): unsure at all n locations
nnnnnnnnnnnnnnnnnnnnnnnnnnnnnnnnnnnnnnnnnnnnnnnnnnnnnnnnnnnnnnnnnnnnnnnnnnnnnnnnnnccacagctccggagttgaactctcaaacagtcacttctcactcagacttcccgtcttgccttggaggagatcaaactcaagtttattgacaccgcctccattcttggacatggtcgcttccagacctcccttgagaagatgaggttttacaaccctgtcacgagggggggagtggtttatcacaattcttcttaaaaaagttcatggttgggtatctggccctacttatctcagagatggtatcctttaaacaatggtatgggagttttcttttgctcttaaattgggacctttttgggaaggtaaaaccattttgcttctaaaggttttgagaactttgatggggttcttttatcaaacaaaaaaaaaaaaaggggcggccccc

SEQ ID NO: 122456 - DNA, 544 bp, Arabidopsis thaliana columbia
atttagctgacactatagttaaagctatgacgccgcatgcacgcgtacgtaagcttggatcctctagagcgggcgcgctgtggttttttttttttttttttttttttttttttccaaaataaaacgttatttctgccattcaaaaaaaaacatccgttgggggacaactaaaacatgagttaacatttcacattattttaatattttttcccccaatggcaagtccggggggggtcaccttggcccttattctcttccctttgggcagcctctccaggaagatccttgccccctacagacttgttttcgggttcctgtgcttttgagttcgggttatgctcttagcttttcttccaaattcttggccacattcacggttgggggggggttttactctctcaggaatcacaggcaaacctcctctggggggattgggtattctaaactctggattctgttaacagaacaccgggggcccgagtttaaaatacggggggctttccttaatttccactttttttctggtgcccttaagacccaaaat

SEQ ID NO: 122457 - DNA, 332 bp, Arabidopsis thaliana columbia
  unsure (1)..(332): unsure at all n locations
taacccccattacacccccacaattctttaaaccacaccctatttcctaaaaaaaacaacatccccccaatctttcttgggggtggggctataaaaacacaagagggttttaaaaaaaacattaaaaacttcaacaccagaactttcacttccncacattttcctcttttcacattttctctttcaacacaaatcttcttttattcttctaaaaaacagccccctgaaaaagaaaaatcatcttttctctctctttcataaacccaaaaattatattcttttttcttctttcccccaccccatatcccctaactattacaattctcacattt

SEQ ID NO: 122458 - DNA, 469 bp, Arabidopsis thaliana columbia
ctatgacctcgcatgcacgcgtacgtaagcttggatcctctagagcgggggcccttgttttttttttttttacattcaagctaacaaatttatctataacaatataatatttatacagtcacacttgacaaaatcaaccgaccaaatttaccgtcatttcgcaaggacgacctacaaaagattcggaaccttttctaaagggggtttatatctccaagagacaaccagctaaaacgtggccttcatatttatcatgtgtttccagttttaaccatcgagaattgctcatatcccaattataccctacacttggttcgccgtaccgaaccgaaccgatcacaaccaggtttccaaacctccttatcgccacgtaagatacattgcacacgtcagcaggtagattcccaactttataccaccgtttcatctttcatcatcatcagatcacggggacaacaagcatataaat

SEQ ID NO: 122459 - DNA, 540 bp, Arabidopsis thaliana columbia
  unsure (1)..(540): unsure at all n locations
atttaactgcactatattaaactatgacctcgcatgcacgcgtacgtaagcttggatcctctagagcgggggggctgggttntttattatattttattttttttttctttttctctccctcgaaaaaattatgtgttaaggagttgaaccaaaacttacctggttatattcggggtttggtggtggtttacaaaattatacaanattgatttctcagggggggggtgggggccccactggtgttctttttataaaaaactcggttttacctattctattaaagggtggtaagggggggactttttttcttggatttcaccttaagcccaccaaccatatgagcgcgttaaaaagggaacacaaaccgggcggtttttgttaacgcgggccatttttaaacccacttaaaacaaaaccaacggggttttttattttgaataaatggcatttttttctctaacaaaaccttggcccggtttaaaaaccgggaattgtagggattataggttaaaaaccgggggggttcctccgggtaaaaaa

SEQ ID NO: 122460 - DNA, 489 bp, Arabidopsis thaliana columbia
ccaccctcgccccccccccgcgcccgggggggagaattgcggggtctaacccactcatttaggggaagccggtcgcctgcggtcccgtcccgattccctttctcattgggcgggggtaataaacatataaagctttttacaccgtgttaaattatgctcccggccacggacctatttccctgtttggaaacgaagctgttttcaacggggaagcacaggaactttaggaaccaacccgatcttcccgtgggggggtctcacacgggggggttaaaaaaaagagttttgatcgtaccccaccaaacgcaccccacattttttgtcggggttctacccccccccccccacgggcaaacacggggggcctgggattttattttatcatgggcggaagagatccacccccacaactatagcggcctctttttggttgtcaccgaaaaccaccccgtgcgcgggaaattttcaaaacatgccccccctcggctc

SEQ ID NO: 122461 - DNA, 563 bp, Arabidopsis thaliana columbia
  unsure (1)..(563): unsure at all n locations
cacccacccccccccaccccccgggggggtaatatcgccaactctaacccactcatttagggaaactcgtacgcctgcagtaccggtcccgaattcccctttcaacccacggctgcgggtttntttatataccatttttttccccaccaaaaacaaaaccactaaatccagagacacattttataaatcccacgaatccctcccccaattctaacaacctcaatcttttagggttgcccaattttcaactctctaggataaactttttttaagggggggagggagaaaccatctggggtccttattaaacaaattttcaaaacgcaacctcattttgtttcccatcccttaccccgagaaacccttttcttcaaggtgtgtttgggtttcaaaatctcccttccattgctaccacccatcatcggcgcccctcttccttaaagcattcttccaacaggctatccccaacggtgtccgctcacccccccaccccctttcttccctcactaggcctctcaccccctcctaatcccctaacccccaaggttcatcctcgagaatct

SEQ ID NO: 122462 - DNA, 530 bp, Arabidopsis thaliana columbia
  unsure (1)..(530): unsure at all n locations
cttttttttttttttttaatatgaaacttttacattttattccaaatcaatactctaaaaaacaacaattaaatccttcaaaagagaattctacccattcctacattgttaattctcccttcaacctaatcaaatttttgaaatggggggggggaccttcttttggagacttnaaaacaaaaactttgtaccccccccccaaatataaaaacccctcttaaacaccaaaccgggaccccccttttccatttaaaaaacaatttttcccaattaacgttccacggctgttctcttcctcaacaaacatttactttaacatacccaaaatcttcaaagcctcccgatttgacaaaatcttcattcctaactcctcttaccccatacctaaatgttcccttcaaaaaatgcgcagtttgtatacctttttgccataggcaaacacaagctcattctttcttgttaaatttagaaaacacccatagcgatttccgcaattgtcgccatcccacatctgccaatactccccttct

SEQ ID NO: 122463 - DNA, 331 bp, Arabidopsis thaliana columbia
  unsure (1)..(331): unsure at all n locations
atgcacgcgtacgtaagcttggatcctctagagcggcgcggcttttttttttttttttaaagcaacggacaaagatgaattaaaccaaattaaactatgaaaatgaataaatccgattacatcaaattaaaacacacaaatatctctcattaagcacacaaaanaaaagatctcaattttttctaagaagggggatgaatcatcaattggggtggggttactacaagaatgaaaccaaagcctttgattggctgcagctctcaaaatatattgatggtatgctgcgtgttgctaatgctcccacgaatggtccaccccaaaagatcccatg

SEQ ID NO: 122464 - DNA, 405 bp, Arabidopsis thaliana columbia
  unsure (1)..(405): unsure at all n locations
atgatttgccnnnnnnnnnnnnnnnnnnnnnnnnnnnnnnnnnnnnnnnnnnnnnnnnnnnnnnnnnnnnnnnnnnnnnnccacgggtgcgagcaaacgcgctgatagctctagtaatgaagctgctgttgctgcactagttatttatgaacttgattcaccttataggaatccaaaatggtgggtatcggtaaggcaaacccgtcccttatatgcgggggatatggacaatgtatattggggaagctggatgcttgtgatgagacagtctaacttgattagactggccacgatttaaagttcttacgcgatagcttctctagatcctgttgaaggccttgtggtcttgggaaaaatgctgtgggggggaaacaatctacatgatgatttaggggggcttgatct

SEQ ID NO: 122465 - DNA, 573 bp, Arabidopsis thaliana columbia
  unsure (1)..(573): unsure at all n locations
gatttagctgacactatattaagactatgacgtcgcatgcacgcgtacgtaagcttggatcctctagagcgggcgggctgtgttttttttttttaacccaacacacaaaaacaacaatatcttacttttaacagtacacaagctcatttaacttgggaacttaataagtagagatcagcctctatacacacacatcctagctcggataagtattttcttggtcgggggactccnatagatgacggaagattcccggaaccaaggcttctctttcgcagacgctctgcaatgatgaatgcaagctccagagactgagatgcgttgagtcttgggtcacagggagggggggagcgtgagcttacatcgttgtaagggatggggcgtgaccctccgacacattctgggacgtgttgaccagtcatttctaaatgaaccccggcaggggaactcccttcttgatcatggagcgcgaaaaacgctctcaattcccccctgattgcattaaaagaaccaggttttacgccaccaggagccatgattgggtttcccgggcttgtgataactaacccaagg

SEQ ID NO: 122466 - DNA, 556 bp, Arabidopsis thaliana columbia
  unsure (1)..(556): unsure at all n locations
nnnnnnnnnnnnnnnnnnnnnnnnnnnnnnnnnnnnnnnnnnnnnnnnnnnnnnnnnnnnnnnnnnnnnnnnnnnnnnnggctttttttttttttttagaaataaaaaatttacaagctgtaaaatgttttgtttgtatatattctttaaggctatgattttattgttatagttaatattagcaacaggaacaagactaatacaaatgtcttaactgtagagttgatcagggtgctctttgtatttagccacgaccatgtcccggctaatcttcataggtggtggcattaacccgttgtctatcgtgaaagggtcgtcgacgatcaagactggtccgacttgaaacgaacattctgatgtccattttctcagttcttggtagaccaagctctttagtggttctttggatgtttcaggatctactctttgtgcttcctctttgtttgggataatgatagctccaaggcgacgtcggtcctgtccataacaacaatttggtcaatcaccctgcttctcatggcggctttttaatctccaagggtccacattgtcacct

SEQ ID NO: 122467 - DNA, 543 bp, Arabidopsis thaliana columbia
atttacctgacactatattaaactatgacgtcgcatgcacgcgtacgtaagcttggatcctctagagcgggcggcctgtgtttttttttttttttttttttttttttttttttgttttttttttttttttgttaagccaagtaaaaaacctggggttaaaatcaaaataaaacaaaaaattgttccaaggtacaactttcattaaacatattttttcccggggggggcttcaaattaaccccaaaagaataaaatttttgggggtgctggacaaaaacataaccatttttctttttaaaattttttttttttttcctaaaagaaccccaaaaccgggatgcccccccccaagggagggggtttttgatggggtggtcataatacctaacgaagagccttggtttctaaccccctgatcttcttttttgggactggagattttttattctttgggtgaggaaaaaatttttgccccggaacaatcccttactggttttggaaaaaaccggggcgaattcaaaaaagcgttggggcttttattaa

SEQ ID NO: 122468 - DNA, 443 bp, Arabidopsis thaliana columbia
  unsure (1)..(443): unsure at all n locations
ggggagcgtaaattacaacctatggggcttccanagactttatgtgggttaccattgtatatgggcccagagatcatgcaactccagaagtatgatgcaaaggcagatctctggaggggtggcgctattttatttcaactttttacaggcagggggggttttacaggaaacagggcaattccgtttaatccacaacatttataagatcacccgaattccttttttcaaggggactggaaaaaatttaacgttggactggatagacctgggggagaaatttactgcgccctaatccaggggaaccgttgacttttgaagagtttttaattaccccttttctttggaaggggggaatataatttctccaggaggaatgggggtaaaaaacagggagggttttttttcgtttggaagcggcccttcaaaaaaagggaaaaaatttt

SEQ ID NO: 122469 - DNA, 344 bp, Arabidopsis thaliana columbia
aactatgacgtcgcatgcgcgcgtacgtgagcttggatcctctaaagcgggggggctgggttttttttttttttttttgcaacagggaactttttgtttgtttggttgatacaaacttaattacatgagaaagagtatgtgaagcaaatcaatatattatatattataccaagaaaaaaagatttaataataaatgccacggggggaggaaaaaaaaaggggggtatcttttaggaactcctcccgtgcgggcggggtgttggagacaacgggacaactttccgacaaaggggttgactggcggcataaattggcggggtgcggagggggagaattccgacaaa

SEQ ID NO: 122470 - DNA, 393 bp, Arabidopsis thaliana columbia
  unsure (1)..(393): unsure at all n locations
taccccccncccgccccccccccccctaaaatcgcccactactaacccaatccattatacggaaagctcttcccccctccaataccaatccccaaattaccttttccacccaccgtgtgggggcaaaaaaaaaaaaaacactcctattcttacttaacccctctatttccaatatcccttataaatattactctcccccaacacaatcacccctccccaacctctcccacttctactctctatacaaaccttataacactcctaccacaaccaacactacttcttttcatggggtggggaggccacccaccaacctgagactccacaaaaaaaaaaaatactttattcttcctccctacttcttcaccctccctcctaacttaaccattacaa

SEQ ID NO: 122471 - DNA, 414 bp, Arabidopsis thaliana columbia
  unsure (1)..(414): unsure at all n locations
ttttttttttttttttctnataccaacagtcctttattcaatttcttccctagaaagggtttattaccctctaagtttgggatcatctattaaaaacaaaatctctttaaatccaaaatacatatccttaacatttagaattgtcttctaagacggggccccnaaattaaaagcgtggccaaaaaattcccttaaaattccccgtgtttaactttaccaccacaccctgtccacaaccattaaaggctttttttttaccctttgttttaaaaccattattttttcaccccctatacctaccaaacgattatctttttttaccgttacactccacgtttctcttttctttacttcgtctacacctccacgattctaaaacttttcctgctttaaaacctttttttttttttgata

SEQ ID NO: 122472 - DNA, 370 bp, Arabidopsis thaliana columbia
acttaccccatccgcgtcgtagcttgatctctaacggcgcctgttttttttttttctcatataaaattatttattaataaatattgttactccaaatttaataaccctacaaaccaaaacatattaaaaaattccttctccttactggggatcaactcaaatacttctttaaatcttgtgcatctaatgtctaagcttttgaatcctccgaaccttcggattcccttcacccattacgagcacttaaaccattctcagcccctttgaaatattattatgaaataccattatggaaataggccgttatgatatctatccccaataaggtttctccaaacctcgttctcatccttaatttcctctttcctcc

SEQ ID NO: 122473 - DNA, 358 bp, Arabidopsis thaliana columbia
ttctttccccttcttctctctttagggggcttcaagttcccaatcctggttttggggtttaggacaaaacacaagagaagaatgatgtttggtttaacacaaaaccatgacttttgaaccatcaaattctaatttaaaacggggggggctctcttcaaagggggtgacattcataaaaaaaagggttacccctgcctggggaaccttcccacgcttttaaatccccaccatgaaaaaccaagcttaagggcttggaagtgaggaaccccccgtcctccttttaggagatttttaaaaaaaaacaaggggagaaggctttacggctcacaaaccacttttttcgggagataaaaaaaca

SEQ ID NO: 122474 - DNA, 307 bp, Arabidopsis thaliana columbia
gacgtcgcatgcacgcgtacgtaagcttggatcctctagagcggggcggcttggttttttttttttaaaactttgtttatatacattctccttgtaataaatagaaatgtatccaacacttttcttggtagagaagggaacattacaataactgacctcacaattgttactggaaactctgtaagcttttcattttaggggggtggttaatataggggggcctatttaataaatatgagcgaggggcttccgtttgaagaaactcctgaacaaagcaaaaaaacttgttaaagattggaacaaacca

SEQ ID NO: 122475 - DNA, 528 bp, Arabidopsis thaliana columbia
  unsure (1)..(528): unsure at all n locations
aaatatacaaaaccccccttaagctcangccccccccttaaccaaaaaacaaacctttaagggaggaaaaaataaacccactgtggatttggccccgccttccaaaactcccataacaaaagatattctgttacccgcgtttttaaaggaatctttcttccctcggggtggagaagaacctcntcttaccgcctcctcataaatctaaaaacaccccttcacccccgatttaccttgcccatcccctctccaatcacctggaatcctgctttttttccttaatttccccttcccggtggaaccctctctttctttattctaaaccaaacctcccgccttttttttcctcccatacttcccccccttccttccggttttttaaaaacaacttctcccccataaaattcttatccccttcccccttttttttcccccagtacccccttcttttctttcttaatgcctcctcttcctgtgttggaacctcggaaagaattttttaacccttctttttcttcttcccccaat

SEQ ID NO: 122476 - DNA, 310 bp, Arabidopsis thaliana columbia
  unsure (1)..(310): unsure at all n locations
cttgacgccgcatgcacgcgtacgtaagcttggatcctctagagcggggggcgcgggggttttatcaatattttnttttttatttttttattcttttttttntttttcccgggaagccttcttttatacccctcccgcggggggaagacttctctattaaagaattccgagggggcaaccccccgggcgtattcttctcccggggggggggnacacccgggggggtggttcccttacaaaataaaagcccccccccgcgccccgctngtttaagagggggtgccttttacccccggccccaaaaagaaaa

SEQ ID NO: 122477 - DNA, 548 bp, Arabidopsis thaliana columbia
  unsure (1)..(548): unsure at all n locations
ggggggcacaggggggggagtataccccactctatcccattatttaggaaactcttcccttcaatcccttccaattcctttcacccaggttccccccaaacaaaaaatttcaaatctaattataacccttacaccaccttatttgccctttcttcaaccaatttttcaaccttaaaaaaaccaaaacacccccttccaaaattttcttccccccccaactcttatttacttgcttggaggaaaaaaaattcttgtcnttaaaaacattaaattaaccggaaaatttccttccctcaccctctccaaaaaaaatttcccaccccaaaattcttttttcccacaaaaatcccccaaaatttcttttcccctttttctttcaaaatattccccccccctttcttcaattccttcccttccttcccaatttttcaaaatccccccatattccaccctatttctacaccacctctcctcaaaataacaatttattcctccacccaaccctccccacaacaccccacttctccaattcgtcatttcccccctct

SEQ ID NO: 122478 - DNA, 486 bp, Arabidopsis thaliana columbia
  unsure (1)..(486): unsure at all n locations
agggaaagctgtgcccctgcagtaccggtccggaattccccgtccacccgcgggttcggagacttaaccaaaatccatctcttcnttaaaaatgtaataattgggcccgggcgggttggatcactcccataggcggagcttacatcggtgactcatacatggggcgcttctggacttttactggctcctctctcatctacgtccggggggggattctctttacaggggcggaaacaaaaaaatccctacgacccacatgcaaaaacggggtttccaaaagggcctcctcgttacaaggaacatttttctacatatccctctattcctaggttttgggacccgggaaacaaaacctaccatttccacatttggaggggaccaattccacagttttggctttaaaaaaaaaaaccaaagggttcctttctttaattggggggagtgtaacctttttcttaggccgctggttccaacattggggctcgg

SEQ ID NO: 122479 - DNA, 562 bp, Arabidopsis thaliana columbia
ttgatttaactgacactatagttaaagctatgacgtcgcatgcacgcgtacgtaagcttggatcctctagagcggccgggctggggtttttttttatttttttttttttttggggaactaaaacagataccaagattaggctcttaagggacaaaatactgtttgattgtgagacagaggagttcaaagaggttctaatgattataaaaaccttgaggttgcctactggggatgggaatgcgtggtgtacaacataaacaaccactgaggattgaagatctcgatctaccttgaaatgcgcgtggaaaaacctccttacctgtttcattgccaacaaaacaaaaaatttcgcccatgagtgcataaaacaaatgaagtccgagatgaatgaaaaaaaaaagaaggaagggagggtgttcttgtttctaacttgcctctttaaaggaatggtggatcatgaaatctctgagttttgtttcttctgatgcaaacaatacaatatgactaggcgggtctgaccagtttctagctaactttgatgcaaacctaaagggtttactaa

SEQ ID NO: 122480 - DNA, 559 bp, Arabidopsis thaliana columbia
gcactatattagactatgacgtcgcatgcacgcgtacgtaagcttggatcctctagagcgggcgggcttggttttttttttttttttaacaaagggaattctattgaggaactctctctcctggtgcaagtgccttcctacgtagaccaagagatctatacgctactttgctctctttaagattatttcttagacacaatacgtaattaaagcggggaggacacctaagtgggggcttataaataccctaaggggacagcttgatcaagcctttacaacttgaacagggtgcatacgtagaatagggcaaaaaccatgggctttgatgtcagccgctttaagtaccccatcctgaaaatggaacgaggatactttttttctctgagggccttggacctgaataacctgtcccaatttaaagggcaagacataaacaccttggcaaaaaagttcttgctcaaggcccttaaacggtgggaatataactttaatgatttactatcccgtggacaatattaaaacttttattgacattagcggtccataaaaaaaaagggcc

SEQ ID NO: 122481 - DNA, 540 bp, Arabidopsis thaliana columbia
  unsure (1)..(540): unsure at all n locations
aatttagctgacactctactaanagctatgacgtcgcatgcacgcgtacgtaagcttggatcctctagagcgggcgcgctgtgttttttttttttccaaaaaaaaatgtactaaattgattgaaggtctcctcaaatataaagaggcacggttttgtatattttctccgacgagaagaatagtctctcttctactctaatgcgggaaacaaaagtaagttcattgggggggttgatcaaaacagagacttggcacttgtgatattagctaatcgctctggtaaagcatgaatcctaatacaattgagagtaaaagtacgaaaatcccgaccaaaatcgggacatttgatgcagtacttgcgttactcggtctcttggtttcgtcttcaccatccgttgtcctttccacattccctcctaggcagaagctggaagcagatgtcgcaggagatatcacgtcccacattgattccgggatcaataaagacggttcgggttccacttctgaaatctttgattcgctatagaaaaatggtccctg

SEQ ID NO: 122482 - DNA, 411 bp, Arabidopsis thaliana columbia
  unsure (1)..(411): unsure at all n locations
ttattaaactatgacgccccatgcacgcctacgtaagcttggatcctctaaagcgggggggccggggttttatttatattttcttccctatcaaaacgaaaaaaaaaaaaaggctaggccacttcgcaagtagccccttgcaataaatcaaatcaacatacaagttttttttttctctcaaaaatacactcatgatcaacacactgggggtggttctccaagggatgccatacacaaaaaaattcacccaatatcacagggccttgtgtttaattattatatcaaccttacatagctgcaacggaaaagggantactaatggggttaaaaaaacttggatttgccaatgccattgcaaacattaaagccggaccaaacaaatgtacggcaaaaaagggttntaaaaaaaaa

SEQ ID NO: 122483 - DNA, 586 bp, Arabidopsis thaliana columbia
  unsure (1)..(586): unsure at all n locations
ccaccactcccccccccccgccgcgcccggggggtaagaaatcccgaatacaacccccctcaatanaggggaaaaccggtcccccccccacaaaccccccccccaattaccctttcccaccccgggttccggggactcaaacaaaaaaacattcccccaccctaccaatattttcctttctcacaaaccctttataaaccacaaaaccttcttcaattacattcatttcatccccaaaccaaacctataaaaaccccccctcactcctccttaccccacaattttctattaaagagggggggggcccctcctcccgcgtcgcccctaaaaaaaaacaaaaccccatctcctcccccccaaatcccccccccccccccactgcatattcccacacaaactccacacccatccttcctccaccaaccctcccaacaaacctccacaccaaaccaccacccaccaaatcgctccccccattatcaccccacatatcttttacctacacccacccaaaacaaccacccccccccctaacccaccaaacaccctctaacatctactacctaacaccacaaccaccccctct

SEQ ID NO: 122484 - DNA, 566 bp, Arabidopsis thaliana columbia
  unsure (1)..(566): unsure at all n locations
ctatgacgtcgcatgcacgcgtacgtaagcttggatcctctagagcgggcgccctgggggtttttttatttttcttttttttttttttttttttcaanaaggaaatattttttttttttttcatcaaccnnccttttttggaaaaaaaaaggttttttttgaccggggaattttaatttacccatgggtttttctttataaaggggaaaaaaaggggacaataaagcaaaaaaaccctttctctttttcccggggggggaatatttccccccagggggccctttgggttaaaccctgttttttttgcggggtttttttttcttaaaatggtggaaaacggggttctttttttatttttatggcggggataaaagtttttacccaccgggttcctcccccctttggaaacgggggggttttttttgtgggtttttttttccaaaaaaatttcccgggcccaggtgggcactttttttttttcccaaaacacctgggcgaggggggcctccgaaaaggaaatttttttaatttttttgtgttaaaaaaaagatttttcccatttccaa

SEQ ID NO: 122485 - DNA, 715 bp, Arabidopsis thaliana columbia
  unsure (1)..(715): unsure at all n locations
cccctcttcccnnncgggggccccccgggggggtagatattaccccagctactattcccacttaattaaaggggaaagctcgttccccctctccggtaacccggtcccccaattccccctttcccacccccggcttnccgggggatntacacataanaancaccctttacctttatccaaaaaaagggaaaagatgtnntttgtcttctttcatccaaccaatcttttaccccttggtgccccggttcattattggggttggtaccctaccctccattcccccttttccaaccaacccagattgttttaacccccaccccctccattttttccttttggtgggggggggccccaaccccacccttgcgaggtttccnctaanaaaaaaaacacaacaccgggcaaanganaacccccccccctttttcccccattctcttttgnccccttgtgtaaaccaattttcctccccccccttctaccccctccctttttatcccggggaatggccccctatttggaaaaaattttcttccttggccccccccaccccttaaaaaacccctctttcccttccccccaccggttttttttcaaaaacttacccaatatccaaggcccaaatacactttcccaccttttttcaaccactttcccctcgaacatactctccccttttcctccccgcccttttcgaggcccccaaatttccccc

SEQ ID NO: 122486 - DNA, 354 bp, Arabidopsis thaliana columbia
gacgccgcatgcacgcgtacgtaagcttggatcctctagagcggggggccgtgggtttttttttttcaaaactttgtttatatacattctccttgtaataaatagaaatgtatcacacactttcttggggaaaaaggagcattacaataacctgccctcacaatgtgttactaggaactcctgtaagctttccaatagggggggggtgtacaatatgtggggggcctatttaaaaagagtgtgagcgagggcctccccgtttaaaagagactccatgaaacaaaggcaaaaaaacttggttaaagagtgggaaccacaccagcgaaccgtgggtgggaaattattaaaagggca

SEQ ID NO: 122487 - DNA, 494 bp, Arabidopsis thaliana columbia
tacttcctcaattcgctagagacgaattcagcgtggattctaaagcccccatcgggcgtggagttccaaactcgtaccctctccattgaacaaaaaagcattaagggtcaagatcctgggatacccttttttttcaagggggggggggggggaaccccctttacccggggcggcattccttaaaaaaaaagagagcaggttgggcgcccatttctttggttttattgggtgtccaccaacaacgttaacacccttttgaccatattcccccggtggcttgaaaaaacttgggggccccacccttaataaaacacatttgccattattccttttggggaaacagaggctggatttatcaagatccaaagggctgtgtcccgctggagagaccctaaaagagttgtggctcggaaaggagggggctctctttttcctcagaaacccttttgtttataaacaccaacccacatggtcaagaacgttctttaaaccct

SEQ ID NO: 122488 - DNA, 383 bp, Arabidopsis thaliana columbia
  unsure (1)..(383): unsure at all n locations
ccttcatattggaacttccctcgacgccgatccttcccaggtcgacctataaacctaactttctatcttttggtttacatcacattttttactccccgatcctaatgatcaattttcttaccttcaaatctccttccaaattttttctacgatctttctnncaaggttaanttaccacacatatnatagttacccctatccatatactaggtggatatttttaagagtaaatctccaaaaaatttcctacatttcctgttaacctacacacgaaaccaaaaaaaaaattacccaaggtgatgcatcttaacttattcttattggtttctttcacccatacaataaaaacccaaccttccccaatacaatactatttccaaaaa

SEQ ID NO: 122489 - DNA, 447 bp, Arabidopsis thaliana columbia
tttaggggaagctggtcgcctgcggtaccgtcccaattccctgtccaccccgggggtgcggggaattaatgatcacccctaaaaaaaaatctacaaacttcctgttctgggccctaccttaaacttagaccaccacaagttggggttttccttatttatggccaagggttcaaaggtaatattttaaactgggggggggcctctttttgggggtgtgggtaaaaaaaaaaaaaaagatcccctttaattccttttcgcccacccaaagtttcattgggttggaaaaaaattttgtgggagctttttttttctttggaatttttaattccccttgaaattttttgggggaggggcgcaaaaccttttggaagacgttttttcgccccccctattggcttttcacatggaacggcccccagaaaaaatagtttttttcccctgccattt

SEQ ID NO: 122490 - DNA, 405 bp, Arabidopsis thaliana columbia
ctatattaaactatgacctcgcatgcacgcgtacgtaagcttggatcctctagagcgggcgccctttttttttttttttatagaaataacaaaactttacgccttgtgatgtgaatacattaataaaaaaaaaagaaaaaaaaaagagtttcacgagtacacttttaacttaaaaacaacaagaaataaaaattttaaaagtggggctggggggggcctaatagagctaaacaaatggaaattaattgattttaaatttggcagaaacgtaaacttagagatctggatctgtctcgaagaaacaatatcaccagggtcgctaacgaaatgatcttttttaatacttgggacccaaactctcaccaaggggatcggtattgctcctgacgtttttggttttttgag

SEQ ID NO: 122491 - DNA, 462 bp, Arabidopsis thaliana columbia
  unsure (1)..(462): unsure at all n locations
aaaaaagccttgatgtaactgacactatattaagactatgacctcgcatgcacgcgtacgtaagcttggatcctctagagcggggggcgggtgttttttttttttgatgaaaagatttgattgatacaaaaatcaaagacaaacaacatagccgaatattaaaatagtgaagaaataaatactccatatgacttaaactttaaaatgggcaagaagaaagagatantttccgggggggggnananaggacagaacaccaactaaaaaaatttaagaaatgtaaatcgctgatagacgacgggtcaaaatcagatcaaagagggccttgcaaacaaaaaaaactttttttncggggatactagtacgggagagcaaacacaggaacagaaccgactttttttctccctttaaagaaaatcggccacgttcaaaggggagtttttcacaaccacatgggggaat

SEQ ID NO: 122492 - DNA, 496 bp, Arabidopsis thaliana columbia
  unsure (1)..(496): unsure at all n locations
ttacgtgacctatataaaactattacctcctgccccgtacctaagcttggatcctctagagcgngggggccttttttttaaataaattttnttttttttntntttttttttnntntctttttcccgccacaaaaatcttttaataatataactttaagagagagccgtgaaaaccataaacaaaaactaaaaaaaaatcatttttaaatttccaaccgggtgagtccccaaaaattttgcaaactttaaaaaaaaaactgaaaaattaancccttctaccccctccccgggggggcacgtgaatcttccaccgttaaaattaccaaacctcacccaaatcaaaaaaaaccctttaaaaaaaaaaccacccaaattttcttggggttaaaaacggggaaatttcaaacccaaaaatttttttttttttcccttcttttcgccggaaacttttatattttttcaaataaaaagttccaaatcgctaataaaaaaaaaa

SEQ ID NO: 122493 - DNA, 297 bp, Arabidopsis thaliana columbia
  unsure (1)..(297): unsure at all n locations
aagcttggatcctctaaaccgggcgccctgtgttttttttttttanaataaaaccanattgattcaagtaaaggccacacaaacctatatatgtaaatcaggttcacctctcaaattataggtctacctgaacataaacgaacaagtgaaagaattgcatcaaatcaagtaacgggggggggatataanagaatctggataaacataaatacctgattagaagaacattggttcctttgtctaaacaagtagatttcataaaaaaaaacttaaacttgtcaatcaaaccaataaaaa

SEQ ID NO: 122494 - DNA, 485 bp, Arabidopsis thaliana columbia
  unsure (1)..(485): unsure at all n locations
cttttttttttttttttttttttttgataaaaatccgcctgcttgggactcaatttaacaaaaaaaaggcttgaattcaacaatacaaccaactcttaatactctaaaaggatcattcttcataaccaanacctaacaaaaagagacagggggcctccacattcaatcttctaacactaaagattggcttcaccatcatcgactgaggcacaatcaaaaccaattctgattagaaagtttctacaaataattctccggtttcccttcttcttttcccttacaaatctaaaattttctctcttcttcctcttaactattggaatctcctatacaatttctttagatacccccttatttcttcctttcaaacccaacttctcaaactgactaatccataattaaaaaaaaatgtataaccttacccatccaactcttttccacatgaactctatccccctgtacaaacaatataccccctttttaac

SEQ ID NO: 122495 - DNA, 188 bp, Arabidopsis thaliana columbia
aacttgacctcctccaccctactaacttgatctctaaacgggcgccttttttttttataccaacaatgtgtatttttactaaaaattctctttttataatctgtttcatacccccccacactaaaaattaccaattcatttacaaataaaagggtatccctttcttttaggggttacacttacatgga

SEQ ID NO: 122496 - DNA, 521 bp, Arabidopsis thaliana columbia
  unsure (1)..(521): unsure at all n locations
ccccttttttttttttttttttaacaaacaaacttacacttaaccacatattttggttatcatctcataaaaaaattcattgcaaatacaaaactttatatagttatatattacataacccttatcaaacattatgttatgtgttgggggggcttccctttggaaaatatttcccctaaaatagccaaattttatgatctcaagtgcttccaccatattatcacatagncnattaagatctttaaatcgtgtttttgtcaaacaactaaattgattacaatttttttctccctaacttataaaaatggattattaaaagcttgtcctccaactaatccacttcctgcaatatataaaatcgggatggaaaaaaaacctttttctttattggggaccttttccctttttaaaatacccatgatgtcttgaccaaattttccttttttaaaaaaagcttttactgccctttcctcaaaaaatttcaagggcgaatttatatattccataaaaaaaaaaacctt

SEQ ID NO: 122497 - DNA, 577 bp, Arabidopsis thaliana columbia
  unsure (1)..(577): unsure at all n locations
atttaactgcactatactagatctatgacctcgcatgcacgcgtacgtaagcttggatcctctagagcgggcgcgctgggtttttttttattttttttttttttcctaaaccancctttattttttcccctatctccccaaacacacccataaaaggggtttaaaaggttttcacaaacccaccaaacggctaaagaggcttaacaattattttacaaacgggggggggtgcttttttgggggggtttaaaaaaaaaaattctcctaaaatcctttccgtgtgggtagacttaaaagaccaccccttctgcaataaaggttttggggtacatttattaaaaagaaaatctccacgcgcctctttttttttccgaaaaaaaaataaaatgtttttctcacacatctcttttcttttaaatctattttttttatgggttttaaaactaaaccccctcctaaaaccataaaaaggaaatcccgcgaaccacccttttttttaaaaataaaaaaaaggttttctttgactccccatgtgtttgaaactttttttgtgggttggcttatcccccaaaaaaaa

SEQ ID NO: 122498 - DNA, 408 bp, Arabidopsis thaliana columbia
  unsure (1)..(408): unsure at all n locations
gacctcgcctgcacgcgtacgtaagcttggatcctctanagcgggggagcttgtgtttttttttttttctcantaataaattagcatcttatgaaccaaaacagggttcaaaggttcaagtaaaaaatttgtcgaaacagaaaacaaatcctaatgcctttggttaggttcattggcaagcatcataccttgtaagcgggggggattccaagaggggggaagcatttacaaatgactatggccgttgcttcacaaagaaagagacggctcgtctcctcggccgaaccattcacctgacaattggagtaaaatttggggaactcttcggataaatagtaaaaggtactcgcaaagcacattccggaacaatgggggggcacgcttcctccaccgtgttaaaaaactgaa

SEQ ID NO: 122499 - DNA, 583 bp, Arabidopsis thaliana columbia
ccctacctaaacctgcatcctttaaaacagggggccttcttttttttttatattttaaaaaaattccctttttcaatattccaaaccaaccctatttcctaaaattaaaataatcctaaattacaaactttcattcttccttaaaacttaaaaaatccctcataaaaaaaaatttttttttctcccggggggggggaatccaccagaccgcccccccacaaaaataatttccaaaaacctcaactccttttcacccctaatatccctcaaccaacaaaaatttactctcctttcaaaaccaaataataccctttcttttcttccgcttacactctcaacacccgttatccacaaaacaaccctcttattcattcgccgtcttcttctctctttcttctctaaaaaataacactcttccttctttaaaagccttttttttaccaccaccacattctaaaaccctctcttatcatataaaaaaacaattttctcatattcccccggtgttaaaacaatttttacccaaaacaacctttcctcacccaacacttcctttttcatctaacaaataaaatctactcca

SEQ ID NO: 122500 - DNA, 439 bp, Arabidopsis thaliana columbia
  unsure (1)..(439): unsure at all n locations
ccccccccctttccccccgccccgattttttttttttccccgcgggtgagggggggggaaaacacaaaaatctcctttttctccttctttcttctttccccttttcacacggaggccagcaaaaactcgcccgctcccacaacctcgctcccccatatacagccccctctttcttcaccacacccacgccttccttcttccccccaccagacaatttttttttcaggagagatgggcgnccncncccccggcgcgcctctcaaaaaaaaaaaacgccccactcctccctccccgccggcccccccccccccctcgccccccaacatctaccactctcctccaatcccccctctactacaactatcaatcagcccgctctcccccgcctagcacacccgcttcaccccgttacaccgcccttctctcctcctctcagccc

SEQ ID NO: 122501 - DNA, 598 bp, Arabidopsis thaliana columbia
  unsure (1)..(598): unsure at all n locations
tcccctccatttcccctccccttttccccctggggccccgcccccccacaaaaatattttatcatcatccccttcccctctctttctaaattaatttttttttaaaaacacccatttttttaatcttcgcccttcataaaaaaaaaaaaaaaaaaaaacccccccccccttttttaaaattcccagggggggggccccccntcctttgcccccccataaataatattttggcggccccctaaatttcatttccctcgccctccttttttccaccctccttaccttaaaaaaacccttggccttccaccccattttaatccctttcaaacaacatcccctttttccccacttgggttaatatccaaaaagaccccgaaccatcccccctttttcaaaatgttccccccccctcaactccccaattcccccccccccctctttaacccaactttttaccgccccgcgcgttttgtttttctttccccccatctcttacccctcttcttctcttcccaacgctcttctaccccccgccttcctttaccttcctttcgccttttctttctctccacccttctcccctcttttcccccactaa

SEQ ID NO: 122502 - DNA, 142 bp, Arabidopsis thaliana columbia
ctcatcactacttaggaactttccctcagaccctcccattcccggcggccaggcgtcaaaaattctatattattgttgcaacaatcctcttttctccttatccgaagtatcacaaaaccctgtaccgtcttttctctccccc

SEQ ID NO: 122503 - DNA, 370 bp, Arabidopsis thaliana columbia
  unsure (1)..(370): unsure at all n locations
ccccccaaatggtttcctctttcccccctccccttatttntttctccctcccaacaaatnccctcattttacctaatttaactttttgaataacaatccccttattaaaatcccaaccactcaccatccttcttattccccgttcttgatgtaaaaatttttaccttttaccccctcaaattcacttaaaccacctttcttcccccttctccacaaaaactctcaataattataacacctcctctccccccatgcaaagcctcccccctcacacacccttcctcccctctaactccccccctgccttcctctatttccacccacccacactcctcccatctcctcccaacacccctctccttctctcttt

SEQ ID NO: 122504 - DNA, 290 bp, Arabidopsis thaliana columbia
  unsure (1)..(290): unsure at all n locations
atttttaatagtaaatacaaaacttcttcagtttaaagatttccttaactttggggtcaataaagttggtnaaaaaaaaaattagaaatgtcctctaaatgttataacccaaattaaaacctcaccatgattcctaaacttctccaacctttaatcgggaacaattttaaaaaattcctttccaaacaggaattccaacccctaggacttctcctttttttattgtaaaagtcttttcctccatttcnaaagggtctttaagaatggttggaacccaatgaggccccaac

SEQ ID NO: 122505 - DNA, 234 bp, Arabidopsis thaliana columbia
  unsure (1)..(234): unsure at all n locations
cgggcccggaattccggggggccgggggggccagttatataatcaaaaagcgatgnggggattttctctctcaattcatcccaaacgcgggggaccattctctttcgggtcgggtcggttcttctcttttaaaaacctttcttcnaaaagagactatctctgggggggggccatctttggggggggtctgcatatcaaaaagggggggacattcggagagtgaaaggggcgggg

SEQ ID NO: 122506 - DNA, 496 bp, Arabidopsis thaliana columbia
ggcgcatacccgcgcgcccggatagacgcgtgtagatccaaaatttttcacaaacgggggcgacggcgttaaaataacaagaattccgctccctcccccataccaaccaaaactaacagtcacccgccctcccaacaaaataataaccccaacatcatttcttatttttccagctaatcctgagtcccacaccccccaagcttccgattttttttcggcgggggcggggtgagatctgctacgtggtgtcatacgattttccccattctatattacaggctgtcctcgccatctaaaactcctatctaattactttgtgtttaatcagtgttatccttcacttcctaagtaagtatgatttcatactactcaacatgggtggggtacctttgcgatggtcgaccgcatcgctctaaaaaacatgaaacaatgccacgagacccactaccaattactccttcgttcttcgatctccaaaacgcgaactcacaaacca

SEQ ID NO: 122507 - DNA, 547 bp, Arabidopsis thaliana columbia
  unsure (1)..(547): unsure at all n locations
ccccccccgagtttggggggggttacaacccaaaaacccccccccctctcctccngccccnngggggcgggggcgcgcggggcgtgncnngngggttcctggggcgctccctccttccccttagaggagaaattttttttcccggagcccccccccttttttttttttaaggggaggaagctttctcacccctttttcttcttcggggggggggggcaccccccccgggggggtccccccccaccacgcaaaagaggggggggccccctttttttttctttccggcgggcccccccccgtctgggcccctccctagaaaattccccgggttttgagccccccccccccgcccttggcgccttttgcacccccttctctttttttgggcggggggggggggcggcggcccaacccccgccgcctcctcccctctcccggggggatctcaccttttcttgggccgcccgccgtcccgggccgcccgccccttttctctcgtccccccgggggggccgcccgtcgcctcgtttcttcctcctccccccgg

SEQ ID NO: 122508 - DNA, 381 bp, Arabidopsis thaliana columbia
  unsure (1)..(381): unsure at all n locations
aaagcccgccgcccccgggggtatataaacactcttcaatttactcctcccctcctacttatcttaaccccccctggttgttttaaaaaacaaaactttttttaaaaccctatccaatanaacccctttttttttaccccaatttcatctcaaatctctcatcttaaattttaccattaaatttccataaaaaagggccccttatcaattcttttacaaacttggggggttaaaaattttaataagcttttctccaaaagaataaaaaaaactccccaaaaccataaaacaaccccccctcttctttcaaaaaaaattctattttttttttttttttccaaaacccccaccctttatttctaaattaccccctcccccccc

SEQ ID NO: 122509 - DNA, 482 bp, Arabidopsis thaliana columbia
aggaaagctgtcgcctgcagtacccgtccggaatcccgggggggcgggcgtcgagaaattaaatagaatttccggataaatctcttattcccggggcccctttatccgttacaatggaagatttattagaacttcccaactggtaaccatttctttaccataaatatactacgggggggggtcttaccggggcgaacctataaaaaaaacctaaaaaaatttaaagtccttctaaaattttggctccgggattgaaactgcattaaaaaaatgcgtataggaagaacaatttttttttaaaacatcccaggtgtttttgattgaccttctagagggaggccattggatttcaaaggggtgctttaacttaatgtctaaggtctttgggggataatacattttttatgggaaggtaccccctaacttttttagccttaaataacctactgggggctgtgcccttcattttaaatttaaaaggg

SEQ ID NO: 122510 - DNA, 485 bp, Arabidopsis thaliana columbia
tgcgcggggggggggggggggggggactattgggacattcttcaaatgtggggggaccgcccctccgtaacttaatccttaaaagctccccttgagttgggggtttaaaaaaaaaccacaccctttccccccctcacacccgggcaacagttccgccccactattcccctcaacgcgggcgagacgtgacatctcttaaaaaaaaaaaaccaacgccaccttcttttttttaggggggggggcttcaaaggggggtgtttaagacacaatcccccttccgtcccgcccggcacccatccggggtcttgccccttctgcaaaaacggtcggccggaacaccaacactcttggccgcccgaaaaaagaccaccccgctgaaacctcccacacgggcggtcggaacgccccagcacacacaacacgcgcctcgtttacacgcgacaaaggcgaggccgcagtggcgcataggagagggggggggagat

SEQ ID NO: 122511 - DNA, 586 bp, Arabidopsis thaliana columbia
  unsure (1)..(586): unsure at all n locations
gttgcccctccggggccggggccctatttcccngggggggcgggggggtgccattaatatttcttccccaaaccaccctcccacttcaccccttcttttaaaagagctcggggcnccaagggtgattgaatggcgcggctcgtttatctctcgccccgagaagaaaccaatctctgtattggttgtgctattaaaaaacataaaaacaccccttcctcccctggggggtgtggggaccccccgggggggggaaaaaatatattaaatctggggttttcccccccccggcccccgcgccaaaaataaactcccctcttaggcgttttttccctcgtgggagagcgctgcgccttcccccgagttttagaaaaaaaaagaacccctttccccagggggtcgtcctacactttgaaaccgctgttccctccctcgctcttacccgcggggggggctttttttgggaggcgacgggggtgctgtcccctcgcctgtcttttctcttttaacgcactaaccgtgggggcggttccgtcttaaagaacaacacactccttgtcctctctgtccctcagggtgttgggtcggc

SEQ ID NO: 122512 - DNA, 518 bp, Arabidopsis thaliana columbia
ccccttaacttaaaatttaaaatccctctcacaaccccccccctttggttttttttttttttttaaaaaaaccaatatatacaaaccctatctcccactctaataaaccctcaaaacacaacaatacactttccccctcttctccacccccaaaccctttccaactacctaccaccccctcccccaccacatcaatccatcttctcaattaccaaattctccacaaacctactttacacgcttccataacaaatctctcccaatcttgagggtcgtcccctccttcccacctttttcctctctatccttcaaaaaaaaaatacccacccgccccttttatccccctcactacaccccaccccccaatttatacaaacacaacctttccatttatctctacctataacaatacaaacactcactcccacacattctcaccatcccccccacaatctttactatctcctgcacccgcctactctcacacaaacatatccatcacaccaccacacacactc

SEQ ID NO: 122513 - DNA, 458 bp, Arabidopsis thaliana columbia
gggggcccgcccccctgttagcttcatccttcaactccccctggggggggggggttaaaaaaaattcctctcttcttctcctcctgatcgggggcctttccccgcggagagtttgtttgcggttttggctgcgggttcgaattttttcacgcgggttggggcgagaccgtaggcggcttttttttcggggggggggcgcaccatgggggggcatataaaaaaagtctcgcggctcttgtgtgcctgttgcgctcttcgcgtgggggggccgtttttgttttcgtttttcgctgtggggggtgggtggggggctcactgggcgctgtttttgctccgtgccgagcgcgctcttttttgttgggtacccaccgtcggtttgtcgtttggtcccggggtgctgggtgtggggtcggtgcgcgcctcgggttttcgtcggggccagtggcttgtttttgtgt

SEQ ID NO: 122514 - DNA, 244 bp, Arabidopsis thaliana columbia
ggcgaaaacaacgcccacgaagacgagcacaagcaaagaaaaagctttttcgcgtggtgggggagggggagtaaacaaaacactccgactggatacctgtaacaggggctggtagtagctgaatctcacccccaccaccaaaatcagcacgcgagacgctatacgtacgagatattgtcgacgtcgtcgtttgcgactgggcggggcgcgctaggcgagagaaggacctttttttttctcgtgc

SEQ ID NO: 122515 - DNA, 607 bp, Arabidopsis thaliana columbia
aaaaaaaaaaagggctcttttaaatccccccccttcagcagcgaaaaagaacctcaccaacaaaccgaaggcaccctttatctccggggggagtgggggaaaaaaaaaaccccagccagggcgcgtaggaatagcacacctaaattaataacaagaccgctcaccgactcatacacagcgcattcatcagacgactgcgggaacgatacttgcatagaagccccccccattctttttaaataagggggggggagaccccaccatcggcccccccgcaaaaaaacacctcgcatacctagccaatcgcccagcacgccgttcacaaataatcctcctgcgcgtcactccccctccgcacaccaacattcaacaaaactaaaccacacccgataccccacacactcctcttcacaacaacacatatcacacatcttatccacataccacataactccgccactgatcacagagtactacgtacacctccactacacgcatcgtcatccatacgtatacctaactttattacaccggaaagtcgctgttcaactatgactgcttctcgcaactcacgtccaggataccctgttgcccccttgttgggagt

SEQ ID NO: 122516 - DNA, 575 bp, Arabidopsis thaliana columbia
  unsure (1)..(575): unsure at all n locations
tccccccccctttttccccngggggacgggcggtaaaacaaaaaactttttttttttccccttnctcaaaccacttaaaaaanaccccccctttttttctcattccacttcccctctttataaactcctcccactcccttttccttttaaaacccccaatttttttccaaaagggggggcccccnngggcctttccaaaaaaaaaaccccccccccccttctttaatcctcaaacccgtcttcaaacttttattctcacaaccctttccctcccaaaaaatacaaaagcgttgcttcccccacccacaaccagacaatggcccccctctatattttccataaaaccccccgccgttctctcttttttgagaccttttcaccaaaaaaacccatcccccctttttctcttaccatctctgcctatcaacgcttttccttctcccttgctcccctcactaatttttacaacaccctaaatctcctccccacacccccggctctccttcctcatttttttccttttacatacctncactccttcctccctcttctctcctacaccctcnctacccctc

SEQ ID NO: 122517 - DNA, 530 bp, Arabidopsis thaliana columbia
tctattcgattaatttagggaaagctggtgcgcctgcaggtaccggtccggattcccggggggggcgggggcgtgcaccacacgtccaggttccaacttcttcttcttcttaacaggtttctcgatatttttgagagtgtttaaccaaattaaacatttttaatcaattttttttgggggagcagacaaagagtctatccatgggggtgggggtacccagaggggaatttggtaaaaaagccaaagccttactctttcatgggacttaagagcgtggaatttgggtaattgaacacaatctcccttttccaagaacttccttatcctttggggacttctactccgaaacattacaaaaacagtgtggtttttgaagagatttttaagtggggggtggcactgaggaatcattattggcaaaaaatttactagaagaatttcttttttgaactttcattagggagggggtaaagtcacttgccattgtatcagagaaaccaaaggttggtgaaaattgggggggagctaat

SEQ ID NO: 122518 - DNA, 458 bp, Arabidopsis thaliana columbia
  unsure (1)..(458): unsure at all n locations
ggggggccccccgggggggggaaaaagcaccgtttcttttttttgtccttttttgtctttggagaaagcccccttcacacaacctcccctctcttttnttaagagaagatgtgggaaaaatactcgcgggggggttgtgttttaaatattataaaacgcgcgtttgtttttttctttctttaccccaaactttttctcctttcgccggcggtttgttaaagagccctctatatctttcgcccctctttaaaaccccctcttcccctctttttagggggttttaaaaaaccccatggtggggctctttttttgccccaggttttttttttttggggctcttttttttttgtgttagccccgtttttgtgttttcttttgggttggggggggcggcttttttttggcccttcttcttttgtgggggcacggcgggctccccccggcgcggtttttttctt

SEQ ID NO: 122519 - DNA, 119 bp, Arabidopsis thaliana columbia
  unsure (1)..(119): unsure at all n locations
atttagggaaactggtacgcctccaggtaccggtccccaattcccnngtgggccacgcgtccaataaatttcantacctncaactcctttttctcaactttccaatcatatttctcaat

SEQ ID NO: 122520 - DNA, 660 bp, Arabidopsis thaliana columbia
  unsure (1)..(660): unsure at all n locations
ccacctcccctccccccaccttccacccgccccccccccggcaattaatttagagacaacctctcagcatatcntttgaccgccccccttccctccttaccttaaatcttttcttccttttcaactcttcccccctttggtgttgtggactttcaaacaaaaactcacacccaatctccttccccttttcttcattacccacacactttttaacacaattcttttctctttccacccccactccctagctccttttccccctcttcaacacaaaccatccctatctcccagggaccaccccccccccccctcccacctcccacccccctttttttttcccgggggggggccccttttttttggggggtccccctcaaaaaaaaaacaccctcctccctcccaccttttctttctccccccccccccctttcttgcctttctcttcttttttttccaactctttcaaacggatctttttctaaacctttacaatttgtctcctccccccatctcacccccccacccccctcccacccacctcccctctctcttcccttctttcttgtacctcccccccacttcatcttcctattcccccaccctcttttataatccgccacacctcccccccttctttccacacacaactcgccctccccc

SEQ ID NO: 122521 - DNA, 451 bp, Arabidopsis thaliana columbia
  unsure (1)..(451): unsure at all n locations
nnnnnnnnnnnnnnnnnnnnnnnnnnnnnnnnnnnnnnnnnnnnnnnnnnnnnnnnnnnnnnnnnnnnnnngggagccgggcgtccngagcgagtgaggattanccacaatgtgtcttcctctcctctatcttctgtttctggcttcttgcttgacacatcaagctttaggccgtggtcgtngccggccatcaccggaaggaagcttggatccttcttctggggggggcggantcgggggtgtctactgtgacacgtgttctatcaacactttctcaagacaaagctatttcttacaagggggggaagttcatgtgacatgtagattcaaagcaagttcaccaaanacaggagagggagggaacatatcagtgaacagaacaacaaacagaaggggggtgtacaagctcgagatccctcacgganatggcatcgattgtgtcgacggaatc

SEQ ID NO: 122522 - DNA, 183 bp, Arabidopsis thaliana columbia
caggtacccggtccccgaattccccgggtggacccacgcgtgcatgtatttctcactcactcgccgctttctcttctcttcttctggttaacttctctcctaagaataacaccactgcatgtttctctcttaagacactccaaaccatttctctccaaaaatagtcttctccttctggcgggg

SEQ ID NO: 122523 - DNA, 196 bp, Arabidopsis thaliana columbia
  unsure (1)..(196): unsure at all n locations
ttccattaaccctacaattttcccgcctttgtctcactctcttnccggcttgcacctgggcggggactccatgggttcaaaagcagcaagcctcccgccgtccgggtaccgggggggganaacctccggggggtcngattatatacccgccgatactggtgtgccaggcctacggagggcatcaaaatttatcctc

SEQ ID NO: 122524 - DNA, 316 bp, Arabidopsis thaliana columbia
  unsure (1)..(316): unsure at all n locations
cctctactgaccttaccccccttgttttttttattttttaatccccccacctttagatagaaattaattatttcatcttaaaagaaatctcctaacttttagttcaattttacacttcctttttggagaataaaactataaatgagggtggtncataaacccccccccaaaaaaaaaaaaaaacttcctccctccctctttttnttggcaaccttatatgatcctctttttcctccccaaactctttcattatcagctttttgttaccattcattatgcccccccccaaaaataacataatccatccccccctttt

SEQ ID NO: 122525 - DNA, 535 bp, Arabidopsis thaliana columbia
  unsure (1)..(535): unsure at all n locations
tctaatacgactcactatagggaaagctggtacgcctgcaggtaccgggcccgaattcccnggtggagccacggcgtccaggagcttgcaaaaaaaagtcacagggcgcgagataaaataccgaagctagcggaaaagcgttctatttcccagcggatccctagggtgtggattctaccgattttagggggttaaatctttgagagtgggttcgttatcaatgcgaaggggggggtcttgcaatcaccaccatctcaggcataggccggcttttttagccaaccatgaacctaaactctctactacttcctcctctgggaccttccccttgaagacaaacacttgaaagtgtagcgggactgggaatttgttgttttgagagttaaagcttatgggttcttcttctgattcctctgcagattcctccacgcctcccaatggcgctcgggagcccaaaagcagaaggggttttcacttggagtatgttcaaaatgggaagcccganttcatggagatgttccttaaaccggcccct

SEQ ID NO: 122526 - DNA, 330 bp, Arabidopsis thaliana columbia
  unsure (1)..(330): unsure at all n locations
gatctactctanctttatcttactttaacaaaaatttcgcattagcttctgtgttattgaaaaactaaccttaattcccacattgggggcgaggaagattacacgggtgatatttttatcaaggggggggtgtttcacaaatgggtgaaaccctcataaataagcgctagaggtttaagggcaaaagctccaccccattatggagggtgatttccttcggccgggggggggggcctccctgtgcttcgttggccggaccatattcccctgacacttgctccggccaccttttattaacaaaaaacctctctcttcccccccttggcttga

SEQ ID NO: 122527 - DNA, 546 bp, Arabidopsis thaliana columbia
tctaatacgatttactatagggaaagctggtgcgcctgcaggtaccgggccgggattcccggggggggcgggggtgcgagttaatttctgttctaatgaggtgcgggttcggaaaactctacaacgctggccactggggacatcatgtcaaacattattggggcggtaccaaatacattatgctgggtgaactttaagccttatttcttgcagggggggggggaattttcgggcgctcaaagggataaataaaatagggccgagggggtcacacaaacatccctttattttccctgtttttctgatcgaagaaaacttttcctttttctttgtgtttgggggaatcataaaaacgggcaggcgtaaaaaaacaaagggcgataatgggaaggggggtccttttgatttctttggaggaacaagttgagacctgtctggccctaactggagcctgtagaggtattatttgtggggggagggaatcccttcaaaaacggggaccgcctcgaaaagaacccccttttggttcccgggggggaaaaacct

SEQ ID NO: 122528 - DNA, 449 bp, Arabidopsis thaliana columbia
gttttttaaagaaattatcctcatataaaatctcaaccaattaaatgtgaaccaaaagctggtgttttactctgaaaacaaaaaattttgggggtttaacctcaaaaaataaaaaactacaaggaggcctgaaattaatggaagggggggggtgggttacctttttgagggggccctaaaaaaaataataacccacctgggttcatttgaaagggcgttggactctttcaaaacaacttggtttttctctcctggaaaggaggttccttcaagttccccctcttggggtcttgggaaccagtttcacgggttttctttgggggggggcaacacaaataggtgcgaaacctttcttggacaactcctaaagggtttaatttcacacctttttttaaagaaacccctaaggaagtttaaactttttttggctattttttcccaaaaggttt

SEQ ID NO: 122529 - DNA, 558 bp, Arabidopsis thaliana columbia
tggaatcggcggggcgggggggggggggccttttttttacagccccccggcttttataagaaaacgagccctctgtcgtattaccagcgacgtccttttttcccggggcgagggggggtaaaaaaaattacactcatctccctattggttactacagacgatctcccgtacacgtcactacactatacctcccggcgactgcataatcgactcgtttcgcgttgctaccaatcaaggccttagcatgttaccacaatttttttttgggggggggggggcacaccacccggaatgccatacaaaaaaaataaccttcattccgacgagttctggccgtgtacgagcgcgtttccattgcggtacgcttaaccatcctatcgtttgcggtaccggggctcgctgtactggcgtcctcgattgatgagagtcttggagttgtccgctccgctcgatggcgccgcgtcgttccccgcgcagtatagtcccgccgctatgatagcctttcacttgtgcatcgccgcgggcccgtgtgcgacggagtgcgtattgttattaata

SEQ ID NO: 122530 - DNA, 500 bp, Arabidopsis thaliana columbia
tttcaaaccccccccttaaccaaaaaaaatatattcactccctttattcactctttcttttcccctcgggggaatgggctcaaaaaaaaccacctcctcctccaccccatcacctcttccctacctatatttctccatctttaacatatctgaactctcaccatcttacacatcttatctatacccccctacacccctcacctataccctttttatcaacctggggggtgtgcacccccttttcatttccttcctcaaaaaaaacaaccattccctttccaccatttcacttatcttttcctctcctctcgtaacccactaatctcataaattactattcacatttacctccccctatcttaatcacattacttctttcttattatctctacatattatctccctctcctctccttcttacctctctattactaccattcccacccatcaccaccccaatactatatcccttttccattctctcactctttactaattct

SEQ ID NO: 122531 - DNA, 517 bp, Arabidopsis thaliana columbia
  unsure (1)..(517): unsure at all n locations
cattcacctccttacaaacgaccacaacaatacacataataccttcacattcgagccgtcccnccaccaattaccgtacataatgaattcatctctttaactgggggtttgttttcaaaaaaaaactccccccctcctttccgctttataatacaattttatagtgcgcccctcttatctactcctattccctcacttcatcccttttctccacactttcatattattgtttctatcggttttttctagctacaagtcttttctcctaggggggtggtccttatattaggctcctctaataaaaaaaactctctacttgcaattatctctacactaattaacactattaccctaatcaagtaatgcttatattacacattataatactctattatctgatacttcccttgattttcatctctcttattctctcacatattttttcaaatatgtataaattatctccgcccttagccaattatccttgtacactaatctttatcattatcaacactta

SEQ ID NO: 122532 - DNA, 455 bp, Arabidopsis thaliana columbia
  unsure (1)..(455): unsure at all n locations
caactcttcccccttcaggtccccctcccctattccccgntgggcccgcccttcaactaaaaatccaccccttnnttccaacttcttcaaaaaaaatttaaccccccacattataaatttccttatctccctacatattccctttctctattacaaatttctaaatttttaaaaaaaattctcctttttttcatccggggggtggcccctccccccggcctcaaaaaaccattatttccctgtgctccttaaccccccccctgcaaagtgcttccctttctttcaaaaccttccttaacccccattcctaacctctctctctaataatcattttcaaaaacaatttcaaaattctacttctaaccccttctcccccccttacaaaaaccctctctctttttttaaaaaaacctttttcttcgtcccaccacacaccaaaaccctccctcttttcc

SEQ ID NO: 122533 - DNA, 366 bp, Arabidopsis thaliana columbia
  unsure (1)..(366): unsure at all n locations
caaaacaatacgcaaaaaaaaaacaaaaccccccgaccaagcgcttttttttacgcggtgagggggccnctccnaaggggggggccccaagaagacaaaaactccactaccccccctccttctcccccccccgccctccgcttgtcctctgtgtgccccccaacaagcagcaaaagactttcccaaaacaaccaacccgccgaaagaacccccaccacaccaaacaccgccgctccaccaacagttacccacgcgcacggcgccccaaaccaacaaccgcccaagaacccggcgccacaacaccatcgacaataaaatagcacagcggcgcctatacacaacaaaatcttcccccaacccaaaaac

SEQ ID NO: 122534 - DNA, 142 bp, Arabidopsis thaliana columbia
  unsure (1)..(142): unsure at all n locations
ccaatcacatctaatctcagattttccctatatcatttcaccataacctagtaaagaagattagaaaccccagtgatctttctttactttatacaaatcccaacaaacangcatctaatactatacccattatctaactttt

SEQ ID NO: 122535 - DNA, 467 bp, Arabidopsis thaliana columbia
  unsure (1)..(467): unsure at all n locations
cccaaacctctaatacgacttactataggggaaagctggtacccctgcaggtacccggcccggatttcccgggggggcgaggcgtgcgaccacacttncnattaacttctctcacactgactctgcgaccctaatttgtgagctctcttctctttgcgcagaacatttcgctacaacttaaaaaaagggggggggggtacttaatccatcggtcctttctttatggggggtggctcttggggcaaaccttaaattccaaccaaacttctcaccaaatggttcttcgttctccagttgagcctactccccgcctggaagggccctggaccccctgccatcgatggtttttccgctggggcaaagccccgttctctgattttaaacatctgcttaaaaaggaaaagttctcttcctggtccaaaatccacttggagaggggaaaaacttttcaacctcccccaaacctc

SEQ ID NO: 122536 - DNA, 720 bp, Arabidopsis thaliana columbia
  unsure (1)..(720): unsure at all n locations
cccccgcgccccgcgcgcggggggggggggggattagggtgggggaccggcgtcttcgccgggaattcgtggngccgccgccccccgcccccccccccgctggagcctgtgcgttcccctttcagccccttcccccccgttgttggggtggttttcccaccccacacttttttccggcctccgctttttctcgggggcgcggggggcggggggccgccctctccttttcctcgcccgggcgcgccccctttctccgcgggccgcctctttctcccccctctcccccggggggggctttgccccccgcgccgcgctcgtccctccttcccccccttcttcttctccggcggggggggggggagnccccncccnccccgcgcgggggnntttcaaaaagacaaaatctttcctcgggcggcggcgtgcggctggtgccccccccctcccccccccccctcgtcttttctccccttccgcgccgcggtgccggccgccgggccgcccgccgcgcggtcccccctgtcgtcggccgctccctttccgcccccctcccccgcccgccgcgtccgtccccgggcgtgggggcccctccgccccgccgtctccaccgcgccccgtctcccgcccccgcctcccccgcccgcccccccgccccccccgctcaccggcccccggcgtcgttccctcggcctgccgcgggccgcccgccgccgcgccccg

SEQ ID NO: 122537 - DNA, 309 bp, Arabidopsis thaliana columbia
atttttgggggaaaaatttaataaacaacactttctttaaaaaaatggtttttttgggggggggcttctccctttggtggcttaaaaagacaaaccctggggtccttctttttttttccccccccttttcctctcccatggggggggatttggtaaaaaaatgctcaaggcaaaacccccccttttaagcctcttctttttttctttgcccgcctattcctccccttttttaaccctcctaggcgggtgcccggggcttcccttaccaccttaattttcctcttttgggggaggttcttccacacggtt

SEQ ID NO: 122538 - DNA, 508 bp, Arabidopsis thaliana columbia
  unsure (1)..(508): unsure at all n locations
ccctgcaggtaccgggtccggattccccgggggggccgggcgtcaatttactcttaatcacttaattataattnccttttccccttttttttcaaaaaaggaactatgatttctgcgtctgagttcggtctctcgatgaataacaatggtagtggcacctccatgatattgaagggggcgtgggggatcaaacggggggggatgctaaatatggttatggaaaagacggggacaccatgatgaccatatctatgtttttgctcccngagcatgagtgggtcttatgatacatggttgtgcgcctttatttttaatgattttttgccctaggggtctttatggcagggagttaatcccttcaggctttaactataatcctctatttttggttttatacccaggttttgtttcccgtataaaagcgaccgagcgaaattttcaagcgttaccgtttttttccccgtggaatctttactattttttttataaagcggggggggctaccttc

SEQ ID NO: 122539 - DNA, 150 bp, Arabidopsis thaliana columbia
cataacagcatctcctttaccgaccaagtcactcttgtcacctgaaataaacaactcccgaaaggaggaagagcgagtgttaccaaaatccttggagtacatatcatgcctaattcatttgggtggtggtgggattttttgggccattac

SEQ ID NO: 122540 - DNA, 377 bp, Arabidopsis thaliana columbia
  unsure (1)..(377): unsure at all n locations
actgtccctcagtccctcccaattccgtggccacctcatattcctttttttcaaatcacgcatactcaccaaaaccctatttctacatggattttcaaaaaaacttttcaatctacatccacagtggtacacaacacgttaaaaccaaactaaaccctacggtctaccaaaaacctcatggacctccaacccggtcnggattctttccatttattcctcttaaagcttttacagaaatactaacccttctaaccaaccgtccttcttgggctccagaaaaaaatattcattaaactgacccgtttattctcttttaggggaccccttaaaaagggctaaaataacctanactaatctcgtaccttttccaggaatgg

SEQ ID NO: 122541 - DNA, 623 bp, Arabidopsis thaliana columbia
  unsure (1)..(623): unsure at all n locations
ggggggggggggggggacttatttggggccacttcttcaaactttgtnacgngncaccccccccctcccttaactttcttcctcttaaaccttccccccttttgttttttttttttttttaaaaaacaacccaatttcctccccacctttttcctaatttctcccccantttttcccccccctcctcattttcnctccctctttttccaccttccaaacccccccccaaattttttcccccccaaataaacccatttctccactcatttcataatttttttttttcagcgtgttggaggcanacccccccccgtgccccttcaaattaccaaaaggttctttttttcacatcgcttttcccctttttaaaagatcttccttttttccttaaaaaaaagtccctcctttgcccttcccccccattataaccccaccccccttcctctccccttctactttgcgggagggcccctttttttttaactcttccccacaccccctttttttttttttcacctttcaattcaccacccctgtgggtctctccccagtttttcctcctcccctttctttattcgccttcttcggtttttcctttagccgggcccttcctttccccccca

SEQ ID NO: 122542 - DNA, 506 bp, Arabidopsis thaliana columbia
  unsure (1)..(506): unsure at all n locations
tcaaaaaaaacttttttttttttnatttttcctccccaaacacaaaattattaataaccctcacctttaacaacaaaaattngaataactaataataataacaaccanaacaacccttttcaaatatttttcccaaaaaaggggggggggccaanccccggggccttttataaaaaaaacaccttnnntccctcccttctttggttcccccccnncgcccccccctttatttttttaaccccttccccttttttgggggggaagaaaagaaaaaaaaattttttttttttttccttttccgggtttttgcacccaccccttttctcacaaaaaccancccaaatgtggctttaaaaaaaacctctctttatccacaaaaccggggctctgggagaggccccctttaatataccccccctcaaaacgcacagggggcggaaaaaataaaccccccctttttttttttcttccctcccaaaacaaccatttttgtttttttttaaaaa

SEQ ID NO: 122543 - DNA, 374 bp, Arabidopsis thaliana columbia
  unsure (1)..(374): unsure at all n locations
ccctttnccctttaaaccctaacaaaaccttaaccctgaaaatgattaggtccctctttctccggtcccggaaaaaaatccctcaaaatccatcctaaccttattttttgaagggggggggtggttccccttggggggttcccacatataaacaacaatttctcttttcccccttcttccgttngggccggcccataaatttaaaaatttcaagggggggggggataaaaaaccggggtctttaaatccttttgggtggagtttataaccacccccccaggggtttatccaaacttttttctcccaaaggaagggggttttacccggtcttttggcatcccacagactcttttttttttgggtgtgccctaaaa

SEQ ID NO: 122544 - DNA, 535 bp, Arabidopsis thaliana columbia
  unsure (1)..(535): unsure at all n locations
tgatttagctgacctatagtaaactatgacgtcgcatgcacgcgtacgtaagcttggatcctctagagcggccgggcgggggttttttttttttttttttttttttttttttgaaaaagaaaagatctttttctttttcggagtaaattccaaaagaaacagagggttggacctaacaaaagatataacaggattcccacaactgcttaaagaaatgattggaggggggagactttaccctctgttgctccaaaaaaaaaaaggagaaaanccccccttttttttcttcttacaagatcttattttctttgtaaaaaatatatttttatttagggtgattggtaaagaaggaagagaaacaccatctttttttgccgttctttttgtgggattatatattttaaaaagaaggggcatctcttgtggttgggaatnttggtcccacgatcctgtttagccggggctttttttttgttttttaaagggcgcggaggagaaaacattcgcacttctgcctttgttttttttttttgac

SEQ ID NO: 122545 - DNA, 306 bp, Arabidopsis thaliana columbia
  unsure (1)..(306): unsure at all n locations
nnnnnnnnnnnnnnnnnnnnnnnnnnnnnnnnnnnnnnnnnnnnnnnnnnnnnnnnnnnnnnnnnnnnnnnnnnnccgcgcgtgcggtaagcagactgactatctcaaatagctcgtacctgaggggacatggagcggttttgaagcatttaggagatgctaaagctgatgctgagcttcgtgaggaagaataactaggtttgcatcctaaacttctatatctttatagctatgaggaggctgttaagcaggtgcaaaggaacatatggtcctctactctggggattcattgcgactggcaccctg

SEQ ID NO: 122546 - DNA, 409 bp, Arabidopsis thaliana columbia
  unsure (1)..(409): unsure at all n locations
tattttccagcactatccactactttagggaaaccggtcgcctcaggtccggtccggaattcctggtcacccggcgtgcggtcgagcctctaaaccctaatctctctaaacccttacatncagctaaaataccggaaatcgcaccctaaacgatcccttcaattctagttatcatacattcttacctcttcacagctctacgcggcactcagagggtctataactcgaaactctatcgtgatctccatttgtgcatgctcaatgctaccttaagatctcttatctccctatgctaggataaatttcttattttttcctcaaacacctgaagagcctggttactcccttttccttttcgcccttaacaccttcattaatccaattactctagggtctttagacctttatc

SEQ ID NO: 122547 - DNA, 316 bp, Arabidopsis thaliana columbia
  unsure (1)..(316): unsure at all n locations
aaaaactcctaccttatactatacctttaattattcctcaataattctaattctccttccttttttaaatactagngtttcatataaatactccttttttttactaattccttcctacatatattcttcttccttccttcataaacccttataaccccgaattttaaaccttgcaaaacaattaacccacaggccagggctgctcctcttctaccaagccatcccacttaaaggaaaaaataaaaacattttccgcccaaaaaaacctccccttcagtcaccacccctcttttaaaaggccccatccccccccccc

SEQ ID NO: 122548 - DNA, 607 bp, Arabidopsis thaliana columbia
  unsure (1)..(607): unsure at all n locations
tacacaagggacagacactatttttaacaacccccatttctactacgttaccccgtccagtttctaatccacgtgagtttttnccgggggggggccctctaatctcaaataaagctagtccgggttacacgttgactagagccccgagcccttttcgagtttgtgtcggtgattccacgtagctcgtaatacagttatttgaacagaccgtactcacctttttttttctgggggggggcccctgctcaggttgttctcagccacacacccccccggatcactccattatgccccctacgttgtttttgcctctacctaggttctcccatagactattcatcaatagttcttctcgcctgttattcttgtccttgtctggattcgcggtcgcctcagatgacgctgcttcaagtcacttaggacgcgtctccccttttctccctccaatgtaccctatcgatgttaccatattcctctattatccccctcttctccccacgttccccatcccccccgtcttgcttgctattctctcccgcctctcgttatctctttaaataccatcttccccttagccaaaatcgccgtttgtcttcatatatttttg

SEQ ID NO: 122549 - DNA, 376 bp, Arabidopsis thaliana columbia
  unsure (1)..(376): unsure at all n locations
aaaaaaatggctccaatttaattacacaccaactaagctttcttatttcaatactatcacattctccaatcttcatatactccattatattactttctaacaccctaaactattttacatcttcaataaaagcctttccctttaccttttataactataccctatctatctcctacctacctccatcttaaatatctacctaatatctcctatcccttccctcttcntaccacttacctctacctaatataaatcacccactatatatcacttcaatcccattcccactaccattacttactccaccctactcatatatcactcctacacttatttatataatatatcagtcattctcaccaaaatatcttatact

SEQ ID NO: 122550 - DNA, 385 bp, Arabidopsis thaliana columbia
  unsure (1)..(385): unsure at all n locations
tccccagctctaatcgactcttatagggaaagctggtacgcctgcaggtaccggtccggaattcccgggtcgcgggcgcgggcgggatcaacctctgttctctttttccttcatttgatcgccttttctggggctctctaatttattggcgtcgggtgttccttatcctgaatccttatcttcaatcctctgttctggttctcaaacctaaaaaagtttnaaactttcctggggaaatgnccacctagagggaacanatcagaaaaaagttaananaattttcccaccaattccacgggaatcatgatgggtgggcttaaccctgaagagatggccgctcttggccgacgtgttaaccctaggggtaaattcagggacgagcaaa

SEQ ID NO: 122551 - DNA, 567 bp, Arabidopsis thaliana columbia
  unsure (1)..(567): unsure at all n locations
nnnnnnnnnnnnnnnnnnnnnnnnnnnnnnnnnnnnnnnnnnnnnnnnnnnnnnnnnnnnnnnnnnnnnnnnnnngctgggtttttttttttttttttttttttttaagggcaaaaaaggaactcttcaacaagaaattggtacacttacaaaaatctattagaccgtaaataccaaggggtaggctagcgagaaggaggagaagagaagaaaatgacaaggagggagacgagaaaacccgccacaagtattcctccgtacaccaacgtttggtaagactttactccaactgtggatttgtactctatcttacaggatctnatgttctccctttgtgggtccaagacatggtctacggactgggggggaaaaggggggtttaaaaaaatctggactgtgggggggagcatcgtatagctgggggggctatcccaaagaatatcaacccccggtgggtttcttccagggcaaaattttttcctatgttttcctccgccgggggggaagggttcgggcatggctctggtttttttaaaactttggaccaaaggcccggggggggttgtc

SEQ ID NO: 122552 - DNA, 485 bp, Arabidopsis thaliana columbia
  unsure (1)..(485): unsure at all n locations
acgactcactatagggaaagctggtacgcctgcaggtaccggtccgngattcctgggtcgaccacgcgtccgtgacgcgtccgccaccttccgctggttctctgcgaggaaaaagagctcttgaggaaaaaaccgaaggggtttaaaaaccttccccctaaaaaaagcgcaaggggttttgacattttgatttatcccccccaagggttttggtagtaaaaaatatttttcccaaaccttaattcgggccccatttttgggcccaccttgaatctaaaaagggaccaagaaaaaccccccccccccgtgaagattttccttttttttcccccccccccccccaagagagcgctccccccccccccccccccaagaaaccccaccaaaaacccccccccggtttgtcttttataacaacaacaggggggccccccccccacaaagttttcttttctttttccctccccccccccaacaaatggggg

SEQ ID NO: 122553 - DNA, 224 bp, Arabidopsis thaliana columbia
  unsure (1)..(224): unsure at all n locations
tgatttnnnnnnnnnnnnnnnnnnnnnnnnnnnnnnnnnnnnnnnnnnnnnnnnnnnnnnnnnnnnnnnnnnnnnnnnnnnccaggcgtgcgaattgcgcatgacgttaagaaaatatctacacttggtgcgggttttcgagaatcctaaccaaagccttaacggtgggctcgaggaggacttccttctggtggcggagttcatgaagagcgactacatcttgt

SEQ ID NO: 122554 - DNA, 555 bp, Arabidopsis thaliana columbia
  unsure (1)..(555): unsure at all n locations
ttttaatcgttgttcntcgttcatagcggcaagcggcccttttttctacgaagaggggcggagttgccctgccgctccaacttccttagtacaatttcaccctctttggcagcacttgcgatgtgagcccgacgtacgcgttacgcgtcttttatcattagatattggtctatgatgtaattgcacggtgacgaagacagtttattcttttttagtcagtggtgctctctaacccccagcaatctattcatttaatatttactcttctctcccgccccccccgaccccatcgcgttgccccctttttcgcagccgctcatgcctccggtctccttgcatcctctctccttgagttactccctccacagtccatcctatgtctgatcgtcggccctcactgcccatagcctgagcagatgaagatcatgctcttgcgatccagtttctggctatgtcccgccccttgttgccgctatatatcgtgacccggatcccgccttatgtggccacttgtcgctccgtcgtgtctccctgcatgccaggactggtcattac

SEQ ID NO: 122555 - DNA, 561 bp, Arabidopsis thaliana columbia
  unsure (1)..(561): unsure at all n locations
gnnnnnnnnnnnnnnnnnnnnnnnnnnnnnnnnnnnnnnnnnnnnnnnnnnnnnnnnnnnnnnnnnncttggtttttttttttttttttttttttttttttttttttttttttttttttttttttttttaaaaagagaccaacaatgtggattaacttagttcctttgggctttgaaaattccaaatttgtttttggggctccacttgttcaacaatgggtgaggctcaaaaaccaagatctttaaaataaacccccctcccaaacagacttgaaagggggggaaaatcaattggttttaaaccataaccctgtcttcactttttaggggaaggtttggacaatagggttggcccatgggtaaaacaagtgctgcaaaatatttctaaaaggggtccttttccagatccattgtgggtgaaccaccaccctttaaattgcccccttccccccccccccgggggggtaggttcttttttccttgggcctcttggggaggaacaaaggttaagggggtttaaatattctccccggggagcccctctttactctttaggaaacc

SEQ ID NO: 122556 - DNA, 536 bp, Arabidopsis thaliana columbia
  unsure (1)..(536): unsure at all n locations
nnnnnnnnnnnnnnnnnnnnnnnnnnnnnnnnnnnnnnnnnnnnnnnnnnnnnnnnnnnnnnnnnnnnnnnnnnncttcgtttttttttttttttttttttttttttttttttttttttttttttttttttttttttttttttttttttccccaaatccaaaattttaaaccccccttaaagggggaaaacaaaacgggggggttttagcctgaaaaaaaaaaggggaaaggcttctagggggttgaaaaaaaaaggggtgggggggggattaacttttaataatcctaaaaaaaattatcacccccgggtcgggtaaaggccttccctttttgagacaattggtttttttttttttggaaggcaagttttttaagggggccccttttgggtccctgggaaacaaatttctgggttttctaagggggggtttttgtcggaaaagttaaaaaaccttttttgtacatctcccggaggttccaaattaaatctttttttttattggaccccccgagaggagttggcaatttttggggt

SEQ ID NO: 122557 - DNA, 536 bp, Arabidopsis thaliana columbia
  unsure (1)..(536): unsure at all n locations
nnnnnnnnnnnnnnnnnnnnnnnnnnnnnnnnnnnnnnnnnnnnnnnnnnnnnnnnnnnnnnnnnnnnnnnnnnnnnctttttttttttttttttttatcaaccaatttactcaagggggcggtcattaatattatcttatgtagcataacaacttatgggtccatcccattttttaagactctaaaaaaagttaaaaccaaccaaaggagaaaacattccactttttactattggagaattttgccaaacaacgaatcttattactttgaaaagggggtttttgaacaaattaaaccgtggggacttttgggaaacccccccaaagttttcccccggaggggaagaacccggcgccttccaaagatttttaaaaaaggggtgggggccaaaccccccccccggaaaaaaacccgtggggggggcgcggggttttccccagggtaacaaacaattagagaaatttttctttttggggccccgtgttttttaaacaacgggggcttccccaacaaagggtttgtcgccccctctttt

SEQ ID NO: 122558 - DNA, 368 bp, Arabidopsis thaliana columbia
  unsure (1)..(368): unsure at all n locations
cttggatcctctagagcggccgcgctttttttttttttttcatgcataaaaagtctagctttgatttctgaatcactcttacaaactggngaatcaaatttttcttaagagaacaaaacaaaaacccaagaagagagattggtctatacaaacggacaaagataccaaaggcggggggtcccacgaattacatatttcatttacttccgaaatgggttcaaacttatcacttgccggattcttgatcgaaaagagaagaaaaaagattgcgcgctcccctttatttggtcaaacccattatggatggagaaggaaaaaaacccaattttaatttgtaaactcagaataagtcgtgctcggtgaacccc

SEQ ID NO: 122559 - DNA, 521 bp, Arabidopsis thaliana columbia
ctatgacgacacatgcacgcgtacgtaagcttggatcctctatagcggccggccttgttttttttttttttttttgaaggatagagcttgattcattgcctccctgatgatgggccctaaggaacaacacaccgctagaaagatgtgccttttaaactataaagcataagaaaaactccccaaagtaaaaaaataaacactaacgggggagatggttttggggattggggaggagacctaaaaacccagttttggtacaaagatttgactttttctttcttaacacaatatcacgggttattgggctatccttatcctgagttaaaaaagggtgatgctgccaagcaaaaattaccctttaagggcctttttttctttttttatttcacgcgttccataaaattggggaaaacattcctggctccaaaaagaggtttcttaatcctgtggccggtgggacccccacaaaatcccaatttttcgttatgaaaaattgggcccgttttttttttgatcccgtt

SEQ ID NO: 122560 - DNA, 410 bp, Arabidopsis thaliana columbia
  unsure (1)..(410): unsure at all n locations
nnnnnnnnnnnnnnnnnnnnnnnnnnnnnnnnnnnnnnnnnnnnnnnnnnnnnnnnnnnnnnnnctttgttttttttttttttttttttttttttttttttgggggcaaatatattccccataataaaaaaacaacatgggggccggtaaaattcattatcatttactgcatctatctgtggcagtaaatactaataaaatactaggccataagcgttcgtttactctataggattaaactctctttttttatttcttgattggcttcgaggaggacattaaacacgttcttggtatgcatttcaccttcgccatcgatctttcttcttttttcttcggtgccttagccatctcaacaatttttgatctttcctcggtgaacgagttgggtcgtcttagcgaggggtcag

SEQ ID NO: 122561 - DNA, 523 bp, Arabidopsis thaliana columbia
gaagagctatgacgtcgcatgcacgcgtacgtaagcttggatcctctagagcggccgccctttgttttttttttttttttctttttctcttttttttttttttttttttttttttttttttcttttttttataaaaaccccggggttttttttttgggggccataagcgaaactggttggtttaccaacaagaaccttttttttggtgcggggaaggggccccttcacaaaaggaaggcgggtgccctcaaccctaaaactttggcccaaaaacaagtctccaaaaacgggattttttccgggcgtttttcctccaacagaaaagggtctttggctgaaagccccccccaggccgccccacccccccttgggggaccccccccctctttaaccaaattgggggataggccccttttgtgggggcctaaaaagggtcccccccccttggtgccccacccccccactatgggggttcaatattcaacccgccctcgaggcagttttttttttaaaacccaaaaac

SEQ ID NO: 122562 - DNA, 574 bp, Arabidopsis thaliana columbia
  unsure (1)..(574): unsure at all n locations
tgnnnnnnnnnnnnnnnnnnnnnnnnnnnnnnnnnnnnnnnnnnnnnnnnnnnnnnnnnnnnnnnnnnnnnnnnnnnncttggtttttttttttttttttttttttttttttttttttttttttttttaaaagaaatctgaataagggttttccccatttatttaatatcatagggaaacaaagttttttgtttttttttctgggtggacccccaaaaaatgggagggggaaagacaagaaacaaactgtttgaaacttacccaaatatttagggaaaaggggtttttgttttttatcccaaaaattttgtttcaaaaaaaaaaagttttttgagcgctttaaagaaaacaatttgggtttgtttgttagagaaacaagttctttaaaacacccgcacaccccggcctggaaaaccattcggtgttttgtgggttgtagaaacaccttttctggaaggggggggcggttttgcgaccaaggtctctccggctgctccccaggatatcaccaccccccctctaaatccttttgtctgggttgcaccccacgaagagccagaagaccaccacaaat

SEQ ID NO: 122563 - DNA, 506 bp, Arabidopsis thaliana columbia
  unsure (1)..(506): unsure at all n locations
nnnnnnnnnnnnnnnnnnnnnnnnnnnnnnnnnnnnnnnnnnnnnnnnnnnnnnnnnnnnnnngccttggtttttttttttttttttttttttttttttttttttttttttttttttttttatttttttctttcccaaaagtttttatgcacattaccggtggaaacaaccgatttaaaattctgctctcaaagacagaaaacccctatatttgggttgccctgaactccgttggtccaacaaagaaccacctagacagggactcgggccccaccaaggggagacctgataacttccccacagcactggaacaaagcgcgctataattttaaggggatcaacttattccatcgatcaaacatccaacggggacaattccaagacacgacttctcccgatcatgctagaacaacgcagatgctctcctataaaaaaaacttacagatcttgtcccatgccctggacactttcacaccacacactccgtggaaccatcttccctgtct

SEQ ID NO: 122564 - DNA, 607 bp, Arabidopsis thaliana columbia
  unsure (1)..(607): unsure at all n locations
cnnnnnnnnnnnnnnnnnnnnnnnnnnnnnnnnnnnnnnnnnnnnnnnnnnnnnnnnnnnnnnnncttcgctttttttttttttttttttttttttttttttttggggggggaaaaaagtttttttttaaaaaagggaaactgtgtacactcttcaaaaaaaaagccttattttaatgcgaaaacaaatttcggattatgtccgaacaaagaggccgggcggtacggcatgtcccaaaaacaaaccaaaggttttggcttggttaaccccaccctgtataacaaggtcacctcagtaaagactctctcggagattactatctggggacactattcaaaaacccaaggtttaaccgggcttattcacatagaggcgcgaacccgagtgtaaaacccgataaagggtttaaaccatgtatcgtaccagtggaggaaaccccttgggtgttttcaggtggggcgtccccaccccggggggacaggaagggcttaaccccccgggtttggggggaccccccctcaccaatttttgggccccccattggacccgggcttttcctttgttttccaaaaatacctaaatgcccggacgcgaacccttttcccct

SEQ ID NO: 122565 - DNA, 275 bp, Arabidopsis thaliana columbia
  unsure (1)..(275): unsure at all n locations
ccnnnnnnnnnnnnnnnnnnnnnnnnnnnnnnnnnnnnnnnnnnnnnnnnnnnnnnnnnnnnnnnnnnnnnnnccacgcgtgcgctatgtatgtcttttttaatgctttggaggagcacacgcataatactcgactactacgtcccaacgtatatctcttatagacatagcgcgtacaaaaatcatggaccgatcactcacactatgaatgccgatgagtcatgaatgacgcggagctccataggggactgagggctgaaaccacgatggtttat

SEQ ID NO: 122566 - DNA, 582 bp, Arabidopsis thaliana columbia
  unsure (1)..(582): unsure at all n locations
gnnnnnnnnnnnnnnnnnnnnnnnnnnnnnnnnnnnnnnnnnnnnnnnnnnnnnnnnnnnnnnnnnnctctgttttttttttttttttttttttttttttttttttttttttttttttttttttttttttttttttttttttttttttttttttagaaaaaaaaacttttttggggggggaaaacaattgggggggttacaacccgggccctttcccgggaagattccctccccattggggttttataattccccaaacaaaaaaaacctttttggggttctttttttgggggagactgggcccccccccccaacaaaggcgcctggcttaacttttttccccgtggttaaaaatttttggcgccaaaaaaaaatatcgcgggggtttaatacccccaacgggctttttgttttcctttgaaaaaaatcccaaacccccctttaaaagtttccccccagtttttttttggctggccccaaaattttttcaccttttcaaaaaaagggtttttttccacaaaaaggggggggccccttccctggacccctaaggggcccttggggcacccccccctttgtttt

SEQ ID NO: 122567 - DNA, 623 bp, Arabidopsis thaliana columbia
  unsure (1)..(623): unsure at all n locations
nnnnnnnnnnnnnnnnnnnnnnnnnnnnnnnnnnnnnnnnnnnnnnnnnnnnnnnnnnnnnnnnnnnnnnnnnnnccacgcgtccgcggacgcgtgggcggacgcgtgggttcgagatcgccggggagtgattctaatgcgtcgattgttggggatcttctggattatcttaatgaatcctggacacagtttcacgccactgctgaggcgaagagacagcttttggctgctgggtttgatctcctcagtgaaaacgaagactggaatctgaaacctggtggccgttacttctttacacgaaacatgtcctgtttggttgcttttgctgtcggagaaaagtatgtgcctggtaatggttntcatgccatagctgctcacaccgatagcccgtgtcttaaacttaaaccgaagtctgcttcatccaagtctggctatctcatggtgaatgttcagacttatggaggtggtttgtggcacacatggtttgatcgagacttaagtgttgcggggcgagcaattgtgagagccagggatggctcgtttgttcataggcttgtcaaagtgaaaaggccttactaagggtacccactttgcccttcatcttgatcgcacagggacagtga

SEQ ID NO: 122568 - DNA, 600 bp, Arabidopsis thaliana columbia
ccccgaagttagggggagaacgaacggacggaagaaagaaaggaagaaatttaaagaagggggggggcgagaaccaaagacaagagaaacaacaagccaagcgcagcacaaagcagttgaaagacgagcgagaacgacataacacccgaccgggaagcgaaggaaaggaatgacgacgcagaagagaagcgggcgctttctcctaaacacaggggagagagcaacccgcaggcgcaaagaacacagacgcacggccggcaaagacgaccggcagaacaggaagacgagaatagaactgaagaaagcgaaggagtaggaccaagtgcagaccacagcccactacagccaagcgcacgccagacaaggcgggagcagaacaaaggcacgacgccagcaagcgacgcaaccccaaccagggagcctagccagaagagagagcagacaagagcgatgaactactggcgccgggcgagaagaacgccgccgcggaaagaaggagaaggcggcaacaggagggacgggccaaccgggatgcgaggacagaatagcaccagagccaggggggaggggagggggcgcgaccacgcccgaggaagagag

SEQ ID NO: 122569 - DNA, 577 bp, Arabidopsis thaliana columbia
  unsure (1)..(577): unsure at all n locations
tgnnnnnnnnnnnnnnnnnnnnnnnnnnnnnnnnnnnnnnnnnnnnnnnnnnnnnnnnnnnnnnnnnnnnnnnnnnnctttttttttttttttttttttttttttttttttttttttttttaaaagaaacaaaggggtctttactttttttggaatttaaaacacatattctccacacacgaaaacaccccccattcccaaaacaaagcaaaaacccacccccttttgggggatttcaaaattccttaataaataacaaactaaattaattaattaaagttggttccccccaaaaaacaaaaaaacatttttttggcttcttcctgggattgggatttaaaagatcaaaccttttattgagttttgaacctggaaagcacttttttttttttggaagtctggttgtcaattggaatcacaatttttcccggttcacccaccttaaaaaaatcggttataaccggttcatgggtggacccaatcttccgggtcttagaaacaatcacaagatagcttccttggggggtgggctcaaactgagctccgtagctaacatgagcacccaaaaccctaagct

SEQ ID NO: 122570 - DNA, 616 bp, Arabidopsis thaliana columbia
  unsure (1)..(616): unsure at all n locations
nnnnnnnnnnnnnnnnnnnnnnnnnnnnnnnnnnnnnnnnnnnnnnnnnnnnnnnnnnnnnnnnnnnnnnnnnnnccacgcgtccgcggacgcgtgggaggaggaagagacggttgttgtagctgagaaggttgttgttttaactgctgaggaagttcagaagaaggcacttgaggagtttaaggagcttgtaagggaggctttgaacaaacgtgaattcactgctccggtgaggccggttaaggaagagaaaacagaggagaagaaaacagaggaggaaactaaagaggaagagaaaacagaggagaagaaagaagagacaacgactgaggttaaggttgaagaagagaaaccggcggttccagcggcggaggaggagaaatcatcagaggctgctccggttgagaccaaatctgaggagaaacctgaagagaaagcagaggtaacaaccgagaaagcatccagtgccgaagaagatggaaccaagaccgtggaagcaatcgaagaatctatcgtctctgtttcaccacctgaatccgccgtagcacctgtcgtggtagagactgtcgccgttgctgaggcagagccagtggagccggaagaagtctccatctgg

SEQ ID NO: 122571 - DNA, 567 bp, Arabidopsis thaliana columbia
actatgacgtcgcatgcacgcgtacgtaagcttggatcctctagagcgggcgcgctttgttttttttttttgatttaagtagatttttagaccaaagcagagagacataattcttcaaacaaaacaaacagtcacgcctaagaaaacatcacaaactctcgacttaatactccgattacaaataagagactgactatctttcaaccggggactcagttgctagattgacgcaactcaggtcgaacaaagtctgcatcagcaggcacagagatatcaacggtaggcctgagctgtgcgcagaccttaagggcccatggactggatcagaaaagaagttactggttagggctttgtggttggtgaccactggcccagacacaagagtttgtgggggcaggatgggggaaaaaccggggggccattttcctcaaccccaatattggtgggggtgagccgggtggcaaccatggagggaacctcccctggggcggcataaagggggttaaagaggcccccgggttcaaccccccttctcggggagggattctggagaagagaggccctttt

SEQ ID NO: 122572 - DNA, 542 bp, Arabidopsis thaliana columbia
  unsure (1)..(542): unsure at all n locations
agctannnnnnnnnnnnnnnnnnnnnnnnnnnnnnnnnnnnnnnnnnnnnnnnnnnnnnnnnnnnnnnnnnnccacgcgtgcgcccacgcgtncgattaacttctctcacactgactctgcgaccctaatttgtgagctctcttctctttgcgcagtcaatttgctacaacttagaaaatgggcgggggctacttcatccatcgctccttctctttcatgcccatctncttggtggtgatccaaaacccctttggtcntccaaagccagacccttggctctaccaaaatcggnttccctctggctttcttcaaagctctgaaggcgcttactgccccccggcctttgaaaagggccccactggaaccctccccttggcgcgtcgcaggggtttttttgcttggggggaaaaacccctggttttttttaaattttaaaaaattgtgctttaaaaaagggaaaaattttttttgttgggggttaaaaaaaaaccttttggggaggggggaaaaaaactttttaaaaaatttccccaaaactctt

SEQ ID NO: 122573 - DNA, 572 bp, Arabidopsis thaliana columbia
ggggggagccgtttggacccggcgccttggggggcgggaccggcccggccccagacattcagggccggaccgccccctccgccccccccccccgccgcccgccgccggctcgtgctgagggagcagcgggcgtgcgtgcgtgtcaccgcctctgccgcgcctccgcgcccgctgtcgcgcggccctaccgccgacgcgcacgcttttcctgggcggggggagaccgcggccagcccacagcagccaggagcgagcgctcccccgcacccgcgcgccacggcccggcgcgcgcggcgcccaggtgtagcggcggcgcgccgcccgccccccgccgcggcgccaggggagcgggccggagcggggactcgaaagacgcgccaggcgggacggccacagccccggccgcgcagaccgcgcggcggggcgtgggcgagccccgcggggggcccgacgccaccgcgggcgggaagaggccccccgccgccagcgtgcacggcgccaaagcgcgggccgccccgcccaccccgcccggcccgcgagggccatgacccgcgacccggacgccccgcgcc

SEQ ID NO: 122574 - DNA, 610 bp, Arabidopsis thaliana columbia
agggaggaacacgcccgccgccccacgacgcaggaaagggaccttcaaagcgaggggggggcgacacagacacaccagcgacgaacgcacagcgcagagccgacggagcgggagagcgcggcgcagagagaagcagaccccgccacgggcgcggccgcgaaacaacgaccccacccccgacacgacacgcgagagtttcttaccaaggggggcgcgaccagccacgggacggggcgcgcaagaacccgcccgccccccccaaaaggacccgccgcgacgaagacgcgcgcaggagcccacccaaccgcggaacgcagaagggcagccgcgcggcccgcgaggcggccacgccgggccccaccccgagcaggccaaacccagacgacccggccagcgggcatcgagagaacgcaaaccacagcacaggggcgcggcccagcgcaggggcacggcaggaggccgcacagagacccaccgagagacagccgccgaaaagggcgggcgggcccacacgacacccgggccccagacggcagacgaagcaaccgcacggccccgcacggacgagagaggcacgaacccgcgcaccgcaggagaagaaagcccgcgg

SEQ ID NO: 122575 - DNA, 491 bp, Arabidopsis thaliana columbia
  unsure (1)..(491): unsure at all n locations
cactatacgactcttatagggaaagctggtacgcctgcaggtaccggtccggaattcccgggtcgacccgaggcgtgcgcgttcctccactcgtagctctctcacagtctggtactcctagagctagagaaaaggcacaggcgttgctcagttacttcaaaaaccaacggcatggaaacgctgggcgtggctgatgatggatgatgatgatgatgatgatgttgaggatgcacagattctgggctctcagtgcctatttttatgttttgtcttgggaccaaagtagtgattttgtacaaaagaggtctcttctgcgnatatatttttcgtactcagattttttgatgggtctctggattctttaattttctattggttctcataataaacctgtgatttgggatagaatttttttttttctccaaaaaaaaaaaaaaaaaggggggccgctctagaggatccaagcttacctaccgggtgcgtgcgacgga

SEQ ID NO: 122576 - DNA, 590 bp, Arabidopsis thaliana columbia
gcactatagatagactatgacgccgcatgcacgcgtacgtaagcttggatcctctagagcggccgcccttggtttttttttttttttttttttttttttttttgttacccatctttatgtggaggatctttccctgtgaaaccacggactctgcaaaaaaaattgctttggaacggctctctttgtaacaaattttccccttttctcgcccttgaggggggacaggcccctacagacatgctcgggaccctgcccccacccatttgacccgattgccccgtggtactaaccctgtgcacttgcagggggcggctatacctaacacccggacttgaaagagcacgaggtgcaagcccaccagagggggaaaaccacaacacccagttttcatgcaaggaccaccccctagtgcaggtgattccccccccaaggagtttacttgggaaaatgcctcctcccgagagctttaaaggcgcccacgtcacccccacaaagtgaagtccttgttggaaggggggccataaaatcccccctcccagtgcgaaggcgtttccttaaggtgggagtgggggaacaacacggtgttttcc

SEQ ID NO: 122577 - DNA, 352 bp, Arabidopsis thaliana columbia
ccagctctatcgactattagggaagctggccctgcagccgccgattccggtgacggcgtcgactctacacataacaaagacagagggttgtggtcctttttgtttaaaccccgggcccccgaatttgggtttcatttccgggggttttccaaacctttggcccgagggggaaataaaagggggccccaaaaacaccctctttttggaggggctttttttacggggggttttttcggggggggttttttctcaaaaaaaaaggggggggaaaaaaaacggggttttccccccctttaaaaggaggccgccctttcttcttcggggggggaaaaaaaaattttgtagaaaaaaa

SEQ ID NO: 122578 - DNA, 579 bp, Arabidopsis thaliana columbia
ttactatgacgccgcatgcacgcgtacgtaagcttggatcctctagagcggccgcccttcgcgttctttctttttttctttctttctttctttttcttttttttttttttttttataaaaagggggtctattgcaaaaattctcaaaaagggttgttttttgacaaatcaaacaaaagcccctcttttacctattttaaaatctctgtgggggcgccccaaaatggaacctaaaatgccaccaacccgttttttaaaagaaaaataccaaaaccctctgccccccttttttctttggttccttaaccccccaggtgaccctcatatgctctaatccgtctttacagaggaatatataagcctttggaacccaaaaccaaccttaaaacctttttgttcctgggaccccaaaaaatggggggggggcgtaggccttttccccaagtgaagccttcccaaacccccgttggggggccagaacttttggaaaaaagaaaaaccgtccatatagggaggggcaaaagcctctccccctctttggggggttcccccccccccagggggtgccctcttgaaaggt

SEQ ID NO: 122579 - DNA, 514 bp, Arabidopsis thaliana columbia
  unsure (1)..(514): unsure at all n locations
gnnnnnnnnnnnnnnnnnnnnnnnnnnnnnnnnnnnnnnnnnnnnnnnnnnnnnnnnnnnnnnnnnnctgggttttttttttttttttttttttttttttttttttttttttttttttttttttttttttttttgggaaagggaaaccccttctaaatttttttttgatcgggggagccttaattacaagaagggcccgaaaattttttgaaaaaaggggtttttccaaattccccctaaattttttttcccgcccaaaattaacccttttttaatgggcctttcccccttaaattttaactttattcccattttgccctcctttgttttttccagaaaaaaaaaaagagcgtttaatccaatccaaaattttttccgggggggttttaagtttaaattccaaagaaaaacgggggggccccaatgaaaaaacgggggttgttcattggaaaaaaattcaaaagtttcttttccaatcaaaaaggcctaaagaccccccgggtggtccattttc

SEQ ID NO: 122580 - DNA, 567 bp, Arabidopsis thaliana columbia
  unsure (1)..(567): unsure at all n locations
nnnnnnnnnnnnnnnnnnnnnnnnnnnnnnnnnnnnnnnnnnnnnnnnnnnnnnnnnnnnnnnnnnnnnnnnnnnngctttttttttttttttccgaaaacaacctttattttaaaaaatccgaggccctacaattcaattttaaatacatcttttgaattataagaaacagattttcttctagatttgaatttcctttttcaaattcggttcgttagaaacattggggtctcttaaaaatattttgggaacaacaagaaaagtgaaaagaaaaaaacagggtccagacttgatgactccaagagtagaagcttgaagcgacaccggatgactctcatttccaatatgaatcccatgatcaccggtcggaatccttcggtttccgggtcgggcccctccacttaaatacttccccccggggttttttcacctgggcacgcttttttttcccaacccggcgggggtcctttttctaaagccccccggtgtttcttgggagcccctttcccaccccgggggggccgagaacccaagcgttgggggcggcccatctttgcggccaccgtt

SEQ ID NO: 122581 - DNA, 486 bp, Arabidopsis thaliana columbia
gacgtcgcatgcacgccgtacgtgagcttggatcctctagagcggccggcctttgttttttttttttatagggttctgattaacaaaaggagaaaaccttcaagtttattgggagatataacaaaatcgggggaaagccccacctgaaatttttgtggggttgggaccaaggcccacaacaaagtttctaggcggtattactcctcgcggggggggtctctcaaacctgcccttcttcctccccaatagtttctgctaaaacccccagacgataccccacaccgccctcccgaggcggcccccggcctcgtgcaagggcggggatgtgctgaggggtgcgccctctctccccgcacccccgcgcccccaccgcgcccagccccgatagcgccgatatctggccgctcctgtcccgagagctaagccgcgggcgctgtcaagacgcccacgtgccccccaccagagccccccggccctcccctctcg

SEQ ID NO: 122582 - DNA, 403 bp, Arabidopsis thaliana columbia
ccagcctatcactacttgggaaagtgtccctgggccggccgattcggtaccggcgcgcaccgtcgtctgggtgcatgtatcatattgcagggtatggggaatgattctcatggtaagagctctattgccatataattctatgtgcctcgggctctttgctaaaaatgacaagaagaaaacttgtagtttgtagtatacatcgctaatgtgtgctgtatcgacatctaagacctggaagattacctatattgcgagatagagaagatcgtgtctgcttgtacagataaacgaacacaaacaaatgactgttaaattgcgttacttctgaggagactgatccatcagtaactccctgtaacacactgtctacgtagggcatgattttctaactctctgagggagt

SEQ ID NO: 122583 - DNA, 580 bp, Arabidopsis thaliana columbia
tgcacgcgtacgtaagcttggattctctatagcggccgccgctggcttttttttttttttttttttttttttttttacttttttttttttgaagaaaaccccccctttttttaatttcccaaattattaacccccaccttcccaaaattttgggagggaaaattcatataatataactttttttttcaaggggggggggtataaaaaaaacacccaccatataaatttgaattaacggctttggtcacacccctaaagtatagatgggaaagggttatttttcttgttcttttacaccccccaattggcttattttccacccaaatttaaaaactcccggaaatttttttaacctcagatacccttggaaaaaaatttttcttttttttaataaaaaagggttttttttaggttttctaagccacccccaaaacttattttttttttaagtttgtctaacaccccccaccttaacactctttgtacctccgcccttttctatttattgacccccccctttttgtgatttttgttataaaatcattataggtttaatcccctatgggggggggccttttat

SEQ ID NO: 122584 - DNA, 549 bp, Arabidopsis thaliana columbia
  unsure (1)..(549): unsure at all n locations
nnnnnnnnnnnnnnnnnnnnnnnnnnnnnnnnnnnnnnnnnnnnnnnnnnnnnnnnnnnnnnngcctttgtttttttttttttttttttttttttttttttttttttttttttttttttttggattaaacaaacccaattgtcccggcgaagaaaacaaaacacactccccaaagttatgtctttattatagatgacccctttttaacgaaagaagggggcattttcggggggaaatagaaggaaggaaggtttggaagctggcttctgtcaaaaaaactttggttgctttcttttgaccgggggtttccccaagggtcaagggcaacagggatttgcccaggggacgaggtttaaaattcgccccctggggttccgtggatttgcacccccagatcctgggccttatttttgtaaaattcagaggaggcggggcttccttttattaacaaacatgggggggggcggggtaaacttgtaaactatgagggggggtggggaggctcgaatttttggggttttggtgcacccaccttttttaaaggttttg

SEQ ID NO: 122585 - DNA, 612 bp, Arabidopsis thaliana columbia
gcctctagatttactatgacgtcgcatgcacgcgtacgtaagcttggatcctctagagcggccgcccttcgcttttttttttttgtttttttttttttttttttttttttttttttttttttttttttttttttttttttgtttattattattttgtttttttttttttaaaaaaccctaaagccctagaggagagggtgggtctttacaaagggggggttaattttgtttttacccccccgggaaaaacttggggggggtttttccccaagttcgggggtgggggaggttttttccaccggtgggggaaagggggaacaaattccccccgcgggggggtgtgggagcttaaacaaacgttggaggggggggagtttccgaggaaaaacgccccttttctaaatacaacccccccccaaaattttgagaaaaaaaaaagggggggttttttgtttttttaccccgaagaagtttgggtggttctttgatatagggggcgcccccaaaaccggggggggataaaaaccatgggtcgaggggcaaaaaagaggggcggttttttttccttccccccacaaagaggggagagatacaccccccgcgggggggggg

SEQ ID NO: 122586 - DNA, 551 bp, Arabidopsis thaliana columbia
  unsure (1)..(551): unsure at all n locations
gnnnnnnnnnnnnnnnnnnnnnnnnnnnnnnnnnnnnnnnnnnnnnnnnnnnnnnnnnnnnnnnnnnctttttttttttttttcattaaattctttttattacttgaagatctgaaatgaccctaaaaatataaacatcggttgggaaaaaaagaaaatacattttactcaacaaacaaaaatataaatacaattttccccgataatagaaaacattcggaggcttgagaaatctttcgaagactcatatgatcctacactgtcaaatacttaagaactgaagagcgtatcttctccatgaaatctcctgcttctttctggtttcctttgtatgcattggctatgttttcgccgagaagggccaacaaagatctgttgatttggtttttctccaccatatccaacaatgtggtttttatatcggttgaggttaagagtttggttaagctatttgtagccgncataagctcattttgcattttgacataagcctctattccttcttctaaattttttgaagggtttcaagctcaatcaactatctttaatat

SEQ ID NO: 122587 - DNA, 476 bp, Arabidopsis thaliana columbia
  unsure (1)..(476): unsure at all n locations
nnnnnnnnnnnnnnnnnnnnnnnnnnnnnnnnnnnnnnnnnnnnnnnnnnnnnnnnnnnnnnnnnnnnnngcgacgcgtgcgcccacgcgtacgcaacatccgtcggtagtagcggcggtggtgaccacggaggaggcanaggaggaggaggagggctaantagaagtggactatctcggatccgttcagctccagcgacttggcttgaagctttacttgaggaaggggagagaagagtctttgaaacctaatcttggtctcaccgatttgcttaccgggaactcgaacgatttaccgacaaggcgcggctcgttcgagttcccgattcctgttgagcaagggttgtatcaacaaggtgggtttcaccgacagaatagtactccggcggattttcttagggggtctgatggatttatccaaagctttgggattcaggcgaattacgattacttatcggggaatatcgatgtttctc

SEQ ID NO: 122588 - DNA, 539 bp, Arabidopsis thaliana columbia
  unsure (1)..(539): unsure at all n locations
tgnnnnnnnnnnnnnnnnnnnnnnnnnnnnnnnnnnnnnnnnnnnnnnnnnnnnnnnnnnnnnnnnnnnnnnnnnnngctgggtttttttttttttttttttttttttttttaaaaaaaagagctcgcatgtttatttgaaagaaaaaaaatgactcgacagggataatgtttccaattgactagcccgaagcgggagaccaaaaagaacaaaagccnaggtttaaagtggggggtcttctcggcctcctccctgcaaacatttttattgcaacaaaccttgggatatataacccaagcctctggggtgaccagatttattgtttgatcaagtccctgataacggattgcaaaacccctccgggacccaaaaaagccaactccccctttggggcaaaaggggggggaactgggaaaagattcggcattgtgtggggaacacggtacctttcgggcgggggggggcccacaaccctgggggggggcgtcgggggggaaagcccccccccggtggggcgaggggtttaaccttctcccccc

SEQ ID NO: 122589 - DNA, 247 bp, Arabidopsis thaliana columbia
cacctatcatatttgaacttccctcgcctccattcgtcacgcgtcaattattctcccttattaacaaacttcaaatcttaaaactatactgttaattttttgtccccatcttgaactcggattctaggggctacatttaatataaactccttttttaaacaatttagactttaccttacaactatttactcccacctgttaccttcttgctgactgtacttatttaaccaccattaactggaaataa

SEQ ID NO: 122590 - DNA, 460 bp, Arabidopsis thaliana columbia
  unsure (1)..(460): unsure at all n locations
nnnnnnnnnnnnnnnnnnnnnnnnnnnnnnnnnnnnnnnnnnnnnnnnnnnnnnnnnnnnnnnnnnnnnnnnnnnncttggttttttttttttttttttttttttttttttttttattgttttttttttttttttttcttggggggaaaaacaatgatttttccttttgaggaaaggggtttccttttttgtggacggggatggccccttcctaaaagggaacctgggctttttttaaaaaacatattttttaaaagttttttggtgggggcaggttttttaaggaaactaagccgggggatttgtgttgggaaaaaactcccccaaaaaaaattttcccccatcttcccacgtgtgtctttggaaaaaaggtttgaatcatgggtgcccgcaagggggtttccatacaaacccccctggaaaggcctgggtttttccataaaaataaaaacccgcccgt

SEQ ID NO: 122591 - DNA, 209 bp, Arabidopsis thaliana columbia
ccacctatcactattagaacttccctcatccgccgattccgcacgcggcgtatatagccttactatatatgtttacaataacattaccgttttcttcacatacatcttgtttatccccgtataacacaatctacgactagggtgggtcgctttattcccaaattccctcctaagaactatctcattacctggttggtgatgatggggaa

SEQ ID NO: 122592 - DNA, 566 bp, Arabidopsis thaliana columbia
  unsure (1)..(566): unsure at all n locations
cactcttataggaaactgtaccctccagaccgtcccaattcccgtccaccgcacggcgtctctatcatccacaanataanccaacaatggttggtgattacaaaggacactttaatagcccgcgtttctcccataactcttaccattcttcccacaatacttcttccgtggaaggaagaccccttctttctntacctctgggggggaaagagtatttggacccacaattaactaataaaacccttctttatatcttaaatctatggaaactttattctaagatcatttatataacctcctccgaacctctcgaaaaaaaccaaaatttatcccaataaccaaggttccgtaccggaaaaaaacctctcaaaaacaggtcaaggttcttcataatggtttctcccaaaagaataatttaaaaacaacctaaacttttattaaccggaagcccccggggaaattcttaagactttcttaagaacccctggaataaancattataaccctttaaaaaacaccccaatcccgctaaaccgataaccccaaaaataaagttttaccccctc

SEQ ID NO: 122593 - DNA, 589 bp, Arabidopsis thaliana columbia
ctatagaatagctatgacgtcgcatgcacgcgtacgtaagcttggatcctctagagcggcgcgcgcttttttttttttttttatagaacatcgcacagagattaaaccactaaaaagatgttcaaatatggggaatggatcgtatccagaagtagttaaacagttcttgaatcacctcgatgaatttataatacacaatatcatttgactttttcgggggtgtgaagaatggcaaacagaaacccgattaagctcttcttcgcactggctttaaataccgggaagtgtgccaaagactttgtcccatagagaggagggggatccatatcctttggcctggatcctaaagggatgattccaggggtatttcttaacatggtaaagggtggttctttaggtagccatggtgcagataggagcgggtataatattaatcgaacagccgaccattgtgcgtcaaaaaaaccagggggcggaacacgagccccctacgaaatggaaaaccttcctttgccaaccaacatattttctgcggcttggggagggaaaacaaaacaaagcccccttgggggggctcgaaaggccccaa

SEQ ID NO: 122594 - DNA, 523 bp, Arabidopsis thaliana columbia
  unsure (1)..(523): unsure at all n locations
ctactatatggaagctggtacgcctgcaggtaccggtccggattcccgggtnaccagccgtcgtagttcttatcccagcagaccccttttttnnnnngcttctttttttctctctctacaaacaccacgctcataaagagcgatatagcccagaccatacacattcattgaaaaacccttcttttcaatgggggatttgccaaaattcaggatcaaacatcacctttgatgctctcaggtcctttttttcaaacttattttggatttctactcccccgcttggagccaccccaacctctggcttccacctgttgctcaccctttaatatcgccattaaagactccctttcccaaatcatcaaataatcttctgcgtaccactcaacctgctaacacacacttatcgctcctttgcccatccaaccaaagtccttgtaaacctccacacttttttttatcatgcctgacaagacctaaaaccccttccttttcctccctccacaaaacccatatttttagctcc

SEQ ID NO: 122595 - DNA, 442 bp, Arabidopsis thaliana columbia
gaatagctatgacgtcgcatgcacgcgtacgtaagcttggatcctctagagcggccggccttttttttttttttttgttttaaaaggattttggaccttatcgatgtgtcttaatccctaaaacgaaacttgccttccctcactgataaaacgaaacaaactcttcgacttactactccgatttcatgtttgggagggtcatatttttaagggttgactgacttgccatatgggcccgccacaggttcttcaacctcagcgtgaccatgcgccttgatctgagcgggctgcctaacctgagcacagacctaagcggaccctgggactggctcagaagaacagtactggttcatgaattgatcttccctgaaccactggccacatccacaacaggcttattgagaatgacccaaataaaaccgctgctcgcacttaccaccgc

SEQ ID NO: 122596 - DNA, 420 bp, Arabidopsis thaliana columbia
  unsure (1)..(420): unsure at all n locations
ttccagctacttcatattaggaagcgtccctcagtaccgccgaattccgtcaccggcgtgcggaaaatcaacaccttttccctagtgttgacccaatgaagggatctttgtttaaaaatcactggaacaatttaacgggaggcaaagtttcctagggagttctttcccaacctncccggggggggaaaaaaaaacccggagaggttacaaaaaaaaaaaactgtttttttccccttttaagcaaaacaaatttttttccccccaattttaaagccttttttaaaccccctttttaaacaaaagggggccttttctccctttaggggccaaaaaaaaaaaaaacttctccccggccaaaaaccacaccagttcttttttttttttttgggaccctccctctcccccacagggggggaggaa

SEQ ID NO: 122597 - DNA, 581 bp, Arabidopsis thaliana columbia
  unsure (1)..(581): unsure at all n locations
attgagaccgnnnnnnnnnnnnnnnnnnnnnnnnnnnnnnnnnnnnnnnnnnnnnnnnnnnnnnnnnnnnnnnnggcttggtttttttttttttttttttttctggttcaaaacgggcccgtaatttacatatttaaaatcaaagccacagcccaaaacgaaaagaatcaataaatgtgctctacaaataaggngggagcgaaagaccatggaaatttcttcatacggggggtagtcactcccggaagaggttggggttaaaaggaagagaaaccaccccccaaaggaccccttgggtggttaaaacccccaagcctatttacctttttaacattttcttttaacacaggaaaaaaaagaaccccccctcctttgagggggccccccggggatttacccgggggggtttaaaaatccccccctcaaaaagaggaagggggttttttctgggggggaaaaggttttttgggaaataatttttctttttgggggggggggttttttccccttggtttttgggagccaaattaaagagaggggtttttttttttctttttaggggcgcccccacaaaaattttt

SEQ ID NO: 122598 - DNA, 515 bp, Arabidopsis thaliana columbia
  unsure (1)..(515): unsure at all n locations
nnnnnnnnnnnnnnnnnnnnnnnnnnnnnnnnnnnnnnnnnnnnnnnnnnnnnnnnnnnnnnnnnnnnnnnnnnnnnngctttttttttttttttttttaaaaatagatgaacaaatgcacgtttagataacgaaggtagtaactaaaatagaatccatggttttagactaaaccatgcttaaactctgtttgttctggaaacaatcttgcttaggattcagtggcgggagtaaaaatcaacctagattacttcatcactcaaatttgctctgaacatcttgaatgatggtgatacaatcagactcgcttacatggatcactcagtttgctctgagatatgcaaagactatggccagtagaatcacaaccattataataaagacactgtttggttgtcctttgtcattaacataagattttctgttttgaagaactccaccgtctctgcagagtttctgaacggcttcaagccggtttagtgtcttactggcatttggatcgttcttgtcaacct

SEQ ID NO: 122599 - DNA, 601 bp, Arabidopsis thaliana columbia
  unsure (1)..(601): unsure at all n locations
ccagctctatacgactcatttagggaaagctggtacgcctgcaggtaccggtccggaattcccgggtcgagcgacgcgtgcgcccacgcgtncgcgcgtcgatccacatcgcaggtgagggttcctgcaatttatccctcgtggtctctgaatctcagatcgtcgtcaacgaatcctccattttctgaatcaaaattttctggaaacaatggggagcttggggacggtgctganatatccggatgacatatatccgctcctgaagatgaaacgagcgattgagaaagcggagaagcagatccctcctgagccacactggggtttctgctattcgatgctccacaaggtttctcgaagcttttctctcgttattcagcaactcaacaccgagctccgtaacgccgggtgtgtgttctacttgggtctccgagctcttgatactggtgaggatgatactagcataccaactgatgaaaagggtccccatcctgatagcttttcaccggcacatatacgatactgagttggattattcatgtgggacgaaggagtacaagattctaatgggccatttcaccatgtttcttcagctttttggaac

SEQ ID NO: 122600 - DNA, 576 bp, Arabidopsis thaliana columbia
  unsure (1)..(576): unsure at all n locations
gatttagctgcactatagtanactatgacgtcgcatgcacgcgtacgtaagcttggatcctctagagcggccgcgctttttttttttttttttttttgaacctgaacaaacacccctgaaaaacagagtaaaatgatataccaaagccgattcaatgattgcatctcaaatctcactcagttcaggtacacacaaacaaacactactcttgctttctaataagggggcagagacaagaaaaatggaaacagataagcttggatcaaaagaaaaaacagtggagattttagagtttttttgtttaatgctttgcgattctttcaaggacttggaagtagtcggggaaggttttcctggtgcaaccggggtcattgatggtgattggaacatcagcacaagctgcaagagagaatgccattgccattctatgatcatcatatgtatcaatctctgccggtttcaccttttttcggagtaatcacacaataatctgaaccttcttgcactgtagctccccattttctaagctctgtgcaaatggaatcatcctttccggtctctttactctccagctag

SEQ ID NO: 122601 - DNA, 364 bp, Arabidopsis thaliana columbia
  unsure (1)..(364): unsure at all n locations
gggggggggcttatnggggacccttacttcccctttctttattgaaaagcttgtccccctcccggtgccgcncgccctattttcccctgggggccgggcgctcccaaaaaaaaatnttcaaaactcaaaaaaccaattcccgagcgacacaaccgtttttcaaacctttaagccttgctaaagctcgtgctgctccttttgataaaaaaaaaccttattttgcctcccaatcttcctaaagggggggggctctctagggggttctcgtaaaaaaaaagcctttgccccctacccgaagtctccttaaaattgacccaacaccattaaaaagggctcaattttccccaaattctcaagagaaggg

SEQ ID NO: 122602 - DNA, 511 bp, Arabidopsis thaliana columbia
  unsure (1)..(511): unsure at all n locations
ggccccctttggttttttttttttttaaatacaaacaccttgtgtcccaatcttgaatatgaaaatctctcatcaccaaaataatacaccccctcttatatcctcaattgggaaactttaaattaaaccccctcaaaacttgccaaataagctaaccttctcctacccttttgaatgggagcgggggcanactatttgcatctacaccactctttttaaaaaagggcccttatttcttttaaataaccacatcccctcttctggttgttaaggcccacaccctgagggccccccaaaatttgtttacccctccccccttttattcagatttaaaaaccctccgtgtcttcgtttcccatttaaaaaaaaaaaagttttgctcgacctcccctttttgggccctctccaattttttcttaaaccccattgtaaaccccctaaatgctcttacccttcctaaaaattcttctccactgtcctttcttaacgcttgggccccttttttcttttt

SEQ ID NO: 122603 - DNA, 495 bp, Arabidopsis thaliana columbia
  unsure (1)..(495): unsure at all n locations
gggaaaaaaannnnngaaaagctttttaggtacactctcanaanactatgacgtcgcatgcacgcgtacctaagcttggatcctctagagcggccgcccttttgttttgggtgtggacttaaaattcaatataaaatcaaactgaaaatcaaaaacttatgaggggtatacctgtacaacatcgaaaatcactttatgaaaaacattgaaaccaaaaatttccgaattctttggacaatctctgggacatacctctgtttaggggggggtaactttaaaagagcttggttaaaaaaaaaaactccatgatggcaaaaacatttccccctctggagccttgagaaccttcacaacatttggcctaaacactccctgttggtgcaacaccaacctagtgggctttgggccaaaacccttccggcggaactcgctgatttaccggaacaccggcaagcgtaatggaccaccctttaaaaaaaccttggttaaaccggc

SEQ ID NO: 122604 - DNA, 495 bp, Arabidopsis thaliana columbia
  unsure (1)..(495): unsure at all n locations
ctcctcaggcccgcttataatcccggccttttttaccgggtttcaaataagaacacacttttcttagggccctaacaaccgaagggcaatccttttttaaaaggggggggattttaattcgggaccctttaaaaaaacctctccttggaaccnctccgcaagggccaagccttccctcttttcccaaaggtttttccagggtggcctccccaatttaccccccttggcttttttttattaagctacagcccttccccctttttacttaaggagcttgcccggaggacccttacccccttcttggggtgggacaattaaccccctcttcccttatttgaacaagggcccgaggcttttttcttccggcttcttttgaacctttaacacccaccgcggtgggggtcaaaaaaccggggggttgtggggtttcttcttcttaccccaggggtgggaccccctccccagccctttaaaaccataaagggggatccccct

SEQ ID NO: 122605 - DNA, 445 bp, Arabidopsis thaliana columbia
taaacatgttttttgaagacacttatccaaatgagatcccgctttttatttacccaatttcatctcaaatggggatcttaattttactttattggataaaaaggggcctgtgatttttttcaacttgggggggggatttttaagctctttcccttaaaaaaaagaaaaccccaaaaccttaataaaaaaaccccctttcttgccaaaagaaggggattgtattttttggttgggaaagcggaaccctaaatgtgtaattgggcccgcggtgcccagaatcattctctttattaatgttaatcaaaactacttattgttgttgggggttttgaaatccttttccttaaaaagaaaacctgaatcgcaactctaccccaactgggggatttctttattgcgcttcaaccccctttcgtgcaaaacttgggggggggggtctgaattt

SEQ ID NO: 122606 - DNA, 453 bp, Arabidopsis thaliana columbia
  unsure (1)..(453): unsure at all n locations
cttcaattaccctcccccagattcccccngtcggcccacccctcccaataaaactcactaaaaccctcactcttcccacatctcttaaaaactaaaacctttaatttccccatctccccaatcaaaaattggccacttttttcttcttttccaaaaacccctattaccttttttcccaaattctgttttccaanaaaaaacttttattaaaaataaactttttcgaaaacccattccttaccttcccaagcttaaaaataaaaaccaaattcatgaatttttcctctctttaaaaaaattttattccccctgaataaaccttaaatcctccaaattccattttaaaaaacctcccacctttctttacaaaaacctacccccaagccaaaaacccccttattgaaaccattttatctccatttttacccaaaaattaattttttttttcaaaaa

SEQ ID NO: 122607 - DNA, 451 bp, Arabidopsis thaliana columbia
  unsure (1)..(451): unsure at all n locations
aataaaaaaanggaaaattttattaaatattctangtcttacatattatgatacatacattgggataggaattattcaaacaacatcngacattctttttggggggccctaaggatagtctattaaatcatttcatcgatttcttgggggggggggtaactttatggggggggcttttaacaaaaanaaaggctgtaatggggtaaacccggcctttgcccgggtttccccggaccccattacccaaagggtgaacccatattaaccccccccgcaaacgcggaatggagataaatagaagggaatcccccttttgccccggtggaaaatttctgtttaccccatgcgggacgaatctttgccgacgggggaaattttttaaaccaaccggcccaggggaaacttcctaaggtgccttgaaccgggcgaaacaataaaaaaaaaaaggaag

SEQ ID NO: 122608 - DNA, 499 bp, Arabidopsis thaliana columbia
  unsure (1)..(499): unsure at all n locations
ttgggtttttgttttttaaaattaanaaaaantaataattanaccaacctttcaacangcaccttagaaaaaaaaaaaaatggcaaccttcacttccctgttggtttaaaactaaatattcacccccttaaaaattctaataagcccaattttctcccaatatgcaattttcttggggggggctttatttttttggccccctcaaaaataaaaaaaaaagaagggaaccccaaccctaanggattttcttccttatttcctcaataaaccaacaactttttttatcattcaataaaccttcacttaacccttgaaataaaaaacccttgtccccccctttccttgtgggaaacctccaaccccatctgtttttttagaaatggccccacccttcccccttcaggttttccctttattggggaccccaaacccctgtttttttatttcccaatgcccaaaccgttgtgaacctcaaaaaataaacccccttttttcccca

SEQ ID NO: 122609 - DNA, 546 bp, Arabidopsis thaliana columbia
  unsure (1)..(546): unsure at all n locations
gggttttttttttttatataaaaatcttttattttttaattacttccctcccccaaaaatttcctccttttttttcccttaaaaactaccccctcttttcccccctcaaaaaaaaaaacccctcatttcccccaaaaaaaaacaaaaaaaattccctctctaccccccttanaaccaaggggccaaaaaaggagcggggggtggggcttttcccncaccccgggannnnataaaaacatatccgcncncccggcgggggggggntcctcacccccttggaaatccccttccttctccgaaaaaaccctcanggcaaccccccccaaaaaccctctccccctcccctattaaaacatctttttttattaattccccccttaccaattctttttaaaccggggccccctgtttactctttcgtatttggtcacaaaaaaaacctctcttaaaaatcctttcttgaagccccaaatatacaaaccccgttaacacattcccccggtgaaaaaaaaccccccaaagtctctccctctccctctcaactcc

SEQ ID NO: 122610 - DNA, 495 bp, Arabidopsis thaliana columbia
  unsure (1)..(495): unsure at all n locations
cccccacaggtcttttttctctttagagcccccttttcttttattcttcaaaaaaaaaaattaaaaaaactcttccccanagaaggaggggagggnnnccccctccccgcgcccccccaacaaaaaataaacccgnaggggtgtcctcttcttctttccccccgggggggtctccccccgccgcttttctttttaaaaacaaaaacccgcgggggggctttctcttaaaacacaatctttgtctcccttctttaggcgggtttgggcccttctctttaaaaggagagaagaataccacccccttccttaagaagggggccctcccaaccccaccacccccccccccctttataaaaacctctccaaggccgcctcttccctttataaaccccgtcctagactcccgtccgaccaaaacaaactttttttttttctttccccgagagcccaagacggtcttctccgcgtatagaaaacctccacagtctttcccca

SEQ ID NO: 122611 - DNA, 417 bp, Arabidopsis thaliana columbia
  unsure (1)..(417): unsure at all n locations
ttttaaataaatttttaaatcaaaaaaaaaactctttacaaaaaaattgttaccctttcaaaaatcttttaaacccggattaccaaggttttgggtttcnaacaagggggaaaaaaaaaaaaacttcccaggagtttaatttttatccgggggggggtnttccttcagacaccaagtttaaaaaaaacctttcctcccagtggtatttttttctctttcttaagaattttcatgctccccctttttgggttcaagacttggaaaacttgcgggggggaaaaggggggtttaaaaaaaattttgggctttgagagggaacattaaaaccttggggggcccttataaaaaaaatatttctcacagtggtttttttaaaggggtaataatttcttaatgtttaaggttatcggttagaaa

SEQ ID NO: 122612 - DNA, 553 bp, Arabidopsis thaliana columbia
  unsure (1)..(553): unsure at all n locations
gaaagctggtacgcctccaggtacccggtcccggaattcccgcgngtggagccaggcgtgccgacttaaacatctaaattaaaaaatacccttttagtttatgttcttaaacaaagagaaaggcatctttttgtcatcatcaaggtgccagagcaacatttttctcttcaagatataacccttcctccttttaggcgggggtaatctccctctttgagggggagctaccacnccccgtgaaaaaaacctataaaaaatattgggcttctggcaaacccgttttgcacccattgtagaccattataaaccttttccttaaaaagaaattctctaaaatttccccttagaaatacttttatcctcgggtaattctctttcccaaaaccttaaattaaagcgtaaaattttcttcaatcctaaaactcctttcaccaggaaaaaaaacaaccaaccggctttggcaaaatttaaaaaaacaaacttttctaactttccaacacttatcaaaaaaaaaatttataccttataaaaacgggtgtttattttttttttc

SEQ ID NO: 122613 - DNA, 563 bp, Arabidopsis thaliana columbia
  unsure (1)..(563): unsure at all n locations
tcccccctgggcgagggagaaaagnnnnngggggccttttggtgccctctccaaaaccatgaccgtccctcgccccctacgtaagcttggatcctctanagcgggcgcccccgcggggggggggttttaatttatttctttttctccctctctgaaatccccccctcttttccccttccctttggggccggggggggaaaaaaaaaaatcctttaaaggggggggggtttctttcccccccttggggggggggtggaactcttcttctttttttttgggggggggggggaccctcccggggttctccccccacaaaaaattctctttttgtagtgagaagggggggagaaacccccttttcttgtttgccccccccaacacccctttggggcggatattttttgttcccccttatgggggggcgttccctccgcggatacaaccccctcctctttgtctctccaccacccacaaaaaagtctgtctctcggcctctctgaggggggcgcccggtttccccctcgtgggcggcggggcgccgtccctcccgggcgggcggcacc

SEQ ID NO: 122614 - DNA, 544 bp, Arabidopsis thaliana columbia
  unsure (1)..(544): unsure at all n locations
gacgtcccatgcgcgcgtacctgagcttggatcctctagagcggggcgcctttgggggggggggggttatttatttttttctttttttttctttcgatgcgtgtnggggggcgggcgccgcccgccgtaaacgaaacccccttggcctaaaagagggaccctgtgtgtggagccgggcgcccctccgaggtgccaattccccttactccccccccctttgtcgggggcgaagggggtcaccccctcgggggttcccctcaaaaaaggggggggggggcggggggtcccgtgccgcgcggtgcgcccgccgcccttgagcggcgcgcccccccccccttggggggtggtgtaggaacagaaccctcgtggggcgggggggcgccccccccccccccggcggggggctcttgtggggggggggccgcttcctctccttcgtcgatgtccgacgggcggggccactggggtgttccccctgtttgtggagcggtgggtgagggcgtccccccccgcaaagaggccgcggggggtgagcccgcggggg

SEQ ID NO: 122615 - DNA, 318 bp, Arabidopsis thaliana columbia
gccttcagcgttgtactgtaaatcatcggttctcggtcgcacccttcccacctccactccgtccggtcacttgccgctccgtaccgatttcacgatctttttttttcgggggggggggggtttcatttcggtcgggcgctctcgaaaaaaaacaacttcttctggtccatcacctttcgtttgtcttacgtccgctcctgtaatattgtgcgcactccagtttcgacccaccccacttcgcttctcgcttccttcatatgtgttagttaggttctccgttcctatactagaggctgcctggctatcgactcgcgctct

SEQ ID NO: 122616 - DNA, 509 bp, Arabidopsis thaliana columbia
gacgtcgcatgcacgcctacgtaagcttggatcctctagagcggccgcccttttgtgtttgtgtttaaccattttctgcaatttccattggacaaaaaagatgataattatttctcgatactgggaacaaactactcatattcccccaaaaaagaaaaaccttgcagataaatggggatgacaaatgtgcaaaaagacaaaaattccattgtgagggggggaagttttgttttgattaccccatgaaaccctcaggagcagctccgcaggagccttgggttttggtttggcaacacaatgggctgagggggcagtacccttcctgcttcggaagcagggttctgaaccccacttcttggcacttgagccggatcaatcactccagtttggaacaattcttatttgatcaagcattggcgtgggccccttcctcccaatggtgaactaatttttttcacaacaacttttttcttcatgtccaggggtttgagaaataaaagggggtgggt

SEQ ID NO: 122617 - DNA, 450 bp, Arabidopsis thaliana columbia
  unsure (1)..(450): unsure at all n locations
gtacccgtccccaattccccgntcgggccacgcgtccaaaatatcattgaaacaaaaacccaccttttaaagggtcatattattttctttntcctaactattacgtcactcaatccccccaaattatcaaaccatttttttcttctgacctacacacttccctttttaactcacgggcaactcctcacatctaaaaatccaactaaaaattcctcctggccacccttcaatgcagccatttacttctacccaaaaggttttactaccttatgattaccttaaaccacttacgggaacccttttatttttttcactaaaatggatttaaccccccacgtaataaaacttttaaaaagctccttcccattaacaaccaatttattttcttcttaatccttcttttttccctcaaaaagcctcaaaaaaaaaattccccctaaaaggtttttt

SEQ ID NO: 122618 - DNA, 150 bp, Arabidopsis thaliana columbia
ttcactcttggaacttccctcggccgccattccgcggctggaaaacaaggtaaattaacaattttcagctgtgggactttcggccacattccggacattccggggggtcaagcaaaacactcgtaggttttgcaggggggggcaaaaaaa

SEQ ID NO: 122619 - DNA, 563 bp, Arabidopsis thaliana columbia
  unsure (1)..(563): unsure at all n locations
aaaatctatgacgtcgcatcgcacgcgtacgtaagcttggatcctctagagcggccgcccttttggtttggttttataaaaagtgaatcatattattagcaaacacccagaatgattctgattctgattcaagagcgttacaaaaataaaaacaacgggtcataatgaggttgtggcactgtgggaaacctctgtatgcgcgaattcttgttcttttaaagaatcctaaaacggcgcggggactgtgttttcaacgaaaacccgtacataaaaatcgttttacttcccattccttaaaatttgttaaaagaaatggaaaagggggcgaaattaaaatatagaaaaattttttcngagaagggaagagggcccccaattgcgggggggggggctttttccggttttggtaaccgggaaccctttgggtagggaccccccagaaccaaaccactttgctggttaaaagggctgagtgcgcaaaccggggcttttaaaggggttttttcttttttgcaggccaaaaaccataaaaccatgggggcttttgtctgagtgttaaccaa

SEQ ID NO: 122620 - DNA, 355 bp, Arabidopsis thaliana columbia
  unsure (1)..(355): unsure at all n locations
tcttcactacttaggaactgtccctcagtccgtccgattcggtcgccacgctcaaaatttccctttcctcaaacaatatttgttaacaaatggactcccgatcctttggagttgaagaagtgtatanattactttgaaaagagaaactatctttcctatgcagttaattcacataagaaagattgtgtcaattactgaactttttaaaaagtcaaattagggaattcataaggcctggctttctggtcatactactcctatgatgctttcttggattccctatgtagagaaagcccctctttcaaattctcttcatcatatccggaaggattattgcctccaaaaaaaggttaac

SEQ ID NO: 122621 - DNA, 384 bp, Arabidopsis thaliana columbia
aaaaaaatttttttttttttttctttttaaaaaatcagggtttccttttttcttaatagaaaacaaaccatttttttaggggttgagttattcgacctgtccaactaaaaaccaaagcaaaaccttttttgtcaagggaagctctaataaaacaaaaacaatcctcaaatattcctgaacataacaaaaaaatcccctccccttttcacgggctctgtttaaacatttctgaattttaacccaatacttttttcggaatccatgggttttttttgaatcccttgggtcccaaacccttggaggctggaccattattccccttaagcatgaactttacttccccacactccaaattttttaattaaaaaataatctcttggaaaa

SEQ ID NO: 122622 - DNA, 304 bp, Arabidopsis thaliana columbia
  unsure (1)..(304): unsure at all n locations
tcctaaaaaatatcttctccaaaaaaatcccaatctttccttttatcacctttttttaaaaaaacccaacccccccccctttttttttcacattctctttaaaaaccacttattccccaaaggcaatnttttctccattaacctccacctaaaaaaaaagaacccttcacttctctttataattaaaaccccccccaaaacttccctcccccccaacaaaggaccaacgtttttacctctctttttagggaatccccaaaaaccgccaaagtgcccttcccattcttttgaacccaaaaaaaaa

SEQ ID NO: 122623 - DNA, 550 bp, Arabidopsis thaliana columbia
  unsure (1)..(550): unsure at all n locations
ccctcagcctttcatcccttaaaccttccccccctccagggtttagggtgttaaaaaaaaaaaatttttatatctctttaataaacctttctttttacaatacctaccatcctctttttctttacacctctttctttaaaaatcaacatcgccaactnccaaatttcttttttctaccaccccctcttttcctccaaacaccttattatttctttttgaggggggagtttccatcctctccctctttcccaaacaaaaaaaactttttctttctcctctaccacctcccatcaccgcctccacctctttccccccctatctaattaacctctctctaaatgccacctttccctctcttctacagtataaacacacattcttctttttccaacccacccatacccacttcaccaccctctcccacctttccccaatcacttccttttatcccccccctgctttactcccatatatctcctaatcctttctccactcttcctctcataagacctactcgtccaccacttctcacctttttctctcctatcct

SEQ ID NO: 122624 - DNA, 482 bp, Arabidopsis thaliana columbia
  unsure (1)..(482): unsure at all n locations
tccgacttactttaagggaacgctggtccccctccaggtaccgtgccccgatatcccgggggggcgcgggcgggcccgaaataaacaaanaaagaagttgggaaaggttttttcccacgcaaaaatttccccgtaacctttccttgtgcgggttatggaatgagcttcttttatcccaagctttccagtagggctttaattgttttttacaaagggggggcggccttttcgggcgagggaaaaaataaaacggcgngggggtttcccccctccttcccccaaggtgcctgnaattccagaggatacctgaccttttttaaggataaatttaactttcgttttcctctctcccccttgaaaggggaattttcttcaaccttaagattcttttggtaatcttacattgggtgggccaataaaaaaaacaaccccttttttttttttcaacgctccccgttgtggaccgtgcttttccaggggct

SEQ ID NO: 122625 - DNA, 502 bp, Arabidopsis thaliana columbia
cgaggcgggggaaaggaagaagaggagggggggggcctgtttggtgacactcttataaaatctatgacgtcgcatgcacgcgtacgtaagcttggatcctctagagcgggcgccctttgggtgtggggttacataaaaatgtattttattttcataaataaaaagaaaaacaaggcctccttcacccttgccgggagctaaaaaagctaaactcacaaccccctaaaattaatccttcaatgtcaaagggtatcacgatctaaccaaaaaattgacccttggggggggggtttattacaaaagcccccacaaaaaaactaaaacacggcatttgttgtttataaaaggcagtttggcatgggtagcttgcccaaccagaactcgtttagcgaacgcggggagcgtttggatgggtcactaccccacatgctgaagaagaggccgttaatatacccccggggtgtaccaacaaaaagtggggatttctcctctttgtgcccaa

SEQ ID NO: 122626 - DNA, 516 bp, Arabidopsis thaliana columbia
ctctacaaaatcttgacgtcgcatgcacgcgtacgtaagcttggatcctctagagcggccgccctttggggggggggggttttattttatacaaaatcaatatgatttatatttgcaacacatatttagccaactgcctttaaactttgataattatataaaacccccttaacaagtaagaaaaacaaaatctgggacatgggcaagtaagctaaaactttttcttggaggggggggggttttcctttggggtgttctaaaaaaaaacgcctgaaactttaaaagaaaaaagaacaacgaagacgacccaagcattttgaattagggaaaagtaacccaagcccttagcctgtgacctcaaagttcagtcctataaataaccttctaaacacaagccccaggatacattccattggggggggaaaaaattttaaaagcgaaaagcttatccctttgagggtgttttattgtataaaggtttttttggttgaaaagtattttaaaactgggtttttt

SEQ ID NO: 122627 - DNA, 534 bp, Arabidopsis thaliana columbia
  unsure (1)..(534): unsure at all n locations
ggaaagctggtacgcctgcaggtaccgggccggaattcccgggtggggccacgcggtgccccaccgtccgggaatctttgaactaaattcgaaaccttttaatgggtaccgagtcgggttcggatccanaatcgagctcaaacgggtggagccgggctcgtggtctaattgtcaagactctggttttatttggggggggggtgtctataaaggggtcactaaatccaacactcgtagagatcacgcccgggtcgtctctcgttctctcacgggagaaagtttacgagggagcaacggtcaaaaatcctgatattacttcaactaaaatggtgagtngcccagtgttgaaggggggatggtcanaggtttttatctcaaacagggagaccatttttacttttttttgggtaatgggaatggaggataatgggtccttcttatggtaaaacaaaatttttcttttttttagggttttggagactcttaaaaccggttcacaaaatttttttgggaaaccggggcaaaaagctaaag

SEQ ID NO: 122628 - DNA, 212 bp, Arabidopsis thaliana columbia
  unsure (1)..(212): unsure at all n locations
cgacttacttatggaaagctggtacgcctgcaggtaccgggccggaattcccgggtggggccggcgtgcgggtgatactactgtganatcacgtcgtgttgagactgnaatcattcctgtttctcctgaagatgtgcctaacagagaggagcaccttgagaggttgttggaaatgcaacactttggtgatacatcggttggggatggggggg

SEQ ID NO: 122629 - DNA, 606 bp, Arabidopsis thaliana columbia
  unsure (1)..(606): unsure at all n locations
aggtgcactctacaaaatctatgacgtcgcatgcacgcgtacgtaagcttggatcctctagagcgggcgccctttgggttggggtttttatttttaaccacaatataatttnccaaacaaccaccacgagtgttctttggattttgtgcttgtgagacaaccgcaacgaatacaataaaataggggtgataccgtgctttcgaaaaacgaagcaacacccttggtgggccgcattgtttcggacgcctaaacaactccaaaaaaggggggggggcggtccttttgccgcgccgtcaccggaaacaaatacacacccctgacaacccctccgctgggttcttccgtcccaaaacagcaattttggtggggggaaccctccctcccgggaaaagccctgcgagaaaaaaaacggcgcaacgagcggagaagcctccttttccaaacatgtgtgttccaaaaaccttgccctttgttctcaccccggcactcttccccttctagcacaatgtgggttgcccggcctctctgcgcggtttgagcgggaacctagaccctcccacaacggggaggctgaggggccgaagaggggttttaaatacttccaca

SEQ ID NO: 122630 - DNA, 502 bp, Arabidopsis thaliana columbia
  unsure (1)..(502): unsure at all n locations
aaaaaaaaaaaggggggctgcngggagcactcctccgactcactataaggaaagctggtacgcctgcaggtaccggtcccgaattcccgggtggggccaggcgtccnaatnacactttanattnacacatatactttccattaacccctccattttcccgcctttgtctcactctcttcccaccttggactagaaagggactccctggttcaaaaacaacaagcctccctctgtttcttataccggaggggggaaacnnccccgggtcnaattaaaaaaaaacgatcctggtgtctacgctaaccagcacctaaaaatttatcttcgctcaagcaaagaagaatgtgctccctctaatatttccaccgtaaaaccaattgacttaaatgattgcttctatgcaaaggggaaatttattgttacccaaggtttaaacactatggggtgggcgaaaacatgtaattacattcatgtgccgatatcacctaccaaaccaccttaa

SEQ ID NO: 122631 - DNA, 374 bp, Arabidopsis thaliana columbia
accacttagaacattcaggcaagctcgcgattgctgtcgtatttgagttactctcagatcacatactaagcgtgtaatgtctactcgacatgacatttatactcgactcccgtctctaccatcatttttttgtttattagggggggggtcttgtaccactccttgtccattcgtcacaaacaaattcgtttctcgcctcttccataactatatatcctacgttaccctctctatccgcctcaagatctctccccgacttgatcgtgtccgcgcctggcttctcaggtccaaagcactctcctcagtccgctataccccgttatatgtaatgtattttcacgtactcttacagctactaccgcatagcaaaatat

SEQ ID NO: 122632 - DNA, 634 bp, Arabidopsis thaliana columbia
aaaaaaaaaaagaaacctctttttaaaaccccccccacctaaaaaataaaaaagaagacgcccaactcataataaacctataccttttttactcgagggggaaaggcgacaaaaaaaaaacgcccctccccactttcataactcctcaacttccctcacccccacaattccaacctctcacctaccaacaccctcctcaccacctcataatcctcactatcatcatttacttcacaacaaaaaaaatcttctttacaccggggggaggtcaccacaccccttacccccccacaaaaaaaatccctctcgacttcctcctttcctccaacacttataatctcacctttctcttcctttcttcacctcatattctacatatcatattacacatcatctttttctccatataacatacttcaaccacccattacaatccctctttcacatccattcaaataaaacacaccaatccaactctacaccccacacctaccaatacaacacccacccctaatctactactaccctccacctaccacactcactacaccaagcctttactcttatctctatatctcacccctacaaccacccacctctccacaaatccataactcttcaatcctactcctct

SEQ ID NO: 122633 - DNA, 124 bp, Arabidopsis thaliana columbia
ctatatatatatcttggaaaacaacgggacccgggaggttctttcccctctaacaaattgggtcgtttttggaaaagggaggcattatccaaattttcttactccccagggggggtccttttta

SEQ ID NO: 122634 - DNA, 444 bp, Arabidopsis thaliana columbia
  unsure (1)..(444): unsure at all n locations
ttcattcttaggaactgtccctcagtccctcccaatcccgtgggccacggctcccccacacatccttttttncttttttttttccccattcccgaacaccccgaagaaatctacgaacttcttaattcctgccctcacaacccttagttccctcccgggggtttcttcttttgccttaaaccattaacaaggaaattcgggaattttaaattgtgaaacccatatccgaaaccaaaaaaaataccgtttttctccctggtgaccctactttttttcttaatttaaccaacaaaaaaaaaattcccgcttttcaaaaacacctttttctttcaccctaaaacccaatttctttttaacttaaaaccaaactccttgatctaaattcccaataaacaaaaactttttcttacaagaaaacccctctccaaaaatttttttaaaacc

SEQ ID NO: 122635 - DNA, 475 bp, Arabidopsis thaliana columbia
caaaatctatgacgtcgcctgcacgcgtacgtaagcttggatcctctagagcggccgccctttggggttgggttttttttgttctgacactctaaactctcaaccaagtaatggttacaagaaagtgttctaaatcattcaatagggccatgagaagacggggacaaagaaatctttcttgtgattaatcaaacaaaaataaagcgatggattcctggggaaaaggggggggggggaatgtctgtggttttccctttaaaaaaaaatggaacccaacctttgggaggcgaagaggagccgcaagaaagagaacctttttggggaagggccttgtttttattataaaaaacccctggccacgatattaaaacaatctgcgtttattgggggcacaggtttcgttgggggccgcgtccccccccgagagcgggggacttaagggttatggagaaaagaagttttctttaggggcaaa

SEQ ID NO: 122636 - DNA, 580 bp, Arabidopsis thaliana columbia
ccaaaatctatgacgtcgcatcgccccctacctaaacttggatcctctagagcggccgcccccggggacgggggggttttaaaaaattttttttctctttccccccctcccccccccaaaaaaaaaattgcaattcttttccccccccgagggtcctttgttttaaggcggccccctccaaaaaaccatttttccctgccacactaaaaacctaaaaacccctttttttcttttctttgcggggggcggggaaaaacccctacccatccctacgaaaaaaatccctcccccaaccgtccccacgttgaaaccccccgcttttttccctccctttttgcgggcaaacatcggtgcgttccacttgtaatctcactcttccacccaaaaacccccgcccccttgtttactaaaaaaatctccccccgtcttttttttcctgtccttccaccccccaaaagagaatttccccttctccctcttccttctgggggtcctttcccgcctccctcggggaaagaccatacacccacccacccctccccaaaatcccgtgtgcccccgatgacctgcgcccctcccc

SEQ ID NO: 122637 - DNA, 300 bp, Arabidopsis thaliana columbia
  unsure (1)..(300): unsure at all n locations
ctctctatatggaaagctggtacgcctgcaggtaccggtccggaattccgggtcagccacgcgtccgccgactccggagtttaattctggactccatactaangattctcataccttctttacttctctcgtgttatgtccgtctctggcatactgttgctctgggcttcttttggctgccataacccaataccacatatcaaccagtacttctttacatcgaaacaaatatacgcgaaatctttcacagggggggttctctatgattactcaccctttctgaaaaaaataaaaagtggt

SEQ ID NO: 122638 - DNA, 516 bp, Arabidopsis thaliana columbia
  unsure (1)..(516): unsure at all n locations
gaagagctatgacgtcgcatgcacgcctacgtaagcttggatcctctagagcggccgccctttggggttgtggttatctttaaagtttcattaagtgaaccacatattaagcagttttttgaaaggaaaacaaaccttgccccacacaataatatgttctcagccaaatcactgttacatattggtacaaaaaggagtctcttanaaccacaatggttcaggacggggggggcggtctcatcctggaaaggattcttaaaagggcggcctctttccatccttgtgcttaaaaaagggcttatggggtgagagacatctttcttcacgggcggaatcaaacaccaggccggggcctttttcgtcactgggcctaatgtgcactccccgaacaccttggggtttattattataatgacccgggggatgcggtgcgtttgacccttgggcccggggaaagaatgggggggagatacaagcggtctaaaggtttttacaaaccggggggtcaatggggaa

SEQ ID NO: 122639 - DNA, 514 bp, Arabidopsis thaliana columbia
ttggatcctctagagcggccgcccccgggggggggggtttttgtttatttttttttttttttggaggggaaaaaacttttctattaaaaattgttaactttttacactcttaaaaaaaaaagtctcacgttaatgcaaaaccaaataggcggattattgtggaaaaaagaggatgacaggtttggggatgtgcgcgggaaacaaacaatatgtttttgggctttgttcaaaccaaaaggttttgtgagggggaccctaaaaaagactcttcaaaatcttaatatgtcaaagactttccaaaaaaaaatttttttaccggggcttcttcaccttgggggggcgaaccagggggggaaaccccccgaaaaggggggagaaaaaaaggaaggtgcccccgggggggtgacccctttttggggttttcagggatgagggttgacaccgtccgggggggatttgtttccgaccttcacccccccgggatttggaaaaaacccccgctcccccctttttt

SEQ ID NO: 122640 - DNA, 163 bp, Arabidopsis thaliana columbia
  unsure (1)..(163): unsure at all n locations
ctggtacgcctgcaggtaccggtcccnaattcccnngtcgggccacgcgtcccaataaaaaaaggcatattcctcaggttggcatcatatggaaatgttctgaaggaactattccatgaggaggacaaaggaagatgatgttttgaaaacaagttcaattaaa

SEQ ID NO: 122641 - DNA, 549 bp, Arabidopsis thaliana columbia
  unsure (1)..(549): unsure at all n locations
ttttgtaaagggaaaaaaggggggggcctttgggtgcactctacaaaactatgacgtcgcatccacgcctacctaagcttggatcctctaaagcggccncccttgagaaaggggggtttatattaatttttttttttttttctcacctttaaanatcaaatagatttacccaactttggaggggaaaattacatataacattttttcataaaatttttttgtgaaactcaaaccaaagggtcctttacatataattttttctgaaaggggggggattccaaagagggggggttttaaaaaaaattttttcttaaacacctttggtttggtaaaaaaacttcaaaaagttccgactttttcttttttttttatcaaggcccttttaaaaaagtttttttaaagcccattttggaacaacctttttgtgtaattaaaccctttttatttcccaaatcattaaaaccaaaggttttcttcggatttttccccggtttttaggagccccttcctttttattccaaccaaaaccggataaattttctttaatct

SEQ ID NO: 122642 - DNA, 508 bp, Arabidopsis thaliana columbia
atgacgtcgcatgcacgcgtacgtaagcttggatcctctagagcgggcgcccttgggggtggggggtttattttttttttttttttttggaacctctaaaaccaacaaaataaatatcttttcctaaagggaaaccagagtaataaaaaggttcctgaggataaaaatcctcaataaagaaacccttagagacgatgagaaaagtcccttgtgaggggggggacttaaaaaaagggggacatatggaaaatcacctcttataaaaaaaagatgacctttgtgtaaaaaatctcatggtgttcctcaaacttattcttaacaggctcttcttcctggggcttcctttctctcctattgtaaatggtttttttttccttggggaggggaggaggaaacctcatggcttttaacagttctttttgcctgttgaggcagaaaaaatttttgagttaaaacccatttggggcttcttcgggaggaaaagccccccattttttttgaaaccttg

SEQ ID NO: 122643 - DNA, 495 bp, Arabidopsis thaliana columbia
aggtgcactatacaagatctatgacgtcgcacgcacgcgtacgtaagcttggatcctctagagcgggcgccctttggggggggggtgtttttatttatttcctttttcttttttttgccaaaaaaaacatggtttttattagaccctaggcggaacctcgaaaaacgactttttccataaacaaaaactcttttttttatttggggggggagagataatgtgacactttaaacccaggggggggggaacccccccccgcgataaagacccggcattaaaacgagctagggggttaacaaaaaaaatggcccgggggggggttggcccgggtctcatttggggtggggaaacatggaaaggggggggcttgaaccctggccacttttgagatacactggttcaccctcgttttgagttccccgggggccttccctgaaaacccatggaaacacggggggcttccagaagggccggccaacccacgggtgggcttgg

SEQ ID NO: 122644 - DNA, 486 bp, Arabidopsis thaliana columbia
  unsure (1)..(486): unsure at all n locations
cttactctatggaaagctggtacgcctgcaggtaccggtcccgaattcccgggtggggccacgcgtgcgcttccttgtcnctattgccttcgccgtcattttcaccgactccaccggcatggtcgtgataatggggcagaagatatcgtgcattcctcctggcgaacacgcggagctatccatcactatgcgtccttactctttggggggggctccngnccaaccattaccaaccgaaaaaatctaactcaagcccgcctaaaaatcagcctctcccacgctcaaagcgccccgaaaaacctgggggtggtgccagacctcgggggggaagaaaaaccaagaaaaaaccgggcttggtgactgggtgggaataattgaaaactctgtggaccacctaacccttcgcctcgggtttttaaacacctccgggtttttgggggtcaactaaagaatgcccggggcaaatgaacattgcacaaacggggg

SEQ ID NO: 122645 - DNA, 505 bp, Arabidopsis thaliana columbia
  unsure (1)..(505): unsure at all n locations
nnnnnnnnnnnnnnnnnnnnnnnnnnnnnnnnnnnnnnnnnnnnnnnnnnnnnnnnnnnnnnnnnnnnnnnncttcggggtgggggttgatattaaataatctctttttataaaattggttttaacttctaagcgctggaaattaaaaatgacttttccgtttctgtgttttgagaaaaaaaagcttttacatgtttgttgcccggcgtgtttacacccagataaatttttctgtgggggggggggtaaattccccgtaaaacacttataaaacctcttgatggggatggcacaaatgtcccaccaaaatgggggttgatgaaggggaggaccccgccttaaaatacttttttcttccttctggaaagggcaaattttgtgtgccggaaatggtttaggtggatccttttcccctctttaagctttttgagcgggcacacccgttctggaaaaaacaggtggggtgttccactttaaaggggagggtttattgggggatgaaaaa

SEQ ID NO: 122646 - DNA, 514 bp, Arabidopsis thaliana columbia
  unsure (1)..(514): unsure at all n locations
nnnnnnnnnnnnnnnnnnnnnnnnnnnnnnnnnnnnnnnnnnnnnnnnnnnnnnnnnnnnnnnnnnnnnnnnnctttgtggtttggttttttatcaaaaagtacagccttttacccattttacatgtgccataagcataaccaaccataggtttcacttccatatgaagaggcctaatgccgaaccattaaaaaaaaaacccctaacaaagattgagatccatcatagtaatctaaaggggagggttatataaatagaaggctttccaaaaaaaaacccaccacttttggagataaccggttttctcttcttcaccgtttaacagggggaagatctaacggccaggggtggggtcattcctagcaaaatggccctaataaactcaggtagaaggtgttccctggtgtggattatcttgaagggaatactttcgtaaaaacaacttcttgggcggaaaaggatgcaactttgtggccccactgcttttttgtaaccccaacgggttaaaaagggg

SEQ ID NO: 122647 - DNA, 490 bp, Arabidopsis thaliana columbia
ctacctaagcttggatcctctaaagcgggcgcccttttggttttgggttttctcttaatactctctggttatttctctaactttatctcacaggaggatatccgaagcttcttttgcttgggggcaaactaaagtgggggaaacaaaaggtggcaaactggggaaccaatggctttacacttggaatgaaaatcccggggggggaaacccctaaatattgttggaacaaaaaaaaaaaatttgggaccccctgcctctctattttttgaaccaatcctttctttgagaaacaaattttttgggaagggtttctttgagttctttttctgggtggctcaaaacacttaacttcggggggttttaacggcccgggtgggaataagctcaaacgcctcgggggtccggcctcccttacgctgaactcccggcgcacacaactgctttccttaccgtctccccccgggcctaaagccttttttggggagccatg

SEQ ID NO: 122648 - DNA, 518 bp, Arabidopsis thaliana columbia
gacgtcgcatgcacgcgtacgtaagcttggatcctctagagcggccgcccttcggggggggggggttttttttatttttttctttttttttggcgggggcccaaaaaaaccattttcatagggggatttttccgggcttaaaaagaaacaacgggggaaaccgtggttaccacccaagatttttaaagatggtgacaaacaaacaaacaaatttctggggggggtgggaaggtgacccatttctgaaaagaaaaaaatggccccttatagctgtttgaggacataacaaatttgaatttaggcttatcctcaggggggactttttataacaaagggggctgggcttgcgtgttttaaaacccattgtttcaagtttctgtgggcttaaggcaaccctctgagggcccacgcccaatgtcttatgcgccctgggcccgccccttttaggtcgaaatacggagacttggaattttttctttattattccccgagaggggggggggtgtttaactccccct

SEQ ID NO: 122649 - DNA, 283 bp, Arabidopsis thaliana columbia
actttccttttgaactgtccctcagccgccattccgcgcccgcgtccccctcataacggagaataaaaaatacaaacaccgccctatccaccgcgctatccaccgcctctaaaatggggtctcttctctcgtaaacagtccaccctactttactctgtgtctacaacgtgtctgtgtcaccccttttggccgctaacatatactctctgctcctaagcttcctttcgactaccgaccacggaggtttattgacatgccttatctctttgaactcgcgcacttg

SEQ ID NO: 122650 - DNA, 556 bp, Arabidopsis thaliana columbia
gacgtcgcacgcacgcgtacgtaagcttggatcctctagagcggccgccctttgttttttgttttttttaaaactaaacaatgggctaacgtgttcatgaggctcaaagatttctccactaaaaagcgtgggaaaaaatggggttttttgaaaaagaaaaaaaccagggtgttacctccaaaagcggggagttaaactcattaagaggagggccgggggggggccttttaggcggcaaaaacgcgggggggggggagccaccctatttgggcgttgatccaaaaaatggcaaaaggcaaaaccctcttggccgtgttttgtgtttgttttaaaccgaattttttgtcttttgccttggggaaaaagcatatgggcaatcttttaagggagaccctttttcttaagaaaacccactcggtggttgttgccacttccttcatgtggcttttttttggccacaggaataagtctgtggtcttggggtttctgacatcagaaatgggggggcgtgggtggcagtattcgctgaagcgcatgttgtcccgccgaatgtggg

SEQ ID NO: 122651 - DNA, 408 bp, Arabidopsis thaliana columbia
ctgtccctcgtctcccattccgcgccactcatcttcttcttactaaatttatttctttatttggaatcaaattattcaatcatcgaaaattaaatcttccccaagaatcttttattgaaggctcaaacaatccttcataaaacctctctatccatacaaaaaccatttccttgtttaagcgaaatcttctttttgcaaaaaacccttccaagtttcgtgtaaaactcttttttctttgaagaaaaactttaggccgtcttggtcccacccttttggttctttcactcgtagatctttttaattttttccaatttaaacccctctttaaccctttttggccatctccccctttaacaaatttccccaacccaaacccttttccaaaggcttctttgtttcttttttaaa

SEQ ID NO: 122652 - DNA, 526 bp, Arabidopsis thaliana columbia
gacgtcgcatgcacgcgtacgtaagcttggatcctctagagcgggcgccctttggggttttttttttttaacagaggtaaaaagccatatttaacaaaaaagcaaaaaccttaggatcctcattacaggaagaaaggggccaggtttcaagatttgtgctacatttaggcaaaattcacaactgcgtaaaaaggaaaggatcatcttatcatatggggggggatctcccatttcttgagctccatgccatccagggggaaaactcctcgattggccttaatcccaacctcttggccagtttggtgacaagaactgtcccattccatttccacaaaggatttgcttgactggtcggctcatattctaatccggattctggggtatctcccggaaaaatttgtttaaagggtggtgtcctctccggtttttattctgttcctgggtcttcactttaggttccaggtggggcccgttctttaactttcttaaaaaaaaggagaagctggccctttggaaaaacctttaa

SEQ ID NO: 122653 - DNA, 547 bp, Arabidopsis thaliana columbia
  unsure (1)..(547): unsure at all n locations
cactttcttaggaaagctggtccctcggtccggccgattccggcggccaggcgtcgacatacatcaatcttctttattcttcttcatgggggataagtacaaaccttgcgctttactgcattcccttcttggtgtgatttcatcggctttgtgagctctcctctggtttttttttctaaggggggggtggcaaaggagcttcctataaaggtaaagagggtttctgagacaatgacttcnatggtgctggtgacttggactccaaagcccttgactggggtccttaatggcgctgatttctccgttgagcgggctcagggctatatcaaaactcgaaaggcttcactgggggccggggcaatgcaaccaaagcatggggtgggtcccttattggcaaagcttcctaaaaaaaggactgcctgtttaaccttgaagatttcgactgtaaaccacttttgaagggggccttttcccgccggggatccaatttaaaagttgaagatggtgcattttttaacccaaaaaaaaaaaaatttggtcaccgggg

SEQ ID NO: 122654 - DNA, 546 bp, Arabidopsis thaliana columbia
  unsure (1)..(546): unsure at all n locations
ggggcagcgggggagggagaaggagggggggggcctttaggtgaacacttacaaaactttgacgtcgcatgccgcctacctaagcttggatcctctagagcggccgccctttgggttttgggtttacaaaggaaaatctctaccaaaaaatttaaacaaaacaaagctctcaaagaaaggtgtttgggtccgagttaaacaaatactcgcgaacctggacaagaggttaaaaaagaacaaaaaaagaaatgaagacttgaaattctctcnaaatggggaggggttgtgccacgagaaaccccgaagaaaaaatcccttttatagccgctgcttctccttttgaatacacccttatgaagtttctgcgagcttttgaaaatcttgaaaaaagtgggctgggggaaaaatcgtttgtttaataaccagagtcgccgaatgggttttgacattatgaagaaaaaatttccaaaagggggggtttgagcctctgaaggagtatctcttccaggaacatcgcccccccggaggtggcgatgggttgaaggg

SEQ ID NO: 122655 - DNA, 398 bp, Arabidopsis thaliana columbia
tacctccttcagatgctcaatcccgccttttggaattctttctattatttttaaccctcccggggttactgtgataaaccaaacctttctaccacccccatttgtttcataattttcataaccctcaaaaacatcttattggtgaaaacattaaagggagaacccggagacctaaaattgtttttcttctttcgtgctttcttacttccacatgaaattttgattccgaaatatcccaaattttcatttctttttttgtccttttttaaccactttgcctatttccaaaatttttttctaattccgaacccaaaacctttctttaaaaacttggtttttttaaatttcttgggcgaaaatttcccttttaaaacaaaaaaaaaaggggcgccccttta

SEQ ID NO: 122656 - DNA, 557 bp, Arabidopsis thaliana columbia
  unsure (1)..(557): unsure at all n locations
gagcccagcgagggagggaggggggggggggggctgntggtaacctctccaaaactttgacgtcgcacgacgccgtcgtaagcttgagtcctctagagcgggccgccctttgggggttgggtgtttttgtataaaanatacatttatatatctctccattaatctgaacagagcataaaatccctcttttttctctttagagcttttcattgggaataaagataccgatagggcgaaaagaaccactgggtagatgggcgaaacttctctaaaatctattttttagggggggcggttttttgccccggaagaanagggaaaaaaaatggagacattgggatggagggaccaagaaaaattctctcctctctttaggccgctgcgggttgagagagtaaccgtggtgaaaaaaccctaggcccaggtggggctctgggccgcgcttccaccatttggcgcaatgggaactctccaaggggtggagggccgagctggaatgggaatgtgccccctatggggggaaaacaacgggcgcgcgaggggtggcgaaagaagcc

SEQ ID NO: 122657 - DNA, 184 bp, Arabidopsis thaliana columbia
ttagtttttccttctagagagtccacatccaaggaattggaggaagaatattgtccgcaagggatgggcaatcgtcctatcgagatcggggtgattaattcttggggtgggggaaactctgaggagatccattactacggctcccgggggggaataatggtgcccctatgggtatataattccg

SEQ ID NO: 122658 - DNA, 526 bp, Arabidopsis thaliana columbia
  unsure (1)..(526): unsure at all n locations
nnnnnnnnnnnnnnnnnnnnnnnnnnnnnnnnnnnnnnnnnnnnnnnnnnnnnnnnnnnnnnnnnnnnnnnnctttggggttggggttttttaataaatttttttttttttggaatttaaggggaaattaaatccaaaaagtaaacaaacctttgtgcataaagggcaacttatacttaaagaggaaaaagaaaagttctaaagagatttgaaagcttaaaatcttgattgaaaccagggggggagagccttctcatatcgatagtctccacttggggggaggggggatatttgatttcttattggcttggcaagccatgggattaatgtgacctgctgtttttggaccttccccatgtcttctaccatttttctaatgccatatggggggaaatggctgcttggaaaatataccgggctaaaaaacttctttactggcccgccaaaaagtcctgggaggggggcctaaagagggaccactgggggagaacctcgcctgaaaaatttgggtggctaaatggcccca

SEQ ID NO: 122659 - DNA, 490 bp, Arabidopsis thaliana columbia
tgacgtcgcatgcacgcgtacgtaagcttggatcctctagagcggccgcccttggggtgggggggttttttaaaaattttttttttttcttttttttttttttatttttctttttcccggaaaaaaagcccggcgccaacccccaaagtgctaccgggggcgagggggaaaacgcacaaaacccaaaaaaaggtcttcacaattcttatcctgaggggaggggatttactgcggggggtctaaaaaaaaaaaaagtcaaattgggcgcggggttttttatacatgcggggagggcccacggaccctagaacgcaggacccaacccaactcttccggcgaaccccgggtggactggaagtgacaccggtctaagaggaggggccggaccggcggcggtgctatttcctataacgcccgaaaaagcggaaattgaccgcgctcggaccaccggctgtgaaaaaaaaaggggcgtgcagcctctggttacgcg

SEQ ID NO: 122660 - DNA, 380 bp, Arabidopsis thaliana columbia
  unsure (1)..(380): unsure at all n locations
acgactcactatatggaaagctggtgcgcctgcaggtaccggtccggaattccgggggggacgaggcgtgccccacacntncnnggacgcgtggggtgcgataacaatgggcgaaactatgaaagattttcgatgaagaacgatgaatcacaggaagaagaaatccccgatcaatttctctgctgggtttgcctggaacttctttaggggggaaattggttatctggggggtcatctatacatggttttggggcggacataagtccatgaatggctttcgggagtctcattgtgcgatatgtanagaccccgatggtcaccttccctttgggggcccgaagctttattttttggtaaagaagatggacccacttgcttat

SEQ ID NO: 122661 - DNA, 561 bp, Arabidopsis thaliana columbia
  unsure (1)..(561): unsure at all n locations
acaaaatctatgacgtcgcctgcacgcctacgtaagcttggatcctctagagcggccgcgctctcgggggcggggggtttttattaacaacccctccttttattactgctccttcatccacctggcgggattcgatagccccaatgtccgcccctnncgcccggcgcggggcgaaaacggccccgagacaaaagagaaaccccctcccgaanaaacttctttttttttttcaggggggggggccccaccccttgagggggtggggaaaaaaaaagaaaaaaacccccgctcccttccacctctcggagggggactcccccccgctcccttcttttttgtgccccaaaccctccccgtaaaaaacaacaacgcccgaggggggggccccccccctcctgtggtctgtggcgcctccccgaaacacactcttgtgtgggaatgtttttcgtgtcttaaaaaaacacgccgccacgccccaccccccccttctggggtgggctcaccccgcaaaaaccccctcttcaaaggtctcctccaacaacccccagcggcgcgcccccc

SEQ ID NO: 122662 - DNA, 209 bp, Arabidopsis thaliana columbia
  unsure (1)..(209): unsure at all n locations
gaaagctgggtgcccctccaggtaccggtcccgnattcccccgggtggggccacggcgtgcccaataaaaattntaacaacccacccttcaacaacaacaaacattattccatgtgggcgttttcgataagcgccaatagggctctccacttaagcgtttctggttagnagaaagaaataatggggggagtgtttcccacccttcttac

SEQ ID NO: 122663 - DNA, 517 bp, Arabidopsis thaliana columbia
gacgtcgcatgcacgccgtacgtaagcttggatcctctatagcgggcgccctttgtttttgtgtttttttcatgaacaaatcgtgaaatgcatagaaactcgtgaacacattgaacttatgataaaaacagttctatacaagaaatttataagtttttttcccggggcatcaaaaaaggggaaaggaggccctaaatttggtagattaatcctagggggggggaaagccttccgggggtaaaaaaaaaaagcccgggtaatgtgtatttttttggtcctttcggaaccattattattcgatttccacccccctgggtggacggtggatccttttccttggggtgggatgcttttcaccttggccgttttttaaacgggagccacttaacaaaataaggggttgtccccttttcacttacgaggccgggacaaccttttcgggggtgaaaggggcctcgggaagagggttccctcttgccccccgacaaaaaacacctttaaaggatggggcgctcta

SEQ ID NO: 122664 - DNA, 522 bp, Arabidopsis thaliana columbia
gacgtcgcatgcacgcctacgtaagcttggatcctctagagcggccgcccttttggttttttttttttttttttttttgaaagaaatacctttgtatatataatgccttaaaattttaatcctatcgaagtctattaaaaacaaatgagacattaatgtcaaaatcctaaaatgggcaaaaaatctctatctaaacactaacaattaccaaccgtggggggagttttctctcccctttgaatcttctcaatctcactactgaggacttgcttcactttggtctttagctcattgagaccttggttctgttttcaccgaaacataaatagattcttcagggccctttttccccggacttaatgaattcgcggtcatcactggtttttattctttttgggaatacacaaacgggggaacctcccaacaaattggcattttgaccacagataaatttcccagggataccttaaacccctttctttaaattctttttatttttgaaaccgaccaaaaaggaaaacc

SEQ ID NO: 122665 - DNA, 507 bp, Arabidopsis thaliana columbia
gacgtcgcatgcacgcgtacgtaagcttggatcctctagagcgggcgcccttttgggggggggttttaaaataatattttttttcaccctaaaaccttccatattttataatccaaaacgaaagatgtggaacatagaatccctgataactcaaatgaaaggaggttacaaaattcccaaatagaaatgcgttttttaaaacatattaaaaaggggggggggtctatctaccggtgcaacaaataaagcttaatctctttttttctgggaaacggggggggggccccccttaccacagggtgggggatcaaaagggctcggcatagaaaggcccacctccgcagggtgggtttgggggcctctttttcttaaaacggtaaacttttgcaaagtccttgggtttttgggaaacgggaaaaacgggggggcttaacccttcttatgggtggggctttgaactttttagaggtggggggaagtgttttttttgctttttttgaccccccc

SEQ ID NO: 122666 - DNA, 502 bp, Arabidopsis thaliana columbia
acctaacttggatcctctaaacagcccccctttagttttttttttgatttaaataaattttaaaaccaaagcaaatagacctactccttcaaacaaaacaaacagtcacgcctaaaaaaacatcacaaactctcaacttaatactcccattacaaataaaagactgacaaactttcaacccttcacttattttcgaagaggacccatcttaggtcgaacaaaatactaaataaccccgcacataaaatatcaacggtttccccttattcttttcacacacctcaatgccccccatgaactgaatcaaaaaaaaattccctaattaagccttttttgattactcaaccactgtccacacaaaaaaaaacctttttttcctcaaaatgataacaaacctgggccccccatttcctcaaacccaaattttgttggggttaaacaatttcaaaccataaaagaccctcccctagccctcaataatgagattaaaaaaccccacaaa

SEQ ID NO: 122667 - DNA, 618 bp, Arabidopsis thaliana columbia
  unsure (1)..(618): unsure at all n locations
gaaagctggtacgcctgcaggtaccgggccggaattcccgggtggggccaggcgtgncgacacacttacnattaacttctctcacactgactctgggaccctaattctggagctctcttctctttgcccgaacaattttgctacaaccttacaaaatgggggggggctacttaatgcatcgggtgcttctcttttatggggggggtggcttattcttnatggcgaaacccctaaaagacttcccaaaccaaaacgccttggctctaccccaatatggaggtgtcctctcggcgcttttgcaaaggctgctgaggggggctcacctgcccccggcagctaggaaatgggggccactgggatccctacccttggcggctcgcatggggttctttccggcggcgggcaaagccccttgttccttcttaaattttaaaacaatctgctttaaaaaaaggagaaaaattcctcttgggtgggtaccaaaaaagacattgggaagagggaggaaaaaacttgtttcaaaccttctcccaaatgcttgggaaggggaataaaccaaatggggggggggggggttggggaccccaagggccccccccacgcgtcaaaatttaaggg

SEQ ID NO: 122668 - DNA, 588 bp, Arabidopsis thaliana columbia
ctctacaaaatctatgacgtcgcatgcacgcgtacgtaagcttggatcctctagagcgggcgccctttggggttggggtttggaaaaagaaaaatcactattttcttgaagaatctaattgtttacattggtacaatcacaagcgcaggggggacaaaaccttctggcacagaggaactaactatttaaagaaaagccactgtcgtcccacagctgtgagctgttttcttgtgaagggggggggtggaaacaaaaaagcggaaaaacccctctctggagaagaaacacccatggggacctgggcgcgttgctaatctaccttccttgggagccttaaaccattatcgcatgtggaaaccaatgtcttaggggggtcggggctcatctacgacggtgggggttatacttcttataacaaacatctggggtgaggggttgggcgccctggcgccatggcaagagagaacttcacccccaaaagggcgccatggtgatccaaaaagacccacttctttgaataaagaaaaaaaacgggggcgccctttcctcaagggacctttttcattccaaccatttgaaaaaaaacag

SEQ ID NO: 122669 - DNA, 393 bp, Arabidopsis thaliana columbia
ctccaagtacccgtcccaattcccggtcgaccaccctcaacactaaaacactaacctaagaccacaaaattggttctttacttttggttctatccccatccacagtaattacaatctcattcatccttattctaccgttggcccatcctctactaaaccaaactcgcatcccaccatcattttaaaaacctactcattacctaaactcttccctggatacaatactctaccaaccaaacctctttacctatacaattactctcccccttattcgaaattcaaaacccctcccctatactaacaaaaaacctacttgaataaaaacttaagtctaccctcccattctcctattaaaattcaaaaactttggaaacaacacccaattctccctta

SEQ ID NO: 122670 - DNA, 480 bp, Arabidopsis thaliana columbia
gacgtcgcctgcacgcgtacgtaagcttggatcctctagagcgggcgccctttggggtgggggggttttttttttttttttttttttttttttttttttgttttttttttttttccttttttcccgggggaacgggaaactttgggtttttttttttttttgggggggacccataaaaaattttcccccggggttaaatgaaacaatttccaggggggggggggaacccaatttgggggtctttaacataaattgttttaacaaaaggaaaatttttaaaattttcaaatcgggggggggggggaaatttttttccacccataaatgccactgggttcccgggttaacccttaaacttttaagatcccttatttcctttgaaaatgaggaccaaaagttttttttaaacatcctttttcggggggtttggcgggtttttttttcccaaaaatttttttggcaaaaggccccaagggttcc

SEQ ID NO: 122671 - DNA, 338 bp, Arabidopsis thaliana columbia
  unsure (1)..(338): unsure at all n locations
tactnnnnnnnnnnnnnnnnnnnnnnnnnnnnnnnnnnnnnnnnnnnnnnnnnnnnnnnnnnnnnnnnnnnnnngggcgccacgcgtgcaaccacacntncnatcnnantgaagaaagaaagaacctaaatcggaatttgggtgctccatcaatggcttcnattttggctcgcaagtcactgaatactctccgtgctccacatctcgttttgtcaaggcaagctgggggggggatctcatctgggtagacctgaaaaaaatggtatatcttatggcancaacaaagatgatgaagaagcagagcccctttctaaagaaatctccaaggactggaatac

SEQ ID NO: 122672 - DNA, 334 bp, Arabidopsis thaliana columbia
  unsure (1)..(334): unsure at all n locations
gggggagaggaaagttaaaaaaaanaagaggcttttgggacactctaaaaatctttagtnnctgccccctacctagcttggtccttagagcgggcgccttggggttggtttatataaaaatataaaatttcttttttccaaggtccaacttataataatttggtaatcatatcatattatcatctctaagcgttgaaggggacaaagataacacccccaagcggtttttacatttaaaagctggaaccagattcccccctgggggggggtaaaaggtgttggggttctttttgcaaacatacattcctttttcacaaagggtgggccggggggg

SEQ ID NO: 122673 - DNA, 258 bp, Arabidopsis thaliana columbia
  unsure (1)..(258): unsure at all n locations
gccttcaaaaaattaccccctctattgaccccatcctcgtttccttttttcaacttccctaaaccagcttggcgtaccacctcttatatcccttccctccccggggtcacccaattctaatattttcctgggggaattccccccaattttttaaacaaaaacccccaggtttctttcttctactaatcctaaagcggccttttcttccaataacaattttncacagaattcaatgggcgtaaacaagagccccccccc

SEQ ID NO: 122674 - DNA, 477 bp, Arabidopsis thaliana columbia
tgacgtcgcatgcacgcgtacgtaagcttggatcctctaaagcggccgccctttggtgttttgtttttagttgggaaacgtatcaatcattattcactaaccgaagagaagaaatacgccacaacgaaattggagacatggggcgtaatttgtcaccattttcatggacttatcttagggcaaaaacttgagagatagatgaaacaaaaaatggggggggggctccaaaaaaaggggtatctttattatacagggcccaactttattttatgagggaaaaaaatcttttttaccttcttactccttaacgaaatctttggcttacgggatgatagcttggaacattcacccggtctccgaaggtgccattggaaaggggtgggtgaaaacctgggaggagaatcgaggatggccttaagggagagggggcgaccgcctgtaagaagtgcggtgccggggcgtctcgtcccgaaagag

SEQ ID NO: 122675 - DNA, 614 bp, Arabidopsis thaliana columbia
  unsure (1)..(614): unsure at all n locations
gggacgacggcggggagagaagagaggggggggagccttttggtganctctanaaaatcttgacgtcgcatgcacgcctacgtaagcttggatcctctanagcggcgcccctttggggttgtgttttaaggaactaaaaattttatactataggggggacaaaacaacactaaaccatcaaatactaatttgacgtctttctaaagggtttacaatacaaatgaatccactcacatgagcatataaatatattgttaggtagggagtttttgatgaggggggggtgggacctaagggtggtaatttaactaaaagtgatgcaaatatttttcccttaccaaaattctttcctcatataaagctttaccatctggaccttctaagaaaaaagactttaaatttaccgcatgggtgcaagaggtttatttgaggggaaaaatccttgatcggtactttcaaggatttaacttagttagggaccgggtcttaatgtttacttagaagctttgccggtttaccgctttttattgccttgtaggaaaaaaaggggttgattcccgaatctctttagtttgtccaaacgcgtgatttagggggtgggaaacccgaaatta

SEQ ID NO: 122676 - DNA, 251 bp, Arabidopsis thaliana columbia
  unsure (1)..(251): unsure at all n locations
tatcattcttagaaactgtccctcgtccgccgattccgtgggccagctcttttttccaaataccacatggtgggatacaaggacccttntaccccctttctcgatacttgacattcttccacatcttcttctggaaggaaacacttttctgggttccggaaaatttgaacaaatgctatgaaactattattctaatttgaacttattctaatcatttatactcctcgactctcggaaacaaaattttccat

SEQ ID NO: 122677 - DNA, 520 bp, Arabidopsis thaliana columbia
gacgtcgcatgcacgcgtacctaagcttggatcctctagagcggccgccctttgggggttgggtttatcaaaataaaattactatcaactcaaatttatcatcttcaaagacaagaaatttgcctccaaggaagattctattgtgtaaaggaaaaggaaaacccgttcatgcttcgataaaccaaggggtgccattcaaacaaataagccaaggggggggggggaaaaaacctggctttcttacaaaaaaaaacctaatttcttttcactaacattctcaacctccttcttttactgaccggaagagggcgccctggcctactcattatcccagtcttttttccactgggagcgtaacttgcttaacttgctttttttcaaaccaatttttggtgatttaaaattccccagaccttatcgggggcccaagaataaatcccctttcaccatttaaacaggtgcttggggtctccccccctatttcccggtgtttaaagcacctcgccccaatcgtgaaaaa

SEQ ID NO: 122678 - DNA, 194 bp, Arabidopsis thaliana columbia
  unsure (1)..(194): unsure at all n locations
cccaactttcacttttagaaactgtccctcattccttcccattccggtcagcaccgtccccaaacaaaaaaattctttaaaacttgtctgttacttgaaaattatcacttggtatctcttttangtttttctcatctgttatttctaacatttactatgcgcaagcccaggcacttcnaatggtaaaaaaatct

SEQ ID NO: 122679 - DNA, 627 bp, Arabidopsis thaliana columbia
  unsure (1)..(627): unsure at all n locations
cgcgtcggcggagggagagaggaagggnggggcctcttggggacctccccaaaactatgacgtcccacccacgccctacgtaagcttggatcctctaaagcggccgccctttgggttttggttttttcttcaaaattcaaaattcatcccgagaagatgtgaatttggcaaaagggggaaaagtggattggggtctctaatttgtctcccaaaactttggtggataaggtaataaaattctgcgaacaaaaaaaaaggggagggggttccctcacccggtttgattgggggggggggaaacaaaaactgagcggcgtttccaaacaacaaaaaaattttgaccctaaaggggggattatggagttttgctttccttgcctctaccgaatcttgctttctctccgctaaactaagagtgccgggcgggagaaccttccctggttttcccttttttttgagcggggaccatgtcgtgggtggaacggaaacccccccgccctttaaaccacgtccctatatccggtacccgggaaaaaccaagttgcctcctgtcacctttggtagaagtcgaacagtgcgggcacaccagccgacaatggtgcgccttgcctgacttgttttgcggcg

SEQ ID NO: 122680 - DNA, 660 bp, Arabidopsis thaliana columbia
  unsure (1)..(660): unsure at all n locations
gggggaagggggngggggggggctggttggggaacactctccaaaactaattacataacatgcacgcgtacgtaagcttgggtcctctagagcggggcgccttgggggttgggggtgttttaaaaaaattttaagaccagtgctaagagacaaatttccttggtagaacaaaaacctgggcccgctaagaagaggataaccccccgctggcgcttggacagctggggggtaacaaacatgggaagacgggggaaacggttccatcgcgcttgttctttttttggggggggggggaggtcactttcttttgggggaaccttatcctaaatattaacggcgcgccccagggtttctcttgggggggagggggtgatgcctgtggacgcatgcgcttcaggtgggtgaccgaggggcgggggggtccaaaaagaggaaaagtccctgggtgtggcgctccttggggggggggtggcgcaccctggtttcgcagggcccagcgaagcgtgggtgggttttcagggtggggggaaaaatggtggggggcgcggttgtatttaagaaatctattccgcagggggggggcggtggagggggtgtgttttcctgttgaggggccccttcgcggtgggtgttgtcgtgttcgggaggtggtgggggggg

SEQ ID NO: 122681 - DNA, 536 bp, Arabidopsis thaliana columbia
  unsure (1)..(536): unsure at all n locations
ctctagaaaagctatgacgtcgcatgcacgcgtacctaagcttggatcctctanagcggccgccccccggggtgggggttttttttttttttttttttttttttttttgttttttctggcccgcggaggctacccggataagggcttatcaaaaaaaatctttttcaaatttctattattgggaaaagagtaaaacccccttttttttaccgaaagaaaaactttttttgggggggtgactaaaattgtttgcctccccaaaaaaaacacccctgcggttttaaataatgacccttcattggtccccgggttaatggggaaacgttaaaacccttttttttttatagccggaaaaggggggccccccctctcccttttattggggcagggctgggccttaccccgccccactcgggtggggggcaactttttggttgggctaccccccctgggggaggggcccctaaaaacccccctgaaaaaattttttcttcctgagcgggggtggtttttcccaaaaagtgtttggggggtct

SEQ ID NO: 122682 - DNA, 321 bp, Arabidopsis thaliana columbia
ctaattcgacttactatagggaaagctggtacgcctgcaggtaccggtccggaattccccggtggggccaggcggtgcgggtctccccattaggcctgaatgtgctatgattggttttataggaagacttgattaccagaaaggcattgatctgatccaaaccgctggtcctgatctcatgggggatgacattcaattcctcatgcttggttcgggggagccaattgaaactgatgaaaaattgaggaaactccgaacaattgcgtgggtgggttgggttcaatgtgccccatctctaatcgaatcacaggcgggtgtgac

SEQ ID NO: 122683 - DNA, 513 bp, Arabidopsis thaliana columbia
ggggggagagagagggggggggggcttgtgggtacactctccaaaactatgacgtcgcatgcacgcctacgtaagcttggatcctctagagcggccgccctttgcgggggggggtttttttttttattttttttatttttttccccaaaaaaacttggttacccggtaaggagggcgccaacccccttgggaaaccaaaggtggtgtttccaacaaaactgtttcttttaccaaggggtccccccccctttttccccctcttaaaaaacgggcgaggggctctttcttattgggggtttcttaaaaaaaactcaaaaaggcgctgcgttttgggaggcccaaaagaactttctttaacctctctcttctgagaggggtacaccccccctcttcgcttttttttcttttgtaaacccgttttattcccttaggtgttggggggggccccccacccctctccttcttctctttttggcgggggggggggcgtctccccctcccaccgccccctgg

SEQ ID NO: 122684 - DNA, 487 bp, Arabidopsis thaliana columbia
  unsure (1)..(487): unsure at all n locations
ttaggtgcactctanaaaatctatgacgtcgcatgcacgcgtacgtaagcttggatcctctagagcggccgccctttgggttttttttttgtaancaaataccctatttcaaaatagaactcaaaggtgggattactctgcatgaacaagcatttacataacatatagtgatcaacatcgacactatcacccgggggatactagttataaaattgaaattgatgcctatataggatgggggggggcaaagtcccaatgggctctgcatctacaatataatctttgccgatttctgcagcttctcagcctcttcatcagtcatatgcacatgtgggcacaggaaccacaccattccttccaagcaaagccggaaaactgaggaaaacatcaccaccatcaacaccataaaaatccacgaacaagaacagtaacccggggtggatcttgcgcctggcacgggggatagtacaacccaaattatcaactg

SEQ ID NO: 122685 - DNA, 505 bp, Arabidopsis thaliana columbia
tctatgacgtcgcatgcacgcgtacgtaagcttggatcctctagagcgggcgccctttgggtttggggttgtgttccctacttatgatatactacaacattctgaaattggtttacatgatgtgatcaaaagacgggatcggtggtttcaaatatttacaaaataaaatctcacatgagcctagttttttcatctgagcatatctccggaatgtattgggggggcggtaagcgcaggcgatattgggaatccatttccctccatacgggacaaaggatgcgcgagcgggactggtcggtcccgaataggaggaacctccatggctccttcaagcattgtcaatggatctaatatggtgggccttaaagcaaccaatacatgggcacacaatatcccaacttggaagaacctcttcattttccctttgggattcgagagcccctgagccttcctctcttaacaaagactggtcagaaccttcttttggtttccctgcttttacaaa

SEQ ID NO: 122686 - DNA, 486 bp, Arabidopsis thaliana columbia
acccctacctaagcttggatcctctagagcgggcgccctttggttttggttttttttttaacaatttaaaaatacttattatttctgaatttggactcataataaaatcaggaaagaatggttctttcaacataagccagtactaaattttaaaattcctactaggaattttaaaggaaagactatgtttcctttttggggggggggttcattttatgaggggctgaataaataaatatctttttggcaccaattaaaacctttgaaaaggatcgatccattaaacgcttgacatataaaatgatgaccttaagcggccccatcataatatttgcctcatgggccaatttgtgaacatggtaaacataaccccggttcctggatgggattcgaatgggtaaaaacctttaggggggatataaaaaaagggggcaatgtttcctgtaaacatgggccggaattatctttaaataacttttttcaaac

SEQ ID NO: 122687 - DNA, 525 bp, Arabidopsis thaliana columbia
  unsure (1)..(525): unsure at all n locations
ccaaaaaccttccaaaatcaagggacctcccgaggggtttgggaaagggttaaattttgggcggaaagataccccttcccttacaccttttcttttaagtattttttcaaaaggagggggggagcacccccttttggtggggggnaaaaaaaaaaaagagttcaaaggggggttcttaaccaaccccaccccggccggggggaagtggggaaattaacaaaattccgggcgtgggaaaaaaaaaacaggggggacccggaccccaaaagggggtttgaaaaaaacctttttaaaaattagtcgccccggaactttttacaaaaagtccttgctccctttttttcttttattccacacttatggctttttatcccttttcaatcccaattaaagaaccgggttttttcctccctttgggacatatttgggcccttggaggccttttttgttggtagggcccctttaagggcctctttttttttttgaaagggtttattgtccgctctctccaaattttttaggggg

SEQ ID NO: 122688 - DNA, 493 bp, Arabidopsis thaliana columbia
ggaggggggcgtcgaaacacaaaaacatcccgctcgcttctttcggctccgctcctctaccctttcttccgcttctctctcccgcatcatttctgtctctcctcccctttccgctcgcgcctctctcgcgctccgctttttgtctttctctccgtccctcccgctccctgcgcttcttctctcgttttttttttggggggggggggtgctccccctcctcgcgttgcggtacctatcaaaaatatatcctcttcgccgctcttcgctttcgattgcgacgtcctcgcttccggttccgttacctatcgctgctcgcacgcgcgtcctgtcagactcctcgcttcacttgctgtgtcctgcaggtcttctctcgttgtcttctcttctctgtcgcttcccttttctgtctatatctccccacttccttctaccgcttgcttctcccggctttcctgtgttccgcccgcactgcctccgacttagctcctcctct

SEQ ID NO: 122689 - DNA, 438 bp, Arabidopsis thaliana columbia
  unsure (1)..(438): unsure at all n locations
cggcccccccttcgggggtttgtgggttttttttaaacaaaaattaaaatcaacctgggtggttcaaggtttgcacacttttttacctaacttccacatgnggacccagagcttcttaaccgggaaagagtttctttctctttttttttttacaaaaaccccccacccgtctttttttttctcttgtgggcgaggggggtnccccccnggtggggattttcatttaaaaaaaaaaaatcccttgtttagaggggcctttacggattcccccccctcctcccccctctctttttcttcctaacagcgggaatccctcccccgtgtgcgggtagagcgttttcgacaaagtgacatcctcctgcgcggggtgggctataagccaaacccctcctttcttcttttccctgcgcgctttccgggcgagttccccccgccctc

SEQ ID NO: 122690 - DNA, 369 bp, Arabidopsis thaliana columbia
  unsure (1)..(369): unsure at all n locations
tgcgcaccccccccccctcttttgaaaacctttccccccccgcagcccccccccatttcccgaggggcggggcgaaaaacaaaattncccacccnnnnctccacttttttaaaaactccccttaattaaaattttttcccttctccgaatcttttcaccagtttgggggcctccttttcctcagaaaaaaaaaaatctttttctaaaaacgggaggggcnaaccctttnggggcttcaaaaaaaaaatatctctttttctaacccnccttttcccccccctggagatttcaccaccccgcctctccctttttaccgcctaaaacaaaacttgttttttcccccccaacccctctccctcccggagggac

SEQ ID NO: 122691 - DNA, 520 bp, Arabidopsis thaliana columbia
  unsure (1)..(520): unsure at all n locations
tttaaggccccccccttaaaaccccggggcgtcttaacctttttcctttaaggaccccccctttttttttttcgccctcccttgcctttggataaattaaaaaaaacccctttccctaagcagagccttttttgggaaggtttctaaaaaaaacccttttttcccnccttaaaaagatggacaggctcttcccaaaaaaaaaacctttccctttgccgcggaacaccttaaataaagttttagctcttcttaaccccgtgcctttaaagttttccaaacccaaaccccacatatttttgtctacccctctttcntttttttgggataaaaggatcctctcccctttcttccctatataggtttccctcctttggggctccttttcctacccttccccccccggggagagaagggctcccacaggccacacccccgtcctctcccttatctctttctccccgaataaaaattagcgttgttcccccccacaggccttttattttctctctaaaaaattccc

SEQ ID NO: 122692 - DNA, 429 bp, Arabidopsis thaliana columbia
  unsure (1)..(429): unsure at all n locations
taaaaaaaaaaaatttatttactccccctggaaataaaacgtggtgatggacgaggaaaaaccgaccatttttttggcccgagcccttctatcatgaaagaggggggaacaaagaaaaaaaacattttttttggacaaaactgagaccaaaaccatatactgggggggggggttttnaaaccngaaggaggtnnnaaaaaaaaaaaaaaatttttttccaccttcccaaagcttttcctctttttctaaaaggtgggtgtccgctagagaggctatttccttaaatatgttttagaaatggcgtggggaaagtaacccaggcctcttgaatctctatttgcgaaataagaagggcgatatccgctcccggggggctgccttcgtggtggaaggagggagcaagccctcacagcgtttttttttgggtga

SEQ ID NO: 122693 - DNA, 534 bp, Arabidopsis thaliana columbia
  unsure (1)..(534): unsure at all n locations
tttaaaaaatttccccctctcatacccccccctatttccggggagcccgccttcaaattaaaaaaaaaaaaccccccccctcccccccccataaaatttttaaaaaagccccttcttctttaaaaccccctttaacttttcccctttaaatttaaaaaccccccaaaattccaaagggtttgtttccctttttaaaccaaaaaaaaagttgacccttttaaacctgcttaaaataaaaaagtttctcccccccattggtctcccaaagtcacttacctantttcttcctttttttaaaaatttcttcctccatataaaacccttcccccatatttttcacaatcaatttatttttcccccagaggtttcttttttcttttcgcccccccctttcaaaacattgtaaatactttcccccccaaaaacaccccccaatcttttctccccaccacttggccacaaaaacccccttgatctccccaccttacacaaaaaatctccccaaaccttcctctctaaacacccccaaaaacc

SEQ ID NO: 122694 - DNA, 416 bp, Arabidopsis thaliana columbia
  unsure (1)..(416): unsure at all n locations
cgcgctggaaaaattagaaaaaggggngggggggctttgtggggnacacccctccaaaatcttatgacgtnctatccaccccctccctaagcttggatcctctatagcgggcgccctttggggtttgtttttttaaacaaaaaaataantctttatttccctgccccctttttaaaacaaaggaaacaccaccccattttgtttacctatccaaaaattaaaaccccgcaaagaaagaaacccccaaactcctccccactaccaatcctattattttgatggggggggcgaattctattacctttgggggggggggccgccacaataaaacgaaggcccctctaaaaacaatccccctttaccggaaactttgggtgttcgctccaaaactcttgatagaaatttggcctcaacct

SEQ ID NO: 122695 - DNA, 447 bp, Arabidopsis thaliana columbia
  unsure (1)..(447): unsure at all n locations
cccctgcagggacccgggccccaattccccggaggggccgggcgtgcaataaaaataaacngcccctttttttttttcttttaacaaatgaaaactctagcgatccccacccaagggctccctagacacccctccttaaaaaacctctttccgggggggggaacaaacctcgggggccaaaataaaaaaaaaccgcctgaacctcccctaggggctttcccccccaaaaaaaaagaaaccaccaagaaccaccccgccgcaccctcccccaaaaggggggaggcccccctttaggggtttgcccccttcaaaataaccaacctaccgtgtttctttacaacgcggcccatagaggccaattacacaaaagcgcgggccccccccctgccccggaatatattagccaaaacgtatccgccgccgcggggggcggccgaaaccaaaaaa

SEQ ID NO: 122696 - DNA, 538 bp, Arabidopsis thaliana columbia
  unsure (1)..(538): unsure at all n locations
aaaatttccaaaattttttttaatanccatgggggggggggggggtccttattgtcgcggggagatattgcgaaagaaatcggcggggggaggaaacctggggttttttccgtcttttccgggggggggggagaggcctttcccttgggggcgctnttaaaaaaaaaaatcttcttccctggggggggggtaagccgcccccgggggaaaaacggggggggggcggggggagatcgcccgccgaaaaaatggaatttngtcccccccgtagaggggggctcttaaggggaggggactcctcaaaacacggttcgcggggggggggggggttcctaattttcccggggggggaggcaatgtgtctttctaaattaggggggggggggggttgggggggggattttttttttgggggggaaagggatggggggggggggggaatccgttgggggggggggggggggggctccctgtggcgccaggggggggagaaaacgggcgcgggggggggggggggggggaaaaaagcccggggggg

SEQ ID NO: 122697 - DNA, 695 bp, Arabidopsis thaliana columbia
  unsure (1)..(695): unsure at all n locations
cagacagcgcgcggaacaccgcggaagacggaacacggggaacagcgcgcgaacacgcggacgcggcaccgcgacggacacgacgcgacagcggcgcgcgcagagcccaggcagagaagaggaacggcgcgccaagagggagcgcgcaagcaccgacgagcacgccagccgagccgcgcggcgcgccacgcgccgcaccgccaccgacgcaggcgcaggaaacgacaaggcgaaaaagaagcgccctcctcccctcccggacacgcggcggggggggggggaaacaacccccgcgccccacaagaaaagaccccgcgcaggcagacacaggcgcaggggaaaagaaaggggggacaaaaccccccaccacacccaagaaacccgccggggaacccccccccacaagaaaagggggggggccgcccccccccccggggaggggggtnccagggggcgggctnngggggaaaaaaaaacaccacaaaccccacaaaaaaaacccccccccccggggggaacacaccaaaaaagaaaaaaaggggggggaaaaaaaaaagggggggggaagaaaaaaaaccaccccgcgggggggcggggcgcgccccacaaaaaaaaaaacgcgcgggggggcggaaaaaaaaaaaaaaaaacaggacaagcgcccccccggcgggggggggggaaacaaacaccgc

SEQ ID NO: 122698 - DNA, 409 bp, Arabidopsis thaliana columbia
  unsure (1)..(409): unsure at all n locations
cccttcctaaactaattaaacccataaaatccctttctttttctcaacccttaattcttaaacccttgaagttctttgggaatttaaatttaattcaaaaaacccctctccacttaccttccttaaaaaacctttttttttcccctttttttcaggcagtgggtttnnaaaattttaaaaccaaaaaaaaaaaaatttcccccttttccttttaaaaagttggaaacccanaactctttttctaaaaacctctttcaaactaaaacctcccctaagtctttcttgatatttgcctttcacacaaaaattttacccctctctccccctgaaaaaaaaaaaaatttttccttttttaaatccaaccctcccacatttaacccacaagtcttttttaaaaaaaataaaaaaa

SEQ ID NO: 122699 - DNA, 392 bp, Arabidopsis thaliana columbia
  unsure (1)..(392): unsure at all n locations
ggggggggggtttataaaaaaaaactcttttttttnaaaaaacacanccaaaaaaaaaagtccggggtcccgcaacctaaccttgggcaaggcacctttttgaaccttttataattggccagaaaatttaattttttttttatcagggagcgggccttttttttggggggctttttttaaaaaaaaatttttgtgaagggggctttttttaaagaaaaccctctttttttctcttttctcccggagagaaaactttctttaaggaagagtcaacgttttcttttttaaaaggaggggaaattttctctaagtcctttcctccttcggccgcttgttgggtggttaaaacccctcttcttttataaacccttttatttttttctaacccctgg

SEQ ID NO: 122700 - DNA, 504 bp, Arabidopsis thaliana columbia
  unsure (1)..(504): unsure at all n locations
tcaaaatacacctttnaaaaaaaccaaaaaaaaccaaaaaaactacttaaaccaaaaaaactttttatttttaaataaaaataaaataaaaaatgggatacacaaatgtgtccattttattaagcccgtttattgtctttgggcacccatggttttcgcanattatataaaacaccatcccagatggtgaaacttagggagcacaagctttatccctgagaatcttcggaaattttgctgctttttacaactggaaattctaccggttccaagacacaatctgtgacgatacaagaaacccttttcttcaagattgtttccgtgaaggaacattccatttcatctttggaaggggaacctctattttccttgggaccccattgcccggtggtggagaccggctttaatgattgccccgcctgcccgaaaaaccgcacaaaaaaagagtggttcccttttccccccctgcaaggggactgaaacccggggaggatttcttttggg

SEQ ID NO: 122701 - DNA, 527 bp, Arabidopsis thaliana columbia
  unsure (1)..(527): unsure at all n locations
aaaaaccaaaaaaacctataaatttctttccccaaagccctttttttttttaattaaaattannataaaaaattgggtttccccattgttttcccttttatttacccctctttttttgccttgtttgtacgcccctnntttttccgcgatttaattaattaccccccccccgcgtttgggtgaaccttanggggccccccccctcttttttccctttaaaatctcttccagaattttttctccttctttcttctcccacttgaaaatcccttcccgtctcccaaaacaccattcttgtaacatttccagaaacccttttctcttaaggttttttcccttaaaagaaccctttcttttcctttttcaaaggggcaccctctcttttctttgaaaccccttttcccctggtgtgaacctcttttttntttttccccccccctcccaaaaaaccccccaaaaaaaaagtttcttcctcttttcccccctgccagggacccagaccccgtaaatattttttttccaaaacc

SEQ ID NO: 122702 - DNA, 300 bp, Arabidopsis thaliana columbia
tctcataccttttcactatgagggaaagctggtacgcctgcaggtaccgggtccggaattccccggggggccggacggcgtccgaaaagaccctgtttttgttccgcaagtcaacccgacccgacttcctgacccattcggtgtgatccggcccaggacctggattgcgtttaacctcccgaaatctacgggccaagagttgctcccctcttgtgatatttactggtctgggaggggaggggtggtttctcgcctgcactttttgaaatctaaacatcacttgtaggatacatcttgaca

SEQ ID NO: 122703 - DNA, 269 bp, Arabidopsis thaliana columbia
  unsure (1)..(269): unsure at all n locations
gnnnnnnnnnnnnnnnnnnnnnnnnnnnnnnnnnnnnnnnnnnnnnnnnnnnnnnnnnnnnnnnnnncttcgtttttttttttttttttttttttttttttgctgtctttttgttttgcttttttatcaacgggcctacgaaaaaaaaaacgcgggacggggggacaacgacaaaacaaacttggagaaaaggcgacgagagaccctcttaaaccggggggtggcaacctatgactaataccccaaagaaacggtcgagcattacccgg

SEQ ID NO: 122704 - DNA, 307 bp, Arabidopsis thaliana columbia
gctatgacgccgcatgcacgcgtacgtaagcttggatcctctagagcggccgcccttggtttttttttttttttttttttttttttttttttttttttttggcccggccaaaaaaatctcgggttaatttacttgttcttacaaaaaattttaaaacgaaaaacaaaggccacaacttgcgtaaataatattccttcttgacaaaaaaaaatcaaagttttgcgcggagcacctaatacgggaacccttttgggattaaaccccccaagtgggttctttttagccttccataaaaaacaaaaacggt

SEQ ID NO: 122705 - DNA, 347 bp, Arabidopsis thaliana columbia
  unsure (1)..(347): unsure at all n locations
nnnnnnnnnnnnnnnnnnnnnnnnnnnnnnnnnnnnnnnnnnnnnnnnnnnnnnnnnnnnnnnnnnnncttttttttttttttttttttttaaggagaaagacagaataaataagacctctttctacttacacaaagaagggtcaactttaaaaaggattacgttactaccgaaacatgtggggtccaccatactaaaacccgattctccattatgaggacaagctcaagcagctaagatgttagaaaaagtaagactcattcttcttctgactacacaacacatcaactgcttaaacttaaaatgcggactgttctttctcgacgacttattcagtatttggggca

SEQ ID NO: 122706 - DNA, 546 bp, Arabidopsis thaliana columbia
ctatagggaacagctggtacgcctgcaggtaccggtccggaattcccgggtcgaccacgcgtccgatgaatacaccttccctcacgcaaaccatggcaaggaatactctgtaggatgcaagcttgcttctccgtcgcttcaaattctatcgacgaagacgaagattgccggcgggtcccacttgctgggattgtctacgagaggggagagtgcttctaataacacttacgaggctatttcgggtcgctctatgaataagctagcaggtcggtctatagctaccgttgaagaaaaggtcactaggggtagtcctgttgatagaccaatggacctggaaaatacctagaccagggaggacgggctgattttaccacagggttatatctatgggacgacattggccccccaggggcgtaaagaccctcccgaagaggatgataagaggcgggcattttagagggggaaactaaccccccccccactacaagaggaacacccccataagagcactctattttggttggagagcagaacgatgaaacctcg

SEQ ID NO: 122707 - DNA, 505 bp, Arabidopsis thaliana columbia
ctatgacgtcgcatgcacgcgtacgtaagcttggatcctctagagcggccgcccttttttttttttttttttgcatgtccgacactcaccggaacctaccacacaggggaatcggctaggtactacccgaaaaaaaacactcctgtgtatcaattttgggcagcatttatcaacattctgggtgtcgcttaaatctggccgagagagattttcgcttacttgtcgaaaaaagatctcccagaccaaacagctggagcttaactgggactcccttctgtgcggggcacgaccccttttccataggttctccaaccaaaccaagatgctttgagtcggacggcaatgcttagacgcgtcggtcggtaatcatgttggactaaagaacattgcagggttggaggacacgttcgttgcttactcgtttcacaatggtaacaacctcttgagcgtggtgatcttgttccggagctggacttgtccagacggcaaaacctcaacggttgtt

SEQ ID NO: 122708 - DNA, 379 bp, Arabidopsis thaliana columbia
  unsure (1)..(379): unsure at all n locations
ctacgactcactatagggacaagctggtacgcctgcaggtaccggtccggaattcccgggtcgacccacgcgtccgccgatgggaggtaaaaaactgctacccgagttttatatttatggcgacgataacccgcctaattgttaaggacttacctctcgtttatcaatctggaacgataaatccaaaggtggacgatcttctaggtctatgtggcgtcggctnttcggtgcttttccataacgatactcttaggggctacttggggttgatgagacctacttttctaaacctgagagcattaaacactcccttaattgtgaagaggacagcattaaatcttaatcttctgggaccagcccagaatgcattacgactctg

SEQ ID NO: 122709 - DNA, 585 bp, Arabidopsis thaliana columbia
  unsure (1)..(585): unsure at all n locations
nnnnnnnnnnnnnnnnnnnnnnnnnnnnnnnnnnnnnnnnnnnnnnnnnnnnnnnnnnnnnnnnnnnnnnnnnnncttttttttttttttttttttagtcaccagaaaagaacttctattttgaatcatttcccaaaaggggaaacttttttttacctgtgtaaaaataacttttaatcgtcatcatcatcaaaaaaaaaaaaccggatttaaagtatagagctttgctcaaaaggtatatgagtgacgaggaaacgatgcaccatttcgaagctagtgaaagttataactgctgcaggagttgttctcagtagattcgtggcgcagcctctgtaaaaaccaggaaacccatctttctcaaacactttcttgatgcaatctcttactcctgagtaacgtttctcactgtggtgcccttgctcttgaagcctagctcgtactacctcgtgcgggtaagttaatgtggatgcaaatatctttgcaatcgaagaggcaactgctacatcacgagcattgaggttatcgactgatttatcacctttcttggccaagtacactttgatcatctcatatgtgggaaactga

SEQ ID NO: 122710 - DNA, 587 bp, Arabidopsis thaliana columbia
gacctatagttgagctatgacgtcgcatgcacgcgtacgtaagcttggatcctctagagcggccgccctttttttttttttttttttcatccatccacagtatatataattaaaattttacaaaattttaaagtgcctttccacgaacaaaattagacagaagatcacaaacacatttcttagtactaaagacatattctctgatagtaatggctcacttctctctctctacttctctgagcaatcagattttgaacccatgattctcaaaacaacaaacaaatccaagtttgataagaaaattaatatagtaactcatttgataaaatgagaacaaacaaaaaaaaaagtgaaagaattataccctttttgatcgatctaggaagtgatcatatgatcttcttctcctcctcctccatctcgctccgccgctgcttgtgctaatctcttccatgtatattgccgatgttcttctacttctttggatttcgcttgtttctcttcatactggctctgacattcttcaaacagttcaggatccatttccatgaacattttcttgatatttgtggttagaccatgaactg

SEQ ID NO: 122711 - DNA, 382 bp, Arabidopsis thaliana columbia
cactatagatgagctatgacgaccgcatgcacgcgtacgtaagcttggatcctctagagcggccgccctttctttttttttttttttttttttttttttttttttttttttttttttttccaaaaacataaaaaatatattttttggttataaaatccccccaaatttttttggttttatggaaccctatgcccaagaattcaatataacctttgatattgaagggaatcaatatgaagttcaatctaaaggaatcggattgaaaagtaaggacctgacaccatcaaggtttttggttttttggggagagccatggccatcgccatatggatacatgcatggaaacgtgcgcgccaaatttatcactgtttccataaaatta

SEQ ID NO: 122712 - DNA, 574 bp, Arabidopsis thaliana columbia
  unsure (1)..(574): unsure at all n locations
nnnnnnnnnnnnnnnnnnnnnnnnnnnnnnnnnnnnnnnnnnnnnnnnnnnnnnnnnnnnnnnnnncttttttttttttttttatttgattctaagtgacagcagtcatacactaatggggagagttgacactaaatcgattgcgaagtatctcaagaaggaaacaaactgagctaaacctcttgagtggagccgaaagattttatggaaggaggggaggacccacgaggcggtcttcagagaatagtgaatcactagagactggaaaaaaatgccaattatggaggagaagaccctttcttgctgtggttatcccccacaggttcatcttagggcgatggttcttagcataagtttcctgcaatttgggatacaacaggtgcttcgggcaattgcttccttcccctgaaccgttctggtacccgtgaggacccccgaactgttggaaaacccttaagccgagaaccgaaaattaaacgcattgaagctggttgtgcacccgccccttgccctattggagcctttggggactattagcctccccgcctctgaacggggtcttaaaggtcatgtt

SEQ ID NO: 122713 - DNA, 532 bp, Arabidopsis thaliana columbia
  unsure (1)..(532): unsure at all n locations
ctatacgactcacttagggacagctggtacgcctgcaggtaccggtccggaattcccgggtggacccacgcgtncgcccacgcgttcggatgaacatatccgagacttataccatcgcatatgatggagaatcagtgactgctagtctaaaagacgggagggcaaggtatgatccgttttcaagatgatggacccggtctttaactactgcggcgggggaaacaacgggaaagatggataagacaaccgaggcaatggttgcctccccgggtgacaccaatggaccagatgcatgaacttggtggtgaatcgacaaaagcatttttataattcgggtgcataagcaggaaatctacatagcagcctggagctccattaggtgccggggcctaacccaatgcagcttaattacctttcgaatgggccatgatcgccttaggggcttttcagaaaggcccggggggaccctcaagggcgttaaaaatgcgtttcttgggataggaaagctccctgcccgccgcaccctgggggg

SEQ ID NO: 122714 - DNA, 573 bp, Arabidopsis thaliana columbia
cactatacatgagctatgacgccgcatgcacgcgtacgtaagcttggatcctctagagcggccgccctttttttttttttttcagaaacaaaccattaaacttttaatcattaagaccaataaacttgagaaacagaaaaagagtcttgaccaatcctacatttaccccatatatagctcaaaatccaacaattgcagcaatctctcacaagcaaatccaccccaacaaaagcacttaccccgatccatatatcacaacattgcagcaaccccaaagccgatcatcgcgcacaaaagagaacaacatacatgagaaggtttatgctggaccgcaaagataaacgagagttaagttgttatagcttgagatggcaatttcgggtggttatgctctgcttcataagtaacaataagcattgccggatcttccaaacatctctcaacatgcttcctcgctggacaacctctcatgctactaccatttgaatatcctctgggataaggaaagcccttgatgggcttctgaccatatttcgccatgaataatcattaggagggatatctgcaaccttg

SEQ ID NO: 122715 - DNA, 417 bp, Arabidopsis thaliana columbia
ctatgacgtcgcatgcacgcgtacgtaagcttggatcctctagagcggccgccctttttttttttttttttttattttttttttttttttgttttttttttttttttttttttttacaaaggcgctgagggggcctaaatccttggaagcaaaaaaattacaaccttaaaagtgaatgacaggaggaaataatttgggattttgagtcccgaaaaattaaatttttttggagacgggggggggtaaaataaatcacatccttaagcaaaagcaaaaagctttgatacaagaggacattgccccttcttggggggtataaagaaaagaaaccgggaaaaaacctttgattggataaacccaaattttttccttcaaagggaaaaaatctggaaaccctttctttaccatacgggacct

SEQ ID NO: 122716 - DNA, 555 bp, Arabidopsis thaliana columbia
gcactatattagagcttgacgtcgcatgcacgcgtacgtaagcttggatcctctagagcggccgccctttttttttttttttttttttttttttttttttttttttttttttttttttttttttttttggaaaggaagaaaagcgtctttgtaacccctcttttgattcacaaagtttccacttttgttttctgtccatttgacaacaaaaaaaacgggtttacatgctgaacaaaaaattctagtttatttttttggcgggccaaaatccacccgtgggagactggttttagcctttccaaagagcaaggggaagctttgcccccctccctcaaagggggaagactctaaacaccccaccaaaacaggcccctgggccttttttggtggattgggaagacaaaaaaaggctgggaggggagcaactattttttttggccaatcttttggaggcaaatgcccagccccttcgatgagtcgaagcttaacatttggggggtgtgggttctcaaatccctctgctataaactggggcaaatatttttcaggttttcc

SEQ ID NO: 122717 - DNA, 550 bp, Arabidopsis thaliana columbia
gacactactagttaagctatgacgtcgcatgcacgcgtacgtaagcttggatcctctagagcggccgccctttttttttttttttttttgaggccaaaaacagacatctcaaatttatagaacaaaaaagggagaaagatattcacaaacagaagcaaagctgttcctggatttacatgcttcgttgcagacaaatcaaactcaaataagtcatataacattcattaaaggaactctcagatttccagcacacacttaaaagctcatctcttcccaatactgacatgatcttacccttgagatcaggattggtctgatgaagtttggcctagagagacagatgccagcgatgaagcccaagcttgtgcgttctttgccctttcatggaagtttcttgttttgacgagacttagtttcaaccataacctcctcacatcgaccatgtgaataccacggttgaacagttggcttatctctccaaatcttcccaagttcaaattggcaacgtatgaagcccataccgctctcatgcgggattcaactatgggga

SEQ ID NO: 122718 - DNA, 484 bp, Arabidopsis thaliana columbia
gctggtcccctgcaggtaccggtccggaattcccgggtcgacccaggcgtccgcccacgcgtccgcatttcgactttggcgtttctcgatctgttgtttctgctcccaaataaaaataaaaaaaaatcggatcggggatttccccaaatcgtaaaattaggttttgttcttcatttctagccctagcttaggtgtatcgttatcttattcattaaggtttgattctacctttgtttcgcttccctcctcgaattttgcaattccgttattaaaggatcctagtttttctggctcttgtactacgtcaagtttcatggattctcgagtttcgattctcttcgtctgtgcaatagccgggtcatgctttacgtctgggtctggttcatcaccagtggacttttccgtttgcaattacgaattcgagctgtttcgattcgatgtaaaggcccaaatgtcctccttctctttatacaactcctcctat

SEQ ID NO: 122719 - DNA, 476 bp, Arabidopsis thaliana columbia
  unsure (1)..(476): unsure at all n locations
nnnnnnnnnnnnnnnnnnnnnnnnnnnnnnnnnnnnnnnnnnnnnnnnnnnnnnnnnnnnnnnnctttgtttttttttttttttttttttttttttttttttttttttttttttttttttttttttttttttttttttttttttttaaaaaaaaaaaaagcccggggaaacttttttcccaataaaacgggggcttttttctaaaattccaaggggcccttaaatggaaaaacaaaatggcctaattgggattgggggaccaaaaaaaattaacaaaaatcttttgcgttttggtttccaaccttccaaaaagcaacaccccggttctgagtctgggaagtaaaaaggggaaggggatcccctttccttttttttccttaaacaaaaaggcgggttaaatgttttacccaaaagaaaaaattgggtttctaaaaaaccccccctttttgttaaacccggtttcaaaaaccgggaag

SEQ ID NO: 122720 - DNA, 587 bp, Arabidopsis thaliana columbia
  unsure (1)..(587): unsure at all n locations
gcttgnnnnnnnnnnnnnnnnnnnnnnnnnnnnnnnnnnnnnnnnnnnnnnnnnnnnnnnnnnnnnnnnnnnnnnnnnnnnnctttttttttttttttttttttttttttttttttttttttttttttttttttttttttttttttttggaacccccccaaaaagggaagcaaaattcaaagcgtggttttaaaatcaaattgggtccccaaaaggccaaaaaccctcagaatccctttttaaaaaaaaatgaaaatgtgccggtccctaccaaccaaaccggtcagatgaaccaaccctttttaaaaaaaacccctttgagaaaaagggaatcatcaaaagcaatctttcattcattggttggggttgggggaaaaaaaaaacaagagtaaagtcgacttttgcctgaggctcccaaggggcttaaaacatatcactccatttgacaaaatactggagggtcttcccattggttcccaccctttttccgataacactttccgtttaaggggactccagcccatcctgggaatccttagcccctttttccgccccgggtacccctttaacccacttgcaatttccac

SEQ ID NO: 122721 - DNA, 530 bp, Arabidopsis thaliana columbia
  unsure (1)..(530): unsure at all n locations
cagagcgggggggaaagcgccgcaacaanagggaggccgcagagggggnggacgagaaggccggcggcgagcgccccaacgagaaaacaccggacaagccacgcccgccgaggaccgacaaaaaacgcgcgacagagcggagagccccctcctcccaaaggggggggcgcggcaaacccggcggcgagacggccgggagccgccgcgaggcgggagacggagcgcccccacgccgacgaccgggcggaggacggagcgcgaggaaccagccgccgcagcaaacacgcaccccgccccaggaggggcgggaccgcccagccggacacaaaggccctcggcagccaccggacagaccacacaaagccgagcaaagggcagagagacccgagccagggcaggggacagcaccccacacagcacgcgcacgacagccacacgaaagcagacacagcacgcgaagggagccagcagacacgcagcaccgacagaaccaaccggcgcccaccaacaacacccccagcaccgcggcg

SEQ ID NO: 122722 - DNA, 367 bp, Arabidopsis thaliana columbia
atgcacgcctacgtaagcttggatcctctatagcggccgccctttttttttttttttattaacaaggagatttattttctgcactatctcatagtcttctgggcacaaagaaacaacactaaatcttgaaagtgtttcataatattgtcatatggtgcaatatgaaaacactggagacaacattacatatttctaagggtcagagaggaatccctcacaatacacttggcatatagaatcctagtgcaatctctcgcatagaagtgtgaaattattatgaatcaaaaaaggttttggatatgcccgatccaggcccaaaacctcgattcttctggaaagtaatccgacagggcaaataccaccattc

SEQ ID NO: 122723 - DNA, 576 bp, Arabidopsis thaliana columbia
  unsure (1)..(576): unsure at all n locations
nnnnnnnnnnnnnnnnnnnnnnnnnnnnnnnnnnnnnnnnnnnnnnnnnnnnnnnnnnnnnnnnnnnccacgcgtccgcccacgcgtccggtcaaaagaagcagcagaggaagttctcaagacccacgatcttgagtgttgtagccgaccagagacggttgggaccagagcaatctcttacaactttaaagacatcggattctcaccgtacgggggagattggagaacgatgcggaagctctcggtggtcgagctcttcagctcgaaaaagcttcaatctttcaggtatatcagagaggaagagaacgacttgtgtgtcaagaaactctctgatttagcttcgagacgatctttggtgaatcttgagaaaaccctttttactttagtcggaagtatagtgtgtaggatagggtttgggataaatctccgtgagtgtgagttcgttgatgaagatagcatcgatgatcttgtgcacaagtctgaagatgtcataaggaattctatcttctctgatttctttcccggattaatgggtaggctcatcgagtggatcttcagtgagaggaagagattgaa

SEQ ID NO: 122724 - DNA, 539 bp, Arabidopsis thaliana columbia
aattgagaccgacactactagttaagctatgacgtcgcatgcacgcgtacgtaagcttggatcctctagagcggccgccctttttttttttttttttttttttttttttttttttttttttttttttttttttttttttttttttttttttttaagggagaggctgttttccgttttttttaaagattttttttgaccggggctggaaccacaactcaaaaattccctgggtccctcccaaaatctaaaaaggaaatgtcccccttccttcaaaagaaaagccagaaacgtttttaataaactttgggagccttatttcttttttttgggaaaaaaaaggccggtttttttgggaacagaggcaagacccttttttttaaggggcttcaaagccctatttgataaacaaagtttgacaaaacgtttgccaatttcccaccaaacttttttgtattggaggttgacaaatcgcaaccttttgggcctgggagtaaaaaaagaaaactttggggcttgaggtgctttcttcccagaaaaag

SEQ ID NO: 122725 - DNA, 539 bp, Arabidopsis thaliana columbia
  unsure (1)..(539): unsure at all n locations
ctatactaaactatgacaccgcatgcacgcgtacgtaagcttggatcctctagagcggccgccctttttttttttttttcttttttttggtgtttggtttggaaatgtgagatatcatatatatctatgcgttgtactctgtatatgtgggataccaaacttgtattctttgataaacaatttaatgaactgtattatttttttaaaaaaaggggaaaagagnacctanagaacggaccggaactaagttccctggaaaggaggcccaaaaaagggaaagaacaccgtataacccgagacattgggggcgcggcggggggggggtaccttttttttttttttgggaaaggagccccagtccggcagataaaaaacagacaaagataagaagcgggggtgtgccgattgcgtgtctttccccttacgggaaaaaagataaagacattagaaaaataatgtaaggggggtgtgttttttcagattgtctttaaaaaaaaaggaccacagagggaaacaggctgtttatactgcgatctttt

SEQ ID NO: 122726 - DNA, 502 bp, Arabidopsis thaliana columbia
  unsure (1)..(502): unsure at all n locations
gggggggggaaccgaaaacaanaggagcgggccccgagagagggcagacgagggagaagagcgcccgccagaggcgcgagggcacgcaaaacacaggagggacgaacggagaagaggaaagagagcgcacgggcaggggaggaaagaactcctcccccccgcgcggggggacgagcacacgagcggacggagcgacaacaagcagcccggacgggggagagagacggccgggcggcacaggcgccggggaagaggacgaagagacgacgcccggcaacgccagggaacgcccgacgcccagggcagaccggcgcagaagcgccgcgacggaaggcggcgacgggaccgagcgagcggcgcggagggcaggaccgagacggacaggagccaggagcaacgggaggaacaacagagacggaccgccggaggccagcaggacagcgcacgcggagagacccgacggggaagagcgcgcgagggcccggcgcacagagaagcacac

SEQ ID NO: 122727 - DNA, 512 bp, Arabidopsis thaliana columbia
tgacgcgtacgtaagcttggatcctctagagcggcgcgcctccgggttcttttattttttttttttttatttttttttgttataacagaggatgttcgactctggattttaatattgcgcttctgatatttcgtcgcggggggcaaaaaaaccacctccggggggcccgaaaaaactcctactaaaggggcggggggcccccccccaggaaaaaagaaaacaaccaaaaaccacgtcgtttatttggggcgggaaggggggccctcttctaataagaggcttcctaaaaccaccccaagattcgctaaccgccgcctccctctcccccaaacaaaaaacaaaagagaaagaggccgcgccccccggtctctttctctcaccacccgcagaaaaaaagacaaaaagggggtctcccctccccaccgccgccggcgccattacacacaaaaaagaaagggtggacaatccctcaccgaaaaacatggggttcgaaaaaaaggggacctgccgcg

SEQ ID NO: 122728 - DNA, 522 bp, Arabidopsis thaliana columbia
  unsure (1)..(522): unsure at all n locations
ctatagggacagctggcacgcctgcaggtaccgggccgctattcccggggcgacccacgcgtccgcgtagttgttgatacatcaaatatccatgtagaaacagaggaggtacgactctgtaatttagattgggctcaagaattcgactcgcgagagaagaaacccggttgagtcaatcttaaatcgtccaaattcataggggggagcgcccgngtctcaactgaaattccttaaagaagccaagagtgatctgttcgccccatcgccttaaagaagccaagagtgatctgttcgctccatcgctcacttttgtctttaagcgtatggtgctagaccagacctaacagcttggggaccactccaaaccacaaattatgggtttttaagccaaccctgggatcccgttcaattaaggaaaccttaggaggcaccacccagcctgcctgggtgatttccgggctggacacccgaaatgaccattgaaaaagacctgtctcagtaatcctgacccatctgttgatg

SEQ ID NO: 122729 - DNA, 555 bp, Arabidopsis thaliana columbia
  unsure (1)..(555): unsure at all n locations
nnnnnnnnnnnnnnnnnnnnnnnnnnnnnnnnnnnnnnnnnnnnnnnnnnnnnnnnnnnnnnnnnnnnctttttttttttttttttcttcatccagctgagaaatcatgttttcgagcacaccgaaaacactattgacagctacctgggttgaatcatccatccctgtcaatgcctcaaatgcttgggacacattaaaattgggctgatttggttcctgaattgctggcttagtttggtctgatacaggctgcataactttggtttctttgctctgatcattactttcatctttctctacaggctgtgaagcagaagattttccagcatctccttcattgtcggtagatgtcaccttgttttgatctgtggcagactgttttgcattctcatcacttttactagtttcatcctttctttgttgttgagctagtacaacaccttggtccactttgtccccatcactagttatatcgtctgccccaactggctgtgggttggtactatcattctttgcatctgaagccttctcgaaaccatcagctacactggattt

SEQ ID NO: 122730 - DNA, 552 bp, Arabidopsis thaliana columbia
ctatgacgccgcatgcacgcgtacgtaagcttggatcctctagagcggccgccctttgtttttttttttttttttttttttttttttttttttaaaacgtgatcatgagcactcaaatgaatagccccttaatgcaaatatatataaatgtagtagtcctgaatatacatcaagcctaagtaaatccctataagcataccaggaggtgttctttactttctgcgggttgacttcttttgcctcttaactgaggaaactggctcgggactgaaagggcctggtaaaacggtttcttcgctataccatccgtatctgatgacatcttttttaaggtttcttggttttaatgaagaccggaaatcttttaatttgtcttgaaaaacaagtataattctcgccttttgatcctaacaaaggagcttcccttttttttttttcttttggccctttttcccgccaaaatacccgcttttttataaggttgtgggttaaactaaggggatcccgatttttttctttttaacatttttaaaatattatttttgaaacccc

SEQ ID NO: 122731 - DNA, 419 bp, Arabidopsis thaliana columbia
gggaaaaaaaagagccccgccaaacgagacgccgcgaagacgctacgaacggacgacacaacgcacgtgacacgcgccaccgggagagggaaacgcaagggcgaggcacagccgcaaagatccctcttttttcggggggggcccccaaaagaacaatcacgagaaaaaaaaaatcgcggggcagtccgcccagccgcccgcgaaccaaccccgcacacaccaacgcctcaaccgcgacaaagaaacgacaaaccccagcacacccccacagccactcctccaacagcaccagaccgcaagtagcaccaacccaaggaagaccaaaaaaaacaagcgcactaagaaaccaacgaaacaaacaaaagcaagaccgcacccgacgcgcgccaccgcgacccgcccgagagcacagaagacgc

SEQ ID NO: 122732 - DNA, 587 bp, Arabidopsis thaliana columbia
ctatgacgtcgcatgcacgcgtacgtaagcttggatcctctagagcggccgcccttttttttttttttttttactcgccaattgttttcagtgaaaatgtaaattacaaatacggcaaaaagtaacaaactcttctgaagcatcatcttacaagagcaaagaaaatagaataacccataatgtggaacatttagcaaaatcgatgataaccactttaaaaagcgtggttaaggattggaagaccaaaagccaaagggtcttttttttattatagcggaaccaaaaacatagagataacccgtttccccaatggcgggttaattggagagcgttggcccttgcttggatgggagcaggccaaattttgaaaattttttttgagggaaaacaccaccttcggtctccgaagggatatgctaatttgcgagaaattagtgtcgcaattgatgtaaaggcgggttagtgggctcttgtgtttggcaacaggaggaagatgaggccgtttaagatacgacacgaaacagcagagtttgggaggaggtatggcggtatagtctataccaatacgttcgccactaataaatgtg

SEQ ID NO: 122733 - DNA, 526 bp, Arabidopsis thaliana columbia
  unsure (1)..(526): unsure at all n locations
actatagggacaagctggtacgcctgcaggtaccggtccggaattcccgggtcgacccacgcgtccgcaacgccctgcggtacagctacctaagaggtccaggtggtcggtttaggaatccttatgatctcgggtgcagaagaaactgctagtggaattntnnctnttnttgnntgactgnnaaaacgttttccgaaaaggggggggggaattccacttgcggaaaggataaaaccctgcgggacaactacctaagaggtccaggtggtccttttaccaatccctatgacctcgggggcataaagaaactgcctcgactctttattgaaagggtctaacgaagatttagggcgccctgagcaacacccaacaccgctaccagaggggtttttccctgccgcgccttctgccgattgccaatttctcataacggccccggccctgttccctttaatcgctccccccccccatatttcgccgcctcccactggctcctttgcttccccgtgggggccctttgcctgat

SEQ ID NO: 122734 - DNA, 399 bp, Arabidopsis thaliana columbia
ggacaaggccgctctagctggttcttaacggcgccttttttttttttttattataaaatgacgcggggtttgcggaaataaaaatctggattcttccgatttgcgtcctgaacgcccgtggggggaaagagtttttttactcggggtaggagagtaggcgcgggtataagtacccttcgctcgcttattccctggtttatccacggcggtgtgatcccccctactccgcctttccacccacttattctggtccctctcgcatctttacttctcaaaccttcccccagctcttcctcccccgtctcgcctcgatgctagacctcgagtaatccgaatacgcatcgcgcctgcatttttattgaatggtacgagcgggttcaactggacatattcgagccc

SEQ ID NO: 122735 - DNA, 342 bp, Arabidopsis thaliana columbia
ctatgacgtcgcatgcacgcgtacgtaagcttggatcctctagagcggccgccctttttttttttttttttttttacgtcaactaacaaacatatatattccaggaatttatatgacatgtagttatagcagattcaaacaaaaaattataattcacgagaagatcaacaggataaacaacgtagacaatttaaacaatattgaagcaaaaacattatccaagtggaagaaaaatgactagaagaagaatggcaacattggcggcgtcaaagttgtgggattttacctactaaacattgacactgcccttatggatcaacatgtacttgacggggttttcgc

SEQ ID NO: 122736 - DNA, 432 bp, Arabidopsis thaliana columbia
gggggaaaacccccccaacaaacaagagaggaggagaagggagagaagggaaacagaacaagaacagggaagacaaaagagacagccggggcgaaccacgaccagcccccgacgagacggccgcaaagacaaccagatccctcttaatagaggggggcaaccacgacgacgccgcagacgcacgaaagcgacccagacacgcgccagcgaaggaaccagaacacaacgaaaaaaaaacacgagaagagcgcggagaagcgccaaccgaccaacaagacgccacaccgcggcacgagcaaccctacacccccccgccacgaaagcgcccgcgccccggacccccaccagccgcaccggagccgaaacaaaatgacagaacgagcagcaagaaacagtacaaccacggcagggagcggacagcagacagccaag

SEQ ID NO: 122737 - DNA, 558 bp, Arabidopsis thaliana columbia
  unsure (1)..(558): unsure at all n locations
tctagctgagctatgacgccgcatgcacgcgtacgtaagcttggatcctctagagcggccgccctttttttttttttttataaagaaacatcattctggtgggttctttaaatgagcctcatcaacaaaaaaggttttttaaccacctacggtgaacgaaaataagaatggtgaaaaagaaagtttagaatcgatcgcctttatcatcttcttgttcttcatcatcgncatcttcttccctcggattgagtttagaagtacttgaaaaggataccaccgcgagtggcgaagaagggagcaaagacaagagactcaacagccatgagcttgatgaggatgttcaatgaaggtcctgaagtatccttcaatgggcctccaattgtgtctccaatcacagctgccttgtgtggctctgaaccctttggtccaaggctctttgcgtgctctgatacaccagcctcgatgtttttcttggcgttggcccaggcaccaccagggttagatgctgatatggcgatctgaacaccggatcaagaaatccgggaggacaccagagag

SEQ ID NO: 122738 - DNA, 712 bp, Arabidopsis thaliana columbia
  unsure (1)..(712): unsure at all n locations
cccccaatttatnaaaacnaaaccaaaccgcagaatcaccactcaaaatattactaatttatctccatgggggaaagggcggggtaaaaaaaatatctactttaaaccttacctaccatttttaacccttactctactaacatttcacctcctctcattctacctatcatcttacactctattcatatctaactctttcatataattagtctaaaaaactacaacaacaaaacaaattatctactttatctaaggagggtgagggcatccatccaacattttaatcccaacaaaaaaaaatatccccattactctcaaatcacaccttatctaactaccacataaaacccacatacatatacaaatacattcctaatactattactatcagtgataattactaccccttaacaatctacccctccacaaacaaattatatatcacatcataagataacacataaaaaccctagcttctaccacccacataattataattatactcacataaataaatcctattttcactctcattctttacatttttatttttattataaatattctagttcatatagatatttttattctacataacctcttacttacattactaatcttaatactccatacatatcacctatactttatcatctaccttattctaatctatatataagtcatatctataaaataatttttactttcattc

SEQ ID NO: 122739 - DNA, 565 bp, Arabidopsis thaliana columbia
  unsure (1)..(565): unsure at all n locations
atttaactgcactatagtaaactatgacgccgcatgcacgcgtacgtaagcttggatcctctagagcggccgcccttttttttttttttttgctgaataaatccaaccattaccaagatgttcaaaaagatccaatgttgttcaagttctgttacttaacaagataaaaaagtatatgttatccaaaatgtttctataaaaacaatcttctattctataattggtcaaaacaaacttacaatagctgcctccagctttttagctcacagagtagtttcatcagtgagaaaattctgtgttcactttcgactcaaaagctttattatttttttcgtttggccctcttaacaaaaatagtatgcaccgttttaaatcacttcttcttgctgctattcttcttccttccctttacttggctctccaaagccttgagcctcttactaacaggactcagcgatgttgaggaaagcctcgggtttactggcgaaggtggttctatctggttctgtgtatggncctgtgtcatggctttcattttcttgagagctagaaacaggtcaaattg

SEQ ID NO: 122740 - DNA, 285 bp, Arabidopsis thaliana columbia
ctatgacgccgcatgcacgcgtacgtaagcttggatcctctagagcggccgccctttcttttttttttttttttttttttattttttttattttttttttttttttttttaaaaaaacgggggcgaaaaagaaaacggacaaacattttgtgttacaaacccttttagaggacaccccggaggaaaatttcttttaggaaagcggacctttttaaacaaatccttttagaacacaacttccaaaaaaggaattggcgaggaagaggatccataaggggccatcgg

SEQ ID NO: 122741 - DNA, 568 bp, Arabidopsis thaliana columbia
  unsure (1)..(568): unsure at all n locations
ccccccnactttatatagggaacgctggtacgcctgcaggtaccggtccggaattcccgggtgggcccacgcgtccggcttgctcaactccttacaacgccaaagggttgatgaaagccgcaataagaagcgagaaccctgtgattctgttcgaacacgtgctgctttacaatctcaaggagaaaatcccggatgaagatttcttctgtaaccgtggggaagctgagatggtcagacctggcgagcacattaccatcctcacttactcgcgaatgaggtaccatgtgatgcaggcagcaaaaactctggtgaacaaagggtatgaccccgagggtatccacatcagggtcctgaaacccgtcgacttcacacaattggaaactccgtgaaaaaaacacatcgggttttgatcgggagggatgtatgaaaaccggtgggattggggcaagttttacagttgcctcaacgagacttttatgactacttagagctccggggatgggttttttttttaagacgtcctacccttaccgtgtccctggagggggggcccggggtctaccggtta

SEQ ID NO: 122742 - DNA, 549 bp, Arabidopsis thaliana columbia
  unsure (1)..(549): unsure at all n locations
aaccccacgaaccagacaattacatttttgcaaaggggcggaacccccaaataaaaaaagagcacgagtgaggacagagagccaagaccccgacatcatctgcggtacagcagctctactcctcctcctaacacattcgtacataagttacaatgatatcgagacagaagagatttttctttataaaggtggccacaaacacaaccanacacacacacacacacaacccacaccaaccaccattgatctataatagaataataccgactacccacccaccgctaccaagcgccacccctctctgctgttaaatgaactcacagtgccttcctattctacccgattctatatgtcttactagtgtattactccttccctatccatactcagaactaccccagaaacacgcctatctcttactatatttctacgacgtctcctcacttctatctccagcccactacgatgtcactcctcaacgacacaaactaatattccacaagccaccccacagccctcccccaaatcatctactcagctatacatcgc

SEQ ID NO: 122743 - DNA, 559 bp, Arabidopsis thaliana columbia
  unsure (1)..(559): unsure at all n locations
gnnnnnnnnnnnnnnnnnnnnnnnnnnnnnnnnnnnnnnnnnnnnnnnnnnnnnnnnnnnnnnnnnnctttttttttttttttttttttttttttttttttttttttttttttttttttttcggagaggacaaaaacagtggaatagacctgtccagcgcatttcaaatttcacataaaaggaattcttccttaattatggggtaaacatataagggtttttttatataaaacataagacaggattaaagttttgcctaggtagggaggcaaataaaaggcaagccttctgtttaaaaaggaacgctgtgcaaaaccactgtctaaacagtgagacctgggcccaaaccaaacaagacaccccactccaacccttttgctgtgggggccacaccatccttaggtgactttctcctcatctcgnnaaagaagaaaagaaccgccgccctccacatgtttccatactcgctcaacacgtgacgggtcgcccttatattctcttcctttaagcctagcttttctccacctggtctaggatcgctggacccccaggggggcta

SEQ ID NO: 122744 - DNA, 568 bp, Arabidopsis thaliana columbia
  unsure (1)..(568): unsure at all n locations
nnnnnnnnnnnnnnnnnnnnnnnnnnnnnnnnnnnnnnnnnnnnnnnnnnnnnnnnnnnnnnnnnnnnnnnnnnnnnnctttctttttttttttttttttttttttttttttttttttttttttttttttaaattttttttttattttttttttaataatagttttattttttgaaaaaaaaatctaaaccttgttggaccaaaaaaagaaatggggggggaagagggggcttaaaacgagagcaaaaaagatagtcgtgagctccgattttttctttttttaaaacaacaaaaaaaaaattatgcggcgaggggaatgaacccaagggggaaaccataatgctcaccgggagaccggaagaactaacagggtccaccccgcccgaaaaaaacggccccccggagcgctttgtggcaaaaaaaaccctcttcaaatattttttggcccgaaagagatttgggaaaaaaaacaccccaaaactttttggggcaagccccggggggcccaggagaaaggcgcttttccactctgggaatagggaaaaaaaaaaaaaaaaaagatcttttt

SEQ ID NO: 122745 - DNA, 441 bp, Arabidopsis thaliana columbia
aaaaaaaaaaagggcgctcctgttgtggcccccccccccttaaaggggggaacaaccaggcgaacgtgcttgaagcctggacttttttgaacggggggggcaccgtgcctattcttatttttggaggccagctagtggcatcttacaagaaatacataacaagtgaaggtatttgttgtaacacgttgtcgcactggagcgactcagtagcgaagactgccgtctagtctgaagcccgagagagggttttttttgtttcttcgtgggggggccacacaccatcacagctcacacaaagtcgaaaaaccaactccaattatgcgttagcactgtacggaaagtcctacttattgagtgctatgcgctcgttggtccccgccgcgcgctgtatgcaacatagctctgtccgtggaagcgcctccagcgcgtcttcccgtaagt

SEQ ID NO: 122746 - DNA, 580 bp, Arabidopsis thaliana columbia
tgattgagctgaactatagatgagctatgacgcggcatgcacgcgtacgtaagcttggatcctctagagcgggcgcccttcgttttttttttttttttgttttttttttttttttttttttttttttttttatttttgtttttttttaaaataaaaaaagcgcccgtggatgaaaaaatgggaaaatttccttttccccgaaaaatgactacccaacttttttaggggggggggagaaactcaccccggaaatttttatttttttttggggcttttgtgaaactcaaaaaatatccccatttttggggggaacacggggggggtgtaatataaagggggggaaaagaaaaaaataccgtgtttttttttatgctgctcctgaaaaaaaaaactggtcgccatttaagagggttgggccattttaattccccgcctttttattttttcgggagggactattgtgtggttgaagaacccttgaaggtggtgcaggggaaaaaatttgtgcctattttacacaaatggggggtcccctcggggaatataaacattgaaatttttttttttaaaaggggggaaa

SEQ ID NO: 122747 - DNA, 567 bp, Arabidopsis thaliana columbia
tgaactatattaaactatgacgtcgcatgcacgcgtacgtaagcttggatcctctagagcgggcgcccttcgttttttttttttttttgttattttttttttttttttttctgattcttttttattatgttttttttcaaagaaaaaaaatcgccgttgatcgaaaaaatggaaatatctctttttcccagtagattgtttccccaatttttttagggaaggtgaaaaaattgctccgggaaattaattctttctttggaggactttgtgaaattaaaaaaattctacaatttttgggggtaccaggggggggtggtataataaggggggggaaaagcaacattaacgcttttttttttattgatcctcctcaaaaaaaaacttgttgccatttttaaggggttgtccatttttaattccaccccttttatcattttcccgaggcacccttgggtggtttacgaacccctaaaaatgggtgcggggaagaaattgggcttatttaaaaaaatgggggggtcacctccgggaatttaaaactttgaattttttttttttttaaagggg

SEQ ID NO: 122748 - DNA, 474 bp, Arabidopsis thaliana columbia
  unsure (1)..(474): unsure at all n locations
gnnnnnnnnnnnnnnnnnnnnnnnnnnnnnnnnnnnnnnnnnnnnnnnnnnnnnnnnnnnnnnnnnnnnnnnnnnnctttcttttcttttttttttttttttcttttttttttttttttattacttttctttttttcgggaaaaagggggactttttttctttttcagcaaggcacaaaaggttatagcccattttcacttttcccattttttatttttattccacacgattgattccccacgcagaagttgaaaaaagcgggccggtttgccatccaagcaacaaacaaccttcttgcttttccacaatataccccacaaccccggattaaagggccaacaacatgcttggttgtttataccccttcgaaccaattctaaccgggttaaatcctccaaaaccgaaccgggttctccactgattaaaaggctgatgccctctcaccccgggctttttccttccctgccacaagg

SEQ ID NO: 122749 - DNA, 522 bp, Arabidopsis thaliana columbia
gcactatagattactatgacgtcgcatgcacgcgtacgtaagcttggatcctctagagcggccgccctttttttttttttttttttttttttttttttttttttttgataaaacagtctattccttctcgattttaacagtttaagggaaaaccactttgggattgcaacacataaaacccttgtggcgcgcttttttttgacaaattaaaccttaacaagccgggggaaaaaaccaatggaaaaaaaaaattttttattccaaaaccataatccacttccattttatacttctttttttcccaaacctaatgaggaacccccccaccacactcttggttgcaatttaactgtgagacctctcccaagacagagggaaactatcctttggagcctatcacttaaaggaaagcgcccttctcagaagttcaccactctaacgaaaggggacccttgcaacattatggcattttattggactgtttggctgggcactgaaggcatttttttggagaagtttaca

SEQ ID NO: 122750 - DNA, 510 bp, Arabidopsis thaliana columbia
  unsure (1)..(510): unsure at all n locations
gacactatacttgagctatgacgccgcatgcacgcgtacgtaagcttggatcctctagagcggccgccctttttttttttttttgaccaagtgctagtcgaatcatgcatgataatccaacattacacaaaacagatttgagggttcaagagaccctgcataactacgatcagggaaagaatatggaaaacacttaaaagccacctattataccggagagaacatcatctgagaatgatagaactgataacactcagacggtgttgagaagatttttaatctaactggagaagaggggtaccagatcttaataatcgtaggactataccaccaccgactnctattacttagccaccaccagccggcaaccgggacattacaccaccactagaccgattcactctggcacgagaacctaatgttatttggggcaatgggtctctctcctggatgttaggcataactttaacatttataaactgatacttacaagattgttttgtccgtctg

SEQ ID NO: 122751 - DNA, 506 bp, Arabidopsis thaliana columbia
  unsure (1)..(506): unsure at all n locations
nnnnnnnnnnnnnnnnnnnnnnnnnnnnnnnnnnnnnnnnnnnnnnnnnnnnnnnnnnnnnnnnnnnccacgcgtccggtcaatgacaaggtgagggtactcttgctggatttatgattggcaagggagcgacattatgggatcccaatgatgctagtcgcggtctagatatcagtgatgtgccatttattatgcagttgtatcctccacctgaggggaatgatatatgcatcgttcaggccgaacacgaccatctggctcacatgatcagaggctcactctaccatcctagaaagccnacgtgatgcatcatagaaaaacactctggtgtcatatgagatcacctcgttcggccttgacctgtggaatatgacagatctgggcgcgtagaagctgctcccaacagctaacgagtgagagacagtgtgcgccctgcttccttgtagctgcccaggtgtcctcagaaacttccggtctacaaagtaaagcactcctgcctaagactg

SEQ ID NO: 122752 - DNA, 531 bp, Arabidopsis thaliana columbia
ccgcgtacgtaagcttggatcctttaaagcggggcggccacccgctttttatttattttaatgcgaaagtgacgggaaaacggacaaccacaaaagcggggggaaacggaaaccaattcaccgtcacctcgaagccaaagcaaaaaacgctgcaaaagcagaaacaaaaaacaacgccaggcttcctccttcccttaggggggggggcccacccacacacgctggcgctcgaagcgaaaaaaccgccccaaatccgtgcccacaccccgcaacccagacgacctaaccacccgcccacggggaccgccccagagaaccgacccgggggagcgtccgaagccataaccccaccagcctcgagaacaaagacggtcgcccacgcgcgaggtgggcaagaacgcaggaccgccccgtgagagaaacatggaatagtaagaccaagcagcgcgcacacgcgaccaacgatgacaccaaaccgcagggcggcttcagcacctagtaaacgcacgagaacagcaaggagagagagag

SEQ ID NO: 122753 - DNA, 444 bp, Arabidopsis thaliana columbia
gggccagacggccccaagagcaggcgacgcaagccaccgccgcccgggggccgcaacgacgcacacgagagacaaaacgcaggcgcaaaagaagagagttttttagaaacgaggggcggcccggcagcaccgcggcgagcaaaaaaaaacccggacacacaccgaccaccaaacacgaccgcagacaggcgcacgcgccgggggcgcgacgacagaaaacggcggccccgatagcccaaccgcccaagacccgcgtcgccccaagtagccggggcaagaacacgccgaaaaccaaacggaacgcgaagacgaacggcaacgacgccgccaacacgcacacgccgcgagccgagcaggagacccgccaacaacgacacgcagaccacaagcagcgacgcaagcgcacacccccgacccaagagaacgccgccccaaaaaccgccg

SEQ ID NO: 122754 - DNA, 309 bp, Arabidopsis thaliana columbia
tccctctactgtcttacgccctgtgttaacatccctattttctcccctaattcttaacttctatcaaattcacatttattcaactttaattctctaataatagggtatcatcccgatttaatttcccaaaagaatcccccttcactatctttaacttcttaatcttacaaccctcttattctcgcctttctaaattcaaatttttttaataaaattcctgccctccacctaccattctaacttctcttttctcccctacaccttcctccttttccaatttaccttttacaaaactatttcccccccccc

SEQ ID NO: 122755 - DNA, 416 bp, Arabidopsis thaliana columbia
ttaagacatccgaacatcatatatacacttcctggtttgccgttagcactttccccacgcaaacgcacaaagaactcatttttttcaagcgcggtgggcacaacccaaccacgaggccccaaaaaaaaaccccccgcattattatatcgcggcagtacccgtcccaccagacatacccttggtattagagattccgtactcatacacaccccaagaatcacggcgtggtatcacccagccatccaagacatctacatagcctatgctagagcgaccgcttaatcacatccttgcgatccgcttctttaaagccctttcttttcccccccaacagcgccttccgctcttcactcacaagttcgttcccctttgcccccacttacatctcccgcccacccaaacttatgtatcaataa

SEQ ID NO: 122756 - DNA, 354 bp, Arabidopsis thaliana columbia
ttttttaagttcctcaacccttttttattaatatccccctcctttaaaaaattaacttttcccaaacaaaaaaaaccaaccaaaacttacctctaattttctttttcccaattaaaacacctccctaccaaaactctcgaaacttccaaaaaccccttttaatcaatcccttacctcactttttctctttttctttttaaaaattcacccttattctttaaaaccttaaacccctttttctaacaccgtttttttccccccatacaaattcccccacaacaactccccccccgaaaacttttttacttcaacaaaaacacttcctttccccctctttcttatttcttctctcta

SEQ ID NO: 122757 - DNA, 356 bp, Arabidopsis thaliana columbia
tctaacccaatcttttttcccaactttaaaaaccacctttttttcttttaaaacctataatacacctctccctttctctaatgctcaaaataaacatttttaatttaaataaacccttaaaaaaccttcttccatccaccaattttaaatcacctttttttctttaacacaacatccccacttttccttttaaaattccccctcaaccctcctttaaatatttaataaaaaaaaaaaaaatttcccccccgggaactatccttttcttttcctttaaaacccactcccaacctttttttaacctcttcttaaaccccctttttaaaaattttttaaaaacacctccctcatttttt

SEQ ID NO: 122758 - DNA, 576 bp, Arabidopsis thaliana columbia
  unsure (1)..(576): unsure at all n locations
acctcccctttttttttttttaaccctaanatatttnttatctattatacccaccctttccatacctnaccttttaatttttaaataattcaaaaacatctttcaccaaccaaacaaaagccattttaaaacataaaaataaagattttcccatttggtgacctttctctcaccttttcccaaaaaataaaatnnttcctccctccttttncccttnccacttccaataaaatttantcccttctttccccccccccacctccattaacctaaaaaacccccttcctaatttttttaaaaaaaactcctccacccccccttcnttaaaattccccttttttctcaatcccaccaanaaaccccctcccacaaaccatacctcttccccctctttttctccttttttcctccccttcccacacctctcccctttttatcaaaaatttcccnccacacctaaccaccaccatttttttcacccccccaaaatcttacccccttttcctttttttttcccccttattctcctcccccacccccctttcaccttccccccccataaattcattttctttt

SEQ ID NO: 122759 - DNA, 222 bp, Arabidopsis thaliana columbia
  unsure (1)..(222): unsure at all n locations
ccaaaaatatttcacccacaaattgggattttctccttttttttccctccccctctctttacccccccttaaaaaaccccttttacaaccttttaaaaaatttcccaagccaaaaattctcccctttncagcctccccactcatctcttcaatccctactatgcccccacccctttttttcttttaaaaaaaaacccccccaacctctttttttttttcaaa

SEQ ID NO: 122760 - DNA, 501 bp, Arabidopsis thaliana columbia
  unsure (1)..(501): unsure at all n locations
ggggtntaaaaaaaannnnttttttccccccacttttaatttcncatcccctcctcccatttaccttnnaaaacaaaaaaattattcctctggcgcgggggggtttnttttccactttttttttacacctttttttttttggggggaggcttaccccggggggtttacacactattccgggggggggtttttttttccctcttaaaccgccccccccatattaggtcttcccgccggcccccccgaaaaccggggcggtttttctcgccttttcccacttttcgcggggtgggggtttccctcaatacccttcccgaattgttttttttccaacaaaaacacgccgcgaattggtctctgcctttcctcaccccccctttaaccgtttttttttgaccctggcccccccgtttttctctcaaccatgttttttcgtgcaccccaagacccccgggcgtcctcccccacacacgcggccgtttccgtcttttcctttttgac

SEQ ID NO: 122761 - DNA, 575 bp, Arabidopsis thaliana columbia
ttccagaagcccccaatacgcgccgcagcaaacacaaccaaccacccattaccccgggggaaggggacaaaacaaaacaggagacacccgccaacccaaccccgaaacgaagccaaccggcgcgcaaccgccagcaaagcgaccaagaaccagccacaagcaaccgagaagagagcgacacaagacgacgacgcaccccacaacctcttttccaccagcgagggggcgcgaccaacccacgacagcaacgcacaaaaacagacaacacacccacgcaccgccgaacaaagacgggacgagaaccaacaacaaccaaacacacagaagaaagaacgaacccagccaccggggcgcaaaaaaagcgaacaaaccaaaaaccacaccaccacccaccgaacaaaacacaccacacacacgcagcgcagcgccgaccgcgaccgcaagagggcagcacacaagacacacaccaggagggcggccaaacgcaaacccgcagaaaaaacgcaagaacaaagcaacaagggggtcgaccaaggaaagcagagcgacccagcacacggggccccgcagcaggg

SEQ ID NO: 122762 - DNA, 360 bp, Arabidopsis thaliana columbia
ccgcgagagagaggaagcgcgacgccactcgagcgagcaacaaggcgccgcgacgaacgaccacgcagcgacggtacgcgaccgaggaaacaagcgccaccagcgcgcgcgcaggcgacacaccacacacgagttttatttgcggagggggggaggagacacagcccacgcagaccacaacagagaaaaaaagaaggccagcccggaggcagaaccgcccaccgcgcagaagacgcgcgacgataagcaaagataaccggaaagacggacacacgccgacaaggcggggacacagcgagcccgcacgaacgaagcgccgaagcaagcatccccaccaccacgcccacaccacgacgcaat

SEQ ID NO: 122763 - DNA, 662 bp, Arabidopsis thaliana columbia
  unsure (1)..(662): unsure at all n locations
agcggccccgggatttgcggcgctacaccccgcgggccagcgccgccgccggccggagccgaatttcnccacgggggggaggggggcacaaaaaaaccacccccccacaacccaccaaacaatgaaggggagggacgccggggcgaggggcccggcagcggacggcgccggggcgagcggcgacgcgccgccgggacgcggcgcgagaaacttttcttccggcggggggggggacacccacaccccccgccgcaaaaaaaaaacggcccgcccgcgggcgccgggcgccggggggagcgccaccacacacggcacggcgatcgatcgggaagccccagcggagcgaggcggcaggaggggcgggccgggcgcgcgcaccggacccccacaggaggcgacgcgagacgcggcgggcgccggcagggcaacatagcgggaggagtgacgggggcgcccgcgagcaccgcgccagggcggagggaaggacgcgagacaggaggaggatcgccgagcagcggccccgcgcgggcgcggccgccacggacgacccgcgcatagcgagcgacgccgcacacgagacggacggagggcgaggcgcgcgagagacgacggtggtcagcatggggggggggggcggcgggagggggcgagcgggggggcga

SEQ ID NO: 122764 - DNA, 629 bp, Arabidopsis thaliana columbia
cggtccggccgcgccgcgccgttcggcggcggcgcgcggggggactcggtttgtgaagcccccccgctccttctcgccccgcgcgacgcgcgcgggcgccgccgcccgcgccggcgccgcggccggctatttttcttgtcccgctggggtccaggtgtgccccaaaataaaaactcccgctcgccccgtcccccgcgccggcgtttcctggcttgtcccgtctgtgtcttgttttgccgctcttgtgtgtctcctggttgttggtccccccgcctgcgtcttctttcgtgccgctggctcgcccccccccgcgagtgttttttttttcggggcgggggcctccccgcccgctgcccgccctgttacaaaccccccggtttttttgtgttgtccctctccccctgtcgtcggttcgccctcccagccttcgtctccccccctcttcctctcgcgcctcctcgcggttggtcggcgttgcctattgtttccctctgctgcttttgttgcccgctcggtgccttgcttgctgttccggggcgcggctctgcgcgctgtctcctgcttccgcccgcgtgcgttgccgttgcgccggcgtccgctcgcccctcgctcgccgctgccctgcgccc

SEQ ID NO: 122765 - DNA, 461 bp, Arabidopsis thaliana columbia
  unsure (1)..(461): unsure at all n locations
ggcccccgtgtagagagcggcaccccgcgccccccctcccccccggcgtggaggggccgcacaaaaaaaaaancaacaccnnncccgacgccaacccacnccgccgcgccacgccgacaggatggtaaggtttggtgactgcctcgcgctcctgccgggggcaagccgttacaagtcacaccccctggcacccgctcaccgccgcccaggcatttttttttggggttgttgggacaaccacgaggggggtgtaaaaaacagaaaaccccgcgagtgccggaagtcgctgcgcgtctctagttgtgaccactctggctagtggtccgcgtggattcgtaagcggaggccggggccgaccgttcgcgttgcttgcacccctctcggcccaccgccgcctccggttctcgggctcagcctccggcgcggactctcctgtgtagcgccgcccgcgcggctggtga

SEQ ID NO: 122766 - DNA, 501 bp, Arabidopsis thaliana columbia
  unsure (1)..(501): unsure at all n locations
gggaacggcccccccgccgggcgcgggcccgccccttttttnccggcgttggggccgcacaaaaaaaccccccnccccgccccggcccgccgcgcgcggggggtgcccgcccggggggcctcttgcgttgtttgttgcggttccgcccccccgccctttctctttttttctccctcccgcccctttttttttggggggtgggcccccccccgcgggttgcttaaaaaaaacctcctcctcgtggtggttttttttattttctttctggtggcgtcttgcttgccttccggcttcctgctccctccctctgccctcccctgctttgtcgcgccgttgtacttctgcgctgcccgctcctttgtgttcccccgcgtttctctctttttccctctctccttctctgctctgtctcgtgtagtctcgtccctgattcttcgtttgttctccgcgtgcttctttttgtctgtccgctcttctcttgtgctttttttcctttgtgct

SEQ ID NO: 122767 - DNA, 682 bp, Arabidopsis thaliana columbia
  unsure (1)..(682): unsure at all n locations
gcggggggtcgccgcgggggggggaattttttgggggcgaccgtcttaaccactttgggggggggaaccggcccccttcttaaggcgnggatcccctttacgccttcccccctttgtttgtgggtggggataatccaaaaaacctttttttttctccccccttcaacccctccccccacctcttttcacaaataaaaattataaaaccatccactcttccctctcctcacaccaaacattcaccactttcttccccctctttcctctaacccacctcccttttcttcacccttccctttttttttttgggatttgttggggccccccaccggggggggcggcccaaaacccaggtacacccccgtttgtttgtgtgctcgggtctctcctcccccctctttctttcccccagcccgcccgaacgggggtgtgggggtgttttgtagcgcggggggcggcggcctgtccccgctctgtcgagggtgtttccggcgcctttgcctgttgcgacgcggccccgcgccctgctccctgcgccgcgctctccttctcgcgcgctggctccccgggcgccctgtctctcctcggcgtcttctgcgttgtgttttgtcgcttgtggcgccgcagggtcgcccggcggtgcgctggctcctctgccgtcggcagcgcgtcgcctcgcgcg

SEQ ID NO: 122768 - DNA, 669 bp, Arabidopsis thaliana columbia
  unsure (1)..(669): unsure at all n locations
cccccccccnttttaaagagaaaaacaggccccccccgcggaaatggnnggtctctcttcacatttttacccccctcctgtgtaagtccctttttttaaaacataaaacaccccaacccccacacaaccacaccccctcatcttctcagcacaattaaaatttactaacacccccttacccatcccacaccacgcacctccctcccacctcttttccttcctacctcccccccatatctccttccttccaccccaccacacccacccccctctttttttctccggcattgtcgggcgccacacccccccgcccgctccccctacaaacaaaaaacaaccctccccctccctccctccccctcctcctcacccccctctctaccccctctataacagtatttttattttattatttttctaccttatcctcaacccacactctcctcaccnacccccccacactcaccccaccatctaattatctcacataatcattcttatctcatacctctccctctatccttactactattctactcccctcctcccttaactccacccatcattccaattcacaccatacgcaacaccacccccctctccttcccttctccttttcaatctcacctcccacctccactcccccccataataccccccctccttttt

SEQ ID NO: 122769 - DNA, 332 bp, Arabidopsis thaliana columbia
gtgaaaaaaaaaaaaccagaacagacgagagggccgaagggcgctacacaaagataagtagaaaaaaggcacgcgcaccagcgaaggaaaggagtagagaacacgtaaggagcaaaaaaagcgactcgagacaaagagagggacttttttttccgaggggggggcggaacaagaggaagaaagtagagaaaaaaaaaaagtcccccacaaaggacgagccgaccacagggactgcgcaaagcctacaagtcgaacgaagaagtgagtgaaatgtacagtcgcgaacaacagaagccgcggaacgagcagtactcaggaaagcgcaaacaaac

SEQ ID NO: 122770 - DNA, 483 bp, Arabidopsis thaliana columbia
agcccgatagaaggccgccagcacctttcccccgggggaggggccggaaaaaaaaacccaccccctgaggcgacgcccgggccgtccacgtaaaaattaattagggaccccccccttgcacaaacctcccaccaacacgtcgattctatgtagtcccaccagcgaattttttttcgggggggggacgcccccacgccgtctcaaaaaaaaaaatcccagccttgcatgacacacgttgtattgcgtgtgcatctgcctcagaaggatactagatatgagagtattgtctaacgaacagcccattgcaagaccagtccgccgtcccagaagcgacatcatatcttactactcacctactctcgaaatctatcccatccgtcccacgcccatgcttataagttacttctaccgacccacctcccccctcgccactatgaagtacctgcgagactcctcgccccccgccaatcctttctttttatt

SEQ ID NO: 122771 - DNA, 425 bp, Arabidopsis thaliana columbia
  unsure (1)..(425): unsure at all n locations
gggggggcaaacacaaaaacacccccccccccccccccccccttcctccctcttttctcctctcctcctatcttatatttttttttcctttttttcttctttcaatctccccccccccccccctcctctcccctttcctctctccccccccccccccccttcctcctttgggtttgtttggggcccaccacaccggggggggggttcaacactcactcaattaccctcggctcctctttgttttttgtttcgtttgcccgctgccgcctcccctccgcctccctttacgtcgtccttggcgtgcgccccccgcnccgttcccgctgttcgtcttcgatccgtgcttttcggcgtgccggcgcctcgcgtcgtgccgggtgtcgcgcgggtcctgtgctctgccgcccgcgcgcggtgtgtcgcgt

SEQ ID NO: 122772 - DNA, 545 bp, Arabidopsis thaliana columbia
  unsure (1)..(545): unsure at all n locations
accccgccccccccccggggggggnnnttttttgtgacatcccaaaaataatacgcccacccgccccccctacttggatcattanaacgtctccttttgttttggttttaaaacaaaaaaaaacttttttattgattaaaaaatttccatcccctttaatacccctaaatgggggggtttttttccattaagaatttaccaaagggaacctggaggtttggtctaaaaccctaaaattttttttttaacgggggggaaaaaactctgcgcccccaaaaaaaaaaaccccccccctggggtcccccccctcccccatcaaaaaaaaaaggggaataccgaaaaaaaaaaaaaaaaaaaattaatattttttttttttaaacaccccccaaaaaaaatataaaatacgggggggggggttttttttaaaaaaaacaataatcccgcctcaaccccaacctttaaacgcgccctttttctttttttctttaaaaaaaaaagtttctgtcacatattcccccccactaaactctcaatcttttcgcccc

SEQ ID NO: 122773 - DNA, 480 bp, Arabidopsis thaliana columbia
gttggggttttttaattaaaaactctttttttaataaagaaaattttatcaaacataaacaaaaaatgtccgggggcgaataaccagccaaaaaggagaggggggacctttggctttgagcttggagggcctattggttgaagcaatttttttcttggggggggcgggggccacaattgggggggggccggggaataaaaaaactctcgccactttttctatttcgtcgagcgcaggaggggagaaaaaagggctcccctaaaaaaaaagaaaaagttccggggggttagggagaaccccctggggcggcaaaaatacgtctcctctgaagacaaaaagggttttttatggcacccccctcgggttgtcggggcgcccgttattcatgtgggaggggtgggggtgttttttgtaaaaaccaagccgccgggggggaaagtgatagaggtgggggcccccgcggattcttgttagaacgtg

SEQ ID NO: 122774 - DNA, 501 bp, Arabidopsis thaliana columbia
aaaccttggatcctctaaagacttccccctttgggtttggttttaccacaaaaaaacctttttttcctatacaccaaaaacaaatcggggtaaaaaatcaaacaacaaaccccattttgcccaaacttttttgaaaaggaaagggaaaaacctctttcacaataaaaagggaaacaaattttttctttgtagttgggcaaaaaagggggggtttcaccaaaccactaaaacccccccccccttattataagggcaacacccctcccttgtttccagtttttttaaaaatatgaaggctgtgggtgcggtaaaactcacgatcccgcaaaagccgcggaaaagatcctcttctcctctaggaaccccgctcctgtacaccgctacaatattccccttcttctttccccctttttataacccatcaacaaaccccacctcctttccctttttctttcagggattatttttccccacccacaacacaccccccccacctatata

SEQ ID NO: 122775 - DNA, 283 bp, Arabidopsis thaliana columbia
gcgccgggagtgggggggcgccgaggagaatttttcctcccggggggagagggcccctgcaaaaaaaaagccgggaagggagtgccgtcgaggtgagcgccgcgagtgagtagctgggtggtaggagattgggagggcagcgagggatgtgagaggaggtgtgggaggaagggcgagagggggatggagagggagcgggcggaggcgtttttttttaggggtggtggggaggacagcggcgtagtcggctccagaaaaaaaataagtggctcaggtcgtgcta

SEQ ID NO: 122776 - DNA, 565 bp, Arabidopsis thaliana columbia
ccacccccccggacgagccaccggccacgaatatttttttccgggtggtggggggcgccaaaaaaataatatatacttgcattcccgtcttctttcttaccaactttactcctattcgcttgaatatgttataagtctctttttttttttgtttgtcgccgctccccctccgcgtctttattttatcttttctctgcagacccgcctttttttttgagggtgtgggcgcgcccccgttgtctcctccaaaaaaaaatatccactcacttcctctttttttttattgtccccctcctcctcgcatctttctccgtctcttttgcctccttcgccggttttcatccaccctcgagtcgttttcttttgcacctctcccccatcctggtcttctcttttctcattcttttccccgcttgcgtgtctttgtcttgttgtctgtcttttatcgcgtttctttcttaccccttcccccgcctctgaccggttcagacttagtcttttattttttctatttctgttccacttttgttcctccttcttctctacttgttcgttcttgtcttgt

SEQ ID NO: 122777 - DNA, 455 bp, Arabidopsis thaliana columbia
gaaaaccatgtcgcacttcggaagggaggtccaccggatatcaaccacacctactcacttctcggccttaacatcaccttccggacgagtggggaagatctctatcctctatttccaaaaattttttaaaggggggggggtgcttttattccccagaaaacgaaagaaaaaaaaatcccggggggttttccctttggtcgggcctcaaaataaaaacaaagctcacaaaccacccggaaacggttttatgagaatatttttttaaccccaaaaaaataatttttcatttttaaaaaaatttggcccaattgctaaaaaaattccccaaaggaaagagttttgaacccccccccaaacccccaaatatttaaaacccggtctctctagggggatccctatcccaaaagaggcccctccccactaaatctctaacacaaaaaaaacccgtttttttt

SEQ ID NO: 122778 - DNA, 644 bp, Arabidopsis thaliana columbia
  unsure (1)..(644): unsure at all n locations
tgccccccccncccccccccnnnnnaattattccccctttcttccccctcaattggtgggggggtttctccccccccggggccccctcccccatttcccccctctccccccgtggttcggggggcgttaaccccaccctttttctctatttcttggaggttgggggggctcaaaaaccccaccccttcctccctcccctggaatcccaccaaaccccttggggcgcgggggaggttctcctccaaattgaactctacaccccctggggcgcaaccttcctccttccctgggggggtgggcccccccccccggggggggccccccccaccagcacttacngggggtttctcccccccccgtcgtggcccctcccccccccccccgggggttacctccccccgggcccccccgccgccccgtttatatatatccacccccccccccccctccccaggggggggccccattcccccccttctcccagagcgcctctccccctcccccacggctttttccccctcccttcttttctcccgagattttccctggggggtgggcccccccccctgcccccctctttttcccaacgcccccccccttgggggggtggcgccttttacacccctcccccccccttccccccc

SEQ ID NO: 122779 - DNA, 528 bp, Arabidopsis thaliana columbia
  unsure (1)..(528): unsure at all n locations
aaacttggatcctctaaagcggcctccctttttgttttttttttttaaaaaaaaaacccacctcaaaggtcagaaataaaattattgagattttacaccacacttttggtaaatattaaaccccaccggatcagagattcttcaacacaaacaagaaataacatttctaaaaaacccaacaccccttttccctaagggggtggcctctctctttctgtaaacccaaatataaaaaatttctctccacacaaaacattttanaattttcatttgncatctcttcttcccccctctttntttttttttctctntcccccctataagggttcattgaaatcaaaaccgaaaaatccttcggaattccttccaaaaaaaaaaaagggttaacaatatatttaaaattgcgcccaaaagctgggcccaaaaattattatcacccttgggggggggggggggcgaacccaaacaccattggatggggtttaatatgggggtctcaaccccccccaccccacccccaaaaaaaat

SEQ ID NO: 122780 - DNA, 511 bp, Arabidopsis thaliana columbia
  unsure (1)..(511): unsure at all n locations
ccccccccgaggaaggggnggccacacaacctttcnccccgtgtggggggcccctaaaaaaaaacacccccccccccacgcgccccaaccgcggagcccccctgacgaagaaaaagaagagagaggaaggacgagcgacacaatactccagacgagctcgaagacacaagtactctcccaccgtacaagcccgccccttttttttgggttgttggggccccacccggggggccgtcaaacgcagcaaccccccgcagccggggcccccctcgaccccaccacaatcattcccctcccttcaaataaagattgaaaccgtaatggatgacacaaacgcgtgtaacggacgggtgggcccggccgtcgcgcgagcaccatcgcccccggcgacagcaagaaaaagaggcagggcacccgcaggcggtaataggatatgtatggtggcatccgagacgcccagggatcaggcattcaatacgagccgctccgcgcgacacaaggaccccacaca

SEQ ID NO: 122781 - DNA, 600 bp, Arabidopsis thaliana columbia
  unsure (1)..(600): unsure at all n locations
tccgctcccccgccgcggggggggggggggcggggggggaaatacgtttgtgaaccccgttcttnccccattgcgcggggggcgaccagcccccccccgcgggcgcccgccgggcgtgtcagtttttttaatccggtgtgtggggggcccccaacaaatcccttcttccctcccccccccccccccccaccggtgtcggtgcgtggggcccccggggtcgtgtggtgtccggtgttttgcgccgtcgtccgcccccctcgcccgcccttggcgggtgctccgccgcgccgcccgtctttttttcgggttgttggggccacccccgcgggggggcgccacaaacacatcccccccgtcccccttccctttttgttcgtggctgtcgtttcgccgtccgtggtgcgtttgtggctcgcccccgcgccccctcccctcccgcgcgccctgtctcggcctcccgtcccctttccggctctcctcgtggcgtgtctcgccgcgtgtgctcccgctctcggtgcctccgttgccgttgttgcccctcgccggcgctcgcgcctcccctgcgactgcgtttccgaccgcccgggtcgcgggcgcccc

SEQ ID NO: 122782 - DNA, 383 bp, Arabidopsis thaliana columbia
aaactttacaatttataacctcttcccctttaagtttcccaagggaataaaaccacctttgggaatcctgatcgtttacccggttttttaaccggggggggcctaccccattttcctacgggaaaataaaaaggggtgtaattttcttccccaaaagggcggaaaacctacccacgtgttccccaaatgggtggggggggggcggttaattcccggttccggtgggttttaaaaaacatttttttcccaaagtgcccaactttgtccctaaccctaaaatttaacaggggccttgaattatttgtcctacccctttttttaaagaagggggagattccccccctctcctcataaaaccctggcctctatacaaaaaaaccccc

SEQ ID NO: 122783 - DNA, 488 bp, Arabidopsis thaliana columbia
aacttcctttttctttttaacaacaacgagagcattttcttccccccgcgccgaacaaccgcacccttctttcacacccgttctaatacaacacaccaccctttcttctcgcctttctttcttctctccaccccccccacttttttttcccggggggggcgccccccccccccccggggctttttcaaaaaaaaccccccccccatttccctctatttaacaccaaaacaaccgcggttggcggcttccccgctctaaacaaaatatactcatctcccccccccccctcccaccaaaaaaaaaaacccccccttcctttcttctccaaaacaccccacctcaccccttttcctctcacccccttgaggggcccacctttacaacccacccgtatttttcataaaaaccaccccaaacaacccccccctcttactctcgcctccccccaaaacccccacgcccgaccgagcctccataaatccaccccc

SEQ ID NO: 122784 - DNA, 483 bp, Arabidopsis thaliana columbia
ccccccattttttaggggaaaccaggcccaaggggcgacgcgcatcttccccgcctttttcacccggggggaggggcctttaaaaaaaatcacccctcttttgaggagcttctccctcctctcttattttgtttatttgattcttgcaccgctccccccttttcgctccatcactctatacatccgtctagttcagctcgcttcgctcaggaaccacgggccttttctcttttggggtgttggggcccccccacacggggttatttttataaaaaaaaaataccctgcctccagctctcactcttcttctcttccatcttccatatctgctcccgtttgaccggtcctagtcatattgttgttcatcttgatgccgtttcatcctccgctttattgctcgcctgctcgtgccgtgttcgtgttctgcgttcttcgtttcttctcccgctttctcctttccaggttgtgcatatcctcccctcc

SEQ ID NO: 122785 - DNA, 648 bp, Arabidopsis thaliana columbia
  unsure (1)..(648): unsure at all n locations
tcccctgtccccgccgccccggcggggcgggggggggggggggagcctggggttgttacgccgtgctgccccgcttgttgggggggggaaccgccccccccgcgnggcgcccgccgaccgccctctctttttttcncccggtgaggggggggcgggcaaaacaaaaattccccccccccccccccccccccccccccccgtgcgcttttggtctgtgttgtgggtgttgtgtggtgtctgttttttggggttgcgcgtgcgtcgcccccgcccccttgccccgctttctgttcctcggcgcgcacgccccccttttctcctatttgggtttgctgggcgcccccncccccccggggcctcttcctctactcacctaatctctcctccctccttctctgttcttctgttgttttttttgtcctgtcttgccgcgcggcgcctttggcgtgtttctccgcctcgtcgttctgttcgcgtgtcctcgacgcccttcggcagcgtgcgcggttgtggccgcgcgtccgcttcgcgtccgctgggtcgcctactccgtgcgtcccgccccgcgccgcgccccgtgttcgccgccccgcgctccgcgctctcgctcgctctggcccgcggcgcgcggcgcccggcgcgtgcgtt

SEQ ID NO: 122786 - DNA, 465 bp, Arabidopsis thaliana columbia
  unsure (1)..(465): unsure at all n locations
taaaattccacggatctccttttttatgggacccgaaattatttaccacaatgtgtatcaatgggttgaaaaaaccaaagattggaaccctaaaaattttgggttggggaaccacatctcatccccagttgggagttctttcatttttttcccgggaggagggggaaaaaaaaagggggtgggtcggaaaaaaaaaaaaaacccagaaattntccccccttttttctttttccccaaatatggggtctcgccccctttaattggggggtgtgttggctttttgaacccccacaccccaccaaagggcgcccctttcttttttatacactggaacaccgtttgatacaaaacgcccgcccctttttgtaattgtgcggagatttttgagcacccccttccccgcgagagggtttcccctggggggcttggaaaaaaaaaaccgcgtgtgccccttaaaaaattttt

SEQ ID NO: 122787 - DNA, 459 bp, Arabidopsis thaliana columbia
  unsure (1)..(459): unsure at all n locations
ttttttttttttttaaccaaaaaaaanatataattttattactccaaccatcttttatgttttttacgtccaaaatcttataacattacagttaaacccaaaccccttgataaaaaaaacaaaaaagcacccacatcccgcggttaatccttttttcaaaccgttgccatnanttacacatcccttttacaaaaaaaaactcccctccaaccccctttcaccttacccttcttcccttttcccactggggcaaaggttccccctaaaacaaccccccgggcttacaaaaaacaattcccccctatccaaaaactcaaaacccctttttttttcttttaaaaactttaaccaaaaccacctccctttttattacatcaccaaaagcctaaggcatcctccctcctaaaaccccccccccatcttaaccctccacccctttttcctccccccaaccccccc

SEQ ID NO: 122788 - DNA, 339 bp, Arabidopsis thaliana columbia
  unsure (1)..(339): unsure at all n locations
gggcctttaaaaaacaaatttnnannaaaacaacaacacaatgtttctcatccctcactagtaaataaactttaacaaaaaacctttaacctttaagattcccatcttcaaatttcaaaataaagatggattataaataaaaccccctaaactttttatgggggggggggcnacaaaatttttttttttttacacctttaaaaattaaaccctcaaacccanaaaaaaaaaaaaaaaacccccccctttaaaaccttttnnccnggttgcttaaaacaattacaaaatttttttntataacccccacagggcattacctctctaaaccccaattttttt

SEQ ID NO: 122789 - DNA, 448 bp, Arabidopsis thaliana columbia
  unsure (1)..(448): unsure at all n locations
ttttttttcctttttctttccaccacacccaaattccttaaactccccatttttctccaaccccnctccccttnaaacccaaaccggagggttgaataaacccgagattttttccccccccccttttttttcagggggggggccccccccccggggtttttcccaaaatataaaacccctttctttctgaaaaataagggcctttttttttaaaaattaaaacgggggtttttttataattttttttttcttaaaaacccaaatttttttttaaaaggccttgggggggccaaaaattcacccttccgagttttaaccaaaccctttttttatggggcgtccaccaccccaaaatttttttcccccctngacccaatacaccttatttttttttgtggggggcgcccccatcatcttttttttttttttttttccccccccgggcata

SEQ ID NO: 122790 - DNA, 551 bp, Arabidopsis thaliana columbia
cgaggacagcagggataaaaagagatgcacacagcgcccagccgcacggcgctttttcgccacagccgggggtggggggcccacgaaaacaaaaaaaacggggaagaaccaagtccgcgcgcgctcgcgccagcccccgcccgcgggacagcgagagagatatatcaagagcagaacgcacgaccgcacgacgcgacagatggcacctatgcagggctcacgcgaccgagacggactacctccgcacatacacacacgcgaaattttttttttccagggggggcggaggcgcgccgccgacccgccctccccaacaggagaaagacaccaccccccgaggcccccaacggcgaccgcaccccgagcacacacacgccgacgacaccgggggtgtgaatataattacacctcgatgccgaccgcggagcagccacccggtccgccacagacaaaccgggcaagcgcccgaacgagcgacgaagcaccaccgacgcccagtcgacgcaggggacaaccacgaccacgcccaccccgccgactccgccccaaga

SEQ ID NO: 122791 - DNA, 398 bp, Arabidopsis thaliana columbia
  unsure (1)..(398): unsure at all n locations
acgcctacgtaagcttggatcctctatagcggtctcgcctttgggggtgggggggtttaaaaaaaatncttttttaagccaaggaggagggataaattcccccaaccacaaaccgggggtgtaacacaagcgaccaaaataacaccgcgaaggttggggccaaaaattctgtgaataaaaaaaaaaacttttttttttttaacaaaatttttacattttttagggagtttgtaggcggaaaatttttcggggtgcggggtggaaaaaaaacaaaaaataaaacccgttttttttttttcatttaaaacactctcaaggcctttaatccaatgtttccttcttgaaaaagggggggggcacaaagggggttaaatattccccttaaaccaccgcccaag

SEQ ID NO: 122792 - DNA, 452 bp, Arabidopsis thaliana columbia
  unsure (1)..(452): unsure at all n locations
cccccctaaagcttggaacctctaaaacggtccccccttggtgtttggtgtttttttattaacaaatacccncnaaatcttataattttttttaccccggccgggttaaccccgggaccaaaactgggccggaattttttttccgggtcaacgtcggggagaaatttaaaaaaacacaaaaaacccccggtcaaccccaaaaaacctattttttgcggggggggggganacccacccccggggnccttaattatcacgaagggcccgaacacacaaaaatatgggggggtctccttctcccccccggaaaaaaaaagaaagaaaaatgtttcccccaccgttaataaccttacaaatcccccagaacacacacccgaaaagatccccgcccggtttggggcacaaaaagagcgacccccctctctttttttctttttctttgctaacccccg

SEQ ID NO: 122793 - DNA, 521 bp, Arabidopsis thaliana columbia
gccccccttttgtttttgttttgtttaaaaagacaaaatttaactcttaccattcatttgctgccaacaaatcacattatcatttcctacaaaataatggcaccaaccccataaataatccttgtaattaatccaattcctattaatttcctgcctctggaaaccatttttaatcgaggggggccgccttttcctccccttttgcctaaaaaaaaaaatttccccaacaaccaaaaatcttccccttccaaaaagaaaaacccccccccctttggtttggggtttgtttttacaaaaaactgccccaatctcgcatcacttttttgataaaaaacctccccctgggttcttttatttttttaaaaagaaacccccttttctattttttttccttcaaggttttgaaaccctaacccccaacccttttttttttcactggaccctgaaattttcttttctcaaagttcttaaaacctttcttcttcttcctgaaaaacacaccaaatacccccctttttttt

SEQ ID NO: 122794 - DNA, 540 bp, Arabidopsis thaliana columbia
  unsure (1)..(540): unsure at all n locations
ctttggatccctcttacagggggggcgccccttgggtgggggggggttttaaaaataaaaaattttttttaaaatcccnnnaaaaattttcgggggcaaaagaaaaacccctttatgacatcttgggttttgggggggaacctccccccggttttgggtagggggttaaaaaaaaaagggagggaatttttttttttttgcggggggggggttcttcaaggagggtccttttataaaaaaaaaaaaaaatggggggggggcgtttttaaaaaacgtgtgggttttgaaagtttaaatttttccgaagtgggtgagggaacaccgaaaaagggggcttcccccgggggcgcttgggggggaccccataaatttgggggggccccccccgcctttcaaagggcgcggttgcgcttttgcccccgtttaaagacttctctttaggggggggccccaanctcttgtcccccccctctccaattaaaaacgcgttggagaaggggggaggagcctcttcccccggggtgcgctctcggagggggg

SEQ ID NO: 122795 - DNA, 506 bp, Arabidopsis thaliana columbia
  unsure (1)..(506): unsure at all n locations
ctaagccttggatcctctaaagcggctccccttttggtttttgtttttttaaaaatactanaaacataccttataaaagcgcctatcacactaattttttaactttgaaaaagtaacaaaaaaacataaattactaaagagaaaatttcttttcaccaccaacaaaaaaaaatanccttaacccaattttcaccacaagggtggggtctnttttaagggggccccaaaaaaaaaaaaaactttcttcttctttttttttccctcaaccaaaatttccccctttttttaactaaccttaaaaccccaaaaagcccgtttccctggctttttccttcccaaaggtctaaaatccctgtttataaccgaaacccccaacaaatttccgttccccccccaattttccccataaaaataccccaaacccgtgaagtcccaccatacacaacttctcccaaaactctctgtttttttaagaaaaatatccccctccaccccctttccccaaa

SEQ ID NO: 122796 - DNA, 534 bp, Arabidopsis thaliana columbia
  unsure (1)..(534): unsure at all n locations
ggggggtttaacaaaaaaaaaaactcccctttatttccccccaacttttaaaaacccttttttnaaaacattttacccccctccctttaaccccncccccttccccccttatcttaaaaggcccttttattccccctcctccctttttttttataaggggagttgggacaacntnttccncgggggttccccaaaacttatctacccccccaaacttttttcaatttttttcccctctccctccccccccgtcttttttctctctctctatggagacctccacctccccggggtgtcccgcggttttttcccccctagaaagaacaaacaaaaccgccccccgcacaccaacggcttcctctcacaccaacacagagtgtcttctccccgcttctcccgacgcccccactatcccgtcccgagcccgccggtctcggaaaacacaccttcttttctttccttgcccgtctctcccgccgcagcccccgccaacaacctctcttctcccacccccgttgcggcccgcctcaacac

SEQ ID NO: 122797 - DNA, 494 bp, Arabidopsis thaliana columbia
caaaaaaaaaaccacccctcccaacccctaaaaagaaaatttttttttaagtctatacccaaaaaaattgtgtaaattaaaaaaaaaaaaatgtttgcaaaaaaaaccccggggtttttaacctccccaaaaagttgaacctttttttttggggggtgtttcccccccttgggggagaacccaaaaaaaatcttttcccctccccaggatggcttttttgccaccccaataattttccccccggggaaaaaactaaccccgaaaccctttttttttttattgaaaccatttcccccaaaaaaaaaaaaggaattatcccccccacccccaaaatttcccgtcctctatattatccgcaacctttcttttctggaactcttcttcaaacactcttcaaaagcgggtgtttttttttttttcggagcccccctttctcccgtgttctcccctctcgtgtttttctccccccaaaactttcctcttttttaaacaca

SEQ ID NO: 122798 - DNA, 419 bp, Arabidopsis thaliana columbia
  unsure (1)..(419): unsure at all n locations
ccccccccccccacaaaaggattatttatttttccacaaattttaaatttttaacacaccccatttctttccaattctaaaaaaaattccccaaccccccccctttttttataaaggggggggggtcccccaacgggggggtttttaactaataatccacaatgtttnaaaaattttggggggcggcccccagggggctttccgggggaatattttttaaaattttaaaaaagagcgggggggggggcttaaggggggttttaacaaatcttttacacccacgagtttttactcaaaaaagggcgtgtttttctggaccgcagaaaaaaatgaggggcgggtggtgggggaaaagaaggcataccccccctcttcgtggttagagacgggggggcacccggaaaacaaattctgccgcg

SEQ ID NO: 122799 - DNA, 366 bp, Arabidopsis thaliana columbia
  unsure (1)..(366): unsure at all n locations
aaacccttcggttaactttttttaagggcgggcctttccttcccccggaaaaaaatttcccaaaaaaaaaaagaagtcgggatttttttcaggtgttgggccccccccgcgggtttaaaaacaacaaaccccttntcnncctctccctctttcccccccttttnctttaaaaccaattaaaaaacactcctcaccttctcacccccccccccccccccccacccncccttaccttccccctcccccacccacctaaatactcacttntcatttcctctaccccctccataacaacacaccccacacactctcttctcttctaaacccnttacacntctccccacccttccctcctctccccccccc

SEQ ID NO: 122800 - DNA, 541 bp, Arabidopsis thaliana columbia
gggaaggaggaaaaaaaaaaccaccgcgagcggaaccgtttcagcgccggggggggggcgcgggcacaaaagacgcggacggaggcacccgcggaccgagccgcgcagccgcccagaaagagaagaagagaaggagaagcgagcgcgcgccgcgcgcgcgcgcacgcgacgcaagacctcacgcgtagccgcaagacgccgcgacacacgcgacacgagcatttttttttccaggggggggagccgcgacagtaaccgaaaacggcgaggaaaagcactctcgctcccgccgaaccctggcccagaccaacgcagcgacggaaaccgagagatcgaaagataatagagggagagcacaacaccccagcccaagaccgaagagccagacgactcggcgaatgcgcacgactagacaacaatcacgcacctcgaaggacaggggcgcgcgtccaccccaccgccccggggctgcgagaaatacgaacgcacgccccgcagccaaccacgccaagcaacaaacgccgcgagacccgccacacca

SEQ ID NO: 122801 - DNA, 340 bp, Arabidopsis thaliana columbia
actcaatacctaccacaccaaccacattttttttttcggggggggtgggggaccaccacccccgggggggcgcgaaaaaaaaaaaacccccccccgcgggagaacacgccggcggacccccggccccgttaactgcgtgggtgagtaaatatttagagagagggtggagccgcacgcccgccgtcgactccacggtcccgcgactgccgcccgcatccctctcatgcatcgctcaccgaggcgcgcagtaaagagcagatagacagagctgcagctgcgtgacggttcaggcatggtatcgatgtaatagtgcggggtacccgccgcgtataccccgcag

SEQ ID NO: 122802 - DNA, 513 bp, Arabidopsis thaliana columbia
ccccccgacggccgcacggggataaggctagtggagagacgcttttcagaacggggggtgggagccgcgagaacaaaagcgcgggggccagtgggacacgtccgagccgccgcaccccgatggaaaaattagggaagaagcccgtgcctcgcgcctgatgaagtctctctagaaacgcatcacacgcccgccgtttttttttttcggggggctcagggcccgcaaataagtcctggtgaaggttacatctggtaggcgaatagccgaaatgatgcaacgggcagccgacgcgcccggaaagcgagattatatatatttatgagatagatgctgcaccgagtgcgccggcacgctagaccttcgccgacacatcatacgttcggaactcatacgactcccttgcgatgtgcgcatgtcggatggtcggaggccagcaatcgcaatggattgtcttatactcgcgccgcacacgcacggtcgtccgcccacaccatagcacaaccgcccccccgc

SEQ ID NO: 122803 - DNA, 436 bp, Arabidopsis thaliana columbia
ggaaagcggagaagggcgaccgaccgacgcgcgcgcaccacagcgcggaacacaaacaccgacggaccgagaacttctttttttttaggggggggaggacgagacccacagccagcgcggcgccccagaaagcgaaacccacccgaccccgcaccgcgacgaagtgataggaggtctcgcgagcgcccgtcgagacagcgaccacggcaagagagagcgagagagcgggcgcccgcaccgcagcgcgcgacaggcacgaagacccgaccgcgcgcacgcagcgccccgcagcgcgccgcggcagacagcgcccggcagcctgcgcgcgcgcggccaggccgcccgcccgaggcgcctcccgcaggctagagggaggacgccgcgcgaggggcccccaggcggaggagcagggacggcaagaccagccaactctgcc

SEQ ID NO: 122804 - DNA, 552 bp, Arabidopsis thaliana columbia
  unsure (1)..(552): unsure at all n locations
caaccgcgcgccaagggggacacggcccgcgcgccagacgcacccaagaagagcgacaaagagagcgaggcggcacagggagcgcccagcgcgacccgccccgaccgaccgcggaggcgggcgcgcgaccacacgacggcgcgagagcccgaccgacacctttcttcttttggggggggggggacgaccaccccacgcaggagacgtggccgacgaaaaaaaagaaaccgcgcgacgacggcgccgcgagcgcgcgctcaccaagactgagagcgcgaccgcggggaggcggagcagaaaagagagaggcggggtgagtgagacccgcggcaggccgccaccacacggagccagcgcgccgaccggggncgcgaacggcgcgagaaagagacgcacgcgcggcaagacgcaccgagaagggtacggcacgccgagacgcccgggaagccgagacgagaggaagggaggcggagagggagaaaccgccgcgcgacgcagcgacagccgcgccaagacgcacagaggcgccgcgcccgccgcccgacgagaacc

SEQ ID NO: 122805 - DNA, 565 bp, Arabidopsis thaliana columbia
  unsure (1)..(565): unsure at all n locations
cccccccaattgnggggggagaaccgaaccgccaaagagaggagcccagaacccccatctcacccccggggcgggagcccccgaaacaacaaanacccgggagccgccgggggcgcgccgcggcgccgcggcgcgaaaggaggcaaagaagggcgggggccaggcgccgacccccacgccccgccgcacggggcacacgagggcgccgcgccccgcgccggaccgacncgccccgggttttttttttttgcgggagtgggcggccccgcgcccagcagcgcgcgaccaaccacaacaagcagccgcccggcagacggcgccccagggcgaccgcccgcccaacgagccgcccgcccccgcgggcagagccgcccagaaaggagagaggagccgcgcgcgcgangggcacgagcccgcccgagcgcccgccgcgcccccacacccacgcgccggacgcaccgaagcggcgagagcgccaacgcaaaccgccacccagcagaggcggcgcgcaaccccaccccgccgcggcgcccgcaagcggcgggggagagaggcgcccaccgga

SEQ ID NO: 122806 - DNA, 642 bp, Arabidopsis thaliana columbia
  unsure (1)..(642): unsure at all n locations
tctcgccccccccccccgcgggggccnattttttggaaaagctttcccaataagaaggccacacgccccccccctttacctttaatcctttttaaccctttccccctaggtttaggggcctcaaaaaaaaaaaacncncccccccccccccccccttccccccccccccaaacaaacctccaaaaaaaaaatacaacccctttcacctcctccccctctcccccccccccccccccccattttcaacaacccccccacaaccccccttttttatttgggatgttcggggccaccaaatttggggtttttaaaacctatccaaattccccctccttcctatttttatccttccccccccctcttttctcccccccctcccctccaatcacttttccatttatttataccactcatcaaacaccctctccccccactactctcttcccttcccctccaccacccccttccccacatccctctttcactacatcccaccatctccatcttttcaccctcccccatccccccactcttccttaccccctattcttcttccttcccctcaacccccccccctccttccctcccctccctcttctcactccttactcccccctcactcacattctactttattatccc

SEQ ID NO: 122807 - DNA, 667 bp, Arabidopsis thaliana columbia
  unsure (1)..(667): unsure at all n locations
cccccccccccccccccccgggccccnnattttttgggacactcccccaaaattatacctcccctccccccctcccttagcctttgatccctcttcacccggtctcccctgngggggtagagggcccccctaaaccaaaatnnntttttcccccccttttcctttctttnnnnncnccccccnctttggcgcaccccccctccctttcctccccttctttgattttttgggcccaccccttttttcttttgggtttacccccccttttttttaaaaaacccccctttccccacctttttttttgagggggggtggttttcccccccccggggccccccctatattatcacccacccccctccctcttttttttttaaaattttttttctccccccaaaaatttacacctttctttctcgcggtgttggcgcccaccatttccctttttttttctttttttttcccccctcttatttttcttaagacaccacaaccccccccccccttttctttttctccccccctttttcccccctccccccgggtttttcccacccctcccgctttttttccccccctcccttacccttttcttttttcccctcccccccctccttcacctccttttttcccacacccccctcttttttttccccccttttttttc

SEQ ID NO: 122808 - DNA, 637 bp, Arabidopsis thaliana columbia
  unsure (1)..(637): unsure at all n locations
tcataccccccccccccccccccggcgggncnccnnaaattantttgggggacgatcccccccacaaaattttnnncgnnnncaccgcccccccctcccctaaaccttnnatcactcttaaacccccctcccccctttttgtgtttggttttaccccaaccacaaacccaccctttttttattttttttaaaaaaaaaaaaaaaaaccaccactctccaataaccccnatatattttttcccccctttaaaaaaaaccccctttttttttttaatattataacaccacacccttttcttcccacaccctcctttttaanaacaaaggcgaaaatttaaccaccggggggtgtgtgccctttccncccccctgcccccaacacacaacaacaaaattcccccatgtttttccccttcttttctctccttttccaccacattatctttactttaaaatccccccttttaanatcccctttccttttcccggaaaacaaatttttttcccttttcaacccccccccacccaccgctcttttttacaaagctttcttccccccaccccaccactctcccccaatatcataaaccccccttccccccaccctgctcctcccccccgccccccttcccttttc

SEQ ID NO: 122809 - DNA, 294 bp, Arabidopsis thaliana columbia
  unsure (1)..(294): unsure at all n locations
gccccgcgccgccgacgcacttccgcctgctggcctccccccacccgcacccacccntttttacaatcctggggggggtgtggggccccccaacaaaataaaaaaccncgcgcgtgacgcctcgcgcgcgcccctccccgcctcaaccgcgagggtcagagcgcctcggggcgtgcgtcgtgtattcatctcgagcgtagttgttgaagcggttcgcgtcgccgggcgcgcgcgccccacgtacccatcatctcaccgcgcgggcccgcacgcagttttttttattacgtgggg

SEQ ID NO: 122810 - DNA, 600 bp, Arabidopsis thaliana columbia
ccccccccccattttcaccacacaccccaccaccttatacccaccccatcccatattcctttttcaacctcgggttaagagtgtacaaaataaattctcctcaccccaccctttatccacatctaaccccatacccaccctcctttacaaccttcttcttccacctctcccatcatcctatttatatttatcacatatcaataataaaaacatattttaatttttatcttatccccttaatcttctttctccccgggtgtgctccatatcccatgacacacaccctccaaaaaaaaaaaactcctttccactaaactacaacaactttctaatacacccttccctcccctttcttcctatatccatatcacatccatattttcgttcccctccaatcacctcccattataaatccccacactgaccaaacaatccctcaccccacctattatatccctccctctccatcccccctaccctctcctactcaccccccctactcctcctccaacacactcttccccttttttcccatccttaataatatttcttattacactacatttcccctttcaccccacccacccacaaacctcaaac

SEQ ID NO: 122811 - DNA, 562 bp, Arabidopsis thaliana columbia
  unsure (1)..(562): unsure at all n locations
ggggggaacccggccccccccggggcccctccccgattcccctttccccccggggggggggggttttacttaaaataaacattcctcccacctcccttaactcctttttttttccatgcccaccccttattatgaatgcgggttcaataataacaccaaccatttttttccaagatttggctggtccttcctgaggccttttacaaaaattaataaccccttttttttttcgggttgtggggggcncccccggggggtccacttaaaccaggaaatgggcgggcgcggaaatcttttcacctgtggaggccccagaaaccttgttgtcaccgtcggcccgcccatgatccctcacgcccgccgtcttggccaacgccacttgcctgcgacccttttttctgcgtcccacgccggaacagagaccgtctggcgcggtttaaaaggtattcctcctccggaaggaggggctttcccgtccatttcgtcccggcgggtgcaggccaccgcggaacccaccggcagccgcctcgccgcccggctgtctttgtgagccccggcgctg

SEQ ID NO: 122812 - DNA, 561 bp, Arabidopsis thaliana columbia
  unsure (1)..(561): unsure at all n locations
gtccccctctccattacctcctaccccaatttccccttttccaccccggggttgggggggcactaaaaaaattactaacaatccgcactccttttcatttttatcccatcatccccccccccctaaacttcaccctactccccattaactagatctctacaacaaaaaaatctcaaaatctcccccctcatactcccaatcagttcataaaaatttttttcccttggggggggcggctttctttgcccgtctcccncataaaaaaaaacaaatccctctctccccataacctctttctctttatttccacccactttcacaacaatttccaaaaacttccttccccctattttcccccccccaaaacaaacaaaaaaaccctcctttacacacaaaacccctcccctcccctccatccattcccacaaacaactcttctcttcccccttccttctttccaatccccccccccctctccttataaacctttcttataacacactcgtaaactcacaaaaatccaaacccttactctctaccaccaccttcactctactcctt

SEQ ID NO: 122813 - DNA, 522 bp, Arabidopsis thaliana columbia
  unsure (1)..(522): unsure at all n locations
cccacccccgggggtagcgggggagaaaaaaaaaaacccttcccccaaaactttcctaaaaaataacaaagggggttcctaattaaagccacaaaaaaccttttaaagttgttaaaacccacacttcttttgaaaggggcattaacttaaaccacctgagggtttaaaaaatttctttttaaacccctttttctggggagaggggcannnnccaaagagttttataaaaattactaaacccccttttcctttttttatcccttttcaaccccttttcctacttcttttacctcnnccacgaggtgggggatcttaaaaatgcttttcattgagaaaacaaccgcccagttttaaaaacatcccccccaattgcccaaaaaaaattttgaccccctttaagggataaaagacgctccccccaaaagacaaaaaaaaattccgacccctgttcaataaaagccacaccttacctggaggggcgctttttttttctgggaaaaaaatttacacaaaacgatcttt

SEQ ID NO: 122814 - DNA, 588 bp, Arabidopsis thaliana columbia
cccccccccgctcgaaggaagaaccaacgcgccagcaggacgaggtccgatcttccacttttgcggcgggggggggggggtgtaaaaaataaacaccacccagactcctcgaagacgacgatggatagtatagtatcaacgtactcactatgcgtcgcgggcgcgtcaaaagaggtcacgccgctccaccaatatatatagaatgacaaacggaacgggaccacaaacgaaaattttttttatgggagggggggggtcgcagcaggagggtgtctcctaaaacaaaagaaggcgagtgtgtctcagctagaatacacgtctgcactttttggtgttcctgcctttctctcgagtattaaaggcacgcgtccatatatgaccaccgcccgcgcgagcatatgcccacgttacttaacgtgctactggacgacgcatgtggacgcacaggtagggagggtgcattgatcgccaccgggtcggtcgagatccgtggcgtcgtggactgtgggggtcgcgcgaactagatggcacgccacacgatctcctacatgctgccacgactcggcaagcaccgagctccaccttcgt

SEQ ID NO: 122815 - DNA, 110 bp, Arabidopsis thaliana columbia
agcgaacgcccacggagtctgagatgagaccatggatccttacaccagacgatcgacggttgcggttacgcacccacacgaccgagaagtcgacaacacacgcgaggatg

SEQ ID NO: 122816 - DNA, 404 bp, Arabidopsis thaliana columbia
ccccccccggcctttgaccggacaaacacagcccaatacattgcatgtgactcagatcaccgcatacattataaaacaacatggggtgtgagtgggcgacacaaaaagagaagacaacgccaaccgggctcaagcacaacattacagcgccacattcccgcaatactactacctgtctctataatctgtcgtctagtgcgataatttttctttgtgctggaactgcttacgctctgactaaacactaagtcagcctaacatttttttttctcggcgggggtgggtcgaacagcattgtacagtaatttatttcacaagaaaaacacacgcacaatcaacgaccaaattacatatacttcgcagtagcctctcattcatgcatcaccggcgttctacacgataat

SEQ ID NO: 122817 - DNA, 553 bp, Arabidopsis thaliana columbia
  unsure (1)..(553): unsure at all n locations
cgccgggcgcgcgggccgggggggggggaatangtgggaactgccccgcgccattaatatggaaacacgttgccccctccgggggccgggcccaaaattacttttgtcaacccggggggtgggggggggcaacaaaaaaaaaacccccntttttttttaacaaaaatttcccacccgcttgttttgagaagaaagtccccccccccacaactgcgggtgtgcggtgttgtggggtctacctccgagagaaggttctcttccccggttaacgttttttatatatcaaaacccattttttttttcggggtgtggggccactcccccggggggggacccaaaagacaaattcttctgcggtttaaaaaaaattggggcctcctggtcgggcttctcgcatctcctgccccttcgtcttataaattataccggggcggcccccgctaaatgccaacatttttgaaacgcttgttcttggaggaaaacctccgggtgtgagagcggagcgcacgccgctgccgccaaatgttgttttcggaaagagagcggggaggtg

SEQ ID NO: 122818 - DNA, 506 bp, Arabidopsis thaliana columbia
  unsure (1)..(506): unsure at all n locations
tcgaggggggggggggggggggttccgggactacccatcacttatggaaagccggaccccttccagtaccggtccccaattccccggtcccccccgggggcggggtgagggaaaaatttaccccccccggccccggagggggcaaaatcaaaaaacattttatctttaaaacgcttggggtccttttttgagggaaaaagaacttatcatccgcccccccaggccttgtaacttccgcacaaaggttttctctttttcaagggtggggggcccctttggaggggggacccaacacacaaaaaggggggagggggtttcttcccccaaaagaaacccagtgttgctgctcccaaagattccaaaggggtttgctccctcctcctcttccaacccacttttgggttaagggtgcaaaagggcaaccccttatnccctccccccccctttaaagaagcagcccaccacagaaggttttatttgttttttaccacaaagcctcgcaaaaa

SEQ ID NO: 122819 - DNA, 582 bp, Arabidopsis thaliana columbia
  unsure (1)..(582): unsure at all n locations
cccccctctcaaattaacccctgtcccccaatttacccactgttccacacccccgggtttttggtgaaatttttattaaaatannnnacttaaccccccctttaacccccctttgaaacctacccattgtttttaaaccactcccccccccctctcccacaaaaaaaataaatatatacccgaaaccctaggggctttaaaaataaatcccatttaaaaccaccgcttccttgctggcttccctcctacctttatttcaaagggaggaggtgggnaatacatattaagttaatttcccaaaagcactaaaaatactctttcnnncaatcctcccttttaaaaaacttttttccaattcccaaaaaaaaaaaaaatctttttcaaaaattctctctttgttgcgaaccccctccccaaagcaaaacctcttgtgtctgggttataaaaacctcctccaaaaattgggcaacacaaaataatttttatacacttttattactctttagtgagaccccccccccaaatattctcttttttgccccccacaataaaatttttctatccatcttccccttcccctaa

SEQ ID NO: 122820 - DNA, 628 bp, Arabidopsis thaliana columbia
ccccccaactaatgaaaaaaaaccgccccccctcccattccccctcccccccaactttccttttttccccccacggcggaggggcttttttaaaataaaaacacccccccacacaaaaaaaccactctttttttttctccccttcccccctatcatttcctccccctttctaaaacttccctttccctcccacacaaaacactcttccttaacccacccccatcctctcaaacacacccacttattttttctcccccttacttcctccttttggcggtctgttgggcaaaccaccccctactcccgccgtctcttaaatccattcaaacaccccccctccctctctttaaaaccatctcctcccccctctctcttatttctccctctcttttcttcttcctccatcatctctcccactacaccaccaaacctccctaccatccccccttctctcttcttttttcttttatccatcacccccccttattctcacccctacaacaccctcaccccccaccctcttctccccctctactccacatacccctcattaataacacatcgcccttaacttcctacttacctaacaccccccctctcccactactctctcttccccacatactac

SEQ ID NO: 122821 - DNA, 522 bp, Arabidopsis thaliana columbia
  unsure (1)..(522): unsure at all n locations
gcccccccccccncccccccccanggccgggctcgttgggggcggcgccgcccccttgtcccgcggcggccgggccgcccccgcgcggaccttctgcccccccttttttctcccgggttgtgggggggggggccttcacnccactcccccctcctcctccccgtccctntcccttttcctntttggtttgttcgcccccggcggccctgtgcccgttttgtggtgcctgtccgcccccggccgtccggtcgtctctgttttggtcgtgttgctcggctgctcgtcctccggtcgcccgtttttttttggggctgtgggggcccccccccggggggggggtccgttagatttattttccctttttcctttttttttgtgttcctggcgccgcgccggcgggtgcgccggctgntgggctcgtgttgcgtcgctcctggggctcgcgcgcctgtcgctcgtgtctcgtgggctgtgccccggctcggcgttctcggtgcttgcggggggcggcggcgggcgctc

SEQ ID NO: 122822 - DNA, 672 bp, Arabidopsis thaliana columbia
  unsure (1)..(672): unsure at all n locations
tttaacaaaaacaatccatccacattaccaatattcactatttacctcttacaatccaccaactccatacctcggggttatgggtcttttcaaaccataaaccatatccccccacacatcactctataacactctattcacctccttaaaactatatcaacaacaacctaattattatccccattactcntctaaacacctactcccaattctcacccccctcctaatcctctcacacatcaccaccaaactcacttattaatattttcccctcccctggtggggtagtatcaaacatataactaattaatcctcttataaataaaaaaaacatcatcttccatcacaacctcaccatctctccctcccaaaaccatccttactccccccacctattctatacacaattcttctattcatctctcatctatcttcacctcctccctacctctctcaccctctaatactctaaacactatccacttctcaacatcaatactaccatacatgtcaattctacatcaatccatctcactcacacaaatctccacgttcactccccatccacatccaccattatttatacttaacatctcctttaacactcataaaaaaacatagatatctcaacaattaatttctatctattaatataactttactatcttattt

SEQ ID NO: 122823 - DNA, 486 bp, Arabidopsis thaliana columbia
  unsure (1)..(486): unsure at all n locations
aaaaaccttccccttcttacctctcctatttctttcccccgggggggtggttaaataaaaaacctccctttttcccttaactcctttcccaaaagaacccataaattcttcttttatctccccccttcacccaaataatccgctcctccatattttccttttattattttttttcccccttttttttttaggggtgttgggtccaacccttcgtgttttttaaaaaccagaaaatccttttttcntttttcctttccattcccaaactctgattttccccttccctctcttcctccaatcccccaattttacctctcctctatcccttcaacttctgcaacacgcaataacttatccccttctctccgctttttcacttccgctctatatccttctcctttctccgtgtttacatagaatcccactcaccctcagtttttcccctttccctctccttcattacacccccccctcacccctattctc

SEQ ID NO: 122824 - DNA, 748 bp, Arabidopsis thaliana columbia
  unsure (1)..(748): unsure at all n locations
gcccccccccccctcccccccccccccggggggggaattgttggggagactcccctcccccggnatggatnggggaaaaaactcttcccccccttncccttaacccctctcccccctaatttaccctttttccccccccctctgtttttatggtttgtttttaatattaaaatacaacttttaacnccaccctctctttttatattttctctcccacacacaccccctaaactcacctcctcccctttttccttacttaccccctcacaaattatattcacttttcacttacctttttctccaacttcttttctcttcctaccacaacaacccccccanacccctccacccctcctattttttttttttccaggcctagttcgccgcgctcccaacacatacagcgcccccttncataaatctcatccaaacactcccctcttccaacaccctctccccctcctctgctcccccccttttttttttcccncccctcaccgcgtttaacccttaaccatcacaccccattcttcctcctatttctctcctctcctccccaccacactccccaccacaccacccctactctcccctcccctccccctctccctcctccacccacccactcttccttcccacccccttctacacccctcctcttcaccctctcttccccctctcccccactccctccctcacccctacattcccccatatcgtctctttcacactctcgcccaccccccct

SEQ ID NO: 122825 - DNA, 537 bp, Arabidopsis thaliana columbia
  unsure (1)..(537): unsure at all n locations
gggaaaaaaactcttcacccccttcccacataccctccccctatatattccccttttcccccccccggggttaagtggggcccccaaacaaaattttcattatcaaacaaaaacccacacctctcctccaaactttcttcctctccttttcttctctaaaactagataacaaccgccccgtcccccactcctacacattatcattcacaccaataaaccaaactctctcctctctcttcaaccaaacaccctcccacaattttttttccccgggggagggcccctttttcaaggcggtggctgncccacaaaaacaccaaacctcnttgatattttctctcctttctatcccccttccaccccctccttctcctactcccttctctttatcatacacaccccccttcttttctatacaaaccttcactcacctaccctttccccaacaataactttctatccctttccacaacctcacattccccatcccccaaaatcaaacaacactctcctctctccactcttcttatttcttct

SEQ ID NO: 122826 - DNA, 451 bp, Arabidopsis thaliana columbia
gggtaggtgggccaaaaaaaaaccctttttttattattttctgggtataaatccttgaaatccccaaccccataaaattcaaattcaacccatcctcaaactggttttcaaacaccaacaatttttcacaatcaccttccccccaaaccatttttataaaggagagggctcccttccttggcggctttaaaagaaccaacctccaaccccttttccactccttcctccaccccttccccatctaaattgcaaaaaatctcatccaccccccaagctttttttcattcaacccaccataaatttcccaaacagacccaaaaccctctcctcaaaaatcacaaatattcctctcaaaaatcactcacatcttcctccccacacggaaaccattaccatcaaacctccacctcttcaatatttcccacaatttaaaaaaacactcctcccaaca

SEQ ID NO: 122827 - DNA, 523 bp, Arabidopsis thaliana columbia
  unsure (1)..(523): unsure at all n locations
cggtacccgtccccaattcccggtccaccaggggagggggtgtaaatacactccatttttatgggcaccaaaagggataattttcggttgggctccacatttacgggggtttcaataaacaacccccttgggatatgtcaataacttttttaaattttttttttttggcgagggggggggcatttcaccggcgtggggtgtctttagcaaaaaaaattttaaccaatggctcatttcccctttaaccctaaacaagaagaaaacgcctttttttgaccccttctaatttttcaaacattttcccccaccgggccttgggtgtgtttagggtccctccccaatttccaaaataaaaatcttttttttgtgccccaccggagtgattccccctgggttttctttcccaaaaaaattgaaatgcgccccaccctgaaatggttccccctcacctttggcccaattttcacaccaacttgcccccttttnttcttccttggggaacaaccgcccacgggttttcaag

SEQ ID NO: 122828 - DNA, 507 bp, Arabidopsis thaliana columbia
atcccatctcatttcatcaccctcccccccccttacatcttcctccttccggggtagtgggtttcttaaacaaataatcacctcccttcccctcacttatcctccctttctccatccttcccattaccaatttcttcattctcttatacttattatctatttcatatctctctaatatattttatcttcctcattctcatttctattttaataataatatcttattatatcttttctcatcgcgggggggggcaaaccaaactacaaattttcatctaaaaaaaaaaatattcccttctattctcccactccttctcaccccacccccccctcgtcttaatttcatcatctccacctacccatcctttctatccttacactacatatacaacccatcctctccatttaatctattcccacaatccacaatatcatactccacccaccacatacactctcaccccctcctttcactcccccccacccacttctcccccagctcttctt

SEQ ID NO: 122829 - DNA, 354 bp, Arabidopsis thaliana columbia
ccccacaccacagaaaatactttgccaaacacacccccaccccactgatctgtaacacaccccacaacccatctcgtacccccaacttctccattcacttatcccccacggggcacggcgggtttaaataaacaaattttttacctcgacacttttccaccaccaacacccatgattgttgattatttccatgacaaccattttatctcgatcccatcaccacttcttaattcattcactgacgacttccaccacacacctaccatccacctcacaacctgtcacctctttattcttctccggggggggggttgatactctccttcatccttcttctccacccaacaaaaaaaa

SEQ ID NO: 122830 - DNA, 686 bp, Arabidopsis thaliana columbia
  unsure (1)..(686): unsure at all n locations
aaccacaccccccccccccccccccccccngngggggggggaaattgtttggatctacccccacccaatataggggaaaacccgtaccccctccaataacccatcccccaattccccttttcccccccacgggttacggcgcacccaaaccaaaaaaaattcattatccaaaacttcttcccacctctttcaaataaatattctacctcccttcccccctcttctcttttttttttactataaacccctccttcctttcttatccacctccaacccaaaactcttaattttattttccccccttttttattctcacgggggtgaaacctcctcaattgcctgaaaaaaatccccacaacaaaattccccccccaaaaagctctccccacctctttcaaccccccaatttaaaaaggaacacccccaccatcaccatcccccttccaaaagctatccacacctcctcccttctatacccccccattattattaccacccccctcttctctttttttaaattcaccccacctcatncccacaatccacaatttctacttccgccaaaaccccacccctccctcaacaaaaaaaattattccccacctttccaaatcttaactaatccaccaccacttaccactcacccaccctaactatcccccctcctctcccacccaccacaaccc

SEQ ID NO: 122831 - DNA, 718 bp, Arabidopsis thaliana columbia
  unsure (1)..(718): unsure at all n locations
cttccccctcccaacccacgctccccccccccgccgggaaatagttttttgactaccccccgccccaaataggggggaaaaagacctggccccctcctcccaataaccccacgccccacatttccactttttcccccccgctgtgtatggcgcccctcaaaaaaaaaacnacctcttccccctctctcccctccctaccccccactctttttatcccaaacccctcttctttttctcacaacccacaaaatccttcctctcttcatcctccttcaacaaataaaacaatttncttcaaactcttccccccatcttctccacatccccccaccccttcctaattttcccggcttgtccggggcccccccnccctttgcggctctctctaaaacccactaaacacctctcctccccgtctctctccccctcccacgacccctctcttcccccttctcccccccccaccctcccccaacctctcattattatccccatcttccttcctccttcccctttctccctcacctctccacacaccctcttcctccttctcttctcctcaccccctaatcctccccttcatccccccttcttcttctacccctcctttcttctcctattccctccatttccactcatccactcttcattccatattctatccacacgtccccccccctcctttatactctcctttccatcatattcttcctactct

SEQ ID NO: 122832 - DNA, 339 bp, Arabidopsis thaliana columbia
cccgcgccgcgacggcgggggggcggggggggggccttggttgggaacaggcccccccgaataaaagggaaagaccgggccccctttcagagacacccgcgccgaatctccctttttccccccggggggggggtggggttaaaaaaatattaaaatccaaacccgcgggtcatgccctgctcaagggcgctgcacccctgtgtcgcggcctccccgcgcatgcgcgaaacaatacaaagatggctgctgattttccaactaccacacagcgggtgtcaggaaagggcgctcgcccttttttttcttgggggagaggggggttcacttccggggggactc

SEQ ID NO: 122833 - DNA, 599 bp, Arabidopsis thaliana columbia
  unsure (1)..(599): unsure at all n locations
acggcgcccgcgggggggggggggggggnntttgggggacagccccccccttttngaagaaccccccccctcggggccgggcccattttccctttccccccggggtgggggggtttaataaaaaaaaacaaaattcttttttttatggggggttctccgcaaaaaagatttaaaccccctctttttttttggaaaaagctcgcgtgccctcttcgtggcccccatcccccccccattttgaaagggggcccaagtgttttcctccttccgggcagttggggggccaagggggggcctctttcttaaacaaaaaaacagaaccttctcttctcccgggggcccctccccccttttttggggcgggggggaatggagcactcactcatttcttttccccacaacaacaggttctcgggggcaaaacacccccccccccccccctttttttaaccctcgacccccctccataaaccgacgcttctaagttcccccggcgccgcgcgcggctgtttccccctacggccacacccgaggacttaagacgtctgcccccgcttcgcccgctacgtcgcgcaagcgtcgtgtgttgggcgcgagaa

SEQ ID NO: 122834 - DNA, 490 bp, Arabidopsis thaliana columbia
  unsure (1)..(490): unsure at all n locations
cccctctccgggcccccggccccgatttcccgttccccccggggggtaggggggaccataaaaaactttctccccacctctctaatctccccctttcccttttttttnctccccaaaagcagagggggccttcaaacttcccccatttaccccttttaaggcccccccgcccgatttcacgggtttttctcttccatttttttttttttgggggcggtcggcgccccccccctagggggcgcgtcccaaaacccacttaactctcctccccccccgagaaaaaccatttctcttctccttgttttccaaaaaaattctccccccccccccgcgttttgtggagccgcccttctcccctatcaacagtgcgcccccgtttctttttctctgtccttaaaacattataccgggtctcttttcctctctttctccccccaatgagacaaccacccccctctgtccgccaccccccctgtctcttcttcccctt

SEQ ID NO: 122835 - DNA, 664 bp, Arabidopsis thaliana columbia
  unsure (1)..(664): unsure at all n locations
ccctcctctccccccccccaccgggggggagagaatacnttgggaacccaacccccactcattttagggaaaaacccttccccccttcaatataccccttaccccaatttccccttttccacccccggggtgggggaaatttcaaaaaaaatcctcactacccacgagaccttctttttttttttccctaccgtttctcttatccatttttgacatcctcccaccactcatattttatatccccccgttattaaaacacatgttttccttatttatttttctcaacacaaaccgtatttcccatttccaaaatccttttttataaactggggcgagagaaaacctcaacatttggagttcccaccctaagaaaaaataaccaaacccccctttctcttttctttttccaaacccttccctcacccttttgacccctacatttccccctcttcccacaataaccttctcgccctttccaaacctcaaaaatcctaataaaaaataatccccccccctcgcttaatgaatcaacatttaacattaaaacccccccctttttttaaccttccccccaatccctcacacctccttcctggtttccccaaaaaatactcaaaaaaagcatggtttttcactaacaacccctccccccctttactctcca

SEQ ID NO: 122836 - DNA, 296 bp, Arabidopsis thaliana columbia
gttggctaccgcacccggggggggggggggggatttttggatactaactcccctcactaaaggggaaacccggcccccctccgggacccggcctcaattcccctttccacccagggggggggggcatttagaaagaacaacaaaccttctatctataaccatgggatccttccaaggaatcacctttaagcccggacaacccccctttctacacccaaaaacggggggtgcttcaagtttccaaaccaatattttttttcctccacccatccaaaatattttctcggcgggggggg

SEQ ID NO: 122837 - DNA, 488 bp, Arabidopsis thaliana columbia
  unsure (1)..(488): unsure at all n locations
tgtggccccctttccgggccgcggcccccgtattccccttttcccccccgggttgtagggggggggaaaaaaatatttatcaattaaaaccccccccttcccgtgttcccaaaaggggccgcaaggttggcgagattcccctcccagcccattgcctgtgttgttttcctgccggggggggggccctcctcgccccgttcggtgatctccctctaacccccctttttttttggggatgctgggccnccatcggggggggctcaaaaaggacgaactccgccggccaaccccctccccccgctcccgctcaggcgtgcccggcgcctcgcacggggccgtcgaacccttctccgtcccacggcggcggggcgttccgcggggtgcacggcagccccccgggttttgtcacctggagcccggctgggctcgctctcccccctcccccgtccgctgtgggagcgccgcgtggcgtcggatggtcgtgtccg

SEQ ID NO: 122838 - DNA, 506 bp, Arabidopsis thaliana columbia
ccaaaattaataacctctccccccggggggggggaggtggtccaaaaaaaaaccccctctttttttcttttctttttggggggcgagcaaggccgtcgggaatcccccccccccccgaagaaaattcccacttaaaaccaaccccccttaggcgggggcgcgcccaccaacaccacacaaatttttcgccgccgccgacccccttaaccccccaccctttttttcttgaggggagaggggccctctcattaccggcggggcttcaaaaagcgacaaacacccacaagacctcgtcttctccccaggggggagacaccctccccacctctcctaccacaccaaaacactccctcccctgcaagcgcaccgcgcccccccccccacaccacaccccccccctcttttccaagggcggcggcccgacattacccgaaacacaggccgaccctccctccacaaaaaacccccatcccccttttccccaaaggacccgcggaccccccaca

SEQ ID NO: 122839 - DNA, 496 bp, Arabidopsis thaliana columbia
  unsure (1)..(496): unsure at all n locations
aaaacctctcaacattaaatgtgatcctacaaaacctatttcctcttngaacttgttttaagagggggattttctttttccaaaaacctgaaaaaacttttttaaaaccaaattttaccacactgaagaaccttattttggggagggactcccaatttttaaaatatccaccctacaaaaaaaacttttttgaaattcttaacttcacccggttaaaaaccaaaaaccttaaaccttttattccccacttttttaaagcaaaataaaggaaaaacggcaaaatttggtccttatttaacaccaaataaaattagccccattttattcccccccgaagcttttccggggggttatttttttttaattaaatcccagtcttaaaccacttttgtgtattaaaaccaaatttctttttcttccaaaaaaaccctataacatattgtggaataggaaacaaaataaaaactttctttttgaacccgcgaagggtcccccg

SEQ ID NO: 122840 - DNA, 518 bp, Arabidopsis thaliana columbia
  unsure (1)..(518): unsure at all n locations
aaaatcttccccccttccataccccgcccccaatttcccctttccccccccgcgtgaggtttttaattaattaannaaaaaacccaaaaaccaattctttaaaaaattttgcacaaccccccaaccctcttttcacttggcccctttacatttaacccacctcctttaaattccccttacccttcccccccccttttttttttggggtggtgtccccccccccccgttttcccaaaaccatatacccctcccctcccttttttcttctccttcccccaaatattctacccccccaagccctccctttttcttaatccataacccctctttttcttcgcgccttctcaaccctcctcgtctataccccccccccaaaaaactcccccccacacaaaaaaacccccccccccatctaactcccattctctccccctcactaaacaaaaactctcttattcactcccttaaaaccactttcccccctatcttccccccctccctctccccacaactccttt

SEQ ID NO: 122841 - DNA, 241 bp, Arabidopsis thaliana columbia
  unsure (1)..(241): unsure at all n locations
tgtgggggtacgggcgggacaacgaaaacaggaaacatatatactcatcgtcctgaattgtgatacacacttacaagagacctcgcgagcacatacaatgtacgactaagactacgtanatcacttgtagagatcctctcttgttacattttgtgttaatcaccacgcgacccgctgacggctatgatggaggagaagaatggagtggaagagaagatattttttttacgcagcggggggg

SEQ ID NO: 122842 - DNA, 480 bp, Arabidopsis thaliana columbia
  unsure (1)..(480): unsure at all n locations
cacccccctctactttccccctacccacacacttataccctatatactactataatcattttaccctattttttcctattatcaactcacttctcatttctttccactatccatcatctcctttccctattttttctcccggggggggtttattatataatcatccttcatatttcttcacaaaaaaaacaatcacttcctcaaccatatactttcactctccttcccataccaattctccctcacctccatcttcttcctcttccttttccttctttcagtatcttatctttccnctatacctccactctcttcataaacttatttatcttacttaactttccctttccttctattataatctatacctccatcattaacactcatcaaccacttctcacacttatctaccaacactcccccctactttcttctctctctaccaaccatattacaaaatcttttaattatttctatcac

SEQ ID NO: 122843 - DNA, 218 bp, Arabidopsis thaliana columbia
atgtatagagaacggtgagaagagcgcgcttcatgcgtccgcgcaaacttctacatacatcatcctctactccatatccctacgcgataaatatatcactcaagcgcaccacccatccaccactcccacagccttccctctccccccgcccacactaagctacctaaataataatagcgatcgtgcccttgctatccaccgctagagcttgtcacaca

SEQ ID NO: 122844 - DNA, 570 bp, Arabidopsis thaliana columbia
gaagtccgcggccggcgagcggttccgcgcggcggggggggagatgcgtgcgggtaccggccccctcgcgcttttagggcgggaggcaggccgacgcttgctgtgcgtacgcatcgcagagactctgcgattttcccgtgagggtggtggagagggtctcccaaaaaccgtatagtccccggccccaccccttggccccgcggccggcgctcagtcgacggcggtctggggcacgggcggacggaaccgttatgggcccgtggcggccgttgtcttcctcgtctactcaccgcgccgtagggccggtgtagtgtctacgtcaatgcggccgagaggttttttttcgagggggggggggagccgaacagacgtgtcacagttcggcttccgaccacaaaacacctaccgcggcgtgcgtgggcacacgcttcgttctcgggctctcgatctctgccatagcaccgcatgcatcctaggggcgacagaaggcggtaacgaccccgcgtgcacagtgcgcggcggctgcggcgcgtcccactacggcctacgaggctcgtgagggatggttaa

SEQ ID NO: 122845 - DNA, 648 bp, Arabidopsis thaliana columbia
  unsure (1)..(648): unsure at all n locations
tccctttcccccctcggtttgggggcttaaaaataaaaaccccattttaaattttttcccttcaaaggggaataacctctaaccccccttctaaaaaaaaaaacttccacacccttccccgttgattctcacccaaaccaaacccctcttttataaaaaaaatattttatccaccccgtgttttcatttcttttctctttctctccaaaattatttttttctttcgcggaagctgcggcctcttatacccccagtgtatgtctcccctcctatataacgacttataccaccacacccactcttttctcttgtgctctctctttaaaacacaaaaatccctccactccttctctctttttcccaacacatttttatccacacacaaaccacaatatctttctccctttcttctataagcaaaccaccctctcctctattctttttacattatctttttcttcccccccccgaacaataaaacacaccnccaacattttccccccctctccttctctcctctcttattataatacacccctctacttttttataccaccacaatctatgcgataatataatataaataatatctacctccaccaacaaaaccattaaactctcttctttcatataccccctctcctctta

SEQ ID NO: 122846 - DNA, 624 bp, Arabidopsis thaliana columbia
  unsure (1)..(624): unsure at all n locations
cccccctcccccccccgcgccgggggggggggttggttggggcgggttctgccgtttcggccccgggccggcccccccctgggcggcccgcgttccccttttccntggggttggggggttccaccaccccccccccccccccccccccccccccccccccccctccccctccttctccctccctctcctcctcctcttctctctcctttctctcccccccctcccccccctctctccctcttccccttttctccctccctcccccccgcnctttttttttttgggggttgttcgggggccnccccctcggggggggggcntcatcctcggagtgccccttctcccttgtctttctctttcttctttttnttttttctcctccnttncgtcctcccgccccgctcccctccctccggccgcgcgcgccctgtcgtcgcgggtggcgggccttcgcgctgccgcgcgcgtctgtttgtgtggtgcccctctcgcctcgctccgcgccgcgcggcgccgctctttgtttctccgtcgccgcgcgctcccgcctgcctcgcccgncgttgtcgtgtttctgttctgcgggtgcgggcgcgcggccgctccccgcgcgnccgcgtcccg

SEQ ID NO: 122847 - DNA, 594 bp, Arabidopsis thaliana columbia
ccccctccaattatcaggaaaaaacccccctccctactaaatcccataccccaaataaccatttaccccctctgggattaggggttcctcaaaaaaaacacaccccacatccaccttttttacttccctacctcaccctctctccatagaaattttttttaaatctccaataccattttccaattccttacacaaaaacaattttccttttctccatatcaccttctcttttttcacaatcaacccccattttttttttttccccagggtgggggattccttccttcatgcacatcatcataaaaaaaaaaataaacacctcccatttactactacacatcaccatttctttctaatctatacttctccttcaccttaataaacaacaccccccaccctatttatactctttacacacctcaaccctccttcactttcctttcctttatacccctacatcttattattatattaaacctctccatcatcctctatctccatttaccatctccatccaatcttcatcatataaatcataatctttactctacccaccctatcctcctctcaaatcaatactttaaaaaaaaccaa

SEQ ID NO: 122848 - DNA, 550 bp, Arabidopsis thaliana columbia
  unsure (1)..(550): unsure at all n locations
cccccccccccgccccccccccgcccccccgggggggggagaggattggtcgaggtacaaccccccccnaaatatgaggggaagaccccttgccccccttcccattaccccttcccccaattcccctttccaacccctgggttaggttttataaacataaaaattttccctttctantatcattttcataatcccttcaatctncaatttcttccacccccaaccctccctttttacccttttttttttcccacctttacttcncctttattnttcttccacccccatattctcaaacggtgcccttacaagccccccccctttttttttcccggggtggggggccnctcttttctggggttcttatcaaaaccaccaaaaccccttttcccccaattttatttcacttaaaaaacctncctttctttattcaccactctttaaacaaaaacactttttatttccgcccctacctcttttcttaccaaaacaaaacccacattttctttctaaccccccctccttcccatcctcccacaaaccttttacc

SEQ ID NO: 122849 - DNA, 555 bp, Arabidopsis thaliana columbia
  unsure (1)..(555): unsure at all n locations
ggggggggggggggggaatatggggggacggcccctcgattttggggggaaccgccccctccggggcccggcccaattcccctttccccctgggttgggggggtataacaaaatactttttccaccaaccttctttcccaaaacaacactaattcctctccaaacaaacctttttnttccgtttcccttttttttcaaaaccccacacacttaacatcctttcccccaatttttttttgggggttgctgggnncctnccccgggggggaggcaccagggagggaagctttttaaaaaatttgccccttgttcngagtgcgttttccgtctcccctggtctcccccggggatacaccataacgccccgtttgggggggggggccccggaatgtcccgaaaaggtggggtccctttttttgggcggggtgggggtagaagcgtcgttccttttttcccaacagggtttggtgcggagtgctcctgacagaccagttttcgcgcggccgcaggctcgccgaggggggctccggaagagtgcgcgggggcaaacgtgcg

SEQ ID NO: 122850 - DNA, 558 bp, Arabidopsis thaliana columbia
tttaaaacaaaaaaccctctacccccaccttccccccccttcttccttttctccactcttcctttcctcttcgccctgccttccactcctcctctcattcagttgccctcgctgtctttctttccttctcttatatttgtctctttgtattctcagcacctcttcgtctcgcccttacacatccctttctctttttttctttcgggctctgttttgtggtgcctctccactccggtggttcggtctcaaacaaccaccaaaaatctctctccgttctccctttctctctcccctccgtcaccgttcccccctctctccttctgcctattgttcctctccctccccacaactatccctatcctctcctctctttcctccaccgtctcttctagtctttctctttttttattatccatccttctctaccttatctgtcctacgccctcctctcccattccctccctttgttctcatcgtttcctctttttcctccttcctttcatctattaactccttctttcttctctctttaccctccatttttctactcattctctt

SEQ ID NO: 122851 - DNA, 318 bp, Arabidopsis thaliana columbia
actcatccgtaataacccactcgataacgacaccttattaagagctcacgccgacccaccggaaggaagaggttttttttttcgggggtgggggacccccgcacggctttttaaaaaaaaaatctctccgctttagaccggattgaaactctcactatatctctatataccctagcgcctccatcctataatcccattcattaaacttgcctactcccgtcctagcgtgccatcttcaatacatcatcctcatccaatttttacttgcatactacccgactatcatcccacgcgccaagtcattcaggtctattttgc

SEQ ID NO: 122852 - DNA, 512 bp, Arabidopsis thaliana columbia
cgttcccccggggggggggtttttaaaaaacctttcccccttttttaaacattttcttacctcaaaacctcttaccctttggggggggggtatcttccttccaaaaatttaattcccacgcaccccggggccccaaatttgtttttaaggggcggaaaattttctttttttccgggggggggggcgcccaatcctctctgggtttcaaaaaaagcaccaaagctcccggggttttttttttttttaaacctccaatctcccctccccttttccccccctttttaccccccctcccttaaaaaaacctttttcgccgcttttacaaaaggcggaaaaacaaccaacctctcccaaaacccccttttccccccgccgcttttttttttcttcaatttgcacgcccggcgcgcggtttacacccaccccgcgggtgtgtttttttttagggacccaaaaaaacaccccccgcccgaagaggggcctctgcccccccttttttttcaccccccctc

SEQ ID NO: 122853 - DNA, 567 bp, Arabidopsis thaliana columbia
gctaggcccgcgccacccgcccccggccctcgagtttgtcggggaaacgccccccggcttcgggcgggggggccccgcgccgacgagcggcggccgcggcccccgcaggatttgggcaccgcggaccacgtccggcgcgagggaccatcagacgcgaccagcaaagagaccgcgcgccagcgccgagggcccggacctcagcggggacagcgtcacccaacgcagagcccacacccaggtacaaggccgccggggccggcgccccccgccgcgaccgcgcggacgcgggtcacggagacgagagcggctccgggcggtgagcggcacgcagccgcaacgcgaccacgcgcaccagcggacgacccgcgcgctcacgaggacaacggacgcgacccctcacccgcgcggcccgcgcggggcagcgcccgagcaaggggggaggtactcacgggcgcgtgccgccacagccggccgaccggcccggcgcagcggcgcccacacatatcgcgcgcgcgacgtcgaccttagcccggcccgtacagagcaaggcatcccgggcacggcgag

SEQ ID NO: 122854 - DNA, 436 bp, Arabidopsis thaliana columbia
cgcttttccccccggaggcagaccccccggcccgcccccccccccccccagccgcggagtggagcgagcgggggccatgtcggtcagagtatgccgccccccccccccctccccaaaaataactgcgtccccatcgtccgcgccccccccttttcgagagcaggcgaggtcgtggtcgcgtgaccgcgaccggccccgctccacccggcagtccgtacggcggtaaccggcaggcaggaaacgccgacagacccccggcggcggccccggcgagccacgcgagtccgcggcacgccttgctctcgtggtgcgccggcaccacccagcgcggccccacaccagaggcgacaccgagcagtatagcggaggcagaggcgatttgacctggcattgctgattgcgagggggagagaaaaggacggcacaggggggggga

SEQ ID NO: 122855 - DNA, 360 bp, Arabidopsis thaliana columbia
  unsure (1)..(360): unsure at all n locations
cccggcccccaccgcagcgctactgccgccccctagccgcaccctgggcagcccacaaccccccctagnttttttgcacacccccccccccctttctctncctctacncccccccccccccccacccccctgcccctcccccctcccccttctccttatctcttcacgtcctccccccctcgctcagctctcctcgctcgctctttttcaccctatctcgcctcccccttcctaactctccacgtcgagtgtctacccgcaaatgagcgctcagctcacccctcacggccccccagcaccttgctgccgcgccacgaccaatcatgtctaactacgacgcgcgacgactacgccaccccc

SEQ ID NO: 122856 - DNA, 517 bp, Arabidopsis thaliana columbia
cttctcacctctctccccacacgctttctaaccaacgcactgcgggtctatccgctcatccctccagcaccattctcttattatcagcgctatcagacttctctatctcttgtgtctcgtgcaagtgccaagcacggtcgcccgtctctccacccccgtcctaccgcgagcgacgcggcagtctcgagtccgccgcacccacttctttctgagcaccagcgattgcaatgtgacgggatagaagaatggtccccaagaacagcagatacatcgtacgcaacgcggcgtagagagtggcatattgcgcgggaacagcgagaactaaacagcggtatgagaccaagcagatcagtactcaggcggtgaggggaataatatgataaatcagcaagaaccactaataaatcagacatctcttcgacacaatgttaggtagcgtcgacctgtcacattcttcatagtataatttgtttctaactcagtcactactcgcatgaaagttgaaagtaaaatgaaa

SEQ ID NO: 122857 - DNA, 239 bp, Arabidopsis thaliana columbia
  unsure (1)..(239): unsure at all n locations
cgcccaccccaggggcgcgaaggagaccgccggggaacggaccgcccaccgcacccacggccagncgggcccggccgaggcggggcgccccgacaaggcggggggccatgccgccgggccgagacaaacgcggtggccgagaaacggaggcgagagggcagcccggcacgaggcggagcacaaaggacccaagcgccgcgccgggcggcgacccggaagcgggacgggtgggaacctcg

SEQ ID NO: 122858 - DNA, 194 bp, Arabidopsis thaliana columbia
  unsure (1)..(194): unsure at all n locations
taactgcccccactctctatctcattctcatatctcgcccccctcacccaaggangacaggaacgagtttgatttntgggnacccatcgcgccgagctttcgcgggtcgccgctgccgtgcacccacactcatcatgctccactcgagcgcagacgcgactatgcggcggggagagcgatggaccgccgatact

SEQ ID NO: 122859 - DNA, 161 bp, Arabidopsis thaliana columbia
ccgacggagaagcaacgcgcgccccgcacatttcatcgacgccgggatactgctcactcgcgaggaggcgaactaaccaggcgccggagaattgattgttatacgtgtcgatggacccccgtccatgtctacatatgtgtatttggggtatggggggttgc

SEQ ID NO: 122860 - DNA, 434 bp, Arabidopsis thaliana columbia
actatgggatcagctggtaggcctgcaggatgccggtccggaattaattcccgggtcgacagagctcactagtacggagagccgcccttttttttattatttttaaaaaattcaaagtctgttaaattaagaaaacataggaatcttggatatcactacagcaaaacatatgtgttttttttaactcaaaaggaatggcgttacgggaaaagaagattgtttcttaagagaatctaaaaagagataccaaagcatcagaaggagtgatctacgagtagctgcaatggtgagctcaacttaaacaccagggtcaatggtgagggaggagatctgattgaacacatcaggagagctgaaaagactataacttgcttggagccagaagctcgaatctggcccattgtgtgggtccttcaccacagggagctttacgg

SEQ ID NO: 122861 - DNA, 308 bp, Arabidopsis thaliana columbia
caaactcctcattacggatttcactctatatgatacaagctaggtaatcgcttgctaggtaaccggttacacgattattttctggatttcgatcgtccgtctctttcattctattctatctctcatagtttgtccctattcaccacatgccaaaaaatacaccatcattttattttctataacatatctcagcatcgtcctccaaacaactcactatattcttattttgttctatatctgatctttttcccaccgactatcatttttaatattataattttatactatttcttttttcctcctttcta

SEQ ID NO: 122862 - DNA, 467 bp, Arabidopsis thaliana columbia
aagctaggtgaccgcccttgccaggtctcccggtgccggtctatttcccgggtggcggcccactctttttctctcctactgcgtacggtacgatagaggatattttaccatcatttttgcttccacacccttgcttttttggctttgaaaaaaggaaagatgggatctcggtctctgttccttcccgaatattcgtctttgggagatgccctcagggtggtttttttttggcgggggggtgtgcccttgttccaaattggaatcacccccaccatttctcctcattgggggtgcgaaatctgtgcttcaatatcgtgtctcacattttaatatttgttttgcacgacccacacattttgtgcgtatgtattttttccgtatatcgttttctcttactacatgttagttgattttcctaagtggttttctgtgtgttgccttcttattgcttttttcttttctttttt

SEQ ID NO: 122863 - DNA, 104 bp, Arabidopsis thaliana columbia
  unsure (1)..(104): unsure at all n locations
cccacagcacgcgtttttgcagcagaggcagaggaccccgatcacacgcgagcgaaacacgggcnacacaccgcgaacgcacaggcccgttgtgcggacccgga

SEQ ID NO: 122864 - DNA, 430 bp, Arabidopsis thaliana columbia
gaccgtacgggacacaggaaagggacgcaggcgcaggcgggaagaaagggggcagggaagaaagaggacgaacgcacagaagacacagaaagcggagcaggggagaggacgcggaccggcaggcgcagcgtccccccaaggcgagaggccgaacaaaaaagcgcgaccgaaaggcccacacaccgcagaagcgagaaaacaagagcaggcggggaagaacagacgaagacaggaaagaacacgaccgcgacggcggaaccgcgcggccgacgacggggagccacgggaaggcccggaagtaagggggagacagagagcggacgaagcgacggcgagacacggccggggccaggaagaaagaagaagaaagaagcggcgcgggaggaacgacggaaggggcgggcacaggagagaagaaaacagcacgcac

SEQ ID NO: 122865 - DNA, 346 bp, Arabidopsis thaliana columbia
aagagacgagagacgcagggtaccgcgaggaggcccggggggaaaggacaccgcggacgagaagaaagaaatatggaggagcagtacgcggcaagcaacgcgggaagacacgagagcggacgacacgaagggagggagtttttcaggacgagcagcgggggggggcggcgcaacgacaggcccaacagcgcgccagcgagacgggacgaacgcgacggagagaagagaagcggcgagggcactaaaggggacgaaggagacgaagaaaaacacgaacgaacgggccacgcagcgcacgtagcacagcggcgcgcaagagaggcagaacggagcgacgcaccgcgac

SEQ ID NO: 122866 - DNA, 550 bp, Arabidopsis thaliana columbia
ctccactacctaccccacctccgagcccccgcgccctcaccctaatgtcccggggagctccaccgccgcgcggcgctccggcgccgaacctcccgccgcgcctagcccagcacgggacggcccgcggacaaactcgcgacccgtcagccggcgggcagcgggcgcggcgcgcgaggcgaacgacagagcggcaacaaagaggagggccgacgggtgggggcgccccccccgcgagccggcacgcgggcccggcgaggggggcgcacgccgcgacgggccccgcgccccacgccgagccgacgcgcgccccccgcggtgcgcgcccagcgtgcggcgcgacccccccggcagctcggcacactcccgcccggcccgcgccccgccagcgaccggtggagcaccgcgcgagcaggtccgccagtggcgaccgtgcccgagcgcggacgcggcgctgccggctgctaccggagcgcgtgcgtcgcggagccgcgcgcggccggaaccccgctacgccccaggaccacagcggggcacgccccgccgcggcgga

SEQ ID NO: 122867 - DNA, 579 bp, Arabidopsis thaliana columbia
gcaccgccgcacggcgagaatgtagaggctcagccagcagggggggggagtttctttgaaacaccccacccaagtagaaagggagctaacgaaacacggatacagaaaaaacgcagattcgacggaggaagagcgcggggagcgggcgggcgggggggacgggcagcggggggggcaaggagaaggaataaacgaagaacgagcgggggagcaggagagggagggagagcgcggcaaaccgcaagcgggcagggagacgcgggggcggagggggcggcccgggagataacgaaggggcggggagggggaggacgggggggagaggccgagagagaggtcgacgtagcgcagacggaaacgaagacaagtgggggaggggacggaagagatgaagcagagaggaggagcgggacgacacgacgcgggcggagggagggtgggagagccgcggcggactgccaagcgaggggaagcgacagccgagcgaagacacgcagggacgcacgggagagcagaccgaaacgtcgagaagcgcagcaagcggagcgcaggagagtggaaaaaaggggcgccgacgtg

SEQ ID NO: 122868 - DNA, 376 bp, Arabidopsis thaliana columbia
accgggaggcgcgcgcgggttttcagaggagggagcccacggcgccacgccccgcacagcaagaccagaaagagaaaaagaagcgagagcacaacggaggggaagagaccgcgcgcagaccaaaccaaacaggaacgcccgacaccaggccccgcctttctcacagaagtgaggggcgaagaagaaagcacccacacaccccacgaccgacgccgacgacacgcaccaaggggggcaggccgacagagcaagagccgggagcaccagcagaccagacgaaacgccacacaggacgccggagcacacggacaggaagagacccgacaccgacgcgcagggcccactcgggacggaagcagtaagaccccgcgacaca

SEQ ID NO: 122869 - DNA, 465 bp, Arabidopsis thaliana columbia
  unsure (1)..(465): unsure at all n locations
cgcgcnnnnnnnnnnnnnnnnnnnnnnnnnnnnnnnnnnnnnnnnnnnnnnnnnnnnnnnnnnnnnnnnnnnnnnnnnnnnnnnnnnnnnnnnnnnnnnnnnccttttttttttttttttttttttttttttttttttttttttttttttttttttttttcaaacaaaaaatttgctcccataatacatgggggaagctaaaaaaaaagagctttttttttaacaacaaaaataattcccccatttaatcttcaaaagtttttttttttgggtttaaaacttttccccgttacatactaataattataagccctgctatacccgtttaccaaatgcccaatcacataaattggggctcatttttttttgggattggaagcctcaaagtttagagaggggttgcagccatattttttttgggatacgcggtttgttttgctggaaacaacatttggctaacttctt

SEQ ID NO: 122870 - DNA, 437 bp, Arabidopsis thaliana columbia
  unsure (1)..(437): unsure at all n locations
ggaaggccngcaggnaccggnccggtttncccggggggggacccgcgancgaccacagcgccgcaagggaggggangagccacaacaacgccccacacccagacacaggaccagaaaagggcacgacggaacgcggcacaccaccccaacacaaaagacccacaagccaaaagcccccagcgcaccccccgaaggaccagcggggggcgcaacatggcaaaaacgcccnaacaccaccaaagaacacacccgccagaacgggaacacgcacaccagccaaccgcccgcccaaccccgccaacacagcgacaacacacccaaaaacaaccgagaagagggacacgcacgaggagcagaaaaggaagcgcgccaaacaccggcccacaccgacacccacaaacccaacagagaccgcagcagaacagacgtaccaacaa

SEQ ID NO: 122871 - DNA, 448 bp, Arabidopsis thaliana columbia
  unsure (1)..(448): unsure at all n locations
tcccccaattcccctttccaccccgcgtccgcctaatcataactaaacttcttcctcacccacaaaaaactacttttntcaacctctaaaaaaattttccccatctcantattgtgatatcctccctgccccttttaaaacgagaaaaaatccttcccaataaattaattttttaggggggggcctatctaaacactttcccccaaataaaacctctcaattctcnaaaaatttccccccccccctttttttcattnaacctcantatntttttttcttcctccttaacacacccaatttnnttcacctccccccccttttttttcttttaaaaaactaanccccctttttttttttttttaaaaaaaaccttcccaaaattttctttttttttccctccccctttttttttttcccataacccaacatttttttcttccatcctctt

SEQ ID NO: 122872 - DNA, 444 bp, Arabidopsis thaliana columbia
  unsure (1)..(444): unsure at all n locations
aggaaaggtcctacccctgcaggtaccggtccggaattcccgggtccacccaggggtggggtaattttaaaaaatttcttaagggaattaagtttataggttgggctaatttttttcccaccactattttttaggtaaatttagagaagggtttgcccacaaaaaccctcgaggggggttttttcccttgtgggaaatctttttaaggggtgtgggtgtcaanaaaacgggtttttttaaaaaaaaaatctccccctccntaaaaattttaaaccacccccttactttttttttttatcaaaacctctccccaaaaaaaaaaaaaacttttttcttcttccttttttattaaaaaaaaaacaacctctttttatttttttttctccaaaaaacaaattaatttccaaacaaacaccctttttaacacctttttttttttttttt

SEQ ID NO: 122873 - DNA, 581 bp, Arabidopsis thaliana columbia
gcgtgcgtaagcttggatcctctagagcgggcgcccttggttttttttttttattttttaaaagaggagctcaataatttaaacatatattttggacacacataatttgaataaggatattcgcccccatccaatcactaataggggtacattcattaccccccccaaacttaaaggaaagagagaaaagaaaaacacctacattttttatttagattgcgggatgggcaaatgacttacttagcggtccggccaaggaagcgtttaacccccgtaacttcgaacgaaaccacaaattccgggaattccggtatcccgggattccaaagacccaaccaagtttgtggaaaagcacttcctctgagtcctcttaaaaccccaaaggtaaaagatcccgcaggggtagattccccaattatcttcaagggggaatattttggaaaatagcctctatttttctccaaaccataccaatatacgaaacccggttaattccgggtaaaactagtgaacaaaccagccataagtgttttgggctaaaccgtgatttttatttatgcaccctaaagtgtccggggggg

SEQ ID NO: 122874 - DNA, 531 bp, Arabidopsis thaliana columbia
acttagaagatttatgacgtggcctgcacgcgtacgtaagcttggatcctctagagcgggcgccctttgggtttttttttttcatcttaaagaaaacatagtttttctcagtcccacacaaaacaccgggtgtggtctggaaacattaaaaggaaaacagacctactttaggcccttttttgttacctcctagtccaaaagaaagaaaaaaagggggggtttttcttcaaggggggggacaaagcccggaggcattgtgaagagaaaaaaacacaatgagggttttgcatgttgtgcaaacaaagccggatctaattgcgggctgtgtggacaggaaacgagcgatcgccccggtaattccggtacgtgttcggggagggggaccagcttttcgtttaggagcggcggttatttgaagctttggggttaacgtgggagaggggtgtgtacccgtgggtgaagaggttttgtccgtcacaaggtgtactacaagtatacgactgccgggaggttgagtgttaccatcccagg

SEQ ID NO: 122875 - DNA, 484 bp, Arabidopsis thaliana columbia
gcaagacagcgagcggcgcgcgaccacatagaagaataaagatacgggagggcgcgagcggcacgaacacggcaggcccgcccggcgcgtgcacacaccccgcgacacaagcgcgagagcagaagaccacgatttttttttcaggggggggtgggacaccgacggagaaaacgcgcacccgagagaccaaagcgaggacgccgcgcaggcgcggacgggagagagaagaggcgtccgagaacgtcagcgccgcaacgcccgcgatcacggacgaaccagcacgaccgaagatatggcacagcgcgtgggcccggccacagccagcgagcgcgccgcgaaaggcccacgcgagccagccggcacgcggcagaggccgcgcgcgagagagcgagggagagcgagaagagaaagaggagaggcccgtgtggtgccgcccagaggcgcggggcgagcacacccgcgccgtagacccgcgccgcagcac

SEQ ID NO: 122876 - DNA, 206 bp, Arabidopsis thaliana columbia
  unsure (1)..(206): unsure at all n locations
acgagagggtgtgcgacaaggctttgggggccgatgtgccggtcacccacgagacgcgggcgaattatcggggggcacgggacacggagaggagtatgcaggaacgctaaatntatcatggtacactaatgagtaacgtagtgattcgagtgagaaacacgaaaagctatgggggagagtagcaacagtagtggcggccgatccag

SEQ ID NO: 122877 - DNA, 676 bp, Arabidopsis thaliana columbia
  unsure (1)..(676): unsure at all n locations
aggggggcgggaaggggggggggctcnttggtaacaaccccccaacagtttcttgggggggaacccgagtagtgggaggggcgggagacaacttataaagtttttgacatgggtggggaatcccacaggaataggaagggacgtaggattaagatgggaagagtgggtttgggcgcatggaggttatgtcagaatcgggaaggggttgtggggatgaagtagtaaagcgatgatagtaggcactccgcgcgcccccgtgtttatggtcgcagaggtgctgggaggaggatttttttttatggagggggaggagagaaccccgccgcgatactaattgcgcgtacggcgntaatgtgtatatggaaaacaaaggcagacgagagaacgcttttcagatcgcgatagagggtgtgggggaggtgaaagtgatctagaatgagaaaagagcagagaggagtgataaaaggagcgagtgtcaggaatttgaggagacggatggtgcgctcggagagggtgttgttggagacgagtataaggagtgagcaggagacagaggatgaagagataagaggaatgggagtggagtggtttaagtagtgaaggagaagataatgaataagtgctcggaaggaggaaggtgatgtaaggcgggagtagagagaagagaaagtaatag

SEQ ID NO: 122878 - DNA, 497 bp, Arabidopsis thaliana columbia
ttgacgtcgcatgcacgcgtacgtaagcttggatcctctagagcggccgacctttttgtttttttttcatttttcccaaaaagagtttcgcactacgtagctttttatcctcaacttccacaaacaacagccaaaatttaattaacaaaaatcttggagctttacgtttttttcttctaactctaaagtttatgcagctgggggaaactttatctggtgggggttttcttgaagaacctggggtattctttttgcaattgccttgcaaccttaaaaagcaatgcaaacactgtctcaaatggtgccatcggaaccttgcatccatctgaaggggtgacactttgtttaatttagggagaaaccgacggttaattaactccttcagccctggctttaacctagtttagatcaagaagaggagacctgtttaaatttccgctactccagaaacagcgagaacccccattggaattcccccatctgcttaagctacgacg

SEQ ID NO: 122879 - DNA, 401 bp, Arabidopsis thaliana columbia
cgtctcatattagaagtcccccagtccgccgatcgtcacaggtcggcctatcaaccaacctacttaagtataccaaattccttttgccagaaataaacgaccaaaaaacacctcgggggtggaaaattttgggggggcccccaccaaaacaaaaaacgccaccccacttttttttcccccccaaaaaatggaacttattataaccgattgggccctacttaaaaccatttttccttcggttcaaccggggggggaaaacaaaatccctttttttacgcccccccctttttttttaggagggttggaattcagtggggggccccccttgtccccgggggcgtaaatttaaaaaccctcctccttttttcgactcaactttagcaaaaaacggcgcggaagaa

SEQ ID NO: 122880 - DNA, 588 bp, Arabidopsis thaliana columbia
tttttttttttatccgcacacaaccgccgcgggggcattattgggtacacacttagaagattatgacgtcgcatgcacgcgtacgtaagcttggatcctctagagcgagcgacctttgggtttttttttatattaatatattggttttttttttgggggccatttttaacacattaatttataaaatttgggggttataagcaggggattaaactatacgagattacctgttggggggttgaaaaatggtgaaaaattgaaaaaatcttttattttttttttatatcacgctcagaggaggttaaactgaaaatagagattatccctgattttgaaataattttgacacaacgggtttttttatataaaatttggtggaggaacccatagcttcttccttttagacccgtgcggtccaaccttttgggtagagttgctatttttacccacaacggttatagttctttccaccttgaaatattgtacactgaacacccctttgtttggaagaaaacttgttttaaagactggcgattttttaaaaccacctaacttaaaaaggtgttgtgtggggtaaacaagaacagg

SEQ ID NO: 122881 - DNA, 485 bp, Arabidopsis thaliana columbia
  unsure (1)..(485): unsure at all n locations
ctctagcagatctatgacgtcgcctgcacgcgtacgtaagcttggatcctctagagcggccgccctttttttttttttttttttcataaaacagggacnacgccgcccgtatcatctcgttgcttcccggcgaggccgaattatcggccgagaattactccggctctctctctgaaaattctgaacggtgaaaacatcgcgggtcgaaagttcggttatcttctcgggggcgcccgcgtgaaggagaccctttggggacctgttcccttgggcaatgcctggcgcctccaaaggccgggcacgattcctcggcggcacactttgagtttcgatccaagagggttatgggtaacttacctggaaattttggggaggtattcccgcacgacggaggagaaaaacccagccccgaaccccaaacccttggtctgcccctccggatgtggcaacccggggacggcctctaaaggccgctcttccgacag

SEQ ID NO: 122882 - DNA, 465 bp, Arabidopsis thaliana columbia
  unsure (1)..(465): unsure at all n locations
ggaaagctgctacgcctccaggtacccgtcccgaattccccggtctacccacgcgtcncggagaaaaaaaaaacttttcattttatttcctcncccagtttcactcttgttgcttccggagcgaggcgagaattatcgtccggaaaatttatcccctcctctctctgaaaattctcgaccgggaaaaatccccccgatccaaagttcctttatctttttcttcgggtgttgcggcgaataaaaaccgcgtggggtttataaataaagggcacggcgctgggttccaaagggggggccccatttttgcccccccccctctcccttggagccatggggtttttcgtcaccacacccaacattcttggggacacctccaaaaaaaaagaagaaacaaccccgccctcaccccccccccctgggcgcccccccaaagtgggagctctttccgaggccttttggccccct

SEQ ID NO: 122883 - DNA, 510 bp, Arabidopsis thaliana columbia
actctagaagagttatgacgtcgcctgcacgcgtacgtaagcttggatcctctagagcggccgccctttgggttttttatatttttttggtgtgttgtgttttttacctttttttttttacaccacacgaaaaacaacgagtgtcctttttttaccacaaaaaaaaaatattttttttcttttaataacccctcgatctcttattgggggaattatactgacctgttttctacccgggggggggaccccaaaaaagggggggttttttccggaaacccaaacaaagaacgggggtgggcctcgtaaaccacagcgcacgggggtgggggggctccggccaaacggggggaaacccttgggccggggtgttcaccgctgggccctcccacgggagagggccccaaaccttggggggtggagatttcaccccccccccctcctcggctgtgtagaaaacaattggccgccgtccccgggggcaaaaatccccacgaggggggcccttcggaa

SEQ ID NO: 122884 - DNA, 544 bp, Arabidopsis thaliana columbia
  unsure (1)..(544): unsure at all n locations
tccttttggaagctgctcgcctgccgtaccgtccccaattcccggtcaccccgcggtcgggacatttcataangttccctcttcacctctcttttcccattcctcnaacaccaaaaagtgcctttatcttcgccatgaccttctcttcttcttcttcttcttcctcttcctccttcttcggggaaaaccctaccaagggctttttcctcgtagtgggttaaattngccccctcaatccccacaaccaaacnaaacctctcctttttaccgcgttccccaagccccccttggtggtcttcaactgggcccaatcnacccttaatcctttcccccggggacctnatctggtccttttttttccctctccacccccccattcccgactttggaggacacctcccaccttccctttttttattattgttattttgccactggggttccccccccccccaccccattttttcttcctcacaatctctcccctttttttacccttttttcttccttttccccgcccgagaacacccccggttctttcccc

SEQ ID NO: 122885 - DNA, 509 bp, Arabidopsis thaliana columbia
tatagtagagttatgacgtcgcatgcacgcgtacgtaagcttggatcctctagagcggccgccctccgggtttgttttttttgtttaccttattgagttactcaagaagctttataaacaaacattgttcctatgaagatgatcgggggggaaccattaaaacccaaattacatccgcgggcccgggaaggcggtggggaaaaatgggtacttctagatttttttaaggggggccttggggactttgggggcttttggaagttttaaaaagggcaaaaacggaaaccccccccgggggggccccggggaaatcccgaaaatgtccccccgggcctctccagttttccctttttttttttttttaaaacttttgaaaacttgggggaataagggttttccgggggaaatgggaaaaactttaaaacccccacaatttcaaaccttttaagcttaggggttataccggggggcccttgggggcaaataaacaacattatttcctttggccc

SEQ ID NO: 122886 - DNA, 588 bp, Arabidopsis thaliana columbia
  unsure (1)..(588): unsure at all n locations
cactcatattaggaaagctggcttcccctgcaggtaccggtcccgaattccggtctcccacggggccggttttggtgtaaaccttattgagttactcaagaagctctaaaaacacacattgttcctatgaagattatttatttgtaaacattatctcaatctccttcccgggtcccaaaatatgggtggttaaataatgggttttctccccccaacattttttttgggggggggtggggccncccnccccccagggggctcccaaaaaaaaaaaaagaaacncccccttcttcctctcttttntggggggggggccccgcgggnggtgggggggggttttcaaaaatttccccaacccctcccccccccccactatattaaaatttttttttatttttttctccaacaaaaacacaacaaacactgcggccccgggcggcccccccccttttgacacggggggagaacgcggagaacaccccccgcttttttcccctcttttgggggccccttcccccctttccccccctctctgcggaaaaggccgaaaaaagacgaccaaccccccccccctctttccattttttc

SEQ ID NO: 122887 - DNA, 543 bp, Arabidopsis thaliana columbia
taggagcactatagaagatctatgacgtcgcatgcacgcgtacgtaagcttggatcctctagagcggtcgacctttttttttttttttgctcatataaaccgatcacttgattatattgtgagattcggaagaattacagataaacgagatcgaagctggtttgtggcactcacaaaaattgaaaaaacaaaaggcgcccaattttcttaggcgccttgccaaatactaatttttttcttggggggtgatgtatcctaagggtgtacacaaaatacctcaaattccaaacttaaacatctggtaccaatctgaatatgcatctttttaaaaatactccctgaccaagaaggaggttccaaaattagttcccgcagcgttgaggtcgctgattaattaccgaccgaagggtctatggggtcaaagcctcgcaaaaataaaaaaaagggcccagaataggctggggtgggttaattaaacccaacggatcccaccctggattgggtgggaaaagcctataggctggccttgaaagggagataaat

SEQ ID NO: 122888 - DNA, 332 bp, Arabidopsis thaliana columbia
  unsure (1)..(332): unsure at all n locations
nnnnnnnnnnnnnnnnnnnnnnnnnnnnnnnnnnnnnnnnnnnnnnnnnnnnnnnnnnnnnnnnnnnnnnnncttcgcgttttgagaacccattgattatatagtggtgccctcttcattataaatagaatcgaaacgttctagtggaaatgctaacttcaaactgttcacaggattgtttgtccaagcaaacacacaaacgaagatgcttatgccgtttgtgtaaacacaatacagcactgttttgagtaaatgtttatgcacactcgagaatttgcgaagagcaaaacatatagaaagagagctttacagagaccatatggacacatgca

SEQ ID NO: 122889 - DNA, 506 bp, Arabidopsis thaliana columbia
  unsure (1)..(506): unsure at all n locations
tgnnnnnnnnnnnnnnnnnnnnnnnnnnnnnnnnnnnnnnnnnnnnnnnnnnnnnnnnnnnnnnnnnnnnnnnnnnctttttttttttttttaaaccttgatagcagttttgtacaatgtctaattcaaaacagtgaacttttataaacagaaaatacataatcaggaaattagataccagacacaagaaaagcatgaggcttgaacaattacgtgtgatagtgttgcgacaatccaacattgcgataatttcccggtccattcatacatcagatttggcagtccaaggtctggatgagttggtctctgctccagaagtagtcatcaagcttccagtatctgacatgtagtgataattgtaattgattctggtcaccaaatcagccaaatgagggaagtgtccacattcagcttcgaaaaaatactctgagaaagaaagcatacagtcctcaaattgtttctctatacggtctatttccatttcgcatctagccttgatggctgaa

SEQ ID NO: 122890 - DNA, 325 bp, Arabidopsis thaliana columbia
ctcacctcaccaacccgcccgataaccccccccgccccgccgcgataccgtgggctaccacctcttcacaagaatttatgggattattacattcactgcctccgctaagcatttggttcctttatcaaccggccggccctcagtttgttttctcattatatctcactttcgtctttttacattctattcttattcgggcgcccaaaactaacacttttgtggaggaaaagatgtaacaaacccatatttttcgcataacacaattttcgcttatttggcgcattcacgcacccccccaaattgcttgtttatgagcttctttttt

SEQ ID NO: 122891 - DNA, 544 bp, Arabidopsis thaliana columbia
  unsure (1)..(544): unsure at all n locations
ccaagctacaatacccactcactttaanggaaagctcgttccccctgcaggtaccccctccccaattcccctttccacccacgggtccggatgaatcatacaaaactctttcccccacccattttcaaacacctcaaaattaaaatttttccaatccaacgagactcttttcattttttttaaaaaattaccccaccggggcctaaaaaaaggagcctttaattcaaaccctcatttttcggggggggggagaaacaacttttaatcccctaaaaaaaaaaaacccccctttttccccataattccccccaaatacttttttaaaaaaaattttcccatcacaaaccctccccccttttcccacccccccttttctcaaaaaactcttaacaccccttttttcacacaaccccccctccaactcctttttttcttcgaaaaaaaaaaaaaacatttatattcctcccccccaacccactatgtggcccaccacccccaaactcatacccacctctcaacttctcccccccaccaccaaacacta

SEQ ID NO: 122892 - DNA, 613 bp, Arabidopsis thaliana columbia
gggcgcgggaaaaaagaggagagcgagatactattttacaccggggggagagggccaggaaaagaaggggaagcggcggagacgcccgggcgccgagcgggggagtaattgattgtgtgtgtcagggagcgccccgcggcggaggagaggcgagaggacagaccagagaaaaaggggaacagagaaacgccggaagaaacccacgacgagtttttttatcacgggggggtggcagaacgacaacgagaacaagacgtgtggaaaagaactgacaccgagacagcgaacgaggcgagagacgcggcgcaaacgcagatagaaccatgccctcaccacagtgcgcggacaggactagcgcacggtgtagggcgcaggccgcacccgtcgccacgaggacacggagtacgggcacgatccgggccgaggcacgagcggtgggcgcgatgcgcgacggcgcgaacgtaaagagagaggagagaaagagtaaagagagaggaggtggaacagagggtcgtcgaggagggacacgacggccgggcgcttagaccactgagccctaagggccaaaggtcgagagcggaggatcagggtgcagcacgagcacgacaagcat

SEQ ID NO: 122893 - DNA, 446 bp, Arabidopsis thaliana columbia
  unsure (1)..(446): unsure at all n locations
atgatctccaaggtacaataccactcacttagggaaagctgctacgcctgcaggtaccggtcccgaattcccgggtcacccactcgttcgggccgcgtacaccacaaaggtttttcccctgcttcgagcgccgtcttagagaaactttttctcgataggctttccagggacagggacacagggttttgattgaaacaaaaacccctagcgtttacgccttttctaaggaaatttcttgggggggcaaaaatgggtgtnaaataaaaatttcttgtggtgccatcacccaccacactctactgagaaagcttttctaaacagtccaaaaaaacctgcgggtgtggaccctggtgggctaaaaaatgaaaacctcgtaacccccgaaaaggcggtttttgataaaatatttttggcccccaaaaattccgcccaaaaaaatcttcggg

SEQ ID NO: 122894 - DNA, 553 bp, Arabidopsis thaliana columbia
  unsure (1)..(553): unsure at all n locations
cactcactttagggaaagctgctccgcctgcaggtaccggtcccgaattcccgggtcgacccacgggggcggggtttntttaacaccatgggatatttgatctcctcctacaatagattgggctggccctataccaaaagaacttggcgagtgttttgtattgggaaagatttcactgagcaacccccttctctgtgggagaaatcccacctttcctctttttttttgcgcggggggggaatccttttatttatttnaaaaaaccaacaaaacttgcttcttttccaaaaggaggggggccccccttttttaggggcgcgggattaaaccttgggaaaatactcccgtgggggggcctttttcccaaaaagtttttgttttttaggggcccttgggtaaacctaacttttaccttaaaacctgtggtgggggggccgcgttcttttttttttgtggaacttaagaaaaacccacccccgggggccttggcctttaaccccgggagggcgggctcttttttcaaacctgtgtcaccggggaaaaccttgtcgcc

SEQ ID NO: 122895 - DNA, 492 bp, Arabidopsis thaliana columbia
  unsure (1)..(492): unsure at all n locations
gcacgcgtgcgtgagcttggatcctatagagcggtcgccctttgtttttttttttaattaataaaaatctcatttaaaaagattgtacccgcggaagaagttgtcaccagactctacgaaagaccaacaacacgagcccttgttttagtgcctgggtcatttcgcataaaaggggaccttgcgtctataaacttttttttcaaaagcgggccaccaacaaggggtccataagctacattcgggtttggtccatccgagataagccccttacacccatttttggctcccgggggtggcatcacctgggatttgagctcctctatgaggcacaaattttggatattatttcaccatatccccacccaaaagctaattttttttcgggatttntccctaccatgttaacagcctgagaatcacacgaaattttttgtaaacagaagggttaaaagagtctgggcactgcaagaaagttcctttaccccagggggg

SEQ ID NO: 122896 - DNA, 506 bp, Arabidopsis thaliana columbia
  unsure (1)..(506): unsure at all n locations
cccctgccggtacccgggcccgaattcccggggttgacccacgcggtgcaggggccgcgtaaaaataaaaataacccaaaactttttgccctcttctaaaaaggatcccccattggaacattttgaagatccactctacccccctgttttttctttttaaaacacaaagtggcgcgcaaaaccacaaggccaaaatggtggttgctaacaggcgggctcctttggggggggtggggctacacccccttgagccntcccttaaaaaaaaacccaccccacaccttttaccaccccccctccacccccaagaggggcccccactagtaaaaacaccccgctaagtggcacacaaaacgccgtttgtccctccctttcgcgaaacccgacaagcgcgcgggcccgccagcaacccgccgcggttcttcgggggagcgacgcctcgacctcttaacagagggggcgcgaaagcttgtttttctttttctttcagaggggctctcccccca

SEQ ID NO: 122897 - DNA, 480 bp, Arabidopsis thaliana columbia
gggaaaccccccaaaaaaaaaaagaaaaagcgaccgcgaccgacgagacgcaagggagaaacaaagaaaaagaaaaccccaccgcgcaccgacacagaagagccgagacagagggcagccagaccccgccacaggcgcgagcgacaaccactttttttcggggggcgggcggacccacgcgcgagcgagcaccaaccacacagaacaaaacgccccaaacgcgcaacaccacgacacacaccagcacacaccgacagcgcgagcgccaagagcggaagcgccatgaaaggcaccaaggcgcacacgagagcgccccagcgcgacgagacacccatccagcggacgccacacaccgacctacacacccagacacacccacgcaccacccgggcgcgcgccgaggctgcggagaaagagaatagagtagagatataaatgagaggagtggcggacgacgacacaccagacgacgacgacgct

SEQ ID NO: 122898 - DNA, 515 bp, Arabidopsis thaliana columbia
actctgagaagatttatgacgtggcctgcacgcgtacgtaagcttggatcctctagagcggccgccctttttttttttttttttttgacaaaaaagactttaagagccaacagaaaaaaccaattcttgaagagaagaattcattacaaaaccataataaacatccattttctccatcttttttttccagatttaatgaggaaaacccccacaaaagacattgttgcaatgagactctgggacactattacatgacagagaagaaacattttctttaagaatcaaagcctctcagaggaaagcggtcttctcaagtagtttcaccacatctagctgattgtttagccgggccccataaatgggatttttactgtccaggttttgttgagtaaatgaacaccattcttttaggaggaggcttccacctttttcctttcataacccagcagaataatgcaatgggggggtcttggtttttggaaattgcattggcagttgctcccacccccaaaaaa

SEQ ID NO: 122899 - DNA, 520 bp, Arabidopsis thaliana columbia
  unsure (1)..(520): unsure at all n locations
nnnnnnnnnnnnnnnnnnnnnnnnnnnnnnnnnnnnnnnnnnnnnnnnnnnnnnnnnnnnnnnnnnnnnnnncttcgttttttttttttttttttttttttttttttttttatcttttttctttttttttttaattttttttttctttttcttcttttttttgcaccaaagattcttcacaattaaccctcttcttctcaaaaacttttgggcacattgggaaacccctttttttgttgggggaagcgaaaaaaaaaacttcttccaatgtgggggggaaaccaaaagaaaccccccccatttaaccttacccttaaaaatacacccgcaccctcaaacaaagaggggggatcaaacccttggaaaaaaaatattttttttgtgacacacccctaaagttaaagtttttctttttgggggggggtttattccccaaaaagcatttttttttcccacccccagaaaagggatcttttttggaataaggggtcttttttaaattaaaacaaatttttttttt

SEQ ID NO: 122900 - DNA, 549 bp, Arabidopsis thaliana columbia
  unsure (1)..(549): unsure at all n locations
tgattatttccnnnnnnnnnnnnnnnnnnnnnnnnnnnnnnnnnnnnnnnnnnnnnnnnnnnnnnnnnnnnnnnnnnnnntacccacgcgtgcgggccaactgattctggtttcngtggatgaacaatgaacagaacgagagagatcctgataacatcaacaacaagaagaagaaaaaggaatctccattgttgatttactccgcctcaaaagcaaagaaacgaatcgtgtctaatttcataaggacaccggtgtcccccaatacctttccttcttntgaaaaaaaaaaaagagtctgtttttgtggaattcaccctccccctaaaaatacacctttagcttaggggtcttcacaaacccattttttttttccagggtttttcccccctttttgttgggggtccaaatttttttttttttttttgttttgggggggtttttatattaacacccccccatttgtgggaagatttttttttaacttcaacataaacaaagggggtcccataatttcccccaatttttttccaaaacaagattttttttttt

SEQ ID NO: 122901 - DNA, 535 bp, Arabidopsis thaliana columbia
  unsure (1)..(535): unsure at all n locations
nnnnnnnnnnnnnnnnnnnnnnnnnnnnnnnnnnnnnnnnnnnnnnnnnnnnnnnnnnnnnnnccacgcgtccgggtaattcaactttttctctcccaactcttcttccaggtttcctctgctactctcagggttctcttctccacttccctccagctttatccttttgatttcggcctccatcttactgtatttacccaaaaatctaagcttttctcagtgttctgggggggtctactttgnttccagggagggctgaaaacttccaatacccatcttaattttttcaatccggaaggagaaaaaacattttagttaaatttgggttttggggctcctcacttgtttaattcttcaaaagcttaaaccctccactgatttctaatttctgagggattgaaatctatggctggaaacaagggaacataaaagcgagtggggtttggttatgtaaacttaaagaatgaaacccccctgtttgggggctactttggggattccgggttttaccttgggggtaaaaaaaaaaactcaa

SEQ ID NO: 122902 - DNA, 528 bp, Arabidopsis thaliana columbia
  unsure (1)..(528): unsure at all n locations
tacgactcactattanggaaagctggcacgcctgcaggtaccggtccggaattcccgggtctacccacgcgtgcgcggacgcgtgggttgggtttaaaaagccggagaagaacactaaaagaaaacatttttatggtctggaattgaatcccatcctcctctgtttctctaacaaaaatggctttctctatggtcaagcttgctctttcgtcttcacctacaccatttgttccctaaggagagggggggttcttccttagcctcatcctccgattaatcttcgggaggggaccaccaaactccccttcccccttgggaaccatttttagagactttaggggccggtttttgccgttttcgacagcgtccaccctaagttggggcccattttaagggatcctgacaaacattgaatggggggaaattgggattttcccaaaccttaccccttaattaataaaatttggggaggagggggtttgtttaaaaaacaaacccnnttttaacccctctcagttcctttttttt

SEQ ID NO: 122903 - DNA, 300 bp, Arabidopsis thaliana columbia
  unsure (1)..(300): unsure at all n locations
nnnnnnnnnnnnnnnnnnnnnnnnnnnnnnnnnnnnnnnnnnnnnnnnnnnnnnnnnnnnnnnnnnnnnnnnctttttttttttttttaaagaaaaggtataaatttcttgtcatataatgtaaatataagttgtgaaagtgcatatacaggagaacaaatgactacttcctcatcttctaatccaagacacaggtttaagtctgaattcgataaaaacagagagctcaaattaactcttcgcattttacatcaaatagtgataggactacttcttgcatgttaacatttaaatataaat

SEQ ID NO: 122904 - DNA, 517 bp, Arabidopsis thaliana columbia
  unsure (1)..(517): unsure at all n locations
ctgcaggtaccgggcccgaattcccgggttgaccccgggggctggcgctcgtacacacattaccaccattantttaagacgttttcccacaatgccgtacccattttaaaccttcaaatacaaaatcccccatccaaaattacatatgcactcggggaagccctaattttctacacaatccttaaacaactatttccgcggggggtgggtccccacaacagggggacccctaaaaaacaaancctttttttcctttcccccatatttccctccccccccnnctaaaatccttggggccaaaaaaattttcccttcactttgagagcccgggggggaggcacataccccccaggggaatttccaattaaacacccctggggtttcgctccccccaaaaattaaaaaatctccggtaaaataaataaaaaccccacactccccccgggggggggccaaggcggggtttttgttagaaaaaatttctggggggccccccaaaaaagtttttgtcttttgt

SEQ ID NO: 122905 - DNA, 384 bp, Arabidopsis thaliana columbia
actctagaagatcttgacgtcgcctgcacgcgtacgtaagcttggatcctctagagcggccgacctatgcgttcgttgttttatggttttgccttgttttttgtggtgggaaaaagaaaaaatcccacttggtgccatcctatcatgcctcattttacacagtgaacactgaatgcttgaactaagcaaaggccaagatgtgtaaaaaaaacctgtcttttattaacagggcgctttggatactaaataacaagctaagaagcttttggtggtttttcccctggagcgtgatcctcatcatgatagagggttctagccatttgccatatttggaggttgttgtccttagcaacactggaaataacccaattttcacaggggttc

SEQ ID NO: 122906 - DNA, 545 bp, Arabidopsis thaliana columbia
  unsure (1)..(545): unsure at all n locations
nnnnnnnnnnnnnnnnnnnnnnnnnnnnnnnnnnnnnnnnnnnnnnnnnnnnnnnnnnnnnnnnnnnnnnnnnnnnnnnnnnnccacgcgtgcgcggttttagggttttgccttgttcttgtggcgggaataacaaagacatcgcctatatggggaaagacgaagaggaaatgcgaggtgagatccaggagcgactaatcaatgaagagtacaagatctggaagaaaacactcctttcctctacgaggggggggttactcaccctctggagtggccttaacttactgtggaatggcttcctgacccgtgacaaccttcccggaaagactactcccttcagaaaatgattcttgggtacccatccctccgagggggggccccaattccttgatggctaccccaagttcactttcttcttgacaatcccgaaagtagacctccgaaatacaataattaccggtttgaatttgggggttttgcctgggccactggaaaggtcaaattctccccccaataaatcttgggggggggggtaatggaggctc

SEQ ID NO: 122907 - DNA, 516 bp, Arabidopsis thaliana columbia
gtaagccttgggatcctactaaaagcgggcgcacctttggttttttttttttttttcttttttgagacacacaaacgcatttatatgcggcactatatattggatacctgggggatgaaacccaacaaccaaataggtaaccggaacatctttattcttcggtcacttcgtgcgcggaaaagggctctccaattaccaagaagaacacagaaacacacaacactttttatttataagaactctctttttgtgccaggggggggggcggggcaagtctcttcaagacgcgtttttgggagacaacacaacattgggattcttttttcgcgaggggggaaggaacaaatcttataaaaataagacccaagccctatctataatcttcctgtgaagaaggtgcttgtgtaacagcgggctcattttaagaacaaaaaagagagactctggacgtggggttaaacaccttgggaaggcaaaaactacccaatgtcgctctaataagactcaaccgcaccc

SEQ ID NO: 122908 - DNA, 522 bp, Arabidopsis thaliana columbia
  unsure (1)..(522): unsure at all n locations
cccctcccggtacccgtccgcaatttcccggttcacccacgcgggcggggcccccacacaaaaaaaacaaaaatnaaaacctccccctttctcttccctcttttttttaccaaacccaagaaccggggctctctctcccccattcaaattcccccctaagatatccaacacacctgactcttttttatcccatccccccaacttttttagcgcggctggggcgctctttttccctctcctctttttcaaaaaaaaaaaaccacccttttttttggggcaccctcccccccaaaaaaaatcccccccccaatttaatctaaatttacgcctcccccccccccccccctgaggagaaaaaccctttcttttttatcggcaaaaaaaccccccccccccttttcacccaccaaaaaaaatagggttttctttccttttgtccgtgggccacaccccccattaaccccccacttcactttccgccccccccccttttctttaaaaaaaacccccctcccccccacg

SEQ ID NO: 122909 - DNA, 579 bp, Arabidopsis thaliana columbia
tgccgcgtacgtaagcttggatcctctagagcgggcgaccttttgtttttttttttgtcaacgaatataagatcagatattttttacaaggcgtgacgttaagataaagaggtacacatctctgtaagatatagggttaataaaagtaatttagtggttaactgaaaaagtagataaaacactgcctacggattcgggggggttccaaatatttttctcttgcacgagaagaaagaaagtggtccctgtatgtgcaagggaagggagaacaggcttgtttcttttgatactgggaataaagaaggagggagagggttgggcttcagattggaattaatcttaagccttcttcctttgcgatttttaccccggtttgttggagacccacagagtccgagaaccatatattttgtgcaagagagctggaacttcttctcttgcattggatcctagaggggttactttttggaacgggtttgctaaaacgaacgtgctggattcttgcgcccaccttagtgtggaagataccctttccggggggccgggaaaaaaagttttcttgggggggaaaaacccgga

SEQ ID NO: 122910 - DNA, 546 bp, Arabidopsis thaliana columbia
gcacgcctgcgtaagcttggatcctatacagcgggcgccccacgggttagctcttttttttatctcctataaagaagcaagagttgggacttttgtctttgggcccccccccccaaagaatttttttatttgaaaaaaaagggaagaaaaaattgcttattcccccacgacgatgggcagataatgattcatttttgcccccgcctttttttaaaaaaaggggggagaccagacgggagagggggaccactcggagccatctgggcaacccccctttttttaaaaaaaaacacaaaggggcgggggagcgccccctgtttcttccccccttgggggggggatagtgaccgtgtaagaggaaaccgtgaaatttgttttgtcaaaaaagtggttttcttagagaaagccgttgtacacaaacattctttttgtggattaatggaagtttttaagagatttgttttttttttgagaaagcccacccattcgttaaggaaaagaggattaacaaaaccttatttgtggggggatatgatataaccagag

SEQ ID NO: 122911 - DNA, 564 bp, Arabidopsis thaliana columbia
  unsure (1)..(564): unsure at all n locations
aggaaattcncaggtgacataccactcactataggggaagctactgcgcctgccggtaccggtcccgaattcccgggtctacccacgcggtcgctgctctttttaactccaataaaaacacaataatggatcttcttgttatgctcctctctcttctggggtcttatctcaacttcaagagctgggaaccccttaactcccaagagagaccaaaacttgttactttttgggacctcccaattgtttttaaacctggcgaggggaaacnnantggagaaccacttcatttcaagaaaagaaaatccctccccttttaaaaacaaaacacctcttggcgcccccaacgaagaacacattttctctcctacaaagcccttggtttttttgcgcggttcgagaaaaaaaaactttcccccccaagggttttttttttgggggggcgggagaacacgtgtctcttcccctaaaggggggggcgcttttcggagaaaggaaaaatttttttatattacacccctctgggaaaaaggccctttaaagaaaaaacaaattttccccctttgg

SEQ ID NO: 122912 - DNA, 276 bp, Arabidopsis thaliana columbia
  unsure (1)..(276): unsure at all n locations
tgacgtcgcctgcacgcgtacgtgagcttggatcctctatagcggccgcccttttggtnngggaaaagttcttttttttgtgtttgaacttnnnggggggcaccttggggaaccgattggaaagagttttgaaaacaccctttttgtttttaaaaagtgtttttcccactcaacaacataaaatgcccgataaatcccagtccaacttagaacctaagtgggaaaacccaaatctttggctatatataagaaactttgggaagacgagagcattat

SEQ ID NO: 122913 - DNA, 214 bp, Arabidopsis thaliana columbia
  unsure (1)..(214): unsure at all n locations
ccagctccatacgactcactatagggaaagctggcacgcctgcaggtaccggtccggaattcccgggtctacccacgcgtccgggaaaggtgctcttgttgtgtttggaactgaaggagccaanattgtgaaagcttttangaatcttcctggtgttgagctttgtcacgttgagaggcttaacttgttgaaattaccccctgggggcaccttg

SEQ ID NO: 122914 - DNA, 546 bp, Arabidopsis thaliana columbia
gacgtcgcacgcacgcgtgcgtaagcttggatcctctagagcgggcgccctttttttttttttttaaaatataaactatcgggagctattaaatttataggtaataatagctgggggttacacatgtttaaaaaaacacattaacttccgtttcttgactaattttacctcaaaacaaaaaaagggacccataatggttttcccatgttttatagaagcgaagaatttttccccatgggttttcctcagggcggggattcccgttggcaatttacggggaactcccgggccttttagaaaccgccggcatcaaggaacctacgtttccgccttcgctttatttgggaaatggttctttacaacccgggcgattttgctcccccctgctctaaaaaataaggggctgggttttttgttggaccccaacccaatggggcaaccgatcttttaaggtgtggggcgagaattgtggggggattaaaaacccccttatcggggaaataatggaccgtggttcccctcccgcggaaaataaaaaaccttttg

SEQ ID NO: 122915 - DNA, 471 bp, Arabidopsis thaliana columbia
cttggggtaaaaaaaccaacaaaaaccccgcgttttttttttgcttttttccagcccccgaaagacaaagagaagggccctccactttctccatcccgggggggttatttattaggggggggtgggggctccttttcttcccccctcccccccaaaaaaaaaaaacccaccccgggggagcccgcaattctctgagaccccgccaacccctaatttctccaaaactcctggggggaggagggggggggtcctcccttcctcccgggcggggtggcgggagcctaaaaacacggggcggcgctgggaatagaggcccccccgcaccgcaagaccaccacggggggggggggggggtgtttgggggaggaaaagaaaccaaaggggcggagagcgggtggggcccccccggcgcgggaggggacggcgcggcgcacgcggggtggtgatgggccataccgacgggcgcgaacc

SEQ ID NO: 122916 - DNA, 499 bp, Arabidopsis thaliana columbia
acttagaagatctatgacgtggcatcgcacgcgtgcgtaagcttggatcctctagagcggtcgacccacgcgttcgtggacgcttggggttttttgtttatctttaaacacacaaaaaagtggaagtatattacatgagtccgcttcgccatcatctatgagacaattgataaaagttttccaaaaaatttcgtgatgacactacaaaacatatcttaaaactttacaggcttatgggtggctgtgaaccacctcggctggacttcaaaaaaagataaagacttttgtttttagagagaatgggtttatttggagtttggaggttgaaaagttctgatgcaaaaggggtaaatttaagggccaaaaaaacggggaaaagccatgaggtccccccccccgtggtcccctaaagtaaaaatggaaacccctggtgggccccaaagggattgtctggcgggttaaagcccgggccccacccgggatttggatgcggggtttc

SEQ ID NO: 122917 - DNA, 555 bp, Arabidopsis thaliana columbia
  unsure (1)..(555): unsure at all n locations
aggtacataccactcactatanggaaagctggcacgcctgcaggtaccggtccggaattcccgggtctacccacgcggccgcggacgcgtggggtttctgattcaacaaaaggctgcatccctctttaggttgattgcttctgtgcgcacaaccatgatgattgctaatactgggggggctctcactctactttttgggttcttgctcggagggttcctttttcctattttaaagagggggggctggnngnnnttcgccttactggaaataacctctcccctatgcttttaacggggttagaacccaagaaaatgggtcctcccaaaagggaaaacaaaaatggtttttttttaaccacaacaataaagggtgggaaacttggggccttaaatcttggggatccccccccaaaaaaaaacgcggccctgtgtttttagttgggcccctttttttttttaaaaaacccttttcaacattttttttgcggtgggactttactttacaaaacctttgggggaaaggaggggggtttctcttccaaaaagaaaaaaaaa

SEQ ID NO: 122918 - DNA, 536 bp, Arabidopsis thaliana columbia
actcactatagggaaagctgctacgcctgcaggtaccggtccggaattcccgggtcgacccacgcggtgcgtgatatggacaatggtgatgctacaattcaatctagaagagaagtctttgcattacagggacgaacctttatctcacatcttccgcatgaacaatgtccattacatagttcaaaaggtcaaaagctctcccggagctaatgggagtttttttggagacggggtggtttaagggaaccttacccgggattattaacacaaagccgcctcccaagttataaaaagagctacgtggggccagggggggttaaaataccttgaaaagatgaagggattaccttgggagcgggaagctttttcttttcgcggttatccaaagagttgcttttaagaaagagagggtaaaagcttttcaacaacctgtgtgagaaaggggtccacagagaatccaaccggggtgggtggggtcccggacccctccgtttaaaaaaaaaacctcgggtattttctctattgggagacctttt

SEQ ID NO: 122919 - DNA, 554 bp, Arabidopsis thaliana columbia
  unsure (1)..(554): unsure at all n locations
ctacctctgtctctcacccttccgcggccgccggcgncgcccccattatctgggtactcctctcacaagattctatgacctcacatgcacgccctcgtaagcttggatcctctagagcggccgccctttggtattgcatatcctccccctacatgtcgtctatatagtttgtttcgattctttcgttctatttcacaccgcgcaaagacgtacattttcttaatagccttggggccctcctgcacccaaaacaccacaaatagcgcgactctctcgcatttgttataaggggggggccccatcaaaagtaaattcctagcggggggtattttttagaggtgaatgggaggaacgagcctttttttgtggcatccgtttttcccttctttgtttcccaaagaagaaaagctttcttaccgcttaatgtctcccgacaccaatattttcctgcccgactattattacagacttgtgccgtgaacgactcctggagtttagggcaccggttattgacgggcaacattagatttgtgcagtcgctgcagaagagagtt

SEQ ID NO: 122920 - DNA, 539 bp, Arabidopsis thaliana columbia
  unsure (1)..(539): unsure at all n locations
cagctctaataccactcaattagggaaagctcgtacgcctgcaggtaccggtccggaattcccggttcgacccacgggtccggccgcgcgtacnaaaggtaatgaggaagaggtcttatnaaacttttaagcttcttcacccaattctattgtggggggaggagagggaaggggtctcaaatcaaaacaaacatattggggcttttctggtttcctttgggcgtgggttttttaaaagggatgtggggaaaaaattnnaaagagggtcttttaaaaaaaacccccaaaaaagagcgtgggggaatttttttccaccttttaaacctccaccctccccggggggtccaaaaaagagggggctttttgggtatcaaattccacaagggtttgggctcgaagaattaatttcttttcncggggggaaaaacacccttgggggaggtgttaatattttttgttttttggtggaccttttttatccgccctttctttcgttccccaatttttttttcttatttcttccccccatttaaccagaa

SEQ ID NO: 122921 - DNA, 423 bp, Arabidopsis thaliana columbia
gaaagctcgtacgcctgcaggtaccggtccggaattcccggtgtcgacccaccgctgcgggaaagtaattttttaacacaaagatatatataaagctcttgaagatctaaccaaaaaccacttttggctcttcttctttcttcttttcaaaaaaagggggggaggggcctattttttgtttcttggaacattaaaaaaaccttttttttggggggagaggggacctttcaaatttattatcctaataacaaaggggaaaaagaagggggaacctccccgccccccctgtttttattacccccctttttaagaaaaaatgcctttctttgctcaaccccctttgtttcgcggggggggcccggtgttcccccctctcggggtgttacctcttttgaaaatcccgtgtgtttgttttttttaagc

SEQ ID NO: 122922 - DNA, 460 bp, Arabidopsis thaliana columbia
tatgacgtcgcctgcacgcgtacgtaagcttggatcctctagagcggccgccctatgtttttttttttttttatgatgatttttttactgttttttgttttttttttgactgccatgatcccactgttgaatgcttgattacactgcttatgataaaaaaaatgaagcctccctcttatgatctccttatatagtgtgtaccaaatgttttttgtccggcggggccccacttcacccatttattgaccatcatatatcaacgacactcacggctcccatgccactagcatatcggccaaatctcgcggtggctttgtcatttgtctaaagaaacacattacccacgccgagccagtacactaacctcggcaggggatgagcatcctacctgttatatacctaaccaaaccgttcaaccgcaccccgtctgggatcttcacgagatatatgagtgtctcgg

SEQ ID NO: 122923 - DNA, 545 bp, Arabidopsis thaliana columbia
  unsure (1)..(545): unsure at all n locations
nnnnnnnnnnnnnnnnnnnnnnnnnnnnnnnnnnnnnnnnnnnnnnnnnnnnnnnnnnnnnnnnnnnnnnnnnnnnnnnnnnnccacgcgtccgctaaaaaggaggaggatgtcntnaccgtatctgataattctttgactgtccatgagcccagagtgaaggttgatttgactgcttatgtggaaaagcatgagttctgctttgatgctgttctagatgaggatgtttcaaatgactattgtgttggggggagaattgacccaataattcccatttttttccagagaactaaagctccttgctttgcatatggccaaacaggtgggggtaacacatttacaatggaaccattccctatacgagcggttgaatatcttatgagggtgttgcgtcacccactttccagaatcggggggttaattgggggttcttttttttaaaattttgggggaaagtcttccatttctttaggaaaaaaaaaaattttgctggcgaaaatgggaaaccgcagtttttttttgtgggcccacaaaaatataaattt

SEQ ID NO: 122924 - DNA, 525 bp, Arabidopsis thaliana columbia
cccgcacgcgtacgtaagcttggatcctataaagcgggcgaccttttttttttttttttggagataaaaaccgacaacggatccgcccgaaaatgttcccataagagggggaaacattcaaagggaaaaaggagacaaaaaaaaggacctaaaatggccggctcccttgcgggctatcctaaatttcacagcagagatttttttttggtgggtgacccccactaaagaaaactacatccatatcctcatacttattaaggaagaataccgcgtaagggggccctcgataatcaagtaggaggaagtaggaccccctgcaaagtaggttcgcgggggatatacaaaagctttgttcaacaggggcggaactttttaaaaaaagtaggctgggtgtctcctgggagcgggccgaataacaactacttggacggagaaaaaggcctgaacaaataaccctaagtcaacttaaagaaatgggagagtctgtggaagggttccgggtgttacaaacaaaaaacaccaggg

SEQ ID NO: 122925 - DNA, 580 bp, Arabidopsis thaliana columbia
  unsure (1)..(580): unsure at all n locations
gaaagctcctgcccctgcaggtaccggtcccgaattcccgggtcgaccccggggtcgggaattaaaaaaaaacctacaacaaaccccggctttttttttttttttatggggaaaaaatatccggctggggggccccccccccccccggggactggcccccancctggggggggaaaacaaacctcccctgcgccccgcgcttttttttttgggggcgcggggacaaanaaacccccccaacccccctcaacaaagaaaagggaaagggtctggggcgcaacccctcccgccccccccccacagagggaggagaggacaccctctccccccgcgcgggccccgcctggaatataaccgcggccgcttacaagcagagaaccctcccggacccccaggatcgctctctcctccgcgcccgaaacaaaaacaaaccgcgccgggaggggggggtagaaaaaaaaaactgaacacatgagagcgggcccgcgcacgcccccgcctcaaaacaaaccgcaacccccccccgccgcgcctctcctcggtgccgccacacagaaacacaacgcgtccctgccgcgcc

SEQ ID NO: 122926 - DNA, 593 bp, Arabidopsis thaliana columbia
  unsure (1)..(593): unsure at all n locations
ccactcacattangggaagctagcacgcctgcaggtaccgggccggaattcccgggttgacccacggggtcggagacagagatctaaacaaaaatggagggaaccttctcccccctttgcttaccttcttttttaaacctctggtactctccccaagaatgggttcaccagattcttcccccggtttatagagatttaccattggtgtgatctccccccccgccaattctatattggggtgtgggggagaaccagaaaaaaacacctttttaaaaaaaaaatacccccccgggtttttttttctttgcgaaaaaaaaccccgctttacaagacgcccgttttattttcgcggggggggagggagaaaaaaacccccccacctccacaaaaataaataaagagccgcgctaaaaaaccttttcttagagcccccccgccaaacctacctccttaaaaaatatttatgtgcgggtattgtttagaaagaggtgatcgccctatatcggctctcttgagagaaagaaaaattacgctcaaaaaagacgtccctgggccacacagtttgaaaaagatgttttttgttgaaacacaac

SEQ ID NO: 122927 - DNA, 553 bp, Arabidopsis thaliana columbia
agaaatccaggtgcataccactcaaatagggaaagctgctgcgcctgcaggtaccggtcccgaattcccgggtttacccacgcgtccaggcacccgtacatataattctcggttgggtttttgattggcggagaattggggaaaaataaacttcttcttccctcttctcaacttgggggaactgtcatcgaggggcctctttgaggctcaagggggcccttaccttcccaaaattttaagggggcgtggggcacattttgggggccaaaaaataacaaagccccccctttttttttagtccccccaccccccccccttaagattttggggggctacaagaaaccccccccccgggggtgtgtttttccccgcccttgggcccactctttttttttccaaaacaagaaggggctctctcgtgttcccccgcgtttttatctctcaaaaaacaattttttattctttcgggggcctggcccccagataaaaaaaaaccaacttttttacacccgggtttttccccccccccatacgggaggggcccatatccccc

SEQ ID NO: 122928 - DNA, 512 bp, Arabidopsis thaliana columbia
  unsure (1)..(512): unsure at all n locations
nnnnnnnnnnnnnnnnnnnnnnnnnnnnnnnnnnnnnnnnnnnnnnnnnnnnnnnnnnnnnnnnnnnnnnnnnncttcgtgttttttctctttccttttttttttttttttcttatttagttgtatagagattgtttattaaaacaaaagatttattttgggttttaaaaaaccgggaacatttaattttaatttgggaaatgttttttcccccgcgggggataccacgtttcctaaacccgggaggaagatccccccaggatttttttccttgaaactaaaaacaggggctttaagggttgttttttggggaggaaacctcattttttcccacactttttactttttccccccacccttttggaggccctggtttccgcctcagtggtgtcttctttccttttccctgttcccaattttgggaaagaattccgccaaaaccttttcatgggttttttattgtcaccccccgcccactaatgatatttttgcccttgggggagggggttttg

SEQ ID NO: 122929 - DNA, 170 bp, Arabidopsis thaliana columbia
caagggggggggaagcccataaaaaaaaaatcaagaggaataaagaagctcgaccacgggagctaaaaattattattagcgaggcgggctcccacaaatagaagagagaagccaactcaccacaactgaccccccacggcgataagttgtccgcaaccattttttttttg

SEQ ID NO: 122930 - DNA, 495 bp, Arabidopsis thaliana columbia
  unsure (1)..(495): unsure at all n locations
nnnnnnnnnnnnnnnnnnnnnnnnnnnnnnnnnnnnnnnnnnnnnnnnnnnnnnnnnnnnnnnnnnnnnnnnnncttcgtgtttgttcacttttttctatggattttttttttttactctaaactgtttgttgttgcttcaggctttttttacactttttgggttcccttccccaaaacgttgacattccccccttaaaacattaagactgggggggcccagttttaagttttttttttaaccgcctgcaaaaccccctctgggtgttttcactccaaaaactttcggcccacgccttccaaggtaacccccaaaacactttctttttgacaaaaaaatccccttctcgaagaaattgggaaaaaagattttcaccccccctgccccaagagggggggccaaattttttaccccccgtccaaaaaatttaatccccaagatcctttcccccggtttttttttttttttttttttaaaaaaggggggccccccccc

SEQ ID NO: 122931 - DNA, 528 bp, Arabidopsis thaliana columbia
  unsure (1)..(528): unsure at all n locations
ataccactcatttagggaaactcgtcgcctgcagtaccggtcccgaattcccgggtcgacccacgcgtgcggcccgcgtacggattnacataaaaaccaacagtttcaagagagaccatactaataggcaccanaattctcctaagagtactatgggagcgggtcctttattttcaacaggtggggagttcctaaagaaacccaacactgatttatattttggggtcgttggagacaaaaaactccaccccctaacactaaagaagggaaaaaactggaaaaaaatcccaatcccccacccttccgtttcttcccccgaagtcttttgttttttttttttataaacctgacaccggtttttgtgccgttccaactcctttcaaaggggtgggccaagaagtccccggccccaagaggatctttggggttttgggcggggctttttagaagacctcttggggagacctttaaaagggcccccttcgagatcccccccttccttcttttaaaaaaaaaaacccgcccccc

SEQ ID NO: 122932 - DNA, 540 bp, Arabidopsis thaliana columbia
  unsure (1)..(540): unsure at all n locations
acgactcaccttagggaaagctgctacgcctgcaggtaccggtccggaattcccgggtcgacccacggggtgcggaaattgagaaaaaaacctacaacaaatacgggcttttttttttctttttatggggcgcgaatctctggctgttgggtcctccccgccatcggcgactgcgcccagnactggtgtggcggctacctcccttgctcctgggtttttatttcggggggggggggaggaacctcggaccttttactaaaagaggagggttctgggtaaacctgccccctcccccgcgagggagagggaaattctcccagcgtggcccctgggatttaacagggtttccaaagggaaaaccccggccccaagaaggggccctcctccagggcgtaatataaaaagcccggggagggggggctagaaaaaatcggccaatctaacaaggggggccgggaaagccctcgaaaaaaacaaaaaaaccgcccggggatattccgggggcccgggaaagaaaaacaccttgtttccccccgcggg

SEQ ID NO: 122933 - DNA, 474 bp, Arabidopsis thaliana columbia
acgtagacatgcacgcgtacgtaagcttggatcctatagagcggccgccctttgttttttttttttacaacaatcttacttattttataggttggatggcggctcaataccgtcaaagcaaagaaacaatactgccaatccattatcactaacaaaacagatggttctaatttaagtgccatgattaaaaacagggacgtactttttcaaagaggcttctcattgatcaggagctttgtttccaactcttgataaggtctataaactttctaaatgcctcataacaaaccttgaagtcccaagggaggcttaagggtggtgctggagcgacataacattcatttccccggaaagatagacccggccagcttccatcattgagattgacatgcggaacttctacccccccgcgaagagaaacctggatcaaccggcatatgtgcagattctgaaacactgatctccacctcgacc

SEQ ID NO: 122934 - DNA, 550 bp, Arabidopsis thaliana columbia
  unsure (1)..(550): unsure at all n locations
atgatactccaggtgcatacgactcactttanggaaagctgctacgcctgcaggtaccggtccggaattcccgggtttacccacgcgtccgcgttgacgccattttcttcttcgatcttcttcttcctccagagaaaacaacagtggccatggcaacaaggactctaggctttgttttgcctacaagcttattttcccagcctttcttcgaccgggggggggggggatttagggtttttgtcatgcggggggcacttctccacgcatttttcccacttaaggggtgggggaaaaccttggacttccccccacgctaggcttggttaaaagaaggtcttttgggggcccctaaagcttttgggccccccgaaccccgtattggcaaatgggggtttaacactccctggngggggattcaaaaaatttaaccgaccctttttgtggggggggatttgggcctaaaaacaaccccacaaagggggaacaccggtgccacccctgatagaaaaaaaccgggggcactctttttttacggggtgggggaaaaaaa

SEQ ID NO: 122935 - DNA, 496 bp, Arabidopsis thaliana columbia
tgcacgcgtacgtaagcttggatcctctagagcggtcgccctttgggttttttgtttttttctgtgggggaaaatgcttcatttactgtgaaaattccttacgtgtggacattcaataatatagctttgacaagacattgactccggccgaaaagaaaccaccagaaatctaatgagattctcaatcgcaaattttttttactgaaaggtggccaatcttgttagagagctttctttacctcgaaaaagttggagcggtcataggtcgctgaatcaaaggcttccggggaggccacaagacccgcaacacctttatttgtaacccaatttaaagtttgggcgaaatcccttgaaatccttcaaactttggtggatagtatttttttaccgctttcttttgcgcgtcttggtcaattcctccgaattaaatgcctaaacaaactgctataacctttggcattctgtaatggggttgaatcaacaatcacccgtggtg

SEQ ID NO: 122936 - DNA, 348 bp, Arabidopsis thaliana columbia
ttctttttaaaaaaaaacatatagaacccgaataaaataagatgggtttatagacggagaggggggaatcgctttggttttcgtcttatagcgacaaaacaatttatctcgggaacaggaagaaacagagggggcattttctaaaagaaaaacaggggccccactttttttttaaaagggcgtttgagagaaaaaaaaaaagcccttccaccttctcttacaaaagatttcaaaaggggggtcaatagcacgccgagtgtggggcataaaacaacaaacggacataatttctttaataagaaaaaaaaagaggggcgcgggcccttagaaggagaggggggaaaaaca

SEQ ID NO: 122937 - DNA, 435 bp, Arabidopsis thaliana columbia
  unsure (1)..(435): unsure at all n locations
actcactatagggaaagctggcccgcctgcaggtaccggtccggaattcccgggtctacccacgcgtgcggtgtcgtacaaaatacaaatgaaccgcagaaagtgaatgggtttttgctggnggcctctactgctggatatgcatatagcgataaaaatagagcctggattggagctatgggtgaaaaattcagaggatgacagggccgcccatttattatggggggggggaccggaaaccacttcacttcctacaaaaatttctcgggggccataaaccaaattttgggaaaccccaaagaaaatattggggcgtgtattaaaaaccccgtaaaaaattagggggggggaaattttttggtttggttcccttgtacccttgagggccccccctctttttagatgggagggggggggccggggttttagggccct

SEQ ID NO: 122938 - DNA, 509 bp, Arabidopsis thaliana columbia
gacgtcgcacgcacgcgtgcgtgagcttggatcctctatagcggtcgccctttttttttttttttgagcaagctgccttgcagcgataggttcataactaagataataatatttaagtggtgggtcgctactctatagcatctccagaatacaaaagatagattgactatttcgccgctttaatacacggtttcttttgaacaaacaccatccttgcaagaaaacaattttttttaattttctgggagatgcggccctaaaaatctgcaatctatcatcccgtaagagaccgaacatatccgaaccattgacgggaaattatttcacatcttggaagcggaagaaaaacttgccatggccacccgtggaaaaatataaaaggcgaaagatctttgaaagaagagcccccaagggggcctggtaaaagaaggcaaaaaggggttccctttcccccccaaaaactaaaaacgcgttttctttggaaaccgggggggacctccaatagctgg

SEQ ID NO: 122939 - DNA, 526 bp, Arabidopsis thaliana columbia
  unsure (1)..(526): unsure at all n locations
tacgactcactatagggaaagctggcacgcctgcaggtaccggtccggaattcccgggtctacccacgcgggcgtacagtcccgactcanccctcattgactcaaacaggagtcagtaatantaatagtaatggtgtagatggatttcatgtttgtcacaagagaagaggggttgattcttattaccagaaactatcctcccacaagctattggagatcctcttccgtgggggggaacaactattatagactttgggggggaaaaggaaccacctttttgcatgttggaacaacccccctcgggaacttatcttgcaagaaccttttattttttttttttctcaacggtggcctttggaaaacctttttcccgtttaagaagggaaaatcttgcccccaaagggttccgacccgctccgcctttttaagggggaaaaaattgcaaatttttaggaaccattctccctaaaaataaaaaaaaattttccccttcccaggggggggttttttaaaaaaacaccttttt

SEQ ID NO: 122940 - DNA, 408 bp, Arabidopsis thaliana columbia
actctagaagatctatgacgtcgcctgcacgcgtgcgtaagcttggatcctctagagcggccgcccttcgctttcttttttttttttttttttagtttttcttgtgtgtcttaccttccttatgttcggaagacaactcttattccctcgagaaacggtcattctaaaacccgcgtttgcaggacggaagcattggctatggagagagcgctccggggttcagacaggtcgagaacttaaaggatgccgaggggcagcttcaccaaaggctgcaccatatgtttgaagctaaaaccaagaacctgcttaatttgttaaaagggtggaaaactttctgaacttggagtaaaacttggtatgacggcatcatccacccctccctggggtcagaaaatgcccaggaaaagc

SEQ ID NO: 122941 - DNA, 409 bp, Arabidopsis thaliana columbia
tatagcaagatttatgacgtcgcacgcacgcgtacgtaagcttggatcctctagagcggtcgacctttttttttttttttttttttttgaagaagtgctcatattatatatctcttattgcttacacacaatacttacaaatcagaaaacatgtgaaggagagagagctaacatggcagaccttacatatacatttaaacttcgaatctattttgcttatgacaaaaaccattttttcttttcccatcttaatttaactcacaaggtataaacattggtttccttttcgggattggggcccaacctaaaacccgggtaatacaccattgggggttccccaatttggggctttttgacccctttttggtttctccccccccttgggaaaaaaaaaaaatttttcaaaaaa

SEQ ID NO: 122942 - DNA, 512 bp, Arabidopsis thaliana columbia
actacacaagatcttgacatcgcatgcacgcgtacgtaagcttggatcctatagagcggacgatttattttttttttttttttctttttttgcgctcaagagacccttttgaatctgggttccaaataatgtttcttacctaataaaacttatgccgcttcttctttccacatacctcttgcgcgtacacttcccccatgagtacatcaaaaccttccctttttgcaaacgcaggtcactttttcttttcttgtgcctttcgctgagaatcacttcaaggcaacttaagtgcccaaactttgtaacacaaaaatccaaagccctgaaatgctcccagaggctttcttatcaaccatagggaaaggtgcattcccccacttttccaaaactgtataacaaattgattcttcataccctcttacccctccggtcacttttgacaacggtcgccacaacctgaacgttttctaccgacgcatctgtaccttttcatgtaagtctaaacccaatca

SEQ ID NO: 122943 - DNA, 537 bp, Arabidopsis thaliana columbia
  unsure (1)..(537): unsure at all n locations
aggaaagtcctccctgcagtacccgtcccgattcccgtgtcacccagggggcggcccccctacttacannntnaaaaaaaaaaacaaaaagggcttataaaggaaattttcttctggcggcgccggaggtttaagacccggcccttacaccttaaaaccataatatccccttggaggggtgaagattcctttcaaaagaaataattttttcccgggggagaagggaaaccaacacaaatttttggtttcccaccaaaaaaaaacctctccannccccccacccccaccacaccccccctaaaatttttctaattcccaaaccccccccccatatttcccacaccaaacaacaatccccccttaatatcccaaccccccattctttccaccccccccacttcctcccaaaacaccactctttttaaaaaaacaacattccaataaaaaattnctctccccccttcccccccctcacccattcctcctaccaccccccccctctctctctcttccaacccaacatccctccaacataac

SEQ ID NO: 122944 - DNA, 472 bp, Arabidopsis thaliana columbia
  unsure (1)..(472): unsure at all n locations
ccagctcctaatacgactcacttaatggaagctcgtacgcctgcaggtaccggtcccgaattcccgggtcgacccacagcttcgcgcacgcgtacnatcattctttttntcggatgggaaaaaaagaagaaggggagatacttctgatcttacaggattccaagggggtggcttttttccttttctcgaccccaaccaaattttttttactaaactccanaatttttttttaaagaggggggggggcccttctttttggtccatttccacaacaaaaatnggcgggcacaatccttngtccccaaaaagtaaaatttttaaagggggggcaaaagttccctctttttgtttaccccccttgcgagggcccccccaccaggaacaaccccgccccaaattgggttttaaaaaaggtttttttccgcgcaaacaagcaaggaaaaaacccttcaaaattttaacccctctcccc

SEQ ID NO: 122945 - DNA, 490 bp, Arabidopsis thaliana columbia
tttgacgtcgcctgcacgcgtacgtaagcttggatcctctagagcggccgctttatgttttttttttttttttttacttttttaagcagcctttagctgaaaatcccttgccattttccttttttactgagtctttacccttcgttggtttaaaccacaaggcacatttgatttagacaacgaagttaattccactggaaatgacttttttccaatgagggtaatcccgtccggccgcggttaatgttatcacccagccttcctacattaggggaagttgaagtgccccttttgacgatggagaccaagaaactggtggcaaaaaaacctagggataaagtggtcaagaagagcccagcgcttatagattttattcctttaggggatggggtttgaaaaaatcaagttggccaggggagataaaggtttctccacttctttttaagaagaattggggaacaagtaaaacctcctttttggggaatggttt

SEQ ID NO: 122946 - DNA, 561 bp, Arabidopsis thaliana columbia
agctgcaatacgactcactttagggaaagctgctacgcctgcaggtaccggtcccgaattcccgggtcgacccacaccgtgcgtacgggtgcaaaaaacagaagggtacggctgccaaaaaaccacagaagggggcttctgtggctaacaaagagcaaacaaacacttagaagaaactaagaatcctctcatcacggcgatataaaaaaaaatggaaaccaaagggatctctaccgggtgctggtccccaaaactacaaaggaccgccttaacaaaaaatcaaaacgcgggggttggaccactccccctctttttcttggaaaaaaaagttgggagaaggctttccacccattggaataccccgaattttggcaccctatttggagggaaacaatgcttctcccaagttcacccctcttccaacatgtggggttgttattaaggggccccttcctttcctccattgcttcgccgcgggggttttttggctaactcccttcccggcgccgttaaaaaaccatggtgcttttttccacaccttccacccgttgggaacctggg

SEQ ID NO: 122947 - DNA, 455 bp, Arabidopsis thaliana columbia
cgagggggggcaaaacccccgcaacacagcataaagagactcgcaccccgacctaccgcaaagacctgaatttttttacacgaccactggcccgcgcaagacataaaaattcatgagacgataagacccacacacaaccccgctaataaacaaaatacaaaccaatttttctaaccgggggagcacacgcgccaaacacccccacactgcaaccacaacacaccacacccagtcccacccacaactcccgaacacgggcatcggcctaacaccacacgacgtgacaacaccgacacgaccccccatacatccccactctcccctacccttaaaccccgggagccactattcgacccgcgagaaagataatacaaactcacgcgtaagacaaagccacgccaggggctagattagaaagaagtaagctgtagaataattagagaatcgaagtaaac

SEQ ID NO: 122948 - DNA, 188 bp, Arabidopsis thaliana columbia
  unsure (1)..(188): unsure at all n locations
gggggagaaaccgagaagagacgagagcggcagncgacgtcgagtagcacacaccgttttccaaacgcgtaccgacgaatgagtcccagggcactcaagcgccgaataccgtaggaacgtcgtgcacacaacccgacgacacttcgtacgtagatagcgccctgctcgcaggatagtaggacagcaaa

SEQ ID NO: 122949 - DNA, 604 bp, Arabidopsis thaliana columbia
  unsure (1)..(604): unsure at all n locations
nnnnnnnnnnnnnnnnnnnnnnnnnnnnnnnnnnnnnnnnnnnnnnnnnnnnnnnnnnnnnnnnnnnnnnnnnnnnnnnnnnnnnnnnnnnnnnnnnnnnnnnnnnnnnnnnnnnnnnnnnnnnnnntatttttttttttataggtgggcaccctcannaattcaantgtcacgtgggccgcgcgcggtttttaccaacggggcggaggacgtggggaaaaacccccggggcggttcaccccaaactttaatctcttttttcaggggggggcggggcttttcccccgggtgggggtaaatagaaaaaaaaggcccccccacctattccccctttcccaacaagttccccccctcctggaatgggcgagagggggccccccccctttttaancgggcaccattaaagcgcgggggggggggtggggggggttcccgcccaaggtggacccctttcctttggcccggcgcccttaggcgccggttttttttgagttttttattccttttccttttttgcgccgcggggcggcggtgttttcccccaggaaaagctttaaaggggggggggcctccctttttggggggtcccatatttaggccgctt

SEQ ID NO: 122950 - DNA, 436 bp, Arabidopsis thaliana columbia
gcgtgcgtaaacttggatcctctagagcggtcgacctctttttttttttttttttacaaaataacttttgaatgatttcttcacatgggcgccatatatacattaacaagacaaaaaagggacttaactcttaatctatgcatagttcttatgacatccataatctataaaatgttcatatcctatgtttttttttaccaggagggaacatcagagaagagtttattcattaagggtgataatcttcttttatttttaaaaatgcctctttcgaatggataaaacacagagactacgtttcgttggccctcacctaaaaaacaaaactctacctcgataccaaaaaaaatggtttaaaaagagtggcctgaatgtttttagatcttcaaaaaacgttaatgcgctaacaacttaaagtttgttttgcattttttta

SEQ ID NO: 122951 - DNA, 507 bp, Arabidopsis thaliana columbia
  unsure (1)..(507): unsure at all n locations
actcactatagggaaagctggcccgcctgcaggtaccggtccggaattcccgggttgacccacgcgtgcggccacgcgtacaaaaagactcttctcttctctcttcctctttccttcacacaactctntcattgtactctctgggttttttctttaagcataacatttttttgaagaacagagattctttttgtttgtgtaagagatgggaaattttttatcgggggggtggggctgccttggttctacaacctcctgaaaggaaagacccatagatattacgggcctgtatccgctaatgggatcatcgccttttatcctggtcactacgttcttcttattattcctttgccggaaaaaaatattccgggaccaccacacccccaattatataatggacacaagggttggaggttcaccccgtaaaatttttcaccaacgaaaatttttttctgggaattcttaacctctatcactcccagaagtttgagggtttaaaacccaaaa

SEQ ID NO: 122952 - DNA, 512 bp, Arabidopsis thaliana columbia
tctagaagattatgacgtcgcctgcacgcgtacgtaagcttggatcctctagagcggccgccctttgcgttttgactttaatttattttattttttattttgtcctctttcaaaaacccttccgcttaaaccctaattcacttcgccggccatgtcttcactcaaaagaaggatttccggcggataagctcttcgctcaaggatactcttacacctttttttacggcgggtttcttcctcacttcatcgatttctccacagacgctgtttgtatatccacgcgccttacccggcgcgtgcctctctccataccttgcgtttttttttccaatggaacccggtcggaatctcacatggctgcttgtatggcttttgttggtgggattggaaacggccactataactcgggcatcgccccccaagcttggaataatcccccagcctcggtggctcatacatccgattggttcccacgccggtgtgaaattccctgagcatgagactacttcttt

SEQ ID NO: 122953 - DNA, 486 bp, Arabidopsis thaliana columbia
  unsure (1)..(486): unsure at all n locations
nnnnnnnnnnnnnnnnnnnnnnnnnnnnnnnnnnnnnnnnnnnnnnnnnnnnnnnnnnnnnnnccacgcggcgcggacttcaattcaatttactttcgattttgtcctcttccaaaaacccttccgcttaaaccctaattcacttcgccggccatgtcgacactcgaggatggatttccggcggataagctcttcgctcaaggatactcttacacctacgacgacggggggggggttcctcacttcatggatttctccacagacgctgtttctctattccaggcgccttagccggggcgggcctntcttcataccttgcgtttcggctccgagggatactgtttccggaatctcacatgggctgctggtatggcttctctgggggggatgggaaatcccccactataacgggggcatccgccgctcaagccttgattattccccaggttaaggcgtttaacctccgattggttcccacccgcgggg

SEQ ID NO: 122954 - DNA, 520 bp, Arabidopsis thaliana columbia
ctatagaagagttatgacgtcgcctgcacgcgtacgtgagcttggatcctctagagcggccgccctttgcgtttttccactttttcgtggacgcgtgggatttgattttgctacttcaaatttgtaagaaaacgtgaataaattccgagaaatcacagaattatttgatattttgcaaatcaactaatccctcgctgtagaagagcaaattaatacactcgttctaatgactgggggcattttttttttgctaaacttcaggatttaactcattcttcttcttgttcaagtgggtgctgattctgaaatctctttcttaataacttaggtcttgggtccatagggcttgaagaacttacattgaaatgtagccatctctttcaaaacactaatgaggttgctctctatttcttcaccggtcggctcaataacttctaagcaccgtgccacaggctgcggggtaggttcccatccctccgaggggggtacttcctttagcacaagcctctgaatcgttaga

SEQ ID NO: 122955 - DNA, 525 bp, Arabidopsis thaliana columbia
ttaggagcactatagaagatttatgacgtcgcacgcacgcgtacgtaagcttggatcctctagagcggccgccctttgtgttttttcattcttttattattatttttcttattaattttgaatttgccccccccaaattttgcggcaaattgaaatcccaatggggttatcatcccatccttggtaacaaaactttttttttcccaaaaaaagctttgcctttttttttctcccccaaataaggggctttttgttccgtggttcccaggcaatccaaaaaaagggtccttcaaatggggagtttaaggttatttggtgtaggcctttttttttttacttctagaccttgccccatgaaaacgattccccttctaaatgggatcccgggggttgctttcgtgccctggccattgtgttttaaggggagggctttcgaccatttgtgaaaaagaaggccccccacccctcctttagagatgacccttgtgggttaaaagaggctaaaatctttttatagggggcccc

SEQ ID NO: 122956 - DNA, 553 bp, Arabidopsis thaliana columbia
  unsure (1)..(553): unsure at all n locations
atgatactccaggtacnnnnnnnnnnnnnnnnnnnnnnnnnnnnnnnnnnnnnnnnnnnnnnnnnnnnnnnnnnnnnnnnccacgcgtgcgcgcatccatttatcatcatctccttataaatctcgaatctgccacagagagagcgtgtgacaaaatgagttcataagattccgttatcgtcttcctgattcctccaaatctccggcgaatttgcactctttacctctctttgactccttgagatgcggggattgttantttcttgtgatgtgtactctttgaagcaggggatttttattgtattgaggaacaagatggggtttgagcccttggattgggtattgcagcccggccccaaatggggtgtgactaaaactgggggtttatgcggttgggcgcatacaccgctttgggctatggactcttttgggcttgggatctctcatgtgggtgtggggattctggggttttatcggtggggggctcccacgaggggccccaaaggggataagttctgcttgggggctaaaggggtaactttttttgggggtt

SEQ ID NO: 122957 - DNA, 555 bp, Arabidopsis thaliana columbia
ggaacccggacgagaatgtgagaacggccgtagcgattatgacgcggtttggagaccgtggttgaagatatctttataaagaaagtggcgagtcgccgacgagtacactgggtcgtgttgcatgatgtatcgctttgcacacactatgttacgtgatctgtttagatgtactcactgggattctcgttactgcgttttacgatagtgtcgtcgggccgcccaaccccatattaatgcgagggagtgggccgccagatttttttttttaggagggggagggagtgaagatgagagcgataatttctacgataacacatcatcacctcgtatacggtgcatgcggtattcgtgataacttaaatgtcttgttgatgatgtgggtttattatatgtgttgcttagctcactcgtagtcgtccttcagcaaatactactgatctaaactttgacgtgtaggtaggtgattggataaggtgtgaacgggccatctcagtggagaactaggaattttcgcgttggacattcagaattaataccgcgctatgtagttttgct

SEQ ID NO: 122958 - DNA, 394 bp, Arabidopsis thaliana columbia
cggggggacaggccgtaagaggatcgaacgaagttttgagaaaatgcgactgactatcatcccccacagaacagggcccaatccatacagatcaaaaccataaactaacagaatctaattccacgagaaaaatatcacaaggagcggcccgccgcaaatcaccaaaaaatggatcactagcgatttttttaatggggggaggggagccaccccttttcatctaaagccaccaacatcaatcatccacgccacaagacaaaaaactgtgaaagcacccccaatacaccaccgacaagacaatatcgcctcttcaggaccgccaactgagcggagccactacatcaaccatttaccaaaaaaggggagcgagggatgtagcaccgactcggggccg

SEQ ID NO: 122959 - DNA, 477 bp, Arabidopsis thaliana columbia
tcactcagacccaccgccgcgcgccccccgcgcggaattattgggtacaacttacaaaattatgacgtcgcctgcacgcgtacgtaagcttggatcctctagagcggtcgcccttttttttttttttttacaaattatagcaagcatttcttgagttttgaaacaaaacactgttttacgtgttcacagcaacattaataacaacaacaacaacaacaacagcatgaccgttttacaatacagccaaaaggcagaagcttaatcctgattttacaaaagacaggtaatctcacacaaaggaccaattgatgaacacaaagcaaatgccatgaacattttcttatttattgagtacttttcaagaaactggtttatcatacgaaactggtcttcccatgcttgagagacatatcccgccttgaaagaccccgaaaccctgttgcttgactgggggaacccaaaccaaagagttttttt

SEQ ID NO: 122960 - DNA, 523 bp, Arabidopsis thaliana columbia
gcacgcgtacgtaagcttggatcctctagagcggccgccctcggggttcgtgtagattattttgatgttcagttcggagacacctgcctgtattaaacaaaaaataaggttttaagacgctccgccaatccacctgtttttcacgctttcaagctgacgcattgcattaagcaccccgggggaggaaagttgggaatttttttggggcgggggaagaaaccatccgccaccccattgttttaacgcctatccacaatgaacctcgaagagtcccaaagggagggagggggtttctatggtttccccaagaatccgggcctttcccttaaccaacttgggggggattaacaccggtgttgaaaataacccacaagcggggggaaggggcccaataccccgtctcaattttggggagggggggtaaaataagccgcgccaagggaatttttctccccgttcactcgagctcgtaaatagaatctccttagtcacccccccacactctttttttccctttcaaaaa

SEQ ID NO: 122961 - DNA, 543 bp, Arabidopsis thaliana columbia
  unsure (1)..(543): unsure at all n locations
atgatactccagctacatacgactcaaatagggaaagctggcacgcctgcaggtacccgtcccgaattcccgggtctacccaccggtncgggggagatcaaataatnttnacccccgatcaccccgtgaatcatcctcaccggagagatttgtgcccctccccccttccaacccccaaacaaaccgggagggaaactcttcaaaaaaaccccccgaaaaagggaatcgggaatctttttttggggggggtgggatncccttttttgatttttaacccaaaaactaaccaacccctttaaacccattggttgctctttatttaaaggtcccgaaaattggcgcgaaaaaaaaaaaaacaacttctttcttgtgttagttgcaaaacgccctgtttattccccaaacccgaaattttttttcgggggagatggtggatcgattgggggaccttggcgttccggccgccacttcaccaactttaattgttcggtgggcggggctcataattaaaccaccccacttactaactcgggggcaatccgt

SEQ ID NO: 122962 - DNA, 411 bp, Arabidopsis thaliana columbia
ggagaggagaagatgaagtggaagccgccccccgcccgccgacacggcgagaggcgcgcgagacccgccggccgcgacgcccgtgcgccgcgcggcgacgccgagagaccctttctttttcgggaaagcttgcccgccagagggagagcggcgcggccgaaaaaaaaacccgccccggcgcgggcggcgcccggacagcgcaccgagcggacgggacggccagcgcccccacagcagccgccgaacgagcgcaccaaccgcgccctccggacccggaccgctctgctcgaagggccgcgcgcgccgccgcaaacggagaaggagcgacgccgcgcgccgcgcgcaccgggcgagtagagggaaaagacataaaagagggagagagaggcgcgcgaacgcggacgagacgct

SEQ ID NO: 122963 - DNA, 543 bp, Arabidopsis thaliana columbia
actatagaagataatgacgtcgcctgcacgcgtacgtaagcttggatcctctagagcggccgccctttgggttcgactttttttttctttcttttctcttgatttgattcgttgaaaagtaaaatcataatgttctcaatacgctttttgtttttgatttctaagttccatctcccctaatttgtgtggtaatttttacgagcggcacccaccggcctcttttatgggggccccccctttttttttttttaatgggcccccttggttttatgcgccccccaaagaaaaaattttttaaaaaagagagggggaaacccctttaaatgttggggggaaagccccctacaaaaaaataaaacaaaaaccttttggtacaacgccccggggttttttttttaacaaatttccgggggggggccatactggaaaaacccctaggccgctcaaaacagagttgtttatccccccccggggggattatttttgctaaaaaaaaacaacagcgttttttttcttttttttttccccaacaaaaaaaatttt

SEQ ID NO: 122964 - DNA, 582 bp, Arabidopsis thaliana columbia
  unsure (1)..(582): unsure at all n locations
atgannnnnnnnnnnnnnnnnnnnnnnnnnnnnnnnnnnnnnnnnnnnnnnnnnnnnnnnnnnnnnnnnnnnnnnnnnnntacccacgcgtcgcggggttctctatactatatctctctgaaggannctngaaaagaaaatcaaagtctcaatagctttgttttgattctagttccattccacaattgcatctaattctcctaccggagccttttcttctttatttgtcatcaacaactcctattattgatgggggggggnnanaaatccgagcggaaaaaataataatatttcaagagaggacctccctctccccctttttcgcccttggaaaggtggcacccctagagggcctttcaagcaaatcatgaggggaaacattttcttgatctttcttttttagaaaatctccacgtttttggggcaatcatggcaaaccccttggggggacaaaccacaagggggtttagcgggggagggggggacctttcgggctccctcaggccaccaccaaaaaccactcacccccgagggttttcttaccaaaagggagatcttggaaataccccctaaattcaagac

SEQ ID NO: 122965 - DNA, 610 bp, Arabidopsis thaliana columbia
  unsure (1)..(610): unsure at all n locations
accactcacatatatggaaagctggcacgcctgcaggtacccgtcccgaattaattcccttgttccacgggggtcagtggccaataaacaaccttttttttttttttttggagtgagaacgcctgtcaattccaaaaccaaaaaatattcacatcacccccgagactgtggggggttgttcaaaacaggaataaattctttgaccattaacacctaaccccanaacccaatatttttattacagggttggttggggccncccctcacggggggtggcccgaaaaaacacaaaaaaacaccacatttcttcccctccctggggggggacccccccccctgtgcttataaagactaaacacatccctccggccccgggcgaaagcgtttttttttttctctacccccgcaatctctttcgcgcggggggcttggcgatcattcccccccacacaacaggaaaatctccctcccaaacacccaccttttctcttttgtgggaaggaggagagaggctctcccagagaaatgggcgcaccctcttcttgcgcctcccgccttaaaagggaaacccatctcttagaaaggagagacgcgtctttcgcaaaacgcc

SEQ ID NO: 122966 - DNA, 202 bp, Arabidopsis thaliana columbia
ccctcttgttttcttcaagagcagaacagacggcgccgtgctgtatcctggtggacattcgcgctcgtcacttttttcttctcacgggggggtaagagtttagtcatataaaatatcgttcgtccgcgtcttcgcattctcacttgtctcacgctctcacgtctctgggagtgtgtctagcctcacttttatgcactatcct

SEQ ID NO: 122967 - DNA, 449 bp, Arabidopsis thaliana columbia
  unsure (1)..(449): unsure at all n locations
aaaaaacaacggccaccccacacgccgcccacaagcacaacgctncgaaccacaaccaccagctacaaaaccagaaacaaggaggggcgccaactccccccccccgaccccaacagcataaccaaacaaaccgcagaaccaaaaacacctcccgaccactacacgacacaccgaacacacaagtgacacccacacaagaagacacacacgaacgaagcacgcaccagcactccacccctcgcacaacagagagaggagggaggctacctcaacacaaaacggaaaaaaagaggaaaagacacacgcaactacaaacataaacaaacccaagaccatcccagccccccccctcccaggacatcacgcccctaccgaaaacacgcacaccaagaaaagagtacgatagagacaaaaccaaaagaacaaaccacccgaagacacaacaccga

SEQ ID NO: 122968 - DNA, 238 bp, Arabidopsis thaliana columbia
tgctgtttaataaaagtcgtacgtcttcttattgataattctcacaacactaattttagtagttcaccaccattatccccctctcactactcttcacttcaataatcatctaatatacttaccttccataatcacctttaacttaatgtatcttattgaggaggtgtgttttgttactctcctcatctttcctactaactaacaataaatataatatccccattatcgctcttattcc

SEQ ID NO: 122969 - DNA, 551 bp, Arabidopsis thaliana columbia
  unsure (1)..(551): unsure at all n locations
gggggggtaatatctgccaggtcacatacgactcactttanggaaagctgctacgcctgcaggtaccggtccggaattcccgggtctacccaggggggcgggcgtgattattaaccttttggctactagcctccctaagagcgcaactttcttcctgacctacgttggtctcaagttctttatcgggtatggccttgagctgtctcggatcataccctttgtaatcttccacctgaaaaataatttttttggggggggggacctgatgtcaaaaaacttggtacccaaganacttaagctgtgcgactagggttcccagaaacatgctcatccctacaataacggtttgctattcaagcattggtcctcttatcctcatatgggggatcacctactttggtgtaggcgggctatgcctaagaaatcagggcgttaaagtggccgttcatccttcggaaggctttgggagaatggggggctttttttcaccagcgcttcctagcgggggttgttttttttccaggggggaatgtgtggcttttaaggagcca

SEQ ID NO: 122970 - DNA, 501 bp, Arabidopsis thaliana columbia
  unsure (1)..(501): unsure at all n locations
atcgactgactttagggagctggtcccctgcggtaccgggtccgagattcccggtcnacccaggggggcgggtgtctataaatatctaantatcancaaaaaaacananatttatagggagagaaaaaaactgtggctgacataaagatgtaacagagacagggggataggcccacttccccaccaccgaaggttggatcatcatcataatcatcatcatgggaggggggggcggatcataacggggggcccaattaaaatatacagcgtntggattcttctacctgctcctcttccactggcttagggataatctctactactgggaaacgtaactccgaacctaaaaagcctccctcttaaagaacctttactaaagaggggacccccaatgtgaggggggagggccgtntgatcccgattgctggcatgggggctgaacgggtttttaagtacaaggggaggggggggccaaaggcgggggggaacgtggggaggggg

SEQ ID NO: 122971 - DNA, 406 bp, Arabidopsis thaliana columbia
  unsure (1)..(406): unsure at all n locations
gctctcattacccacttcacttttangggaaaggctcccttcccccctcccccggtaacccccgtccccaaaatcctccggttttttcccccgggggggccggggggggaaatacaacacaaaaacggttcctccgttccaaaaaaacacccaccacaaaggggtgtaacatcttccgaagtgtttttcaacatttttttctgtgatcatatttactcccacgttcttgggaaacaaatgggtttccaacattacccaaacattattgttgctttttctcttanaccccctttctttttgagggggggcgggaattntctctcttttaaaccttcttttttacaaaatataanttntctcttcaaaacgttattttctcttccccctccacccctttttcttcctc

SEQ ID NO: 122972 - DNA, 513 bp, Arabidopsis thaliana columbia
  unsure (1)..(513): unsure at all n locations
tccnnnnnnnnnnnnnnnnnnnnnnnnnnnnnnnnnnnnnnnnnnnnnnnnnnnnnnnnnnnnnnnnnnnnnnccacgggtncggggcgggtgggagaanacnacanaagggtctgatgaatcccttcagagcgatgcagccgggagattgccagtcacacttgctctcgctagcttatggctccgtaaaaactatgctgataccggcctggtgagagttgtggattcattaccagaggggggggcnaaggtanacacttggatcgaaaatgtggtgtttgaagaaggtaatgcacacatccttcccctctttggctggctcatcacaattctttatctgcgggaaagacaacgtaaaccagttcgctgttgttgcccatcccaggggctggctgacggggcaccaccctctcgacgctgatgtgggcccaaccacctgggtgggttcccccggggatcaaatggataatgcggtttcccgacttggaataaccaaaaaataatgggcttttg

SEQ ID NO: 122973 - DNA, 510 bp, Arabidopsis thaliana columbia
cacccaatttttacaaaaatttgccctccctcccaatggggggcgatcactttccctcaagtttttcccatttgctgaataacggatttctgatcgtcccttaaaaaaaaaaaatttaattccctaaagcccttaacgtgagactaatatttttgtgggggggggggtttccacaatacgagaggccggcaataaaaacaaaaaaatttttttcttttttctttttcttggaacagcctcttgctcttcccttatttattgtgcgaaaaggaaatttaaagaaaccctcacatcatttctcttacaaaaaaaataaaaaaactttccgcccctcaataaaaaataacatcccacaacctctctcccaccgctttctacaagtttttaaaacacatgcccgtcacctttttgttttcaagacttcttcaaaaaaatttcacaaccaacacaccgtttaccttccgcgaatatttatttaacgtattcttcgggggttctgtaattttttca

SEQ ID NO: 122974 - DNA, 568 bp, Arabidopsis thaliana columbia
  unsure (1)..(568): unsure at all n locations
tctccaggtacantacgactcactttagggaaagctgctacgcctgcaggtaccggtccggaattcccgggtcgacccacgcgtgcgggcgtttggagcaaaccccaattattccatagaggaattttacaaggtgtctaaactatagatgggaaagacctctaaattcttggttaatagtttctcatgcaccatgtgatgctgtgggatttagtgagtaagtgaaatgtttttgctttggggggggtgtgaacatgcctggtttttcttctaaaaagaaaccggtcaagatgttcgtttttggcaatcatgatgcaggagcagctccctgaaaatctggggggtgggcgatttggttttcaggaaagcaccagaattgtgggcttttttatacgggggaaaaactggtggggggcaaaccgttgggtacttgggcccctggtttataaaaaaagggggcggggctttttgttgtggtcgcttgaggggtggcttggaaacgcggggggggtttctttgttctgaaagatcccagggccggggtcctttgggggaggaccctcgcgct

SEQ ID NO: 122975 - DNA, 558 bp, Arabidopsis thaliana columbia
cactcattttaggaaagcaccacccctgcaggtccggtccggaatttccggtttgacccagggcgcggccccctttcctttcgttgttaaaaaaccaccgaagggttcggcttgttaaaaaaactaccaaaggtgctggctttctaaaaaaccacccagaggggccccccttctttgcgtcgtaaaagaatactgcgggcttcaacaccttggacccctttttctttttgggggggggggtgttcatctcggcgcttcgtgccttcaaaactattggcacttccctccacatccacaaaaaaaagtccccacacaagaatcaactcttgccctcttgtatagcggtatttcgttctcgcggctcttacgtcgtcttttaagaaaaaattctaccctactcgtcgtccttcccgtgagccttgactgactcggtgcacctactttcgcctaccttttcctcctatatgatataattcggtccgcctcctactgttcccgctctcttgttgtgtaccatcggtacgctctcttaccacctttttgatcgtcgatacgaca

SEQ ID NO: 122976 - DNA, 634 bp, Arabidopsis thaliana columbia
gacccgaccccgcccacgcaagacgcgccctacaaaaccgcccacagacaaaccgagacacgagcaagagagcaccaaacgaaagaagggagacgacgtttggcagagaaaacaaaaacccacaaggaattttaaagagagggaaaaagacccccaaacaccaggccgagaccgccgcagcggtggcagcgacagcactcaacaaccctctaaccacctcccggggaagaggggaaaaagcaccacccccccacaaaaaaacaaaaaaaaaaacctcccgagggggggaagggtgcgaaagggagacaatgacggacagcggcaaccagccgacaaagccggccaatagagggagggaagcgagagacgctagaagacagggcaggacagcgcagagaagacgcaaagcaacgcaccacgcggggaacgcgctccaaccaccaaggaacgaaagagagtcggacagacaatcgaacacatgacagacgaaagagcacgaggacgagaaccacgcgaacaggcaaggcagacgggacacaacaaaaaaatagcaacatacccaaaaggggggggggggaggggcaccaaacaaccacgacaaacgaagaggggggggggagcggacgaaccagga

SEQ ID NO: 122977 - DNA, 484 bp, Arabidopsis thaliana columbia
  unsure (1)..(484): unsure at all n locations
nnnnnnnnnnnnnnnnnnnnnnnnnnnnnnnnnnnnnnnnnnnnnnnnnnnnnnnnnnnnnnnnnnnnnnnnnnnnnnnnnnccacgcgtgcgcggttcgcaccactaccttgtctccgtcagttgaaaccgaaacacatctctatttccggcgcagcggcgaataaaaaatcggagactgtgacggcgccaacaccgggagcctaacaataattctcgcgtggacggaggaaacctattatgaagtgggggaaggtctgctcgtggcttcaaaaaaaggcgttaaacctagggcagttcactggatgggtgagtcatgccattcctggccctcgaattgggaatacccaatggccggggatgctcgcctattcgttaggttacgcgggatcactttcgggactggtatacccaaaaccgtccacaaattcccttctcctaaagcttacgcaagaaaccggggaaataaaatgctatgcttgcc

SEQ ID NO: 122978 - DNA, 474 bp, Arabidopsis thaliana columbia
  unsure (1)..(474): unsure at all n locations
ctgcaggtaccggtccggaattcccgggtcgacccacggggggcgggccgcgtacagacaggttgacaatcatcggaatcagcttattcagggtgcgtgaatgtcgaaagccaaagtttttttaatatggcatcttcttttggggatcatcttcaaaatcctgcgagggggagctagggttaaggtctggaacaagtggggggggggtngactctctggggggtggaattttaaggatgaacattccatacacatgggaacgacgggcatgggtacatgttcaaatgcgggggggggcttgacgggggaccctttgggtaggcgggtttgggatcatatgggcccccgctagggacaaaggacttgggggatcttgaggggctgatttgggttaaaggggagattgggaagggggcttgggccaatcttggtttcgaatattatacctggggggcgtctgagttttaaacgagc

SEQ ID NO: 122979 - DNA, 541 bp, Arabidopsis thaliana columbia
atgagaaaaaagaggagtatctgccaggtgacaaacgactaaccttagggaaagctactacgcctgcaggtaccggtccggaattcccgggtcgacccacgcgtggcgggagaatggagaagaaaacctataaacaaataccgggcttttttttttctttttatggggcgccaatctctggctgttgggtccccgccgccatcggggactgggcccagccctgctgggtcggctacctgccttgctcctggctttttatttcagggcgggggatggaagaactccgggagccttcactaaaaaggaggaagggttttgggtaaccctggtacgcttccgatgcagattgggagagggatatctcccacaagcatggagcccgtgggatttaaccaaggttttccaaagggacaacctccgcgaccaaaaacgcggactttcttcagggggcgtaagaaaagaaaggccccgggaatgggggcctagcctaaatccgcccccactctacaaagggggtgcgccggaaagccatcgcagaaaa

SEQ ID NO: 122980 - DNA, 518 bp, Arabidopsis thaliana columbia
actcactctagggaaagctggcacgcctgcaggtaccgggtccggaattcccgggtcgacccacgcggccgggggagagtattggatcaaatcattgattcattaactcgggtagctaatccaaatgaagattatctatccccacatagagaagcaaataaaatctcactgaagattgggaaaggccagcaagaaaatgaaataaaagagaagccttttattgacgaggggggaggtgtttttattccttggaccgaacaagtgtgtccccccactgctgatttcctaacttcagttaaaaccattttggccccaggagggggacaaaaaatttttcggggcaaactttgaaaaaaaaccagtgggtccggggatgggccctctttgtttctaaggggcccaaaagaagggggaggtttttaaaatgagaaacggttgggctaaattttccgatgggaaaagcctctttaaaggtgtctccacgggggaggccgcctaagtcccaccgggggggggtg

SEQ ID NO: 122981 - DNA, 580 bp, Arabidopsis thaliana columbia
ggggggggggaggatctgccaggtgacaaaccactaacttagggaaagctcctacgcctgcaggtaccgggtccggaattccccggtcgacccacgggggggggggggggaaattatttattacttcctcatacataagctggcggaaaacccaactcttcatatgggggggtctttgacacctaccggattttacttcattgatgcgaaaggttgggaattaataaaaaaaaaaaacaggctttttccttttttttggggggggggaccaactttctattaaattaaaaccaataatttttgattttaaaaaaaaaaaaacaaacacagccacggcctcctgtacgcaattgcttatgtgcggactacgggtcctaccgccgccgggggggcggcgctttttaaaaggacccgagcgttccggggccgccgcgagaacagcttaatttctgttgcagggggcgcgcctactccgaggccggggccggggttgtaacacgggcgggaagagggagaaaccctgcgtgccggccgatcagagtggaggtaacacaacgtagtcgctttccggggggtggaa

SEQ ID NO: 122982 - DNA, 558 bp, Arabidopsis thaliana columbia
  unsure (1)..(558): unsure at all n locations
ggggggggggggggggggagggactagccaaggtgacaaaccgacttgaccttagggggaaagcctcctgccccctctcatgtacgccgtcccggaattccccggtgtccacccccggggggcggggtaaacaaaactaccaaaaaaaaaaccccgaaaaaccctttcaggtctcaacctaggaatgggaaaaaaaaaaatcgcctgccgagtccttttccgtgctgctttcctaaccccccttttggctccaaagctccgaaccaccttctccataacggggggggatnnnacccctccaaacttttcccaaaaaaaaacttctttacattcaaccttccccttttccccccctcnccctaccacttaaactataccttttctattcaaaccaaaaaaaaaaaacaaccgccgccccccctcaaaaaaccccactcttaccttccctccccttcaacctcactacccctcctctacccccccccaaactcaatcccctctccctccctttcccaaactcacaactaaaaaacccctcccctcccccaccaacacccc

SEQ ID NO: 122983 - DNA, 515 bp, Arabidopsis thaliana columbia
  unsure (1)..(515): unsure at all n locations
cagctacctaccactgactttanggaaagctcgtacgcctgcaggtaccggtccggaattcccgggtccaccccgcggtcagaggtaaggcttnaattccttacttccacctcctaaaggttaccgtcagccgattccatgggctanaagccgtgacgaggtatgggttancaatgttcctcatactcggcttgttgaagacaaaggaggtcaaaactggatttttctatacaagaggaggttaaatttcctggaggtggtacacaaattattcatgggggctgatcagtccttggaccacatttctaagatggtttcttatattccgtttggcaaaccataattagggttcctatggatgttggttggggtgtgggccattttttngtcccttatctattggcctcggaaattcaataacaatgggctgttgcaccaaaaaatgtccctaaaaaccaaattaattttcctccttacccgggggtgcctgctttgggggcaactttttcaacagg

SEQ ID NO: 122984 - DNA, 147 bp, Arabidopsis thaliana columbia
attagatcacttttcaagcgaggggggggagaggcccttgattctaaaaaatctccccccaagcctattaagacgagatatactttcttatcgtaagaggtaatctccaacttacgtgcttaccgtgcgaccgcgtacggtagcttt

SEQ ID NO: 122985 - DNA, 426 bp, Arabidopsis thaliana columbia
aagaagaagagaaaatctgttagttacaaacccctaattttaagggagagtgcccccccctccgagcgacacgcgtcccaaattttcatgtttcacccaggaggggggggggcggggttaaaaaacaaaaatccttcttacttaaaaagtttctttcttcttttcttttggaaacaaaacccgacattttgcccacgcgttaacaccgcgaaaatagccgaccttgctatacctctgcctttaaagcatgggcgctctcgtcaatcaacactctttcattcgggggggggaatctccaaccccgttttcagaaaaaaaaaacaacccccccgcgttctccccgtttccagctcctccatataaaaagggtgattacactacctctcctatgacgcctctctcctctcctctcggcccacgcgcccc

SEQ ID NO: 122986 - DNA, 539 bp, Arabidopsis thaliana columbia
ggaactcccccctcagtccgtcccattcccgtcccccggggggggattgaaaaaaaacctacaacaaattcggggttttttttttcttttttatggggcccgaatctctggcgtggggtggccctcccccccatcgggcgacgtcggcccatgtactcggttgccccgcttccttcgctgagctcctggctttttttttgggggggggggggattaacaaaccctcgcgaccttttcaccaaaaagacaaagggtttttgggacaacctcttgcctctgtcgagctgtatggaaaacttgcatttcctaccaccgcggccccctcgggttggcggcgggctttgcccaaccttgacacacgtctggctcaaacgccgcggcccttgtttgatgcgttgttaaaacacaaagcgtgcgtaacgttccctcaaaatcaacccggatataacaaacgagtgggggccgagcagggcccccggggagtgaaacatataaacccgcgcgcgtatttgctatcggttcgccgtgtagaaaaaagt

SEQ ID NO: 122987 - DNA, 486 bp, Arabidopsis thaliana columbia
  unsure (1)..(486): unsure at all n locations
ctccagctacatacgactcactctagggaaagctgctacgcctgcaggtaccggtccggaattcccgggtctacccacgcggtgcgggaaattgaaaagaaaacctanaaacacatgcgggcttttttttttctttttatgggtgcgtaatctctggctgttgtgtcctcccccccatccgagactgggccaagtactgctgtgttccccacccccgttggctcctggcttttttttttcatggcgggggggtaangaacctcgtggagcctctatacttaaaaaaaaagaagagtctctggagtaaacccttctatccccttctatgcaaatagggaagagagttttattttctcccaaacgcgtcgagcccttggagaatttaaacaatactatttccaaaggttgaaacccttggggccccaaacattgggtacctttcttaagaggccgtttacataaagaagcgttctggatcagcggggc

SEQ ID NO: 122988 - DNA, 519 bp, Arabidopsis thaliana columbia
  unsure (1)..(519): unsure at all n locations
atgattcttnnnnnnnnnnnnnnnnnnnnnnnnnnnnnnnnnnnnnnnnnnnnnnnnnnnnnnnnnnnnnnnnnnnnnnnnnccacacgtccgcggacgcgtaantaaggatcttgttagatctggttgagaaaataataggatgagaaaacgaaaccaaaacgtttctgtttgtgtttttgagttttggatttttgttttctctgtaaatagttttttttttttttcgttttctttattctttggggggagagggaaatcatgtataaaaatgaaaagtaaataaaatgaacataatggtttttttcttcaaacaaaaaaaaacatttctcatcttgccgctcttcttccactttataaagcggaacaatcttcacacccctaatctatctgttggacctatccctcttttttccttttccccatactataagcggcggccgttttataaaataaaacacatttttctatattactcttaaaagttcaagtattcttatctttttttttttttgacaa

SEQ ID NO: 122989 - DNA, 522 bp, Arabidopsis thaliana columbia
  unsure (1)..(522): unsure at all n locations
cagctactatccactcactctagggaaagctgctacgcctgcaggtaccggtccggaattcccgggtcgacccacaggtgcggagttttgtatttctctcttgattgagagaaaaacaaaaaaaaaaatttgaaaaataattttttctttggaactgatctttccataccttttgattctctggttcgcttcggcggaatcaaagaatcgtttcaaggtacaaattctcaacaaaaggggggggggatctcnantgttttattcgtttacggggaanaaacatttcaaggggtataagccttccctgattggtagaaactttgaatcggttaataaatttaaaaataagaaaaaagggtttgtgaaagaaaggggagtgtctcaacccgccggaagatggaagggtggctttatcccatccacaaaccggtttggccttcatttttcccggaacgatcctttgttcttcacgagaacaacctttcaaggtttaaatttggcccttcggaccacaggggggac

SEQ ID NO: 122990 - DNA, 464 bp, Arabidopsis thaliana columbia
  unsure (1)..(464): unsure at all n locations
aggaaagctgctacgcctccaggtaccggtcccgaattcccgggtcgaccacgcgggcggggaccctaaactaaaacttatttttgaatataaaaagagatctcaaaaagaagagaacacccaaaacaaaccaaaaatctctaataaaaatgggcttccaaagctttctttcttctctttctttaggcgactcccgccggatatttctttttcttgtgggagaggggnncccccccttgatgcctaacaacaaaaaaaaatttccaaaatccaagggtcccttttcctgccaccctttncctgtccccattcgttccccgttttaaaaaaattcccggaagggcccaaaaggtaaagtgtgctttccccagaacccaaaccaacaccggccctatatatcttttacaaaaaatctcctgtccccctcccaacaagggaaacgtctaaaagagaggccctacccc

SEQ ID NO: 122991 - DNA, 515 bp, Arabidopsis thaliana columbia
  unsure (1)..(515): unsure at all n locations
actgactctagggaaagctgctacgcctccaggtacccggccggaattcccgggtccacccccgggtgcgggggattganaanaaaacctataaacatatgccgggcttttttttttctttttatgggtcccgaatctctggctggtggctcccccccccgcctcggcgactgccccccagactggtgggtccgctacctcccttgctccctggcttttttttgcgggggggggaaacaactcgggacctcttactaaaaaaggaagggtctggtaaacctgtccccttccctgcgagggaagagtaacttccaccagcctggcccctgggatttaccagcggtttcaaagtaaaaccgcgccccaaaatgggcctctctccagggctgaaaaaaacaacccggcctggggccccgataaacccgccccccaaccagcgggcccgaaaacccccgggaaaaaccaaacaaaccgccgccgccctgccgtggccgcgcggaaaaaagcccgtgtct

SEQ ID NO: 122992 - DNA, 545 bp, Arabidopsis thaliana columbia
  unsure (1)..(545): unsure at all n locations
ggaaagctactacgcctgcaggtacacggtgccggaattctccgggttttacccacgcggcgcgggcgtgatgggtttttttccatacaccaatcancactcaacgaataaagtacccaactgggaagaaagaacatcaccaaggggagtgacagactttacaaaaggcaacgggagaatggtgttccctttcttccaccgaaaaccacaaaggaaaagctcctattcttttttatatttgcgggggggggataaaaaccccaaggggtcggaaaatcaaaaaaaatctcaaaaagggtttcttcaaaaattaggggaaaaagaccattcgaaatcggccgtgaataacggcccggaacaaaatttccgttcgatggaaaaggggccttcgatggggacaaaaaacccgccccctgacttggggggaaaccgcggttttcggagctttgcgctctcggcagagcttcaacgcctccggaaacagcacccttcttatttatatatccgcctatcggggaccggataccaaaataccttaggaggaa

SEQ ID NO: 122993 - DNA, 558 bp, Arabidopsis thaliana columbia
  unsure (1)..(558): unsure at all n locations
atgatcctccaaggtcacatacgactcactctagggaaagctgctacgcctgcaggtaccggtccggaattcccgggtcgacccacgcgagcgggctcttcttacttctacanttactttggtctccgccatggctacacagagtttactttcctctttcgtcacttgactatgactgacctaccatagttagttagatagggagagataccaagaccaagaaaatatttttctcatcttgttttctggggggggcttctnggtttcggaaaactgcaaacaaaaatgtctctttttacgatttgcggggggggttaggggtttctttaagatttgggaatccggagagggggtcaaaccttggggaaagaagcaaaaatgggggaggaaaacatggttgggcaacttccctggctaacaattgtgaggggggttggcaataccgggagttctggcttattggagggggcgccaaccatgccggttttcggctccctctgtgggggagggaccccttgtgggaaactatattcttcctgggagggattacttttggcg

SEQ ID NO: 122994 - DNA, 536 bp, Arabidopsis thaliana columbia
  unsure (1)..(536): unsure at all n locations
ctttaaggaaagctgctacccctgcaagtaccggtccggaattcccgggtctacccacgcgtgccgggaaaacggaaatctttnaacaattgctcccatcggaatgaggtttattgttggagccaacatcttagctggaggagctttctctgggacccccatgaatcccggcggggctttcggaccaggggggggggaactggacatggttccttccctggggggggcggggcccctacctgtggtgtggagaaaaaatacctggccctcatctacgaaatttttttattaaaccaccgcacacgagcaggttcaaacaagaaagtgctgagataaaccgtgctttttccccgctgggggaaatttgattggactatggaattgaaactttaacggctttttaaacggcccggtgggggaactccgcaatcctgcagggggcttatctaatccggcgatctcttttgcaggcgaaaaccagcactcgcgcggtcttgccgcgcgcgcccctttctaaaaggaacctactctttcac

SEQ ID NO: 122995 - DNA, 539 bp, Arabidopsis thaliana columbia
  unsure (1)..(539): unsure at all n locations
gtaaaaagggggagtactcctacttcaaaccaccaccaagggaaagctcctcgcctgccagtaccggtcccgaattcctttttacccagcgtacggagcagctaaaatcttcttaacttagtcccgatgactttcctacaaacacctcctaaaaatctaattgttcatgtttcttgagttaaaaaacctttcttttttccctcttccacaaaaaaacttggtttatttttttcttaggggggggcnncaaagaagaattttcttttaaaaaaaaatttcccccccccaaagtttcttttaacacaaaatttttcctcccccctcctcacaaaaaaaaaaatccctaagccccccactcctttgaagcttttttcttctcttttctcaaaaaaaaaatcctgtgcaaaaacccacttttatccccttcttaattgcactatctcccttaaaacctccccaatcacctccatcctttttgtctcacaatttttctcctccttcaaaacaaaaccacaatacataaaattcatattttttaa

SEQ ID NO: 122996 - DNA, 409 bp, Arabidopsis thaliana columbia
  unsure (1)..(409): unsure at all n locations
ggggggggggggggggggggggacctgcgaaggtttcaataccccctggacctttaggggaaagctccctcccccctcccaggtacaccggccccgaaattttccgggtttccacccccgggggggcgaggcgcgttttaaaaaaaaaatctaaaatttttctccccgcggaaggttccccccccaccccaggcacccttccctttctctacttgcttgtggtgttcttttcttgggcgcgcaggggggcgtttaccctcgtgttgccttgctaccccaataccacaaagaaaacgtcgcttttttcttttccccccttttttttttggggggggggggggttntttnttcctcggggctgctttccctccaaaaaaaaattttccacgaagggttgttgggagggcta

SEQ ID NO: 122997 - DNA, 225 bp, Arabidopsis thaliana columbia
  unsure (1)..(225): unsure at all n locations
acttcctcgtcctcattctccactctcctaaaacaaggacacactttcttcccttttttacattaagacaataacttactctttttattatcttctcatcaaaacttatctatttataaaaataaaaatcnngttcttattaaacattctactttattaatacttctcataatctatcatctcaatgttatattcataactttttaaaacctttccatacaaatt

SEQ ID NO: 122998 - DNA, 330 bp, Arabidopsis thaliana columbia
ctacctccccccccccccacaaaaacaagaaaaaaaacgttgattagtaaacaacccccccaattctactaagagaaggaccagacctccgagatccgcaccgcacctagtttgctctttttactgtaggggggttaagccctgaacaaataaattactcttttccgcccccctcacgccgagacctactcttttctctctccgccaattgttctctaccttctacgtcccacaaaccacacaccctgtcgtcgcacatcctcacccatctttctcttaaccgcttctctccttactctcctctcgcattagtacctattttctcttttt

SEQ ID NO: 122999 - DNA, 299 bp, Arabidopsis thaliana columbia
  unsure (1)..(299): unsure at all n locations
aatttgcgagggaataaaaaaaagaaaaagccctaacacctcaagccgaaaagagggngtggaggagaaagaaccccccgagcgtcctgttcgtctcgcgaaaaaaaagaaccccctcaaaaacgaaaacccccgcgcccgctccatttattcgactaggccgttaaacgcgggaaaagaggcaccccttatgcgaacctccccgcccgagggcacgctccccgcataacaaaccgaagaacaactccccataagcgggtctgacacaacactatacgaacacccacaccaaggcgccc

SEQ ID NO: 123000 - DNA, 476 bp, Arabidopsis thaliana columbia
  unsure (1)..(476): unsure at all n locations
ccccgctttacccccagggcaaaaaaacaaataaaaaattgncgcatttcgtttcccccacttttctcttctcaacattctttttatactcttaatttcccctccaacccaagacgaaacttacaaaaattattaaaaaatcctacccctttttgttccctctattattgaaggagggggcttattacaccccccattttaaaaaaaaaaaaacctacacntttccctccatttcttcccccccccctaccaacaaaaaaccacccctaccacaaattccctaaacacacaccatttatctcacttcacactctctaaacacccccaaaaccaccaacaccctcccaccaacttctccctcttaaccaaaaaataaatataacacacctcacatcccctcccaccaaaaaaaacacactcctatcncaccccctttatttacttcaaccccacctcataccctacacccacctccc

SEQ ID NO: 123001 - DNA, 526 bp, Arabidopsis thaliana columbia
  unsure (1)..(526): unsure at all n locations
gggggcgggggtaaaaaattttccttccggctcttctaaatttttggttgggaaaaaacccactcaaagaagctctcattatttctgctccgtttggtggttaggggggcggctcccctttaccccggatcctttttctcccccttctcaagggggggaagggccctnnnaaaccaaggtaacccctaaataaaacaactattcccccggttttctcccccgggggtttttcccctccaccgggtgcctgtttgggccgggacgggggggggtgtttaaatccaaaactcgacccctctcgcgcagggcggggggggcgtgagtnccttcttcccccccaggaggggcggcaccgccttccgcggccgccgttttctttcgggggggggggcgcgcccccgcctctagcttccctgcgccgttgagggtcgcgaggcgcggcacggcgtgtcccgcgggccggtccgccgcgttctgtcgtgcgcgcgcgcccccgccccgctcctccttcgcgggggagggtttt

SEQ ID NO: 123002 - DNA, 567 bp, Arabidopsis thaliana columbia
  unsure (1)..(567): unsure at all n locations
atgattctgccagctaacatacgactcactttanggaaagctgctacgcctgcaggtaccggtccggaattcccgggtctaccccaaggtgcgagatattcaaatggtggaagcaggaaacatgctgatatcaatccaagtgcttcgttctgtgactaacaacttcagttcagataacattcttggatcaggaggtttcggggttgtgtataaaggccagtttcacaatggaactattatttgcgggtgggggagtggaaatggagttcttgctggtaaaagcttttcggattttaaattaaagattgcgggtttaacaagggttaggcatcgtcatttgggtaccccttctttgtttttggtttggatggggaatgaaaaatttccttggtgtttgaatttatgccctcaagggaccttgattgngccttttgtttgaatgggtaaaaagaaggactttaaccccttttgtggggaaacagaaaatgggctttaacctttgaatggtgcctagagggggggaatttctccatgggttagcctcaccaaagcctttttccccggggt

SEQ ID NO: 123003 - DNA, 528 bp, Arabidopsis thaliana columbia
  unsure (1)..(528): unsure at all n locations
agctccaataccactcacttagggaaagctggtacgcctgcaggtaccggtcccgaattcccgggtcnacccacgggtgcggggggagtcaactcccaanacaaaacctctcaacattaaatgtgatcctacaaaacctanttctgcttggaactgggtggagagggggatgtctgttccaaaacctgaaaagacttctaaagcaaatttgacaacggaagagccatatttgggagggggggaaaantttaaaatatcacctcaagctaactttntnaattctaactcaacgggaaaaaaacaaaactgaaactgatatgccaagctataaagcaaggaagggggaagggcaaaatggggacctatctgagacagagaaaatggcccattatgattcaccagaagcctcgggggagggttattatgacctaatccaatctcaggcccttgggtggtaaaccaaattctttggtcaaagaccctgattgtggggaggacaaattaaaccttttttgaaggggggggtag

SEQ ID NO: 123004 - DNA, 519 bp, Arabidopsis thaliana columbia
  unsure (1)..(519): unsure at all n locations
tttttttttttttttttnggattttagactcgctctnaatctcccaaacccanaaaaangcattccaacattaaaaccccaacccctaaaaaagggcctgcttccaaaacaagataattaattcctttcccccctaaaacccctcaaacccaaaaacccacttactcttaaaagcaagggggggccgnttccttccctcaaggtaggttttgagccaccaacacaccggaaaacccttgttttttcctcccggagaggttccccccttccccatttctcaaataaaaaaaaaccctccttcantaccaagccaagccttttttttccattcctaccaccgctattccttttcaacaagggggctcccattccttctcccaaaaataaaaaaaatttcccctcaaaaaacccccctccccccccctcccccaaaaaaacccccgcccacccaaaaaaatgggccccctttcactttcttcccctctttaaaaaaaccctctcctttaaaaagaaaacccc

SEQ ID NO: 123005 - DNA, 434 bp, Arabidopsis thaliana columbia
cgcgaggggggggagaagggacgtgagaaaaaaatgctctagcggccctatgtacgcacgcaggcttaagacagataatgcgccactcgaaagtcaagtacagtattccctaataaacacgctctgccagcggctctcctgctttcagcctctttatcttgtacggtagcaagtctgttttttttgggggggggttgcaacgcgtatttccaaaacaaaataaatttaagacaagtgatctccattatcgtcgcctgcatcatatgatccatttggtcgcaattactcattctaccgcccctcccccctaacatttcgtcactttccatacctagcaaccgacgctatctactctctcttggcgtaccgtgcctcagacctggggcccagtaactcctcttactgcccgaatgaccactccaccgtacgtacgt

SEQ ID NO: 123006 - DNA, 412 bp, Arabidopsis thaliana columbia
  unsure (1)..(412): unsure at all n locations
tttcttccaatccttataaacaaagaacctggaagaatcctttcaaagggaaaaaaaactaaaaatggccactcttttcaacaaatttcaccaggctgttggaattcttcccagacaccgggttttctaaaaaccccaaggcactacaaaaaaaacccccccttaccaacttttttttttcccacctataacccnnttnaaaccaaaaccttanaaacctatccaaaaaaaacccttnacatcgcttgttaaaccccccttttttctgaacccacaaaaaccctttcccaaaaaaccctttcccctcccacaatttcaaaatcctccccctctcttaaaagaataacactcctcctctccctatattaaaaaaaaaccaatttgaagtacccattaacaaacccctttttcc

SEQ ID NO: 123007 - DNA, 518 bp, Arabidopsis thaliana columbia
ctatacgactcactatagggaacagctggtacgcctgcaggtaccggtccggaattcccgggtggggccaggcgtccggtgctcttagcctttactctatagttttatatcatatcaatcgacatggcgaatgtggaccgtgatcggcgtgtgcatgtagaccgtactgacaaacgtgttcttcagccaaactacgaagattatgtcggttttgggggctatggcggttatggtgctggttctgattataagagtcgcgggccctccactaaccaaatcttggcacttatagcaggagttcccattggtgggacactggtaaccctagctggactcactcttaccggttcggggatcggcttgctagtctccatacccctcttcctccttttcagtcccggggaatagtcccgggggttctactattgggcctggtgtgacgggaaatcttggtttctagtttgtttgggtgacgggtttgaacctcggcctcgggggtcctaaactaccctccgggg

SEQ ID NO: 123008 - DNA, 483 bp, Arabidopsis thaliana columbia
  unsure (1)..(483): unsure at all n locations
tataaaaaaaatatttttttccataaacccctacctttttacaaaaaaacatatnaactcttaatcttattccccaaaatgtcccccattccttttatacataataccactaaacctttaattcccactacaaaaaagcattttcctaatttttttttttgggaggaagggacaaccccccaggggtctatataaaaaaataaaacacaatgtttcttggttagtcttcccatttttttactcaaacccccttgcacccctagagcttctcccgctaaaaaacacccaataaatccgttgctaaacaacctcttctttcctttaacaacccctctcttctcttctcccataccttatttttctcaaatcaatcacctgtttgcttccttaactctcttctttctacaaaaactattttcttattagaacctactaacctttcatttttatacccccctttctacaatcctttttgactcttac

SEQ ID NO: 123009 - DNA, 187 bp, Arabidopsis thaliana columbia
taatccgactctctatagggaaagctggtacgcctgcaggtaccggtccggaatttccggggtggaaaatcaaaagagttccgaccgttgtttcgaactaccagaaggacgatggagcggaggatcccgtcggctgtggacggaattgcctcggcgcttgttgcctaacggggctaggctttcattg

SEQ ID NO: 123010 - DNA, 523 bp, Arabidopsis thaliana columbia
  unsure (1)..(523): unsure at all n locations
ctccgtcggggnaggggggaaaaaaagggggggggggacctattgggggacgcttctccaccctatggggggggtccggcccccctttggcgtttgccgctttttaaatcttctcncccagcgcttgagggcggtccaatttaaaattttttcgcttcggtggcgtctcggctcccggccctctcccccgcccgtgctccgccgcgcggacggagcgcgccttcttttttttttctcggtctccaggagcgcccgagcttgtccgccctctttcccccctcgttctcttttttgggggcgcgggggttttnttcccgggggggcgntctcaaaatacacaacacccccctccgcggctgcttccctccttctccccccgcccggtcttgggccttgccggtcgtctccggtctcgtctttctcgttcccgctcgctcgttcccctcgcgcgggttcgcccccgttgccttgccctctctcccgctctctcttccgccccctctcccgctcttcccctggccgc

SEQ ID NO: 123011 - DNA, 581 bp, Arabidopsis thaliana columbia
tgcggagcactaatacgactcactatagggaacagctggtacgcctgcaggtaccggtccggattcccgggtcgacccacgcgtccgcggacgcgtccgcccacgcgtccgcccacgcgtgcggtatatctttgcaatacacgctggcagtgggagaaacatgggacttgttcttctcctgtttttcatgatgagtataattacttccttaccacacttaatctgtacttgaagcataatgtcacggatgtcctttatcaagctggctatgttgcttccaacagtgaaaagtatcctctaggaggtatcgtaacagccattcagaatgcatttcatatcacccctgaagtggtttgcaaaagagatgcaatcgatgaaatacgtatatgcttctataaagattttaagcccagggactgtgttggttcacaagatttgacatctagaaagtcatgccccaagtacgtaagtttgccggaatacacgccattaggtaagtaaaaatcatatcttgaaggaagcataattgcaagagtattagataagtaatggatctatgataaaaatgataagaagtatgg

SEQ ID NO: 123012 - DNA, 417 bp, Arabidopsis thaliana columbia
  unsure (1)..(417): unsure at all n locations
aaataaaatacaaacttaaattaaaaccatctcccaatttcaaaacaccttcctctaatttcttttnnccccatacttttttttttctcgagggggggaaaaatttcaaacgtttttttaaaaaaaaaaaaaaaaaaaaaatttttcctttctttatttccaacaaaaaaaaaacacgtccgttcctcccaaccctacacaacttcacaatcttcaccttcaacaccccatcccattctttgcccacctcccaaaacttttttactcacaaacatttccccttttatatccacccgaaaacactccctttcccccccccttctttaacccccccctcccaattttcaccccaacaacacaacatcctttacttctacccccccaccccttttccttccaccctcctcccaaaaaaaa

SEQ ID NO: 123013 - DNA, 466 bp, Arabidopsis thaliana columbia
  unsure (1)..(466): unsure at all n locations
nnnnnnnnnnnnnnnnnnnnnnnnnnnnnnnnnnnnnnnnnnnnnnnnnnnnnnnnnnnnnnnnnnnnnnccacgcgtccgtacggctgcgagaaacgacagaagggatcttgaagctcttacacaagagattaagaagaagcttacacgggctgttgtctctccagcacatacacgcaacttgttacaagacttatttgctgatttagctctcgaagtagacgatcgagccanagatgtgatccttangcaaaaagagggantgattaccttctgatgaagcagatgctgatgggcccgtatggctttttcgtggcctttgctgattctatgggaaagtgtctgagaagggggagggatttcttgatttgatgggggcactggggagcccggtcctttggttacatttttttcttttaccggtccactaatggcttggtgggggtgagcctcacattcagaaata

SEQ ID NO: 123014 - DNA, 312 bp, Arabidopsis thaliana columbia
  unsure (1)..(312): unsure at all n locations
ctctttaaaaaaccccataaaattccaccagtccttcttgtcttttttttttattttccctaaaacacaaaccctctacgcatactgtttcttttttttctttgaccatcttttacacaaaaaagatttaagaatcccccccccccctcctccttagntcgtccttcccccagccataagattacttcttttctttcttaggatcttcccctttagaaatctcactccccctctcaaaccccccttttttgaacaaaacatccctttacccctccctttctcagacactgtaacacccggtttttctccaaa

SEQ ID NO: 123015 - DNA, 431 bp, Arabidopsis thaliana columbia
gacgtcgcatccacgcctacgtaagcttggatcctctagagcggtcgccctttgagttttgaggcctaatgaaaataaaattcctgtgaaaaatcagcgtacaataaggggtacctccaaatacctaaaaaaggaggtgcctgcttcaagtctcttattttgtataaattgtgcaaagagtctcaccaactgaactaacccgtgtgggcataattttcaaagaagagcagtggggttttttttttcaagggggattggttttaaaaaaaaatgtcaaaaggggtttcttccgtgatacaacttccaccgggttgctagagaaacagaggattgaggagttctattcaacaacccgggtagggaacggtctgaataggccgttcctcttaggaagggggggggccttggagaagaggcctcccgcggtggcg

SEQ ID NO: 123016 - DNA, 277 bp, Arabidopsis thaliana columbia
  unsure (1)..(277): unsure at all n locations
atgcnnnnnnnnnnnnnnnnnnnnnnnnnnnnnnnnnnnnnnnnnnnnnnnnnnnnnnnnnnnnnnnnnnnnnnnnnnnnccacgcgtccgaacaacaacacttggttcttgaccgcggtgtaacctcaatgggggcgctcttcacttctctgagattaatatatccaagccgagcttcatattagattcatctctcaagatattgactacactgtgctcttctagatgagattctgcggcacctaacttatatgatgcctctgggccaatgatatt

SEQ ID NO: 123017 - DNA, 544 bp, Arabidopsis thaliana columbia
cctatacgacttctatagggaacgctggtgcgcctgcaggtaccggtccggaatttccgggtggacccacgcgttcgcccacgcgttcgattttggtattgtatattttatagagcttgatcttgagacatctttataacggacaatttcttttgtttgtggccggaagaaaaaaaggatgccttctaggaggggagaattttcggattgtcctggatatggggcacgggaaaacagggggttcggctgcctcaattctcgcggccccaagagggtttgtcttggtcaaagaccccggcccggacagttgttagggagctttccatggccggggcttaggcacattttgttgaggaccagaacaagatatgtcggggtcttctactcccacattttggtccttggacccttgaggggtctacaacgacaccgggggccccaaataaaaacccttatcatggatctatttgttccccccttaaagagggtaatggaaaaaagcttggttgtctcaaagggcgataaaaaaggcgtccccccgcct

SEQ ID NO: 123018 - DNA, 440 bp, Arabidopsis thaliana columbia
  unsure (1)..(440): unsure at all n locations
tccctttaggggtggggcttttaaattatatttaaaaagagaccctttcttgaactttcccaccccctggggcccctttcccaaaaatcacaaaaggcgttttaacacattgggcttatttggttttggacaattttttccacctataaaaaagtcctataaaccaacttttttttaaaaagggggggggggttctcctttccccggggcgactnaaacacaaaaataaaacaaactctccgtttgtcactcctttgcggggcgggagcgttcttttcttttcctcaagcactacccatattacagggcctggtttttgtctattttgtatttttcccaagggagctattcttccccccttttcttctcccaattacaaaatgagtaataatctcggcgcgcttgtcgtggcgacaagagaaaacaaaaaccgcctcctt

SEQ ID NO: 123019 - DNA, 262 bp, Arabidopsis thaliana columbia
gaggggcgggcatctttccggggggccacccgcgcaggaacaagagccggggcacgggcgtggaggcatggcgatccccgcggtcgggctgctactacttgccggcggatgcacatgtggcgggaaggaggatgagcagagaaaaattttcttccacacgggtaagtagagacacgtaccgcgaaaggcacccgacacccgtcgagacgtgcgttgagcccgcccactctaccagaatcccgcggggggaaaggaatcgccg

SEQ ID NO: 123020 - DNA, 367 bp, Arabidopsis thaliana columbia
ccgaccttctataggggaaacctggcacgcctgcaggtaccgggccggaatttcgggggggccacgaccccgctagtatcggctgataatagctggacatgataagaggatatatatgtgttgacgtgtggtagcattggagttattaccatttttttacacccccgccaggaagggacagggaagggtgaatcctccctcctcaatgatttctttccattgcgggggcggggatacctagcttcaaatggatgatttggtaaagcttcctattccaattgcttgtggagggcattatatggtgttccaaacccgctaaaccccatagggcaagcttgtggtgtcatttcaaaggcgcttgatgggg

SEQ ID NO: 123021 - DNA, 514 bp, Arabidopsis thaliana columbia
  unsure (1)..(514): unsure at all n locations
agaaaaacggagagcgcgtagagagaaggtaggagaagctaaaaattcttttaaagcgagggggagaaagagcggttaataaattaaaaattattatgaagatgaatggagaggaatgagtgaatgagggtggggatttagataattagatatttgtgtcatttgaaagaggtggagaaaggaggggggattagaatagagaaaaaaaaggggagaaagagaagaaattttttttattgggggggggggagaaaagaatgagggggaggaagaaaagaaagaaaaagagatagagaaagtggaggagaaagaagatatagtagatagaggtagcaaaagaaagagaagagagagatgcgtagaagaaagaggaatgtgcaggatggagaagaagatgttgaagaaagggagagaaagagaaaaagagtaaacaagaacaanggaaagttcagacgaggagggaattaagaaaatataagaagaatgaggtgcagataagggtgatagatagaaa

SEQ ID NO: 123022 - DNA, 670 bp, Arabidopsis thaliana columbia
  unsure (1)..(670): unsure at all n locations
caaggggaggnagaaaaaaaaaaaagggggaaatagcctacttaaggtaacactctccccaaaacctctgaaccttcgcatccaccccccttcccttaacctttngatccctcctaaaaacctttccccctttagaggttttgttttttttaaaattatttttttaaaaaaaaaatttattttcattaatcacaaattcctaccaagttctttcaattttccctctttaaaattttaaacccttccctcccacccttttctttcttcctactgccttttaactccaaattccaaaaatcctttttataaaacggggagagggcccccctttaatgaaaccccttttcttcacataaaacacaaaaaaccaactttttttttttccaaaacccccccctcccctctttttattacacccttcatcccccccccaaattctcccacccagactcttttttttttcgccctccctttacccactcacaccttgtctttttatcccaacaaacttccccacccctaaaaaaagccccatccccctcttctctcccctttctttcaacccctcccttcacccttttcaaactccccacanaaaaaccccttctttaccctctcttaccccacaaccccacttccacttcccacccctccccccccctctatttaa

SEQ ID NO: 123023 - DNA, 441 bp, Arabidopsis thaliana columbia
atctaattgtgggactacctcccctcggcgccccccccgtggacgggttgtaaaacattctctcccaaccaaaaccattttttcttttcttggtggggggaggcggggccataaaacaaccgctggttgcctttcgcacaaaaacaatggagggggggtggggcccgcctcctgacggacacccccgtctaacggcgtgggcgggtcgaccgctccctgggagaactcgttcgccgggaagttccctttctgctttgcccctggtggaaggtctccgagtgcgtgagcacgcttcgcctcgcccgaacccagtgggtttatgtttttcgggcggcggagatcgcgttcgtacgtggggcggtcggcctgggagcccgccggcggtgggagttcggcctccttgctcggccgcctgcccgcatcagccgcacctgcgcgggg

SEQ ID NO: 123024 - DNA, 477 bp, Arabidopsis thaliana columbia
  unsure (1)..(477): unsure at all n locations
gcttggatccctctaaagcggttcgnccttagggggttggggggtttaacttaaaccccaatctaatataaactaaaaaagaacatggggttattctaaacagaaacctagggattagcctactactttgaacaacaaatgcatgcggctggatgattctatacgtgttcggatttcttgggtatagaaaatgaggggggggtacaaactaccgattaaaaaaacaaaaaaggattacagtctcaaagggaaaatgatcatcgccttaagacccggtccttaaaaccattgggttaaatttgggaaagtttcccgaccgaagtaaactttttaacggggaaagtgggggggtggtcccgacaaagaacggactccaacggcgtgcggccatattaaaagttccctttttttacttcttgggtttaaaggggggaacataggccgggggttttcaccggggtttgtcctaatccaaag

SEQ ID NO: 123025 - DNA, 532 bp, Arabidopsis thaliana columbia
  unsure (1)..(532): unsure at all n locations
aaaaaaagaagggggggcctgttggggaaccccctcccaaactctngagggacacgcccccccccctaaccttgaccccctaaaccttcccctgagcttagggccttaaaaaaacaaaaaaattccttttccttcaaaaaaattaacaaacctgctttttcaaaacggcaaaggaaccttttctcccttaaaaaccacaaatttcgcgaggaaaggccgcaaccctcccccatacccttttttaaagggggggggttctttttttgtggacacctctcaaaaaaaaaaaacctcctaaactcccccttcntcccccccccccccctctnacaaaccccccccccccaaaataactctccaaccacaccttttctctcctacaacaacatcacacccttatacctccttaaacaaacccttcccactcaacccccaccttcccacctactccccaccactatcacacctctcaaaaactccacctccaccctcaactcctcacccccccaaacacatccaccctccccacatc

SEQ ID NO: 123026 - DNA, 492 bp, Arabidopsis thaliana columbia
  unsure (1)..(492): unsure at all n locations
ttccccctttgggtttttcttttaaaaacaaactttaccaaanaaccttaatannattcttcaccttcaaaaacacaaaaatgtccgaatagtacaaacaaatgactcaacatctaaaaaaaaaaaacttctctaaaaaccaacccccaaaaaaagggtctttttttaagggggggggaattttttttttccgtccaaaaaaaaaaaaaacttcaattaatttttcttaacccataccctaagtgaatttttcccctttcctggggtccccaaattttattttcaaacaaaaaacaaacccttcttttttccttaaaaaaaattcattcgaaccttccctttttattggttttacaccaagctcttcattttgtgtgtattgttcccccattctgtttcaaaccttttatttttcctctttccggtcctaaaaaccaccattcctctttttgtctttcccccccaaaatatatctgcccccctttctttttt

SEQ ID NO: 123027 - DNA, 330 bp, Arabidopsis thaliana columbia
ggggggtgtaaagaaaatatctgggcctcctttgcggcccgtctgtgggtacacaaaactcggggccgccccgcttggggcgggggggggaaaaacaagacgcccgcgtttccctcacctctaagaggcgggggcggtttttgcgccacaactcgctttcgcgcggggggggactaccccaccggggggggggggggtcatattaaaaaaaaaaaagtgtttggagaggcgtaacgagatcttctgcccaggccgccatttgggctttaagcgccttggctttgagaagggccatttttccctcgccgggcgggggacccctgaccggat

SEQ ID NO: 123028 - DNA, 634 bp, Arabidopsis thaliana columbia
aaagtatggcgggacaaaaaaaaaaaaagaagctatgaggtaacactctccaaactctgaggcgcacccccccctccctaaccttgatcctctaaaacgtttccccttgagtttagggctttaaaaaaaaaaacccatttaattttcataattttgggaaaaccctccccaaaaccatatattttcacaaaaagtgtaaccaaattcttctcgggaaatcactttttaattacaaaaaaccaatgcttatacatgcgatacataatcacaaacttttcttaaaagaggggggttattttaaaaaaaaaaacctttttctcaaaaaaaatcatcccacacacctctttcttttcgtttgttttcccaaaaaagcacatttttcgctcctgaaaaaaattcgcttttcccccggtccaaaacggaattcagggcggtatatcctttctcttccctaaagggcgtttaaactagagcacaggccttaattgcagttggagacttctttatcctaaccacatacctccccaccttcggtcttggagacttcctctttcatacctatgcaagaagagctagcttctctctttttggtgtcttccatccagcgcaaaacctttccccctattacacttca

SEQ ID NO: 123029 - DNA, 528 bp, Arabidopsis thaliana columbia
  unsure (1)..(528): unsure at all n locations
agaaaaanaaaaagggaagaaacgctacttaggtgaacactctccaccaaacctangacgttcctatccacgcctacctaagcttggatcctctanagcgttttcccttgggggtgagccttaaaaataaaataccacaatggatcacccttaaattttttcccaaagatggcggaccttcccaagtaaaaagggtttaatttgaaaaaccctagggacttgggctccctttccgttttttcttaatttaacaacaagaattttttttttgggggggggggttaaaaaaaccggcgttcctttcataaaaacaatgaagattttttcgttttaaaggccctcacccaacgttaaaaggaattgcgctctttggacaaaatcgtggaggggttaaacccaatcggtccagtgaccttttttttatttaaagcttctgcgatttccttgaggctcgactatttttcttgaatggaaaatagttttttttaaccctgggaactcctttttgcatttttgaaggtgtttttt

SEQ ID NO: 123030 - DNA, 615 bp, Arabidopsis thaliana columbia
  unsure (1)..(615): unsure at all n locations
nnnnnnnnnnnnnnnnnnnnnnnnnnnnnnnnnnnnnnnnnnnnnnnnnnnnnnnnnnnnnnnnnnnnnnnnnnnnccacgcgtccgagtaattgagatgaaaacccatatctaatacggtcattctaccttgtttgtatagggcggcattgtccgtcagcagtgtactactctgcgtagggaacagcgcccatctctagatgagtggataccttgctagcggctggattgcaactaactccgaccgatgaggacctgacgagctgtgactacaagatgcatgtgctgggtgaaccggaactcttccatgcgatcggagaggtagatctgtacatgcgtgagctctggaaccaaacgctgtttcctaaggtgcaatctctgatcctctaacgggactcttcgaatcggtactatagtatgtcccgtgccggcgctaggatgagttaaccatctaacagatggggactgagatcaactggaacacacatagatgtcctcaaagctgtccagttactcagatttgaaaacacgctggtttgcacgcagatcgcctgcatacaggcttaagactaagggggacgtgcacgaatttcatcttagagaaataagaagctg

SEQ ID NO: 123031 - DNA, 336 bp, Arabidopsis thaliana columbia
  unsure (1)..(336): unsure at all n locations
nnnnnnnnnnnnnnnnnnnnnnnnnnnnnnnnnnnnnnnnnnnnnnnnnnnnnnnnnnnnnnnnnnnccacgcgtccggaaaaggaaaggttatagcgaaatagatagagatagaagagagagaaaggacgaagaaagagagttcctttaactctctcttcttcctctgcaaatctgacatattgaaccaaaccaaaaaaagccctctttgattagggttttgtagtcaagattctggaaaagagcttttaaagtgaatttntggggatctctgatgttgaatgtattagaaattggaactctttctccacttaacttggaagttggtttggtttt

SEQ ID NO: 123032 - DNA, 510 bp, Arabidopsis thaliana columbia
  unsure (1)..(510): unsure at all n locations
gatgtaaggagagaaaaaaanngggggggctcgttgggacctctccaaacttttactggcaccccccttcctaaccttggtcctctaaaacgcttccccttgagtgttgggtcttttttttaaaaaaaaaaacctctttaccaaaaaccctgtttttccaccttttttgttcctacatgtgggccccagcgtgaagggggggggtcccaagacccaacccttgaaactcccccctaaattaatccctttcttatggtccatttgaggggggggggacttaggtgtgggggtttcttaaaaaaaatcattttcacctgcgagggataaattcccccccgggtttcaaaggcttgagcccaaaagggggttttaaaaacaaaacccgcttttttcaatcttttaaaaccttggggttacccctttgccctcctaggcttcttccacccccaatatgtttggggtgtccctgccccctcaacgagagacgcgggtttcttttttcattttaac

SEQ ID NO: 123033 - DNA, 580 bp, Arabidopsis thaliana columbia
  unsure (1)..(580): unsure at all n locations
gggggggggtcccgcccccccccccctaaagctttgtttccttttaaaccctgtcncccctgaggcttgtgcgtttttcacnaaaanatttttttttttttttctgggggttcttatccgcgggggcgaaaaaattcttcccccttttcccgccaactctccttccttcctaaaaaaaaaaacacgtcccccgcggcctcttttttttttcaaaaaaaccacaaaataaattttttttcttttggggagcaggggcccccaccttcgggggggttttaaaaaacacaacaccgcccgcggcttctctccctcttttgccccccccccccctgctgtatccgggttctgcccttctcgccccctctctcctgggagattcaccgcctccctcccctcttgtcgccccccccgtaaacgcccctcggctcttcccgccgtcctccctcaccaactctcgtctccgtcccccccctcaccccctcgctagcccgtctcctctcacgctcgctcttcgtgcccgtccgcgccctcactcctctttctcccccgctccctcgcctccccttctctcctgctcccc

SEQ ID NO: 123034 - DNA, 430 bp, Arabidopsis thaliana columbia
  unsure (1)..(430): unsure at all n locations
tttttcttttttccgaggtggggccttttccctgtttaaaattcccctcttttttatgacgagggggtggtgtttgtttttacggcctttgttttcctgcggttttcctctacgaccgggaggttggaaaaattttttttttgggggaaagcctgggtntttacataaggggggggggtcttttaaaaacacaaacgtgtgcgctcctcttcctttgtcttgngcgtgcctcccttcgcgcggttgggcgctcccccctcctctcttttcgctctcttcctcgcccggtcgaaaggtcggtgcccgcctttggcgcccgcgtctcttcgctcggcgtgcggtgcgccccccgccgcggctctgcttccgagcgggagacgctcttctctcttctttcggggccgtcgtgcccctcgtttcgcgccccgcg

SEQ ID NO: 123035 - DNA, 494 bp, Arabidopsis thaliana columbia
tacctaagctttgatcctctaaaccctccccttagtttaagccggaaataaatacgacaatgatcacctgaaatgttccaaaagatccagaacttccaaagtaaaaaaggattataaaaaagacctaggtgggtgcctccgttccgttttatcctaattttacaacaaacattcttattttttgtggaggggggtaaaaaaccgtgcttccttacttaaataatataaagaatattcccggtatgaggcgcatgaaaaaaaaaaaaaagaaaaaacacccccggagagaggtggcggggggttaaacagcttggccaatgggggtcttcttcttaaagggccgcgccccctacagcaaaggaattgatttttgagtggaaaatcgtaatattagcctgtgaactcatcatttggaggcctgagagtttcttttttaaaaaaatggggggaacctttttctgaaaaaatttaaccttttctcaaggaaatccaag

SEQ ID NO: 123036 - DNA, 615 bp, Arabidopsis thaliana columbia
  unsure (1)..(615): unsure at all n locations
tctggggggggggggaaaaaannggggggtgctctagggacctctacaaaatttaggacggggcatccacgcctacctaagcttggatcctctaaagcgttcnccctttcggtttgggggcctaaaaaataaaattccctaaactttactaaaaattcttacatataatataccctcctttaaacattttaaacataaccttcacatatggggaacgagggcaaaagcccgattttatgttctagccatttttttggattattcccctttataaaaaagggggggggtacagagggtggggggcttaacctaaaaaaagaaaaacatcttcaccagaccaaaccaatccttaaagggtgttggagcacacggaaaaggttcctttcccaagaangaaacccaacccgaacccgatttttcttgaccgaagctggtttgttctaaaccgcggggtcaagcagttaaaccgtttttttggtattagtccaacgggacaacccgaaccgttttttcccctcagggaggaccttgttcctggaaacaagaaacttcttcggctagaaggtctggaaaagcctgaggttgttggccattccgccgggagcctgtacccag

SEQ ID NO: 123037 - DNA, 550 bp, Arabidopsis thaliana columbia
  unsure (1)..(550): unsure at all n locations
tttaaaaaaaaaaaaaaanannaaagagaaggggcgtncgcccgcgtggnggggcgcccgtgtgcgccgtcgcccctgcccgcgtgctgtttaaagagaaaaacgcgcgcctgccccggcggggtttgttcttccctctttcataaaaaacaaaaaaaaaaccgtttttatttatggcggcgggtgtttctttttttttgggggggggtggtgtttttttatgggggggccgctcttccaaaataaaagggcccccaccttcttttctcgcacaagaaaatttcccgcccctcatcgcacccccggacggaccctctgccccccaaggcggaggggcgtcttttttttgtttccttttcgccggaagagtggcttggtcggcgggcgcgccgcggggcgctgtttgtttcttccgagagaaggccccccgttcttcggaaaaaacgcgctgtgtccgccgcgagggcggtttccccgcctctggggggggggggcgcttctttgacgggcagcggaaccctccatctcccccgcggggcgagaaacctct

SEQ ID NO: 123038 - DNA, 554 bp, Arabidopsis thaliana columbia
ctatacgaacttacttaaggaaagctgtcgctgcagtccggtcccgattccgggtcgaccacgcttcgtggttcatccaagtgctttgttttgggcaacaaacatagaaatttttggttttggagaaaattttttggccccggggggggcctctaaggggaaaatggggggtttccaaaaaagggtttcacggggattttggggaaaaaaatttttttcctcccttgtggggggaaagttttttttggccccccttcccaacacgggggttttttttttttctcacaaccaaatttttttttttttctcctccgccacaaattttttttataaaaaaaaaaagacttttgggggctgttttttttttttttaaaacacacccccttttttttttttgggacaaacaacaatattttttctttcttcttttggggggggaggggggggggaaaaaaaatatataaaaaaaccacccccccacaaaggggggttacccttcttaaaaatagacaaaaacccccccccccccctcgagggggagggggggggggggg

SEQ ID NO: 123039 - DNA, 688 bp, Arabidopsis thaliana columbia
  unsure (1)..(688): unsure at all n locations
ggggggnnngggggggggaaaggggggggggggaacctacttgggggacacttcctccaaacactccttggnggggggtccgcgccgcccccgccttaaggctttggttccctcttaaaacctttccccntttgaggtgtagggtggttttttatattaaaaaaaaaggggcactctgggagattttcttttgtgccccaaaaaaaaattccctaccaaaagcttgttttttgtggggggccttttttttatttacattcctgcggggggggcgtgggttccctcttaacaaaaaaatgggaatcgtgggctcttttctttaaaacttttcttctgggggggggtgggttttnttttcttcggcgggggggtgtttaaaaaataaacaacgcgttggggccgggggttgggaggtagaaagagatccgcgttgacagatcgcgcgctcacacaaaccctctcggttggcaaaaaaacctcttctctccccctttctaagcggagcagaccggcgtctccccaggggcgtcttttcgcgcaacccccgcctccgcgagaccgccttgtggtggcgcatgtacgcgccttctccacggacggtgaccgtccattcctggagcgggtgttttttcgtccctgcactccccgcgcattctttcttttttttgggccgccccgggcgccttcg

SEQ ID NO: 123040 - DNA, 336 bp, Arabidopsis thaliana columbia
  unsure (1)..(336): unsure at all n locations
tttaaactcacttttttaagagaaaaaaaagtttctctcaccctttgttggagaggacgtttttgtttttggtgtttaaaaatctcgggcgggggagaaccttttttttttttggaaagttgggtnncnnnaaggggggcccnttctaaaaaaataaaggttttcttctcgcaaagggcccaaagtgttttccctttcttttttggaggttttgtggtggggcgtggctttgggggggtaagccgcagacaattttttttgtcggggcgggtgtgggaggcggccccgggcagggaagtgggctcgccggggggcgtgtgtttgtgttagaggggg

SEQ ID NO: 123041 - DNA, 413 bp, Arabidopsis thaliana columbia
  unsure (1)..(413): unsure at all n locations
tttttattaaaattttaaaacacaaggggtgggctcctaaaaatgaagagaaccnaaccggggaaaaacaaaaagaatttctctaattagtataaattgtagggttgagcttttcaaagcttaatatccactgttgggtttcattccaagaaggggggggggattctttttgggggttttaaaaaaaaataaggctacatttgggggagaaacttcctttcctcagaaggtggggcggtacttctctgaccctttgaacaatgtgttttttaggcgtcgtacaagggggggcgcaaaaaagaaagggggagtgtcttgagctttctgcctgtgtgttggccccaaaagaatggctttgggagtggtgcggactccaaatgatgagagtccggctggcgagggggtggttaagc

SEQ ID NO: 123042 - DNA, 407 bp, Arabidopsis thaliana columbia
cccttcacgcgccccttggccgtcttttccgctgtgtattcttttaaaattttcctccctcctgtgtcattttttcccggggggggggggcttttcacatggccgttctcactaaaaaaacaaaaccccctttctcttccaccctccctcctccggccgtgcccccaccctgcctaccctttgcttgtgcggttctctcgacggaatcccccccgtcccgctctcttatcctgatccgatcggctcccgtgtcgccccctgctttcctttatcgtccctctgcgacccgtccctgcctttcgccgttcgctccctctctcccatgtctgtccgctcacgttctcctttgccctgagcggcgtttgcgcttcctctcggtcgcggggtgcggtggcctttgcgttccc

SEQ ID NO: 123043 - DNA, 649 bp, Arabidopsis thaliana columbia
  unsure (1)..(649): unsure at all n locations
ggggngggggggnnnaaaannggggggggggccctattggggcacccccccaaactctnggcggcaccccccccccccgagcttgatcctttaaagctcccccttgggggtggggggtccnaaaaaaactttcttttgtttttggggtctccttaaaccacccgcctttcgcccgggaaccctccgctttttttttttaatttttgttggaagaacaagaaaaaaacggtgggagcgggaaactttcggggtttctaagaattaaaagaatttttttttttcggggggggggggcccccctttttaaggggtctctctccaaaaaaaaaaaaactcccctcctttttgcggggcggctttccctcttccgcgcggggcggggcgggggggcggccccccccccccccccgttgttttctgaaccgcgcgtccctccctctatcctctcccaggcggggccggccgtcgctcctcccctgcgccagcggggggcggccgccgcccctgcgtccccccggcggggtgggggcgccgcccacacccgtcgtgcgggtggcccgcccctccgcggcgtcccgctcggggtcccccgtggggaggcgggcgccccctcgcggtctttgtttagggcggcggggcgccccctccg

SEQ ID NO: 123044 - DNA, 454 bp, Arabidopsis thaliana columbia
  unsure (1)..(454): unsure at all n locations
gagccccccccaagcgaggaacagagagggaaaaccctccccgggaggggggtanacccgggccaaaaaaaaaggaggagggacagcgagagcacccgagacacccgcgccgcgccaccggagagaggacggagcacacgccgggaggaggacgcgcgaggcgaggcgacgggcacaagggacgggacagcagcgcgaggaaagcgcggcacaacttttctttatgggaaggggtggagcgccgggcgcccgacgacgcgtcgcgagaggaaaatgtcatcccgcctgtctcccgctaggcatggtcacccgccgacatccctccaagcggttctcatagtctgagttcgtcttattctcgtgaggagtcaagttgaactggttcaagggcgtgttcgagtgcactactcacatggaatcgttcgaggtgcgtgggtgcgccgtaagggagtct

SEQ ID NO: 123045 - DNA, 529 bp, Arabidopsis thaliana columbia
tatggggtacagctggtacgcctgcaggtaccggtccggctttcccgggtcgtcaacccgttcgaataaatcttgagattggggagaaaaacctcaagagtgacattgacttttctctgatcaaagactaaaaaaactgaatctcaacagcctttgtttgtgtggacaacaacaagacattatgcactctttttacgaaacggtgagagacaaagggttattacagattcattgatgcagaactcttgtgttaaaaaaatcctaaactgaggaacttctccccggagacttccacttagactagtgttaaaacattccaaaacttttgtctgggggtgtgttccatttcaacataaattgccggtgataaaaacaaacccggggaaaagtggcttttttgactacttttctaccaaaaggtgaatataggaaccattttttacggatttctttgtcctatagttaaaagcttttttttgtgaaagtttcaattgcccataaatatttaaaaaaaagatattttttcccc

SEQ ID NO: 123046 - DNA, 504 bp, Arabidopsis thaliana columbia
  unsure (1)..(504): unsure at all n locations
atgcacgcgtacgtaagctcggaattcttttcnagtgagtgtgggcgcttagaactaagaatccatctcggggaaggccctaaccagctctatttgactatggatgacttacctggagagttagaaattggtacttttcggttagccacaaagcgaacgtttcacctttatggtgttttaaaacaagagggggagactgtgatgacctcaatttttaaatatatggggtacacgcttggggcatggtgggatcttaaaaaaatttttttcctctcctgcacctattgaaaagaaactttttttttaaacaaaaaaatggtaaaacattggcggtttttttttctcttaaatagggttctttaatgatttgggggttgaaagaaacagttcataacttggtaacccccaaagggtggaagggctcaaagatatacccccattgaaacaaacttttgcgattttcttagaccctttatagggcccattttttcgctaaaagttaaa

SEQ ID NO: 123047 - DNA, 576 bp, Arabidopsis thaliana columbia
  unsure (1)..(576): unsure at all n locations
ctatgacatcgcatgcacgcgtacgtaagctcggaattcgtctcgagcgagggcatgtctcgatttgctatcttagtaaccttggcacttgccattgccactgtttcggtggttatagctcaagtccctccggagaaacaattcatagtcgtcaacgaaggagaattcggtgaatacatcactgagtacttcgcaggttgcggggggntcgaatcatcaaaccaagagcttattcacatcaccattccagctcttgttttacaacactacccctagcgcctacattttagctctccgagtcggactcaaggcgtgacgaggctaccatgcgttggataggggacccgaatccgacaaaccccgtgggagaaacgcttcactttctattggccctaacggcaacctctactggctggaactggaggacgattcaatgggggactaacacagctaacaagagggttcccgatttcaaatctacccaacggaacattggtcttcaacacaaaaacggagattcggatgggagaatttcgatccccaacgtttcattcttagcgggccatcgttaaagtt

SEQ ID NO: 123048 - DNA, 328 bp, Arabidopsis thaliana columbia
ggcgaactatagaatactatgacgtaccatgcacgcgtacgtaagctcggaattcggctcgagatgcgagttggatcgatcgctacatcggtattgtggaatttccaggcattgttgtctggcttttgcatcagttggagccaccatctccaaggagccctgctgttgcagcttcaaatggattttctcatgatttcaccaccgatgttctggataacggagattcagcagtaacttctggaaacttctttgaggtccttacttcttcagagctatacaagaacacccaggttcgagatatcttctggacattcccgtgggcacccgt

SEQ ID NO: 123049 - DNA, 439 bp, Arabidopsis thaliana columbia
  unsure (1)..(439): unsure at all n locations
attgagacgaactatagatgagctatgacgtcgcatgcacgcgtacgtaagctcggaattcggttcgagaagggctctaacatccttctaggagatgacatgagagccaaggttgctgattttggattggtcaagaacgcacctgatggtgaatactctgttgaaacaagattagcaggcacattcggttatctagcaccagaatacgccgtttctggaagagtggcgacgaaagtggatgtgtatgcatttggtgtggttctcatggaaatactaactggaagaaaagctttagatgattcattaccagacgagagatctcatctagtcacatggttcagaagaatcctaatcaacanagaaaacatcccaaaggcactcgaccaaaccttaaaagcagacgagggaacaatggggagcatttacagagttgctgaac

SEQ ID NO: 123050 - DNA, 163 bp, Arabidopsis thaliana columbia
  unsure (1)..(163): unsure at all n locations
gcgtacgtaagctcggaattccttctagggcgtgtggagacggaanaatctctctccttttcatgtcntccttcaacctggggttcagctgcttcttccgccgtcacgttaaagaatctggtgcttcanaaaatccaaccaaaaacgcttcccgtttagaaat

SEQ ID NO: 123051 - DNA, 170 bp, Arabidopsis thaliana columbia
ctatgacgacgcatgcacgcctacgtaagctcggaattcggtttctagagaggtgctagatcttatcaacaatatcttccgtttcgtacaagcaggatccgaggtatccgccttattgggtaaaatgccttctgctgtgggttatcaacccacccttaataccaaaatgg

SEQ ID NO: 123052 - DNA, 317 bp, Arabidopsis thaliana columbia
gttttttcttaaaagaaaatttaaaaaccccctcccccgtttattcaatgttcctgaagacctacaaaaggtccagggaaaaccttgtgtttataaattcttttgatccctttttgaaccccgggaggtaaaaacccattaaattctcggaaaaaccaaaaaaaaattaaagcccccaaccattttccctttttttaactcccccttgaaaaacccttagtttttagccggaaaacaattttacccaaattttccccaggccaatcctttttagatattttaggcccccatctctttttttttaaaaaaaaaccttt

SEQ ID NO: 123053 - DNA, 585 bp, Arabidopsis thaliana columbia
attgagctgcactatagatgagctatgacgtcgcatgcacgcgtacgtaagctcggaattcgtgctcgaggagataatcaagattcttgggacgcctacaagagaagaaatacggtgtatgaatccgaattacacagagttcaagtttcctcaaatcaaagctcacccgtggcacaagattttccacaagcgaatgccacctgaagcagtagacctcgtctcaagactccttcagtactcaccaaaccttcgttgcactgcattggaagcttgtgcacaccccttctttgatgacttacgggatccaaatgtttcactgccaaatggaagagcactgcctccattgtttaacttcactgcccaagaacttgcgggtgcatcaacagagctgcgacagcgtctaattccagcacattgccagggaacgggaagtagctcttaggatcatttatagcgtgtccaaatccagctttctttctctccctctatttactgcagtgtgtacatcaattttgaaccacttctgcttccaagcttttgtcgccggaggagagattggaaatctgtacgccgggacctgatgaa

SEQ ID NO: 123054 - DNA, 406 bp, Arabidopsis thaliana columbia
  unsure (1)..(406): unsure at all n locations
ggggggggagaacaggccccacggggggaggngagacggaggagcctctcccnaaggggggagaagccgggccacaacaaaaaaanaaaacaaggaagcgcgagcgggccacgccaggaagcgagcgagcacgccaccgcgaggcgcagcagcccgcggcacgagccggcgcgccgagcaggcccgcaacgcgcgagcgcagagaacaggaacaagggccctcctccttaaatgcgggggggggaggcggcccagagccagcgaaaagggatagagacaaagcacacagcggagggagagaggagaaacgacaaagcagaaaggagcgaaggaggagggaatgagcgagagcgaagaccagaaacagaccggccaccgacccgaccgaggcgagagagaacgcgag

SEQ ID NO: 123055 - DNA, 553 bp, Arabidopsis thaliana columbia
tcgggggggaaacaaacacccaaaagagaggggcagcgccctccccggggggggaagcgggcccacccaggaggggaggagcacaagaaccccgacagcccggagaggaacgaaccacgcgaggaagagccccacgccgggagacaagagcaccgaaacgacaccgcgaccgggcaaagaagggagggccctttttaaaaacaggggggacgagaacagaggcgccagacaccgcagcgcccggccacaggcgcgggcagcgggccgcccgcgacaaaccagcggccacaacaccgagaacaagaaaagaaggggacgcaagaagaagaaaagaaaaacaaaacaaacaacacacacacaagacaacaacgacacgagcccgacgcacgcgcaagcagcacacacccaccgcacaccacaaccaaaacaacacgaccgcaccagcccgcccacccacagacccccgcaccaataccgcgccgcgcgcgcccacgcgacgccgccagcaccgccgcgcaccgccaccggcccggcggccggcacgcaccccccc

SEQ ID NO: 123056 - DNA, 402 bp, Arabidopsis thaliana columbia
tatagaagagctatgacgacgcatgcacgcgtacgtaagctcggaattctgttcgaggggtggtctagatatagatgaatatcctcctgatgctaatcaaggattcgacattccatcggctttgataagcttccccgatcatcatgctagtttagatttccaagaagagctcagcacctcgcccttattatcaagtttaataggaaaaatctggagggcgctcttacacagaaagtattggctcgaacctttgacaacccctgattttagcatggcttaccacgtaatcacgatcacatgccccatctttggattgtattttgggatattggtaaatggctacggagaccaattgggaaaaaaaaagggtgtttaaaagccaagggaaaaaaacaggggggc

SEQ ID NO: 123057 - DNA, 487 bp, Arabidopsis thaliana columbia
gacggccgaggcgcgggacacgccgggcgcccagaggaagaggagcacaggggccagaaccgccgacgccaccggagcgggccgaaccgcccagaccgcaccgaaaagcccctccccgggggggggacccaacgcgacaagacacgcaaaaaaaagcgcaccagaacgcggagaaggacagaaacgagcccagcgaacggcagaaacccaaaaccccccggcgcgacgagagaaccccgagccccgcaacacggcccaccccccgcgccccaccgcccgcgccccacagacacccccacccccccaagcccgaccccaagcccagcccagaggcccagcaacgaccacccccaaggacaacaaaacgaaccggcaaagagagccgacaaacagcgccgccagacccaccaccacaacgagcccgacaccgccgagcccaccccgagcgcgggaacgccagcgccgcccacgcccccgcaaccggccc

SEQ ID NO: 123058 - DNA, 472 bp, Arabidopsis thaliana columbia
  unsure (1)..(472): unsure at all n locations
cactctagctgagctatgacgacgcatgcacgcgtacgtaagctcggaattcggctcgagtcaggatccagttgggacagccatcctctcaacaatgttgctcgctcatccaaggtttggttgacgtcgacgctgcgatttgtctatgcactgctctgagggctaacgttcttggtatcaaccttaacgttccgatatctctcattgttcttctggacgtttgtaacagaaagcttccatctggtttccaatgtgcttgagcaatatccattatgcatacgatgcgatgccagtgcacaatatacgtcttcgaaatttattatagtnttgataaaatgcatgtaaggtatagcttatgtatcaatcctaattttgtaaaagagaaaaaataaatgtgtgagatttttataggtcaaaaaaaaaaaaaaaaaaagggccggccgcccactagttgagcctcctcgaccccggg

SEQ ID NO: 123059 - DNA, 588 bp, Arabidopsis thaliana columbia
  unsure (1)..(588): unsure at all n locations
ctatgacgaacacatgcacgcctacgtaagctcggaattcggctcgagctaagctccggaacttaataggcgagagtcgccacctttgctgcgagatcttcatcacaattcttcttcctcctgccggagtctggctcaagcctggctgttgcactagaagggtcatctctctctatcaatctctgaacttttcttcttctggagggaaaaaaccgaaaccgtnattaaaataaaattgattacgcctaataaaaaatgaaatgggtcgccctccgggttacgggaaaccatcaatatgatgagaagggggaaaccattgccgaaaaaattacttggggggtttctggaaaaaaaaacccctagtaaggggacctaaaaaaaaattgttgaaactttgcctcttcccaaccccaatgtttttagggtaaacccggagggggaggtcctacattggtggaaactgacctgctaaggctgccacccagaaataattccccccactaccccaatttggtctcccccccccaaaaaatttttaaaaaacccaaaccccaaacaaaaaggggctgacacctcaaaaatcttccc

SEQ ID NO: 123060 - DNA, 548 bp, Arabidopsis thaliana columbia
gggggggaacaggcccccaagaagggagcgggcggagccctcccacaagggggagagacccgcacacccgcgaagacgacaagacagagccacgaaccccaccccgcggagagaggcgcagcaccgaaccaacaaaccgcccaaaacgcacgaccccgacacacccaccccccacaccccgaaagaaacttcccacacaagggggggccgagccccaacacacgaccagaacacacagaccgaccgccgcgcgaaccgacaccgcagaaagagcacgcaggcagaacacgaagcgcccgaccgccgccacccaggacaggaagctcgcaaacgcccggacgccgcggccgacagacacgcgcgcgcggcgggcgcgcgccgcgcgcgggcgcggccgcgcacgccacccacaccacacgcaccccgcacgcgcgccccgcgacccgcgacgcaacagacgaccaaacacagaaacgaggaccactacgcgatccgaaagcacacgacgcgcaggcgccacacagcagccgacgacgcaacaggcgccc

SEQ ID NO: 123061 - DNA, 551 bp, Arabidopsis thaliana columbia
ctgtgacaccgcatgcacgcgtacgtaagctcggaattctgttcgagctacgactaaccacgacaagctgctccagtgtaggatctttgcttatggtgacactcatagacatcgccttggaccgaattatttgcagcttccagtcaatgctcccaaatgtgctcaccacaacaatcaccatgaaggttttatgaacttcatgcggcagagatgaggagatcaattactacccctcaaagtttgatcctgtccgctgcgctgagaaagttcccacccctacaaactcctacactggaattcgaacaaagtgcgtgatcaagaaagagaacaacttcaaacaggctggagacaggtacagatcatggggcaccagacaggcaagacaggtttgttaagaaatgggtggagattctatcggagccacgtctcacccacgagaatccgggcatctggatctcttactgggctcaggctgatcgatccttgggacagaaacttgcaggccgctgaacgtgaagccaacatctagagggcattctcatataacctca

SEQ ID NO: 123062 - DNA, 473 bp, Arabidopsis thaliana columbia
gggggagttcggaaacaagaagaagcggacggcggaggaggcgggcccgcgacaaagcccagaggcgacgagaagagcgccgcgcgccaaacgacaatcaggcagcgttttttcttaaggggtgtgggggccccccgcacaaaaggccacgaaaaaaaacaagccccgaggggggggagaagggaggcggcagctaggacaagccacacgcagaggaagagaacagtggaggcaaacacgcgaccaaagagggaggcgagagaacaccaagaccaaaaacgacgccgggggcagccgagcgcgggcgagagccgagagcccgccgagaggccacgggaaaaagggtcgcggggaagaggaggccaggagagagaccacgcgccggcaaccaagcgcaagccagacccgcaaacgagacgcaggccacccccgaagcgaacggaaccgagcgcagcgcgagaccagacgcagac

SEQ ID NO: 123063 - DNA, 292 bp, Arabidopsis thaliana columbia
  unsure (1)..(292): unsure at all n locations
ctatgacgtaccatgcacgcgtacgtaagctcggaattcggttcgagctttgtagggaaacactttttaggtccaaagatcgagagagaagagaagattttgaattttttttggtttataaagtttcgtcttaagcgatcgattttttgtgcgaaagattgaaacctttttggtaagataattgtggttgtgtggttggatcgtgggagtggggtcttctttcgatggcggcaacaggggcangggaagcatggacccctgcggctctcgatgatatcattcggcggtttgg

SEQ ID NO: 123064 - DNA, 484 bp, Arabidopsis thaliana columbia
  unsure (1)..(484): unsure at all n locations
cactctacctaactatgacgacgcatgcacgcgtacgtaagctcggaattcgtctcgagggccgattcaccgagcttctcagcgccgacgagaaatgcgttgacctcgtggcgcgattcgccgaatccaagaagctgatcttcactagctgtcatagccaggttatgctgatggcggccggaatcctcgccggggtgtgtatgcacggcgtgtgaaagcataaagcctttgatcgaactctccggcggtgagtggtggcaacagcctgngattcagagcatgttcgagatcaccgattgcgttaaagacgggaatttcatgagtacggttggttggccaacgcttgggacgggattaagcttttgcttgaatctcttggtggcaaagtctgtagctaggagaagaagcaagcttctgtgcttttcctcattgggggctatgtagaagattatgggatcatggtacccgttagagcactacaagc

SEQ ID NO: 123065 - DNA, 603 bp, Arabidopsis thaliana columbia
ctatgacgtacactgcacgcgtacgtaagctcggaattcgtgttcgagctggagcgaaagaaagcaactttttttgggtgaaattcacagaacaaccaagggttttcttcttcttcttcttctccagttcctacagaatcatgcctgacaagaacatcgtagaggacgttatcggtgatttggaggataacttctcggagactgtggcagaagacaaacatggttcctccttcttcgaacaagatgattccgtcagttctcgtttcaaccgtttgtttgatcgccagaagccaattcatcatggtctaggcgggggcaaatctgctgatgtgttgtaatggaagaacaagagatctccgcaggggtttgatgggagctcccgaatttgggggccttttgaatggacaaatttcattttctggcctctcgttggtatggccctttggctgggattgatggacaaattcgtgtgggctaaccgccctgggattctaaacccggtcacaatctaaaatggcctcccttaatttcttacaaaggaattcctttgcttaaatccggtggggcccgtagaaaaagaagttaaccgcgggttggtttttt

SEQ ID NO: 123066 - DNA, 564 bp, Arabidopsis thaliana columbia
ctatgacgtcacatgcacgcgtacgtaagctcggaattaggttcgagatgaggcaagacctataacctcaggtgtcgcccgagaacggtgtatgccgacgaaatgtgtgtgtggcttataagtcacaatgttcgtctcaaaaacccaaagagaaccccttgacgacccgttctttccggtgtattaacaaaatgttttgcctcatggcggggggacacccaaaagggatggatcatgtcgttcaaatggggtccaagattcctgaggtttaaagaattaaaaagatgcctttcccaaaataaaccattatttgcaattgtaattaacaaagttaaatccgatgccaattgatttaaaggcgtttgattccagaaaataaaaaaaaaaccattgggccaacgcctggaaaaaccccaaaaaaacttggttgggccttgaaagttgttatttcggtgggaatctttatatccccccttgtgaagttccttccggatggtgcggccctccttaaaaaaaacaaccccctgagcgtggcgttttatggggtgttggtgggttgtaaaa

SEQ ID NO: 123067 - DNA, 491 bp, Arabidopsis thaliana columbia
gcagccgcgtcggagctcggatcctgcttggggggtaaacgaatcctactggaacagctcgatcagcaagggttaacactcatcttggaattgagcaaagtaggagggacgatctggaatctcttggctacctgcttatgtattttcttcgaggaagacttccttggcttttccttcgggccggagcaaaaaacagaagtgtgacgagatcaaagaaaacaaaaggcttacacctgtagaagttctctgtaaatcctttccacctgagagcacataatacttcctctatggacgaacattgggggggggaagacaaaccagattatccatacctaaagacgcttgtgagggatctctttatttcaagaaggtatcaagtcgacctttatttgacgagaccaaccggaagccccccacgtttagtgggggctccacctctacctccaagccaaaaacaagggcggagaccagctttgaaatccctcaatccc

SEQ ID NO: 123068 - DNA, 389 bp, Arabidopsis thaliana columbia
ctatgacgccgcatgcacgcgtacgtaagctcggaattcgtctcgagcccgagtgttgagatcgagactccggagagtttcgcggcggtggattctgttccggtcaagaaggagaagacgagtcctgtttcggcggcggtgacggcggcgaagggaaagcattatagaggagtgagacaaaggccgtgttggaaatttgcggcggagattagagacccggcgaataacggagctagggtttggttaggaacgtttgagacggcggaggacgcggcgttggcttacgacagagctgctttcaagatgcgtggttcccgcgctttggtgaattctccgctgagagttaattcaggagaacccgacccggttcgaatcaagtccaagagatc

SEQ ID NO: 123069 - DNA, 409 bp, Arabidopsis thaliana columbia
catgcacgcgtgcgtaagctcggaattctgctcgaggcgggtaccaacatttgaatcatagggtctcatcacagctgatcttgatcttggtgatgtagcaagagctaagttgtacttcgattcggttggacattactcgagaccagatgttttacacttgaccgtaaatgagcacccgatataaaccgggcggttcatttcgaaggtggagaaagcggaagatgactcaaacaagtaatcggttgtgattcgtcagttcatgtcactcctatgaaggagtcaagttcaaaatgttatgttgagtttcaaacttttatgctaaactttttttcttaattttcgtgtataatggaagagaaccaattctcttgtatctaaagattatccatctatcatccaatttgagtgt

SEQ ID NO: 123070 - DNA, 250 bp, Arabidopsis thaliana columbia
  unsure (1)..(250): unsure at all n locations
ttatttnaaagacaacgcattttctggatactttcaaccatacttacttttagaggcctaaactacttcctaatcgccaaaaacccacttttttattttcaagagaggtggnaaaacaatttcncgggtttcctaaataacataaaaaccctctctaaaaaaaaaaaatttttnnaccacaatcttcttcaccctctaaacaacaaatccaaaaattttcctccccccaaccaaaattattcaataaaac

SEQ ID NO: 123071 - DNA, 262 bp, Arabidopsis thaliana columbia
  unsure (1)..(262): unsure at all n locations
gcctgcgtaagctcggaattcggctcgagtcgggagcgggagcgggcaccctttttttttttttttccggggtctataaactgaactgagattgctctgctattcacttctctacattacaggcgttttttttttatctccacaccaaatacaaacaaagcaagaccggccctttcttttctgaaagaggcgggggcaaacaaccgcgttatngaaaaaaagaattcgggaaaaagagggaccctgggggtggtttcattcc

SEQ ID NO: 123072 - DNA, 375 bp, Arabidopsis thaliana columbia
  unsure (1)..(375): unsure at all n locations
ctatgacgacgcatgcacgcctacctaagctcggaattcggctgcgaaagcttatacaatatcataacacccacaagtgattcantgtttgtttacttatacaacaaaaaaaggggtactaaaatcctcaaattaaagctcatccctggcctaagaaaaaacacaagagaaggccgccaaaaaaaaaaaattttctcccaagggggggggaaaaactcaccccactctcagggagagaaaaccctcgactcatcggggcccacccatgtctttgaccagccaaaaaaatcccaaatgcgcgaaataccccaacggagcgttgtcttccacccgcccttgaaaactttaaccccccaataaacctaaaaaggcggg

SEQ ID NO: 123073 - DNA, 566 bp, Arabidopsis thaliana columbia
ctgtgacaacgcatgcacgcgtacgtaagctcggaattcctctcgaggaagggtgagccgtgaatttctctctgaggcaattcgtcgaacaacatggggtccaaacaaccatacctaaacggcgcgtactacggaccatcaattccaccaccgcctaaagctcaccgcagctataactcacctggatttttatgctcggggggggagctgcctcagaagcctgctacattactaagggtggctgatcttaagcctgatctgcaacataccaatagctggagccgaaatccctgggagccccggtttttttcctgtggcctcaacttccggccaaacgccgggaaattctacgtgtccgacccttatcttaacccgataaagttttgaacaaacaaaaacctccattacagggccgatctcaaatttaacaaccggaaccctaattaacgagcggggggcccacaacaaaaagtcctcggttaagggctattaacagagaacaaagaatccgatctgccaacgtgtgggcggtttattaaggggcaaaaaaaaaccacggggagttt

SEQ ID NO: 123074 - DNA, 294 bp, Arabidopsis thaliana columbia
caaaaatatgtgccggctttatttccattttccccttcccacaagggcaaagggctacactacgggtggaaccttgtcaaactttttctccccccccacactttggggtttttttccggtgaggcccttccaccaaccatttaaaaaaaaaaaggggcgagaaaaaagggcccgccccaaacccgggaaactgaaaaaaaaaaaaatttttttaaaggattcctaaccgcccttgggaaaagggccggttaaatttcaaacccaccaaaaggggtaaaagtttggtttcccccc

SEQ ID NO: 123075 - DNA, 485 bp, Arabidopsis thaliana columbia
gcatgcacgcctacgtaagctcggaatctcgctctaggggggaacgtgggttactcaatgggaggacaagctacttgggcatgccttaaatacattcctcacagggtggctggagtaacgcttgttgctccagcgggaactattggtggaagaactttccatcagagatcctcttttgaaacttgtggggggcaagggagaaatgaccaatggggcggaaaagttgcacactatgctccttggcttactcattggggggactcccagagctgggtccccggatcaaggtgtgggctcccatctcggtatgggggccaaaccaaacaaagagacatgtctaagctccgggcgggaaggagccaacttgagggacaaataaggggacaagggacacacggatacattgccccgggacacaattgggggattaagaacctgggagttctatccacaggagccccaaaatccttcccccaacatggaag

SEQ ID NO: 123076 - DNA, 503 bp, Arabidopsis thaliana columbia
  unsure (1)..(503): unsure at all n locations
ctatgacgtcacatgcacgcgtacgtaagctcggaattcgtttcgagcttggtacatgactttttgacagccactggtccatctggtcctgttactccagatggtgtgtggaaatccccggcagacactccttcctcagtgccattattctctcctcctgccaaagctgctacgtttggtcatggngggatcaaatcattgggagggtctattggatcagccttttggcccaccaatgcagatagtgcagctgaatcctttgcttcagcgtttaacaatgaatctactgaaaagaaacanactaatgggaatgtctgtaggctttttgggtttgagctanttgaaaatgttaatgtggatgaatgtttctctgctgcctctgtgtctggggctggccctttagatcaccctgtcccctccaacaattttgactctgggccgcattctgagccattaaacattaacccttctgtttttctttgggggagggggaaccctgaaaa

SEQ ID NO: 123077 - DNA, 501 bp, Arabidopsis thaliana columbia
  unsure (1)..(501): unsure at all n locations
gcatgcacgcctacgtaagctcggaattctgttcgagcggggggagccatattactccttcttcttcttagctctcttcctccattatcagattatcgtagcttctccattccaaggatttgatgctgaaaaagaccacgttaccgacgattgctctcaccttctttaccactcacttttcttcgctggtgggggtgnatctnacttatcactctccgataccgatccggaaccggaaccttcttcccgccaatgtaaatcccatcttatccctgaatcagatctcgaacatcaatcccgattcgaaaactccctcggctacaccatttggagtaccgggaccaaaaagaattcaaaggactcccccttgagatagaaacccttgaaccctccttggttacccaaaaagggaacctgttgcctgttccaaaaacccgcaatcttaagaacttcatggggaaggccaagggggacccttatggaccaacccgaaagaaaaaa

SEQ ID NO: 123078 - DNA, 537 bp, Arabidopsis thaliana columbia
  unsure (1)..(537): unsure at all n locations
gcatgcacgcctgcgtaagctcggaattcttttcgagaagggggagctgatcccaaattatattctctttttttcgatttttcgatagattagaaatcgacaaatccaaaagaaaaagtgagtggacctaacccatcgaatcatgactatatccactattctgatattcaaattctttttgagatggagggggaacacctngatttttttttatttcatatatttggattaagaaatccgtccatatctctcattgaagcctcttggttctatatatttcataggaaatatattgcgttcctgcctagaaaaagagatttttttgcaaagaataactaaaagggcgtttcaatattttttttgattcgagaacctaacaagaacctcccttctctttggtttaggaacaaattggggttaaaaataaacaaaatcgaatcataatcatggggtccgaatatcaataaaatattgcccttttggtgcccccaaaagacaatgtatgggaaccaaggtgttgggaaaaaaaaacctaat

SEQ ID NO: 123079 - DNA, 563 bp, Arabidopsis thaliana columbia
  unsure (1)..(563): unsure at all n locations
ttattttctctccccccgccccgcccccccgccgcaccggtaattttttttcccccccttctcccccagacgcccgccgacagcgggacgacccgagcgatttttcttgggggggtgatgggcccacacaaaatangcgcgcggcgcccggtcacatccgccataccccgtcgacaatcctctcagtcgtttgggctctttcgttctttatgtttatgacacttgactcgtacatcccgtcggttgtctgacagatacctcttttttcgtcgggggggtgtctcttccccgtttcggcgacggttaaaaaaaactgcttccgctctcttgtttcgttctctccttgccaatcgtcttttcccgtcccgtatctattctccagtatcaccatggcgcgttgtttattgcgtatctcttgtgctctctttatcttcgcctgattgtctgggcttccgttcatattcacctctctagcgtccttttccctccatctccccgttttcccgtcggtctttcctcgggaggcccggttgaccttatgcacggctattgtcactgtatcc

SEQ ID NO: 123080 - DNA, 541 bp, Arabidopsis thaliana columbia
  unsure (1)..(541): unsure at all n locations
gggaaagcgcccccccccgcgccccgggccccccccgcgccccttttccccccccgctggtgagggggggccacaaaatcaaacacnanncccccgcgccgcccgccgccgcgccgccccgcgtgtcgctcccgccgcattggctcggtcgtccgccgcgggcccgtagtgggtgcctctcgcgtccgccgcctgcgcgccccccgcccgcccgccccgccggcccccggcccgcccaccccgccccctttttccccccgggggggtgcccccccctcgcgcgggcggccgctaagcgaaaaaaaccccctctcccccgtctctgcgcgccgctggctccggcgtacccccctgcggtctccaatgtgccgaccggccactggccgcctgcccgccgaacctcgtccacgccaccccgtaacgcgcactaccttccacgccgcccgccatccctactccacccccttaggcattccttgctcctgccctccctcacgcccttccccgccgcccccccctccgtctggtgctgctcgtctcg

SEQ ID NO: 123081 - DNA, 260 bp, Arabidopsis thaliana columbia
aaccccccggggcgttggtgttatgctgctcgattctgctcatgtgtctacagaacgtacgcgcggccctacctccatacgtttatcttaccttccgtgacgatctttatgtagtgcgcatggttgcacgttaggttcatggtccgctcctcgcttgtttctacggtggggggggggccggcctttagcgtggtgtgcgttcgagcagtacaaaactacttcgccccggcacgagcagtcgggccgttgattcgcacccc

SEQ ID NO: 123082 - DNA, 455 bp, Arabidopsis thaliana columbia
cccccagcggacgccgcgcgcccgctcaccgctcccgagccccggcgcgcgctcgcgccgcgcccccgcgcgccggaaccggcgccggcgcgcgcgcccgccccccaccccccccgccccccgcccgcccgcgtccggcgcaccccccctttcccccgggggggccgggcgcattgtcgcggcgcgcgagaaaaaaagggggcccccgccgcctcgcctcgcgccactcatcttgcggccccctcccgaccctcgcccgacgtgacaccccgggcagcggtcccgccgaccgtggcgccgcaccggcgaggcgcggacgtcgggagccgcgtccgtcgcctcgcgcgcccgctatgacaccacaagggagacgccgcctcgcgctcccgcgacgccctgggtcccccaggccccgagcgcgccacacgcgcggtgcagcgggtatgccgtggcga

SEQ ID NO: 123083 - DNA, 669 bp, Arabidopsis thaliana columbia
  unsure (1)..(669): unsure at all n locations
tttttttatatccccccccccccttttttcccncacccacaccacacccccccccctcccttacccccttcccacctcctactttccaccctttttccccacgccgggggtgtttcttctctccccacatctaatacccctcccccctcactccccccaccctctctctctctactcaatcctccccccctcccaccatatatcccttctccctctcttccctctccctccctcttccctcttcctttcccttcaccctttactccgcatttccttcctcaccctcctcacctcttccctctcttttttctcgcgcgcgtgtgttccactccctcccctctcccccgcctctccttatttaaaaactcttcgcaccctcccattctcttcaatctacctatacccctctttcccaccttactatttccttcttcatttctccccctacttcccctccctctttatttcttctcctccttccactctactccctcctcttttctcctccccctcctctcctatccccccacccctctctcctacctcataccttcctccctcttactccctatcattttcccgctttatttatcattctccattccttcttccttatactcccttatttacctattttccacttcttttctcctccttctttccccctcc

SEQ ID NO: 123084 - DNA, 290 bp, Arabidopsis thaliana columbia
ccccctccccccgaacgacccacccggcaccccccccccttcccggggggtagaggcacaaaaaaccccccccccgggggcgcccgcccgcgcccgcgggcccagcgctactccggcgctgcgcgccagcggtgccacagcggcccccgcgcgtcgcaggcgcgctttttggggggggggccccccgcccctccgacaaaaaaaaaatcgcacgcgtgttccgccgccctgcgtggcggttcgagcctggcccgtgcgccgttttcgcgggccgccccttgccgccgagt

SEQ ID NO: 123085 - DNA, 601 bp, Arabidopsis thaliana columbia
  unsure (1)..(601): unsure at all n locations
cccgtctgccccctcgccccgcgggcggcgactcctttttttttccccccctttctcccccgcagggccccccccnaccccgcgaccccccctctcctttcccgcaacggtgtcgggcgccaccattcaatctcccgcctctctccttttgttttctccccctttcgccttccgcttctgttcgcgtttcgcctgtctccgtctcccctctctatggcgtcttcatgtccctcctaccccccctctcctgcgccgacggcgccccctctttttttttccggtgggggggnccctctccccccgggtccctccgtctaaaaatgtcctctttgcctgcttgcgctttccgcggctcgcttcccggttctccgctgttcgtctctgtccgggttgctccgtcttttcgcccgccccctttcgttgtcttgcccccgtgttcctctttctcccgtgtcccgcttcctgtttcgtttggtccccccgtttctttctcctcgcttttgtctctctctcttccctgtcttttctcgntttcctgtcctctttccctttccttcctgtctctgcccctttctttgccccctttcgcccgtctttctcc

SEQ ID NO: 123086 - DNA, 563 bp, Arabidopsis thaliana columbia
gcaggaaagcgagccaggcacagcccgcacacacacttttgaagccccagaatttttgggaccccacgccgcgggggcagccacaatttaaccggggggagggcacggcaacacacccccgggacgggcatgacacgcaagacaggcaagcccgggacccacgcagcaagacacacagcgcgacaccaagccgagcccacaccccagacagcggcgcgccacgcgccgacccgcaccgagagcacccgacataagccaggccgcggccttttttttttccggggggtgtggcgcacacaccgcagcgcgcacccgcgccaaagagaaaagagacacagccacgaagacccaagagaggacacagccacccccaggccctcccacgaaccagggggcgcaaacaagacacaggcagaagaagacgccgaaacgccggcacaaccacggccgcacagccaacgacggaaacaccaggccccccccccgcaactcgcacgcaacggggacgaacacgagaggaagcgggcgcggaaggcgacgccatagcaaaagatgagacgaag

SEQ ID NO: 123087 - DNA, 234 bp, Arabidopsis thaliana columbia
cgcccatccgtccgcctcgcgccctagtgccgctacaccgtccctccccttcttcgtccctctgcgcggcgctgccgccccccggttccccccacgccgtcccctccgccgcccccggtttttttttcgcggaggggggcgcccgctcacgtcacccccacccgctccacctaacgaatagcaacaccggcagcttaactgcgccccttcgtcgctcaaggcccccgggtccct

SEQ ID NO: 123088 - DNA, 481 bp, Arabidopsis thaliana columbia
  unsure (1)..(481): unsure at all n locations
cgtcccacgcaccccctacctaaacttggatcctctaaacctttccccctttgtgtttttcttttttatattaagcacaaacaatcattttattataaccacacccttctatatctnncaaatcatttccacaatnaaaaattaaaaaaaaaataaactctttttattacaaccaaaacctcatnaatctttccccacctcacaattttttacatgggggaaacctttcaaacaaaaattccaaacacaaatccttctttnacccctaataacaaaccccctttactaaaaaaatcctttaatacttccccaaatctttctccaacccataaatttttttttcaaaaccaccctctaacaacccaatcttttttttaaaaccctctcccccctccaaatttatcaccccctcacccttcaaacctttctttaaaaattcactcttcacaacccaaacttctttttcaaaaccaaaaaaccc

SEQ ID NO: 123089 - DNA, 473 bp, Arabidopsis thaliana columbia
  unsure (1)..(473): unsure at all n locations
actccatccccctactaacttgatcctctaacgtcccctgggttagccttaaaaaaataacccttttnnnnccaccaaaaccccttcttcaaaaaaaaataaacataaacactttaacagttaaaatctttactattataaacccttaaacatctataaccacttcaccctnaaaaattccctttattttttaacagggggggtgcccccccttacttctcttattaaaaaaaaaacaccctctacctcccttaataccctctccccccaaccctcctcatcctaaacttccccccacaaaaaacaaaaccctcntttttaaccccaaaccccttttccccctttttaaccctcccctttctcattacaccaaattttatttttttttttttaaaaccctctcccaaaaccccaaaactttcctttctttcactccccaaaaaacaaaacccttcctaaaaacacccctttaa

SEQ ID NO: 123090 - DNA, 475 bp, Arabidopsis thaliana columbia
aatgaattatgtgcactatacaagactatgacgtcgcatgcacgcgtacgtaagcttggatcctctagagcggtcgcccttggggtttgagctttattattttatatatttttttgtttttatattcccccagaagtaaatgaattgggccaaaaaagtttatgaccccacacatattgttttaggaacaccacctccagattcttaatggggcctgaaaaaatttccaatgactttttagaagggtgggagctggtcctgacgaatcccctaataattttggcaaaaatcattaagttaaggggggtcccattttggaatataatcaaagggttcccagaaaattaataatcaaacccccggatgggccaactcgatatttaacacgattctttttccaattctgcccggaattcactaaaaaccactcaaccgttaacggtggctgcccccctttatttaactgaaaacttta

SEQ ID NO: 123091 - DNA, 404 bp, Arabidopsis thaliana columbia
cgtttgttcgcacccgacggcgttctcgcagccgcaacgtaaggcgtcgtggcgtaggccgtacataagcttttagacgaaggcgacgactcgtagccacgaccagtccagatgtgttcgccataccaccaccgacagagaccgcacacgaagactcgttgtctcgaaggtagagaggaggcataaagcaacaactactcattcagatacctggcgtgatagagtgctacaccacaagacggaccttggagcagccaagagggcacgcttttttttctccagagttagagtcaccaacatcggaacgcgcacgccgatgcgctagaattgaactccgcgagtggcagtaggcaagatgacacgcagaaacagcggcgtgcccgccagcgaataagacagacgca

SEQ ID NO: 123092 - DNA, 447 bp, Arabidopsis thaliana columbia
  unsure (1)..(447): unsure at all n locations
cgtccgcccccccgccccggcccggcggcgggagcgcgcggcgggaataatattttaagaggcccccgcccattgtggcgcccgagcagcccccggccgggcgccccgccgccagggcggccccctattttttgccccgtggggtgtggggggcctcataatatataaatagagcgcggaccgcgggcctccccgtgtctcctctgtgagcacctgtcggctcgtcggtgtgccttctgttcgatccgcccgctctccgcggcgctcgagttggccgtcgtcgccatggggtgttcgccactccccgtcgcgctcctctgctgtgccgccggctgagggtgggtgggcacctgtttttttctccgcgggggtggtgtccncggcgcgcccaggcgcatctctgttccgtatgaaaacaaactgcgtctgtctctgtctgctcgttcg

SEQ ID NO: 123093 - DNA, 531 bp, Arabidopsis thaliana columbia
  unsure (1)..(531): unsure at all n locations
ctcccctccacgcctccctaaactttgatcctctacacccttcccccttttgttttttttttttacacataaacctcatgtttntatactttgcccataaaaaaacccttaaacactagatttagtttaaaatccaacctttttttttccccccaatgctccccattcactttttaccccattaaactaataagatttttttcaattcctcctaggggtgttttcanncccccttttttttttaaaaaaaanaaaacccccccttttttccccaatttaaaaaccccccccttaaaaatccccttcttcccttccaaattcccaacccaaattctttactcacaactttttttcccccccccctttcccctttcttttaaaaaaaacctctttttccctcccccccacctcccaatttatcacaccctttttctcccccccaaaccctcttcaccgaaccaattccctcccaacccccaaccctcttccttttttacttttttccttataaacaaaccccacaccccccct

SEQ ID NO: 123094 - DNA, 506 bp, Arabidopsis thaliana columbia
  unsure (1)..(506): unsure at all n locations
caagatctatgacgtcgcatcgcacgcctacgtaagcttggatcctctagagcggtcgcccttttgttttttttttagttacaaaaaccattatttatttctaaaacgtcaattattgtaatcaagaaataaaagtttctaaaatgattataccgagttgttaatttagaaagaaaaacttgaaaaagacgggattttgcccattaataatacactttctcttgggggcgcggganattcactccataagacctcttaaaataaaccactctcaaatccaaaattctaaactccttttttataaatccccaccctccaaaggccctcccatttagcccccctacactttagattttgcctttttttcccgggggaaaaaaaccccctggttcccaaacaaccgagagtggcttctgatccggttgcaataaactcaggctcgggtttcaatcccagccttaggggtccgggcccgaacttcttcccaaagccccctttcctttttt

SEQ ID NO: 123095 - DNA, 508 bp, Arabidopsis thaliana columbia
  unsure (1)..(508): unsure at all n locations
acgtcgcacgcacgcgtacgtaagcttggatcctctagagcgtgtcgcccagggttaggggtttttaatttatttttccacccctcaatcttttcccccgggggagaaacatgagatcctgacacataaattttgattgtaatagagaatttttttggataaattatgtaacaaacattaaccctcaaaactttaacccaatgggaacaatttgagaaaatnatcctcaaatttttctcttgtggggggggggagggnanaaaaacaaccgnggttttttttttaaaaaaacaatattttccgccacaccctcttccaaggtttttataaaacccctcaaaaaggcgagcccccccatttttctttggggtttttggttcccctttgagaagggaaacgtttttttttttacccccaccaaaacccaanttcaggcccacctttggctgcggtgagaacccagtttccccctttttttgccggggacaccactcttttttttttttgg

SEQ ID NO: 123096 - DNA, 520 bp, Arabidopsis thaliana columbia
atgaattatgtgaactatagaagagcttgacgtggcatgcacgcgtacgtaagcttggatcctctagagcggtcgccctttgtggtttgtcttttttaattttttttcttattttttgttttttcccgacctgaaaataaataaataaactatagtttttggcaccgattcgagaaaatgaaaaaaagtgggagaaaatttttttacttggaggattggatctattttttttttagaaggggggggaggatcttttttttttggatcctccagggttgaatcaaatcgcctccacctattggggggttgcttttcccctggaaaaaatggggcttgtttttcttcgcacggggggtgacattctaaagagagctgaggggccttctacaagaacattttgtttatattcaaacttaaaccgggcaccggtgggtgccaaggagactttttgtttttctccagggatgcaaatatggtggggaggggcccctcctgggttttgagctattagaccccccat

SEQ ID NO: 123097 - DNA, 427 bp, Arabidopsis thaliana columbia
cactactacaaaatctatgacgtcgcatgcacgcctacgtaagcttggatcctatagagcggtcgcccttttgtttttttttttaacataccaaaaccaacacatttaaaaaaaccttaatatatacatccaaaatattaaccattacacccagaatctcaattttttcaaaggtttgataaccatttacatgtctatatcatctcaaaaacaaaaattgaatttcttggggatgtgatatctgtttctttctgggcccaaaataaactaccttggaccagaaagttccatgggaaatgaatccaacgcttgattatcatcttcatcttcaaatcctgaagaaccaaacaaattttttggtttgggtgctcccataaaaaaagaaaatactcctaaaacacattttggcttggcaaaaatgtaaatg

SEQ ID NO: 123098 - DNA, 553 bp, Arabidopsis thaliana columbia
  unsure (1)..(553): unsure at all n locations
acccccccaattcccagccaaaccgcccccaaacggaaaaggagcgagcaaattacccaaagagagagagggcgccacacaaaaaacgcaccgggcacccaaccgggcaccaaacncaacaggagaccaaccgccagcagtggagaccgtggacaccacctgcgcccacctgcggggaccggacaaagagacggcccaacacacgaccaaaccaggaagaccaaggccttttttttacaagggggggaagacgcaccccaagagcgacagcaccaaaaaaccacgaccccacccaccgactggaccaatagacacccaggacaaggccaagacacagaacagcgcgtgaagcgcgacgaacgcccaccagcgtgagagaaagcagagaacaaacgagaagcggccgccaagccaccacgcaacaagacaccaagaacccgaaaagacgtaaccacgacacaacccagagcacggccgcaagccgagaccgcgacaccaagcccaccaacacacgagaacagaaagagggcagagaacccgagcgcgccatagc

SEQ ID NO: 123099 - DNA, 468 bp, Arabidopsis thaliana columbia
gggaacccgcccgacggggggaagcgcaccccgcattaccccgcggggaaacccccccacaaaccacagcgggaacacggccgaagcggagaaacagcggccggccaaccggacgaaaggccggaacgcagagcccagccgaccgccgccccaccccacagcggagaccacgaacgccgagagcctttttttttgggggtcgcgacagcaccgcaccccgcaagaagaaaagccccccgacccagcgaacgacggcccagcccaaccccgcccgcccccaggcggcggagcgcaaagagcacgaccaacggaccacaccacccgccgagagcccgcgcagagcagggcccgggggcggacaccgcagcacacgggccacaaagcgaccccccgcgcgacaagaggacagcggcgccaaaggccaaaacacggcggcacgcagcagacccgaggaacccgaccgccacc

SEQ ID NO: 123100 - DNA, 395 bp, Arabidopsis thaliana columbia
  unsure (1)..(395): unsure at all n locations
aacagcgaacagaagcgatttttttttgccccccaacgattgaagggaggaacacccacgacaagcgaagaggaggacaccacccttttacgggggggggaaagcccgaccgaaacaacggagacgagacaagaacaagaccacgcacaaacgggaaaacgacggagacgggcgagacaacgaaggaaagcggcagggacaacgcgaaacggacgaaaggcagagaagaacgaagacagaaacagaagaaggggacagaggcaaagagaattttttttttccggggggggaggacccaagacaaacaaagaggggacgnaaagaaaagaaaccgaaggaggacaggccgcgcagacaagaaagagagcaccagcggaaccccgaaccacccgcga

SEQ ID NO: 123101 - DNA, 483 bp, Arabidopsis thaliana columbia
aatgaattatgtgcactctacaagatcttgacgtcgcatgcacgcgtacgtaagcttggatcctctacagcggtcgccctttggtgttgggctttttaaaaaatcacatttatttcttactttttttttttttttttaaaagggagggatttccaaattgccccctcccacctaaaaaaatggccaagaaaatgttttttcctttctcaaaacattattttaagaaaaaaactttttccaagggggggtggaccaaaattttttcttttttaaaaacaaattatttcttttttcaaattcccaacgccaaaaacaaagcacttttaaattgcttaatgagcctcttaggcccttttttttcccccttgggggccttataggatgccactaaaactcacttttttaagaaaacgccccccccccccaaaaaaaccctttcacttgggccttcccccccttactttctttgaagacccccccctt

SEQ ID NO: 123102 - DNA, 701 bp, Arabidopsis thaliana columbia
  unsure (1)..(701): unsure at all n locations
ccccccccttttcccggggaagacctcccccccccctcccccataccccccgcccccaattttcccccttttccccccccctttgtttacactccccctttataccnaaaacaccttnnnncctcctcccttttttttntttccccacccccaaccctttttnncnttcaaacaaaaaccaacctcccttctccccctctcctcaaacttcacctccccccacaaatccctttttnaccccctccccatttctcccccctanctttcttccccttcnccccctctcttttctcggggcggttgtttgtccttttacacnacatccacccccccctttcacaacaccacccacaaagcccttcccccttttttcccttctcttccaaaggcttctcacacattgacttccccttctccttcccncacacaaccttcctcccacccacacccccccaaccctcttcctccccacacccttccgacttctttttctcctctccccccccacccccacttctttttttccctcccccacctctccccacctccttcctcaccatccttcttccctctcctccctatacacccctctcccctttcctcctctctcaaccaccccccacaactctccctcttcctcctcctccctctctttcttaccactctccctccccttcccaccctccccatctctctctctg

SEQ ID NO: 123103 - DNA, 440 bp, Arabidopsis thaliana columbia
  unsure (1)..(440): unsure at all n locations
gaccacaggggaagtttttttttttatacacacggcgcaccttttcgagggagaaagaaagccacggaggtggcggcggagagcagaggagaccacctttttcctgtcacggggggagagcgaagcggacagcatacaagcgagcgtcacgagggaccactgtcgtccaggcgcccagtcggagcggaatagacactccagagctcacgcacacgtgccccccccgaacgaggcacggcgcgaatcataggggcgcnccacacagtgcgacccacaagcggacgcgccagagcaaggggattttttttcacgaggggggaacgggacgacacaggcaccccacagcgagcaacagataaataacaacagatgtcgatcgaaagataccagcgtgaggcgccgcttgcagccggaggactgacggtacagaacagagagtg

SEQ ID NO: 123104 - DNA, 499 bp, Arabidopsis thaliana columbia
cactatacaagatttatgacgtcgcctgcacgcgtacgtaagcttggatcctctagagcggccgccctttgtttggggtttttttaatttattttttttttttttctcttttttttactttttttttttttttcttttttttttttttttttttcttgaaaaaaaaaaaaaaaacttttttttttaaaccccaacctttctttgtttttcaccctccccttttctatcggggggaagccccttttgctcaccaatattttaaaattttttctttttggaggggggggggaaaaccccttggtggaggaaaccctttaattactttccggattttttttacgagcggggggtgttatttttgaaacacccctgttggaccccaaattttttttttacacctttttgcccttttgggtttttcaccaatgcccttcaagggtttcttgaccttttttttggcagagcaaaatcttttttatactcaaaaaagcttttgaaa

SEQ ID NO: 123105 - DNA, 501 bp, Arabidopsis thaliana columbia
gaatgaattaggtgcactatacaagactatgacgtcgcatgcacgcgtacgtaagcttggatcctctagagcggtcgcccttttgtttttttttttgaaacgcacacgtaagtaaaaacccagagagtttgtcacacacaagtgcatcatagaaacgaaaacaaaaagggaaatgaaacaaacaaatggagaagcaaatataaaagaaaaaaagaaactttgatcccattcataaaaccccaggtggggaagcctttgatcttgagagcttaaaaacattttctgtgaacgattcctggacctgcctcatcatactcgggcttggagatccacatctgctggaatgggctgagggaagcaagaatggaaccaccgatccagacactgtacttcctttcaggtggtgcaacgaccttaatcttcatgctggttggggcaagggctgaaatttctttgctcatacgggcaacgatccctgagaccatagtggttccaccactg

SEQ ID NO: 123106 - DNA, 284 bp, Arabidopsis thaliana columbia
  unsure (1)..(284): unsure at all n locations
tttatttacccccccccccccaattttcgcgccggcccaccaccccggcagnatcgccgcgaagggcggccccgccattttttacagacggggggggtaggtgcctccggaaaagaaaatgccgcggaggggggcggcggcagcgaggtgtaggtacggtcgcggcggacggaatgctttctcgcatgcacgagggcagcacggtacaacatcgaacaagctgccggttagtcgacgggctaaaactgcggacggtactgagtccagcccaggcaaacgttttt

SEQ ID NO: 123107 - DNA, 416 bp, Arabidopsis thaliana columbia
  unsure (1)..(416): unsure at all n locations
acgtggcgtcgccgcgtacgtaagcttggatcctctanagcggtcgcccccagggggagggcgatttaataaaaatttttttttatccttttttccaacggttttttttttaccccgcggtcggggggggggcgccttgtggggcggctttttttaaacccaccgggcagggaaattgggtcccccccgcgcctccccccccctttttattgggggggggggggaacncccccatgggggcctttntaaattaccaaccccccccggtgtggtttttggcttttcccctcccccgtgtaggttttcgccccacaaaaaggtccccccggggagaggacccccaccgtggcccactttttttgagaaaaaacgttccaaaaagggcgcccccccccgagggcaccgttctggggggg

SEQ ID NO: 123108 - DNA, 193 bp, Arabidopsis thaliana columbia
tacaaaatttatgacgtcgcactgccgcctacgtaagcttggatcctctacagcggtcgccctttgggtttgttcttttaaagaaaaaactttattaatgagaattatccaatgaaagaccctccatttacttccttatataaacaataatataagcccatcccgctaaaatcactccttaaaccataaaaaa

SEQ ID NO: 123109 - DNA, 548 bp, Arabidopsis thaliana columbia
  unsure (1)..(548): unsure at all n locations
cacgccttttaacagcgcggggggagacgaccacgagacacgacggaccaccacgcgcgcacacgcgaggcgcgacacgaagcggaaacggcgaggcggaaacaaaataacgcgacggccacgccaaacgccgacagccgacgccacccgacacaccccagacggaggagacgcggacagaagagggaaccgatttttttagaggggaggggcggagcgacaggcgagcgagcaggcggaaggcgtcggaagcaagcccgcaggacccgagcgcgcgcgaccccggccacgaccgccacccccacccgagaaggcaacccagcgcaccgacaccagcatcggcgcgccaacggacactaggcacgacnaccgaaggaggagacagggagagaagcgaagaaagcgaagaacacagtaacacccaacgcagaaggagtgcggctagtcgaaacagcntcgccagacggcgacagacgagaaaggacaccgagatggatggccacgagcgacgcgaagcccggccgagcgggaagaaacagccagaaacc

SEQ ID NO: 123110 - DNA, 282 bp, Arabidopsis thaliana columbia
gagagaaccacccgaggcgcggggccagggacatttacacggggggacgcgaacaacaaaaaagcccacggcgcccaaggggcccgcaaacccgcaagagaagccgacaaggagagagagacagcggcccgacaagcaacgcggcacgcggagcacctacgcaggggaccgccaggcgcggcacgggagagagggcagcgttttttttccggggggggggggccgaaagaacaccagcggccgaagacgcgagaaaagacagcgcgcccgaagaacagccaa

SEQ ID NO: 123111 - DNA, 415 bp, Arabidopsis thaliana columbia
  unsure (1)..(415): unsure at all n locations
cccccccaaaccccccccggggggttcttttttttttttcctttgccaaaaaaaattccctcccccaaacaaaagaaaaaaattttccgggggaaaacaccaaatttttataacagccgcgccggaaacgcccgcnactttttttttcgggggggggtgggggaaacaccccacccggtgaaagatggttaaaaaaagggggccccacatttttgggggagaccctcccccaccccccacccttagggagggtacccacattggtctgggcgggccccccggaaacattgcccccccctcatttgttttccaacccggaaaaaaaattttcgtacgcagctccgaccggcgccagaaaaaacaacccctcttttggcataaaagagacaccccccccccccggcggccggtgctc

SEQ ID NO: 123112 - DNA, 435 bp, Arabidopsis thaliana columbia
  unsure (1)..(435): unsure at all n locations
nnnnnnnnnnnnnnnnnnnnnnnnnnnnnnnnnnnnnnnnnnnnnnnnnnnnnnnnnnnnnnnnnnnnnnnnnnnnnnnnnnnnncttttgttttgtttttacaaaacaatcacaaacaggcttatcttattatatctctatcatgcacgcgtgataaccaaaaacatttaaacaataacttttttttcaagtaagaaaaaaaagaagaagagtctttagtgaataatgataaaatgatcaatgtatggcggggggaacacatctattaactaaagccaacaaattactagccatctttttaacggcatagacccgtgcgcatatgtaatccttcctcgggtcatggggaatgtttttaatcccgcccgacaagtttcctaataaaataaaagcgaattgacccaattttgcaccttattaatttggaacctaaa

SEQ ID NO: 123113 - DNA, 312 bp, Arabidopsis thaliana columbia
accacaccaccccgcccgcggggaagaaaccaacaaccagacacaaatctttcgcaaaccacgggggggaaaaccccgccaccgcacaaaaaaaaccaaacgaagagaaaacaacaaccaagggccagaaagagcaaaagcaaaagcgaacaacacaaacaacaaccagacccaggcggagcgcacacggagacacaagaaccataagccgagcaagaccaaaaacaaagaaaacaacacaacagaacagacaacgcaagcgacgcagccacacaacgcgactttttcttaaagaagggggggaacgcaaca

SEQ ID NO: 123114 - DNA, 587 bp, Arabidopsis thaliana columbia
  unsure (1)..(587): unsure at all n locations
acggggcaccacccgtccgtaagctcggaattcggctcgagttataaaccaggggatagggttcccttaaccctaaccacaacaattncgggggggtctctaggaaatatctcactccccgctctccttcggggcgtgtggtgtaatccggattttttgatggaaaccccggttcggggttttttcctcttagaatcccgtgtttgggggtttttctattttcccccccggggttttttttttngtggggggggtggggaancnccccccctccgtgcgtncaaaaaaaaaccaacaccctccccccaattccccttttctccttcncccctccccccctttttttcttaaaacaccctctttcttttttcacactcccccaacatttccccaacctcttcccccttctcaanaacagaattgcggttccgcctcccccggcgtttgcggacaggaaaccgcttcccccttatccgcccgccagtgggcgccgtttgtttcccccccgcgctccggggctgcccgcgccgcctggccggctcttttccacacgtcccccgccgttggtcagcccgcccccgtcacgg

SEQ ID NO: 123115 - DNA, 512 bp, Arabidopsis thaliana columbia
acactataccaacatctatgacgtcgcatgcacgcgtacgtaagcttggatcctctagagcgttcgcccttttgtttggggccttttaaaaaaattttattattttttcaaacttgaataatgtctgataattgaccccatcctgatattgatagttccaaaaaccctaatttccgaatccaaaatcaaaaaagagcggcccccctttttttttttttttaaatttaaaagggggggggggccgcacacatatcccaaaaatctacaaatactttctccccttctttggagaaagggacgcccattccttgaattccctctacacacaatacattttattgggggggaaaatcaatcaaatccccccccattttctaagattggggttttctggaaaaaaaaatctctttttttaaaactcaatttttaggggccctctctgggtgttcaaagcaccactttaaaacccaacctctggcattgttcacaatccccaaaaagtgggggggctc

SEQ ID NO: 123116 - DNA, 515 bp, Arabidopsis thaliana columbia
  unsure (1)..(515): unsure at all n locations
gcaccccgcgtccgtaagcttggatcctctaaagcgttccccctttgggtttggttcttgtataaaaaaacccttctttttctccatccccatcacattgttaacttcaaaagagtcaagttccaaaaaaatacatcttttttttaacatggtactttatgaaacaaacccacccacccttttgatccccccatcattttttttttgggggggggggaacaaccaaatttcatcctctctaaaaaaaatttcccctgnanttattaatttcttggccccacgccaaaaattttttctcccggttggagaacaagtctcccaaaccttagttcccattttaagaccccgccccacgtgcttcctttgaacaccatttctccctggacacctttgtggggggagtgtaacccagttgggttggtaccgccaaaaaccccccttcttgccgcttctcgggggttgttctaaaaaccccccaaaagcccccccacccggttctgggccccattggcttg

SEQ ID NO: 123117 - DNA, 523 bp, Arabidopsis thaliana columbia
  unsure (1)..(523): unsure at all n locations
aatgaattatgtgaactatacaagagcttgacgtcgcatgcacgcgtacgtaagcttggatcctctagagcggtcgcccttgtgtgtttgttttttgaacttttttttttctctgggaacttgcaattttattctacaaatatacaagtgtagattacaccaaagtcacataggaacccagttacagaaatagacaaataactccaatacctatttggtaattctggctctctttttcatacagcggggattacgtctccttatntatactttattataaacccaattccaaaaaaatccaaantaccctttcccattcacataatttacacatcaattaccttccctgtttaacaataaacaccaaactttttttggctcaccttttcatagccatttgtgagtgatcaaaatttttgcggggaacccgactcacactggaactttttgatgggggaggttaatccttttggaatcctggggggcctttttaaacctgacgtgggtttgacctccaataaaa

SEQ ID NO: 123118 - DNA, 477 bp, Arabidopsis thaliana columbia
  unsure (1)..(477): unsure at all n locations
acactatacaagatctatgacgtcgcatccacgcctacgtaagcttggatcctatagagcggtcgccctatgggtaaagtcctttaaaataaattctttnnnnatttaaaacaaagaagtttattctccaatttaaaaataataaacccgagagaatttttcttatttgactacaccacaagttattaattacccgcacgaaaaactaaaaaataccccaaataaatattcagagggtggtttttttcccaaccaattaaaaacaaaaaaaaatccttccctttttcttcttaataaccccccatttttaaacccctttaaaaccaaaccccaaaacaaataaaccttaacccccaacacaaaaataaaccctttcttaaacccttaaaaaacattttttaattttaaaattttaacaccctctnaaaaaaaaaaaaancnctaacctcccaaaaaaatnccccccttnttcccctc

SEQ ID NO: 123119 - DNA, 485 bp, Arabidopsis thaliana columbia
cacggacgcacccaagcaaaaacaacaggagcacgccatttttttttttacccacccccccgaatttttgccgaccccaacccgaggccgacccagaaagcaaccacgacgcaaagctttttaaacaccacggggggaagagcccgcccaaaaaaaaaaacgcgggggggacgcaccagaccgggacaccgcgagcgcggccgacgccgcacaaccacgcacgcggacccaccgacagaacccaccaccaacaagcgacccgacgagcccgcaacaccacacacgaaacgcacccaagagcctaccgggagcgagcagacgcctttaacaacacggggggtgaaacaccagcaccaagcacacacccaacgcccaaaaacacaaaggcccaacgccaagacaacgacagagaggccaaaacccaacagccgcaaccaagcgaaacagccagccgacgacgcccaaaagcaacaaagaccacccac

SEQ ID NO: 123120 - DNA, 428 bp, Arabidopsis thaliana columbia
  unsure (1)..(428): unsure at all n locations
gtaagctnggaattaggctcgagttttctttcaggggaaggcgtctaaaaaaaanccannnanatcactnattacaaacacatnttctttcctcaaccatttaactcttnntaaaaacaaatnnaactaaaaacttcatantcattcattaaaatatnntttaccttatcccccccanacttctccttggggaggtggggaccnaaccangggggccttcaaaccatcaaatccccacgttcctgtttcctttgtccccccccccttttgtaaatcctgcctttttcttcgggcaaagaacatgaacctttcccacttcttcaaaatggaacattcgtcttagctggttaatgtgatacttgagccgccactggcgtgaatattcgcgctccccacttacctttcgaagagacgcgctccccccgcta

SEQ ID NO: 123121 - DNA, 242 bp, Arabidopsis thaliana columbia
gaccacacacaagcgagaaagccgcgacccgaatatttgaacaaggggggggggaagaccccgacaaaaaaaaaaaagggacgccggagacgacacaggcgaacgccgcgagagagcaagggaacccagacaggagcgcactagaaaggaaaggggagaggcgagcgcaaggaccgcccacacgcagacaaccgccaccacgaccacgcgcgagccgccgagccgcagggaacgcgcaccgc

SEQ ID NO: 123122 - DNA, 442 bp, Arabidopsis thaliana columbia
  unsure (1)..(442): unsure at all n locations
aaatttcttctttctccaaaacccataagaaagaactacataccccccgtaccttgatctctatccccgccccaccccatttccaatatcaaccaatacctacttttgcaaaaaccactttcctacnttcctggggtcgaactnttataatttgccantcccaaaaaataataccaccaccattttttttcaaacctcccccccccctatnttctttaaccccacaattcttacttaaaaaaatttcttttccaaaattccttaatttcaacctcacaacaccccccccttttttttttacaaacctaaaccttttctctctcaccccccacncccaaaaaaaaaatcacttcnacccaaaacactcactttccccccttcttctcttttccaaaaattcacacactctcccctaacaaccccnatattaacttcccccccc

SEQ ID NO: 123123 - DNA, 441 bp, Arabidopsis thaliana columbia
  unsure (1)..(441): unsure at all n locations
atgaatatgtaccttacaaatcttgagtccctgccgcgtactaagctcggaattcgctcatcaaaaagaggccaggctctnactatntctctctttctcttccngtgggtctatatttatatataaaaagacaagatctctggtctgaaattaaaagaatcttatttggggttttttcttaggattaacctctaatggcagatcaagtaaaagagctttttttagaggggggcgtctcctccccaagccctnttnaaaaaaaactcactctttatttcaagtgcctcccaccttctattacaaaattggaacctggttaaaaaaaaccccangccgggtctttttgaacctcttaaaagggcaaagccaacgttatgctggggggattcatatcactacttctcacagggggacaacccccattctaaatttttggctctc

SEQ ID NO: 123124 - DNA, 410 bp, Arabidopsis thaliana columbia
gtgtcgcaccagcacgcacgcaacgcgaccttcggaagagcccagagagtttttttttttacatacccccccccttcacgacgagcggcaccccccgcgggagcgcagggacggaccgacattttaaccgcggggggtggcccggagcaaaaaaaaaacacacaccaccgaggcaaaagcacggccctgcggcccccaagcagcacagacccacgtgtaccatacacgcccaccccgcaacagcaatgtgacatgcgtgaacccccccctgaaacaccaagaagaggcaaaagaatgagagcgttttttcccggcggggagcgcccccgcagccccgccacgctcccacgaagctatgccacgttcctggtcgcagtccacatgaggcccccatgccccaccccaatgcc

SEQ ID NO: 123125 - DNA, 470 bp, Arabidopsis thaliana columbia
  unsure (1)..(470): unsure at all n locations
gtgacacctatacaagatctatgacgtcgcatgcgcgcgtacgtaagctccgaattcagctcgaggtctnatcgtgggcttgggtactgaattcacataaaaattttaaaggaatgtgcataccctagctagggaagaagagaagactaactaaggatgggggggacttgtttctccggggaaacctctcacaacaatacccttttttcccaaaaaaatattttggggggggaaaaatnncaacaccaatccnnattaaaaaaaaatttcacctttttaacaaatcccctcccttttctccaaaaacccnaagtcctttctatccttacccttaaaaactttaaattcccaatttaaaacaacactctttataataacaaaaaccacacccctaccaattttaaattccaaaaaaaaaacaccttttttttttttaccccctccttcctaaaaaaaattttctctcaaaa

SEQ ID NO: 123126 - DNA, 260 bp, Arabidopsis thaliana columbia
  unsure (1)..(260): unsure at all n locations
ccaaaacacacccttttttttttttttttggaggggcttccatcccctttaagagctcttgggttcttgaatggaccaggctttaaaagggacttggttttaacctccttttggttacaacccaaaaccctttccgggngaaggaacataaaagcccttttntggggggggagggttttccaaaaaaccttttccatttaaaaaaaaaaaagcccccctttttttcaaccaaccccctttcccccaatttttaaaaaaaa

SEQ ID NO: 123127 - DNA, 476 bp, Arabidopsis thaliana columbia
  unsure (1)..(476): unsure at all n locations
ttttttttttttttttttttttttttttttttttttcgccacacaaaaaaaaattttcaacaacacccccccacacacccaaggggggtaaaaaaaaaggtcccaccccctcataatataactccattaataaacccgggaatacaaaaaaanattctcttccncccggggtgttggggggcacacccccaacggccttccaaaaatccatttataattcccccccaagggggggaccggtcttcccccacacacaccccccttttctttttttcccctccctttaaaaaaacctccacgcacccaaaaaaaaactcccacaaaaaaactcccttctcccacatctctctcgccaaaaaaatgtcgccgccccctctctcatatccccactcttataaaaaaccggcgggggggcgaggtttttcacacaaacacccccctcaaaaaaaacccacccaggcgccgcgcgggggggt

SEQ ID NO: 123128 - DNA, 280 bp, Arabidopsis thaliana columbia
ccgagttttttttttttctttttgccgaatttattcacaggacaccaccggcgtgcaccacggacggcgcaccccgagaacttactgggcgtgggtaaaatcccggtcacaaaaaaacggcgcagcgtggtcatctccgcagcccctctgagatacgtatcatgcttcgttgttcttatgttataggcacgactgtttagcatcatttggtgctgcgtctagtattctggtgaaggtatgtttatagtgttattcagcagcaaggcgtttttttttttcc

SEQ ID NO: 123129 - DNA, 309 bp, Arabidopsis thaliana columbia
gaggcggccggaccccacgcagcgcacagcgacgcggaccgcgggccggcgcgcagcaggcaccgcgggccccgcgcttttttttccggggggggccgcgcgaacgccgccggcgccgggccgagcggcggggcgcgccagcgcgccacgagcgcgcgaggccacggcaaacggcagcggaagagaggggggaggcggagggcggaagcggatcggacgccggagagacaggggcacacggaacaacgggcggcccagcgagagaacacacggcacagcggtacggcgcacagcggcgcggtcgccgcc

SEQ ID NO: 123130 - DNA, 516 bp, Arabidopsis thaliana columbia
gaagccgacagccccgcaacagcaggcggcggcgcacgttaaggaggccaagccccgcgaattaagccaagcgcccaacgcgcagcacaccccgcgacccacagcacaaattttcagccggggggagggccgagcaaacgaacacccagacacgaaacacgagagcgaaacacgccagcccccgacggcaccaaggaagacgggcaagagaacacgccgacaagaagcccgacgaacgagcaaacaccggcgaggacaggagcgcgcccggctttttttaacgggggggaccgacccacgcagcgacaggcaacacaaaaccaggacccgcccgcggccaagaagccgactcccgaggcggagcgagtcgacgccgaggacgcggcagcccaaagaagcgaagaagacacaacaacaccacgacaccctacgcgcagagacgccgcagaaacaaccaggcaccagcaacaacccaccaacgaagacagcaagaaacaaaaacggagacgagaaggg

SEQ ID NO: 123131 - DNA, 406 bp, Arabidopsis thaliana columbia
cgcgcaccacgacaccataaccccacagcaccaccagacccacacaccacccacctcaaagcgcccccccccccacatttaatcccaggcgcccacaccccccccaccgcaccccaccccgacgcaccccaaatttcccaaccggcgggaaagaccccacaacaacaaaacaaagaacacagagcagaaaccagccacaaacccacaagaacgcgcagcacggacgaacccccaacacaacaccagaagaacacaagcgcccgaagaaccaacgactccacaccaccagccccaaccaccaagaccacagccgaagccaaccagctcagcacgcacacccacggcttttcttttttccacggggggtggcccacccaaacacacccacacgccacaccgacccaaa

SEQ ID NO: 123132 - DNA, 311 bp, Arabidopsis thaliana columbia
  unsure (1)..(311): unsure at all n locations
tttgtgtcccccacccccaaattcaccagcgacaacgaacccccacaaggcgagagacgcggcaagggggaaatttttcagcgcggggagagaaaaccccccgccacacaaaaaaacccgaaggacgcacgcgacggcagagacagcacaagagacgaagggnaggcagaacgacggacaaaaagagaagagggaggaagagaacagacacacagagagaaaccgaccacgccgcaccaacagcagccggcaaagcacaacaacggcacgcacagcaacccacacggcacccgttgtttttttagaggggg

SEQ ID NO: 123133 - DNA, 181 bp, Arabidopsis thaliana columbia
ccatgcaagtgagttcgacggcaacaacgcgcaggccggttttttcttttcgatctccccccaaatttttttgtatgactagccaccagtgcggagcgcgaccgctcggctgtcggcgaccaatttttagccctgcggggcgaaattccatagcacactgcacgggccggggagaggggag

SEQ ID NO: 123134 - DNA, 285 bp, Arabidopsis thaliana columbia
  unsure (1)..(285): unsure at all n locations
acagacgaccggacacaccgaggcccacgacgcgcgcagccccacacacgattctttacgtgcgccccccccgccaacaatattacggaccgcnaaccccgaacaaagccgacacacacgagaggagcacccgccgaatttccgacggccggggggcaagcccccgcaacaaacacacaccaagcccaacaagagaacaaaccccccccgccgaccaccaacagcagcggccagcaccgacgacgagaaacacaagaaaaggagaaaaccacacggccagcaacc

SEQ ID NO: 123135 - DNA, 460 bp, Arabidopsis thaliana columbia
gccccgcggaggcgagcgcgcaatttaaccgaccggggggaagcccgcggaaaaaaaaagggcgggccagacaggacgcggcgggcgcggcggcgagaggaacggcgcagatgcacaagccgaccaggcaccaccacacgacacgaaagccggacgcgagaaaacgacagacgcgggggcgggggaggcacgagacgcttttttctcacaggggtgtaacgccgcgcgaccccgagaccgacagcccgaccgcaatatgcagagcccgcaggtcggacggaggggagcgccgggacagaggggcacacaccgccaaccgggcgcggaagcgacgaacccaacagaacttaaaaaagggccgcgacaccgaacagcgccgccggaaatcatggagaggagagaaggctaaaacgcaagagcccacatagaaagccaaagccccaagcacagcacacaagag

SEQ ID NO: 123136 - DNA, 524 bp, Arabidopsis thaliana columbia
  unsure (1)..(524): unsure at all n locations
cccccccgcgccccgaaggcacccgaggcacaggaggggcaccttccaggcccgggggggaggccgccccaaaaanaaaaagcaggccgccggccgcgggcccggcgggcgcgcccggtgccccaggagacgggacgagggcccgcggaggccggcccccggcccgccacacgcgagaagggggccagaaagagccacccgccccgcaccaccccagaggggcccaggcgccagacgcgacggccgctttcttctcacccggggatggggtgccgccacagcacacacaccgccgcgcacgctcagcccgcagccaagacacccgcagcggccacgaggcgcaagagacgagacacgccatacgccccgcgccaccagacgccacggacacgaacgcgcgcacacggcagcccgcccgtncgcccgcggcccgccacatacacccacacgcgacggacgaccacaaacacccacgccacgctacgccacacagcgcgatccacaaacgaccacacagcgccgcg

SEQ ID NO: 123137 - DNA, 424 bp, Arabidopsis thaliana columbia
attaattaacctatctaattattttcttctttcaaccataattactcttcaatttatctatcccctttctctccccgggggccacaccctcccccaaaatttctattactatctatcttatacccatcttccccaacctttcttatacttaattcccttctctcctactccccacttctttttcttgtattacccctctttttttctctatcttatcattattaaaattataatccacccattttccacctcttatataccatacaatacctcacaaatacaatgtggttaatcaaaccctccctccaccacttcctacctttcattcatcacatcctcattaatattctatctataactcttataaccttaatcttttactttatatttttatttatatactctcacactccatatactactt

SEQ ID NO: 123138 - DNA, 231 bp, Arabidopsis thaliana columbia
tacctataaccatcctctttacacatctatcatacttccagctacatatctcttcatcatccaccaaactcctatctacattcaacaacgatcaccattattaatacaatatccaccattttaattatcaacgggggttcaccaccaacaccaaaccatattataatatctcaatattatccaaatctcatacatatctcccaatctacctctctcactctcaccgctccc

SEQ ID NO: 123139 - DNA, 418 bp, Arabidopsis thaliana columbia
tatacgtcactctgcccctcacttcatttttcatcttcactccctcttccttctttccctcttcattcctcccctatttcttccctttctctccattttctcccctccggggtgctcctattccttttcccataaacctccccttttatctttctttactctctccactccttccctatttccttttctttcaccccaccatcctttcctccctccttcccaccccactcctcttcctttcctcccccatctacccctctcccactctctctctttcattatcctcacattttatcactaatcccccaacttcttctctaagatctccttctatactcacatatttatcgtggttgttttccaccactttcctcctacactacgctcttaccttcttcctttcactaaaaaacccctt

SEQ ID NO: 123140 - DNA, 333 bp, Arabidopsis thaliana columbia
ctaccattagagcggtagaacgaccggacaggcgaatgtctcgtccgttaattatcgatagccagggtgaagtagacgatgtatagatagttatatcggcttggtacgaacgcgtacgcacgggtggcaatcgagtgtggaaaggatgcgtactaacccccgagagttcttgcgccgggagaggggtgataaacgcgatgctgtgaattttgttggtttggggtagctgagtttgtggtgttataacgggcggagctgcacggagacggtcatagtagagtgtgggtggacagcgagggctatctggatgcacgtagctatatgagaagaact

SEQ ID NO: 123141 - DNA, 264 bp, Arabidopsis thaliana columbia
ctcattattaacacatcccaacactatggggggggggggctctctccacctctacacacatccctacctctcccccaaaaaaaatcccgtatattacccctctacactccatttttgctaatataaaactctccatattatataagccacaccccctcattctttttatccctcatgtgacattatatactccccccgccactctttccgatttgttatcaattttgtgccactccgagatagttccattatataatatccttt

SEQ ID NO: 123142 - DNA, 576 bp, Arabidopsis thaliana columbia
tcctcctatactcatatccaccttctaactctcctactttccctctcccacctattacttctctattttttctcctctttctcacctatcatatatattacttctttttcctctccctcctacctctaattatatctacctctcatccacttatacactcaccatacactttctcaccctaatatcatgggcgtatatcatctatcaaccaaaatctatcactatctctctacctctctccctcctccttctatttacactcctcatctcatcccatcttccatcaacctcatatctccacatctcccctctctttaattcatctattctcttccctctttatctctattattcaacatcactctttatatatattattcatttaatcctctctttttctttttcctatcttctttcaactacactgggggtatacttaatatcttttctatcttcttttattttcttaataaaaactcttcccatttcctcccctcctccccctccttatcctcccctctcactcaatatcttttcttcttcattctttctccctcccctcttcttcccttctca

SEQ ID NO: 123143 - DNA, 556 bp, Arabidopsis thaliana columbia
cactagtcgcatccgacctctctcctatcccttgcgcccacctttgtcatcgtattttttcttatctatgctcttcattcgccatctttctcattccccccgcgcgcacacccgaccgcaagctccttcccgcgtgattacctcctcacaatcgtagcgctgtacgtcctcccatcacctcagtataggcgctcggccgctcttcgcctcccttcccctgcggctcttattcttttgtgcgcactatgcgctcgtcacctgctcatccaggcgcagtccgtggcacgtgctccgcccgtccaccgctatctcacgactcacccaacaccgcaatctcctcgacgtcgagcccgtcctcccctccaccctaatcgtctctttaacgatgcatacacaacaaatttctgatcatattacttccttcggtagtcagattgttatgtgtcgctttacatcgtctccctagcgtatcgttctctctgacttttccacttacactcctagcgggggggagtcgtctctttttctgactactatcaatggttatatttttatc

SEQ ID NO: 123144 - DNA, 137 bp, Arabidopsis thaliana columbia
taataccgaacattacaacctcaacacgccggaacgaacccactcatccgactaatcattcacccaataagcttgatggacacggttattctctaaaagcccaaaatctcagggggtattatcacagttttccatca

SEQ ID NO: 123145 - DNA, 639 bp, Arabidopsis thaliana columbia
  unsure (1)..(639): unsure at all n locations
ttatatactcctctctcttcttcatcttatctcctttcccaccttaccctcctacatcaactcccacctctctcctatctccccctacccaccatcttatataatccaatcccactatccctcacaattcttcctcctccactactatctttcctctcccccccttacccatctcttcccctcctaccacatactctcccttctccattctctcacatacctatcgggctccatttccttcctctcatacaatttcacttcattcttccctccttttctctctcactctcatcactcctcatatttatctcctacctttcatcctccacactcttcaactcacacccttctccttctcttttactctatctcctccctccttctctcccccccattctacttcccatctatattcacacctttcctcaactaacccctctatacaccatatcaatcatactctctttcatttatcacttnagctaggggggctaatatttacaacctaatctaacacacccataatcatctcactatcacacaaaaacatatctttctcaccaatttattctctattcttttacattattctctattttctttcataaactatcctccccatcccctccaacacctatt

SEQ ID NO: 123146 - DNA, 559 bp, Arabidopsis thaliana columbia
actatatactctctcatatatcacaccttctggtcgatagttaaccagtatcgaatatgtaattcgaatctcatacactccatacttcaatctctataccatcaccttaataaatctatcgtgtttatgtatctcactatccatttacattacgattacggtcccacccttaaccaactacacatgtacttttactattaattcatactccccgtctcttctgattcgcagagaatcagatgttacgccctacacaccccacgattaatcacaaacataagccataaccaaacacattattgtagccagacgaccttacctcattgcaaacagaatactaccccgacacacacaacacaacactaatacaccatataagatcttacaaccacccatcgtccaatcttgcacatgtctatcccctatttacgccacaagaagagcacacaaccaacaccaatcaacgcactactacaaacaatacaacaacagcacaacacactaatcttaaggtgaggtcaaatgtatataagaactaacgacttagtaggaaaaacaa

SEQ ID NO: 123147 - DNA, 407 bp, Arabidopsis thaliana columbia
aaatattctatccacttcatctcttactctatctcatcatattaatataccttcaccaatcaatcctgattctattttttctaatcttaccacatctctaccatccatttgccacattagtatatatatatctctatcttctcattatcctcaaccacattcacctcacactacacacacctactttaacactatccctcacactatcaactactaatatccgacaaaccactcacacacatccaacaaataaggggggggggcacctacctcccaccaatacgccccacactccccttcaaaaaaaattcccctctccctctccaccttctaaattatacacttattcaccaaacatccataactcatctcatctataaattctacctacatcactctaatccact

SEQ ID NO: 123148 - DNA, 496 bp, Arabidopsis thaliana columbia
tactcaccaacaacatataataacattatatctcactttaacactcacaatatatattaatcctctcatatacatatattaattcctatacctcacctccacacatacacacaccttgggccctcctcctctcaatataaaaacaccatttatatcctttatttaccttctctttataactatttaactaatcatccaaaaaccatttctctccccttcctcatacactaaatatttattactatacaattaaccatttacccatatcctcattataaaataaccattatatatttctattatttcaactcaattttctctaaatattaaaaaaaaacggggtcaaaaactctcctactataccctaaacactctattatctaataaaaatacttatttctcctcttccaccttctcctatactctttacttctcttttttctatttaatacccattctctctattaacctattcactcctccaacttactaatta

SEQ ID NO: 123149 - DNA, 293 bp, Arabidopsis thaliana columbia
accctatccttcttactatcaatttactctacattaccatccttcaattattcaaaacacccatcttatcatacatacctaccttccttattccatccaccatcttattcattcacttctctcctcttcttttattttattggggtatctattattattctcctttttcttattttattttaaataaaaaacattacttctattctccctatttttaaacatatattaatattcatctttatatctactatcctcacctaaattataataaaacatataatcaatcctctcaa

SEQ ID NO: 123150 - DNA, 509 bp, Arabidopsis thaliana columbia
  unsure (1)..(509): unsure at all n locations
tggatccctctattagcggcgcgcgcgctgtggggccnaaaatataaattttttattttcgcgttattctgcgtgtgggctggggtctggtggcgtgggggcggggtttggaaccccccccctttttttccggaggggggggccttcccctgggaaaatttttcccggggggggaaccccggggggggccaaaaaatttttgagcccgtaaacttggggggggaggaaccccttttcccagaaacgcgccgaaatagggggggtgtcctgggggggcctttttttttgaccccccggtttttaggcccaagcggggggttccccgaggccttttaaagggttgtccgcgagaaaaaagaagggggggggggaccggtccccccgaagcggggggcctttggggggcgcgccggtggtgggacgggtttttgttttgtgagaccccgtttgttgcgtggggccgatttttgcgggggggggcttttggcgcccgtttgccgggagggggg

SEQ ID NO: 123151 - DNA, 323 bp, Arabidopsis thaliana columbia
ccccaaaaaaaaaattcttctttaatcttttacagggcccagaaacaattcccccaatgcaccaaatctcctgccccccccaaaacccttccctccgccccgaaaaatagccgcggccttccaaaaacccacccccccccccaaaaaatttttttccaccgggttgtcggacccaactcccgggttccccacaaaccacttaacatcccctttttcccaaaccgcattgaaatgccaaaaccctctttaaacaattctccacgaacctcccacaaaaaacccaccctccccccacccctttctcatccttccccagaaaaccc

SEQ ID NO: 123152 - DNA, 517 bp, Arabidopsis thaliana columbia
ttaatacttgacgcctgccgcgtctagctggtccttaacggcggctgggttttttttaccccttttttgcttgaattctggagatccttttgcttagacttctggggttaaagatcttttggtcttgaccccaccaatccctttaaatttccctggggggtttctttttttgagccttgcttaaaaaattggggaatttctaaggttctggtttcttaacaattcttttgctcttaagtatggaagccctctttttatccaaagcttcccactcttttctaaatctttccttttctgggtaagttcttacggccttaaaaagcacccccccccttgcttaccttatctacggggggcttaaggaaacggggcctaaaaaccgggccctcttttttttgggaacccaaaaactttgatgggtgcctcaaagaaacccctggattcccggcttggggggcccaaaccccgatccctttcaaacctattcttttaagggaccgcaaacttttcttttttt

SEQ ID NO: 123153 - DNA, 482 bp, Arabidopsis thaliana columbia
ccccccactttcaggaaacgaaaacccccgcggaggaaccaccctccccacgggttataaaacacaggggcacgcccccccccccaacaacacaaacacaacagcaccacgcgccgcagccgcgacgagccaacccgaaagaaaacaccccacgccagcccggaggcccccgccgaacccaagcaccaccacaaagcgaacgcccgaaggccccaacccgaaaaacgctttttcacacaaagaacgggggacaccacaacccacaacgccccgacacccaccaccacacccacccgagccgccccacccacccccagccaaccaccgcaacagcccgcgaggcagcccaccacacaagcaccccacatccacgcagcccaaaccaaaggagacaagcacaaacccacgcgacggcacgagcaccccccagaccacaccaaaaccctaacaacgcccgccaacgacacaacacccgacgccgc

SEQ ID NO: 123154 - DNA, 240 bp, Arabidopsis thaliana columbia
acaaccagaaacattcgacgggccacgaggagggaacggaggagaaagagaagcatcgacataagaaggagtaaagtggtcgtatcgtagataggtgcgtcggtggtgtttcgttaccaccacatacccgcaacaacacctccttttagaagaggggggggaacgaatatagaacataatccgagaaagaaaaacggcgacatgagaaacacacaaacgtgagaataataatctataaac

SEQ ID NO: 123155 - DNA, 556 bp, Arabidopsis thaliana columbia
acactcatagaatagctatgacgtcccatgcacgcgtacgtaagcttggatcctctagagcggccgcgctttttttttttttttaaacctaaagttttaaactcatcagctaaaactctctttacatatatattcttacacaagagtgcgtcgtcgatgttacaagctgctgacattaaaatacctcatgggtctctttccaaaatagggtttcacttgggggttctaacaaggcttgagttttttttattaaggttatcatttccaatctactgggtaaccctgggtatcctccataaagatttttttttaagggggaatctggaaattagcttggatgaaactttggccctcggtcttgtgaaattgattctaaaaacccccccgttttcccaaggtgaggttttaaactggagaggcgtttccattagttctgcctaattacgggttttgcgcaaagagtggtggtttattaaagggccaagaagttcctctgggaatcttccggaatcgggaccaaaaaaaattcttcacaagggaaaaaataagttttggg

SEQ ID NO: 123156 - DNA, 446 bp, Arabidopsis thaliana columbia
tacgactttatatagggaacgctggtacgcctgcaggtaccggtccggaattcccgggtcgagccaggcgtgcgcccacacgtccggacctctcaattcgaagccgctctaaaggaactgaattttgtttcatcatctgacgcagagagtaggctcaacaaatatgctgaagatgtggaggttcattttgcatctagaaagaagatagaagggggggcaaaagcaagaaatttgctgttgcaaagtaactttacgattccccaggatattggtatgaggaatgccaagcacatcggctgcttacttttctcctctgaaaggggggggggtatctgaagctgcatctcaacttatgaatttggtgcataagacccctccagggtggcttggttttttttgcaggggttggttcagagttctacaaccctgctagagattctattcct

SEQ ID NO: 123157 - DNA, 583 bp, Arabidopsis thaliana columbia
gacactatagatttactatgacgccgcatgcacgcgtacgtaagcttggatcctctagagcggccgcgctttttttttttttttttttttcagacaaacatagaaatatttctacttccaaatctttacggatttgtcatgacttgcagacgcaaccactcccgtggaaggggactgagccaaggcagagatcacacactcgtggcctgctaccggggggcatttgttctccattgggttccacaaatatatagcctgatagccaccgatgaccaagagatcgggatagctagggtgaaaaacaacagagggggaccttggttccactgttgctaaacctcgaggatgcaatctcctgaactcaaggaccataattttacagggggttactaacagacgccccaactctccggttggggctcaacaaacagaaggacatttgaggaatgggccttaaaaaaggtgacccggtggttttattttcaatttaaaaaatgacacattttttctgacccttgagctaaaaacttgcctgttcttggtggaaaacaaactgggtgctaaccccttacaaaacaaaagg

SEQ ID NO: 123158 - DNA, 455 bp, Arabidopsis thaliana columbia
tatagggaacagctggtacgcctgcaggtaccggggccggaattcccggggggagccaggcgtgcggccacgcgttcccccacacgttccaccactcgttccgccacacgtgcggatttactcttaacttacaggtgattaccattcactgggaacctctcaagaaccctagaatcttttttttccttttcaaattggaaccggcagagggggcttgatctttaaatttactgaaaaaaagaagaccgaagtaggggcctgacccacttgatatttaatgggggggggggtttttttccagcagcgccaattttgggcttaaagttttggttcaaagaaaatggggaaagcccaacaaaagcttcaagggttaccataaatggataatttgggggaagaaagaaacctcattaaaaccggcgaacccgtttattacgtgagagggggggggtcct

SEQ ID NO: 123159 - DNA, 398 bp, Arabidopsis thaliana columbia
ccgatttatatagggaacgctggtccgcctgcaggtaccggtccggaattccccggtcgggccaggcgtcccacaatatccgctctgaacagaaaaaagggattctgatgtctggaaaaaccggttacagagaatcccagacagctatcatgatcatcgggatttacctccggagagacttttctccttggccctccatgtgtggggcctccaccaccctgttttgtaaaaaatcttcccataccgggagggggaaatcagaaggcaggatgctgaaatccaaagggttttgagggaatatcatgggctagcttgacaacccaatgggttctgagagagaactcctttcttgtaaagaaaactttcccgaatgaaaccgaggaattctgatcttcgcg

SEQ ID NO: 123160 - DNA, 410 bp, Arabidopsis thaliana columbia
gggggagggcgggggcaaaacaaacaacatgcagcactaccaaacacgcagtacggcagtgccaggcggcaaggttcagagcaaaactccggttgaggctaggcggcgacgggcggctccacgaccgagcacggttggagatgcggggggcgcggcgcggctcgttttttatcacacagcgggggggggcgcggcacatatcccactggctcccggcgagaaaaacctcgccacccacgcacgaccgacccgccttcccgacccgcgccccttgctgatcactagagcagtctgctgctgcgcccctccatacactcagcggcgcaacgcacgcacacccccgcaccccctccccgtgctcgggtgacccagcgcgccttgccgcgcgcgcccaacctcacacataccgt

SEQ ID NO: 123161 - DNA, 501 bp, Arabidopsis thaliana columbia
acccccccacacttacgagaggcgagaaacacggccaggcgaagcaccagcacaaaccgcacaccccggctttacaaaaataaagggggcaacgcccgaccacccgaaaccaagagagaccaaaagcggccgcacgcgcggccgcacgcccaaaacgccgcgcccgcgaagcaaaaggacccagcaacacgcaaccaccctagggaagcgcaaacacagagcagaaccagcaacaaccgacgacgccgacaagcggaaccgacgacacgcacaacaagaagcaaacacttctaaaagaaacacacaggggggggcgacaccagagcgagccgcagaaacagccaaacccaagacaacaccaccaacaaacaacacacaccgacgcaacgaccacaagacggcacacaaagactacacacggcgaccaagaagagcaaacagccacaacccaccccagcgagccacacaccggggaccaaccaccgcggcaacagcaaacac

SEQ ID NO: 123162 - DNA, 478 bp, Arabidopsis thaliana columbia
taaagggagaccagggggaggaggagtgtatcactcaattttttccaggggggggggcggcatgcaatatatgagggtgcgggttcgcgcgttggcttctaataatatttatgcatttggtcttttattttttatacgtactatcaatttactatctagagcctcaacctaagggcgggggcggttttctcatggtgggggcgaacacgattaatatatgacaaatcaagcaatctgaacataaaagatgacttaatattttataatggaacccaataaattcgatgcgaaatgcagcgacaccagaactcctttctacacgagagcggacaattagtcctaacgaaaattcccatcatgcatattattattatcgacgttgttagtgctcgctatagaggcaaagagtcgtcgaggaagacgcccaggggaacgtgaccgggccgtggcctgtaccactcccgagcccgtctcccgg

SEQ ID NO: 123163 - DNA, 159 bp, Arabidopsis thaliana columbia
gggtatatttgtgtggcgaacggtggattgagagttcgagagaggtgtagtaggccacagaaaggaggatgtacggctgtagaatcggagtgggatgcgcgcaggcctcgacggtacgtatgatggctggggggcggagcaagagaaagaattttcatg

SEQ ID NO: 123164 - DNA, 565 bp, Arabidopsis thaliana columbia
  unsure (1)..(565): unsure at all n locations
ggggggggcccgggggggggggtggttnggttaagccctcttactcaggggggaaggcctggtttattaattacctccaccccctccccccacctcctcttacatactacaccggcgcgtctaaaataacgacgaataacgaagtgagggcgcaccttctcttcactataacatcacctcaaccccaccacaacatctttctttctccaaggggagggacgccaccctaccacaggttgttacagaataaaaaaacccccccgcactgcccatttcccacgcggtaccgctccatattctatatcaccacctgagcaatacaacgcaaccccccatcattcctgtcatctgcgcctccacccgctcaccctctatcactctctcacctccctcacctccaacccggtccacctcctctcccaaccaacaaaacaatcccaacaacaacagcacccgcccgtccgacacccgcgcacccgcactcatcgcacaccacccaggacacctcagcccccactctaccccccacccaccccacctccctctccgtaccacccacccccct

SEQ ID NO: 123165 - DNA, 484 bp, Arabidopsis thaliana columbia
aaaaaaaaaagccctaaataaacacccaactaaaagaaacaggggaaggaaaaaccgacagcctcacaggggggaacccgagcaattcagccccccacccacacaccacacgcccaacccgccagccgcacacgcacagccccacaaaacacaacccacaacaaagatcaaaaacaacacaaaccaaacttttcaaaacacgggcacaacgaatccacacactcccgaaccacacctcacccgagcagcgcctcacgccacaagcccgacgccagacagaccaacgagagcgccaatcctacacacactcacccaccaccacaccccacccaccacccgacgagaggccacgaccacagacaaagagacagcagacagtagaaaaccacacaccgacacaaccagacgagccccgccccacccgccccacccccaccgccccccaccccccccacaccccccccgcaccacccctcaccaccac

SEQ ID NO: 123166 - DNA, 540 bp, Arabidopsis thaliana columbia
gctccccctccaacttgatcctaaaaacggctatgctttttttttttaatgtacccatcaaccaaacaatatcgggaggtgctcattataaaatatcaccttattgactttatttttttaaaccaaaaaataaaaaaactaacccttctaaattctcataaaaaaaagagtggtttttcaaccccctaaaaaaactataaaattccccatttttcgctcaaattcaccccaaaactaaaaactccccacctaatggttttttttttaaaaaaaattcaccaatttcttcgcccaccctaacaaacaaaaaacaactcaactcatcccccaattcacacagaattcctccttcatctcttcctcctttctctttgttcggactcacctataaccttaatttttaacttcaacttaacctttccctttaaccgcgcaaaaaaaaacacactcaaccctcctttagaaataaacctctcaaaaaacacccacaaattttctccccctttcttttttttcctttaatcaacacataaaaacaat

SEQ ID NO: 123167 - DNA, 669 bp, Arabidopsis thaliana columbia
  unsure (1)..(669): unsure at all n locations
cccactccctccctccccccctcccncaccccgcccccccccggaggnngggggggggaaggttaattttcgaggacgtccctcccccagttttnttttagggggaaaccatagggctcccccctgccgagaaacccccccccccccatttcccccnntcgggcccaagccctccccaacaaaaattcanacaactccccactctttttctttcaaaaaattctcctaaaaaaaaatttttttccccaattaaaattctttttcaaaattcttccaaaaaccccccctttctttttttccatcccttaaaaatttttttccccatttttttttctctctttacacacccgttgtcgcacaacctcctcccttagcttttttcctcatattccacccattccccaaattcaaccggaccccttttttttttataaataaataacaaacattttcccccaccttttccacttatcttccccacttttctttaaaactcttctcccaaaaatattctccccccccccacacactctaactaacaccctatattttttcttttttccctacaaaccccctcaattttttcttcccctcccaaaaccttcccaatttcctttcacctccttctttcactaccccccctttacagcttacttctcccttcttacc

SEQ ID NO: 123168 - DNA, 572 bp, Arabidopsis thaliana columbia
  unsure (1)..(572): unsure at all n locations
cgtctaatttaggcgaactatangattagcttgacgtcccatgcacgcgtacgtaagcttggatcctctagagcggccggccttgtttttttttttttttcatcattatatatatgataacactttattaaatttcaatacataacataattttgtaacgatcatatctaaaataaattggaggctctctacttccctaaaagaaccttgtgcacgaccattttgaaattgagggcggacgaccataaataggcttcgggagttcctcagacagggggctgcacttcttggccttttggctcatttcttttctttgcctcggccatggagttttaaccaattcctaaactcctccctctcaacaattcaccggcttcaatcccatttccattcatcacaaaatatttacaatttggttggtggttcccgaaaaaacggccaaacccccttgggacctccccgggaagactcttcacaggggaattcccatcactttgggtgaaaaaaccctccactggcggaggaaaaaaaaactttttttgggggaccacaactggtaggttctttggtag

SEQ ID NO: 123169 - DNA, 642 bp, Arabidopsis thaliana columbia
  unsure (1)..(642): unsure at all n locations
ttaggacgaactatagaattactatgacgtcccatgcacgcgtacgtaagcttggatcctctatagcggccgggctttgtttttttttttcttttttttggtgtttggtttggaaatgtgagatatcatatatatctatgcggtttactctgtatatgtttgataccaaacttgtattctttgataaacaatttaatgaactgtgttaaactttttataaaaagagggggggnnaaaaaaangaaaaacccaaaattatttgcccgcgattgtgcttttgtttgaataaccgggtcctgtgggcccccggccttgttgcaaaacaaaaggaggtgtggggggggggggggggcgcggtttcttttttttttttttcgtggcggcgccgccgcgaaaagaacaagagagggaggcagaggggggggggtgtggtggttggtggcgtgcgcccgcgccgcaccccgcgataagaaacggaagaaagaagaggaaaagatggggggcgagtgtggcgctttgttttgttctttttggtcgcacgcggggacgagaaaacaagagggaggagttggttgtgtcgtgggtgtgttagagggcattaagaaaacgcaaagaaagatagttcttatttgtgcttgtaga

SEQ ID NO: 123170 - DNA, 511 bp, Arabidopsis thaliana columbia
  unsure (1)..(511): unsure at all n locations
tatagggaacgctggtacgcctgcaggtaccggtccggaattccccggtcgggcacgcgtccgggcgggattaccccctgagtttaagcctatcaataagcgggaggaaaagaaactaacaaggatttcccttatttaacgggcggagccgaaaccgcgggaaagaggccccacactttgaaaaaatccgaacgctctttcngcctttttctaattaggaggtatgaagggaaacgntccctcaggggaccggaaccttttatataaatgttcccctcggaaaggggggcccccaaaaaagcggggagagccccccccccctccccggaaccctcttgtgaacccacagaggcggactttataaacaaattcggggttgtgtttggggaattggcagccccccaaatcagggccgggggaaaattcgcgcccccaaggcgtaaaatgccggggcgaaaaaaacccaaagggcaaacaaaatcccccgggagggggaaaaaattaaaaaagg

SEQ ID NO: 123171 - DNA, 575 bp, Arabidopsis thaliana columbia
acactatagaagtgctatgacgtaccatgcacgcgtacgtaagcttggatcctctagagcggccgcgctttttttttttttttggtagaaagccatatttaacaaaaaaagcaaaaccttaagatcctcattacaggaagaaagggacccaggttcaagatttgtctacatttaaggcaattcacaactgcataaaaaggaagggtcatcatatcatgtgagatcaatctcccatttcttgagctcatgccatccgaggagtcttcttattgtctagtcccaacttttgccttttgtaacacactgtccattcattcccaaaaagatttgttatcggtggcctatatcctcatccggattctggttattctccgagaaaattggtcaaagctggggccccctccaagttttaatttttttccgggtttacctaaggttcaccttggcccaagcctaactttttaaaaaaggaaaactgccccttggaaccttgtaaaaaataagcgtttggaaaccctggccttttcgcggttaaggagccccggaattatcgtttttcaaaaaaaattattttg

SEQ ID NO: 123172 - DNA, 482 bp, Arabidopsis thaliana columbia
  unsure (1)..(482): unsure at all n locations
cggaaacccccacgcccgattttcccaccacgagggagccaggccgtcccaaaaaaaaanaccccctttcaccccccgcgggaacaacccaattttaaaaaaaaattgatcgaatcaaatcgccatttttccttaatcaccccaataaaaagaaaaagaaatattgtttcaacacccggcccctccccctttcccctccttttttttaacccggcatgaagggctacactcggacgcccccccaaaaacaaaacccccccccccgcataccccccaaaaaacccccagagaaagtctccgcggaccccctcttttcccacacaaccaccccacccccataaattttaaccccccccctttctgcacaacccaacatccaacaccgacccaaaataacaacgtcccctccgcaaaaaaaacaccttatttacaacccccccccaaaccttctcacaaacataacaccactcacccccatagac

SEQ ID NO: 123173 - DNA, 325 bp, Arabidopsis thaliana columbia
agcccccccagcctttaaaacgagagacaaaccaccgcaggagggaagaacacacaagggagaagactttagcaaaaaaaggggaacaggccgcgcgggagcggcggacaacgaaaccaaccaccgaacacacagacgaacggggaggacgcacagacaaaacgcaaagcgcacgacccgaccgcgggggcgcccgcgcaccccgacacggacaacaacccccacaaagagcgagacgcgagagcaacgaacacaacaaaaacaaagagaattttaaaaaaaaaaacaaggggaggaacaaaccaggacagaaccggacaaccgc

SEQ ID NO: 123174 - DNA, 514 bp, Arabidopsis thaliana columbia
tttcgcgttttcccgggtgtgacggagacgaggagtggcagaaaatttgtgggggaaattatgccatcgaaaggattatgtaaactatgatcttatgttcggtggagtataaatacgagacacggagattacataggttttttcgaaggcagggggggggtgcaatgtctgcggtgagtactactgctggcatgtcgtatacgtacgtagtacgagcaatcggtacaaaatcaaaccgtgagcgggagcgtgtaggtacagaagatacgcggaggatagccgcccgtcaactgtagctctgatatagtaaatcacaccggtgcgcccggcgcggccccgcgatgctctagtgctatccgtccttacccgcttctatcccgtgccggaccccctgcgtccgatccggtcgcccggctctacgccttcctcccggtctcttccactcctacacgcctccccgaaccaaccacctcgtctctcggctcttgctatggctatcagtcgacggttcaat

SEQ ID NO: 123175 - DNA, 525 bp, Arabidopsis thaliana columbia
acccccccccttagggggaacacacgccacgcgaaaaagaaaacaccacactttccaaacaagggggaaaggcgccaccaaacaaaaccgcaagccaccccgccacgcgcccagcgccggcgcgcaacccgaaaaaaaccacaacacgcgggcccgcgacgccccgaggcgacccacccagcgcgcgcgcgccacgccaacccaccaaccaaaaaacactctttccaccaacaaggggggagcccaagccgcaacgctcgcgccccccacaacaacccgccacgaacacaccacgcacaggaccaccacgaccacgcgcgccccgaccgaggcgcgccagacgacccacaccaacagaacagcacgagagacgcaccaggcacccgcaagggacgcgagagcgccgcaccacagcgcgcaacgacgcccacacgcccccgccaccccaacaccaaaccccccccccccgagaccacaccaccccccccagcgcacccacaaaccggcgcgcgagaacgcgccacg

SEQ ID NO: 123176 - DNA, 267 bp, Arabidopsis thaliana columbia
ggggggaacgccgagcggggcggggagaaagacgcgcaggccgcttccggccgaccaggggggacacgcagctgaaccaggcgacaaacagccgaccaagccccgcgcgcggcgcgggcgggaaggcccgcgagaaaggagaacaaaacgagaaccgcgaccgcgcgagccgcggaggcaagggaccacaccacgagcagaggaggccagcgaggacggcacgagcccggacacacgcgacagcgcgcgtatttttgcacacaccag

SEQ ID NO: 123177 - DNA, 295 bp, Arabidopsis thaliana columbia
  unsure (1)..(295): unsure at all n locations
tcatttaggcgccctctagaatactatgacgtcccatgcacgcgtacgtaagcttggatcctctagagcggccgcgctttttttttttttttacataggagtcaccgaaatatgcaaaagtgaatgggtgtaaaatgatggtttgaataatagngggtgggattaatatatatatacttagcctaaaataaaagagaggttaatttattgaatgaatttcaatgagtagggggtcctccccaaataagcttaatcttaagagcgaacttcttttgcctcccaacaccatggggat

SEQ ID NO: 123178 - DNA, 589 bp, Arabidopsis thaliana columbia
  unsure (1)..(589): unsure at all n locations
acactatagnaatagctatgacgtaccatgcacgcgtacgtaagcttggatcctctatagcggccggccttttttttttttttttttgtaaaaaagacagaagcataaactagaagcaacagaagctgattacaagtacgatccgggtgaaagacaaacaaaataaaataaaaagactaaaaaaaaaaaggcgaaccaaaattaaaaacattaactaagggggggaaagaaccattgattgatccaaagatcgacaaactacaaaaacctaaaagaaggaaaactttaaataaacaacaacaacaaaggtggattaaagaaaatctctaacataatgcttgaattaattcatatgaacactgattaaaaagtaattggtgggggttgtgggtccttacaattgtcttagttgtaatgatccaaaacttagaaacttggtttttacttccatctgcccgaaaaatctttaagcctttctttggtttggttgggtaaccctcaaccctagtttttcggaaaagacaaatatcttctctttaatccggggaaacttggtccgaattttttttaaaaaaacataaaaaaccct

SEQ ID NO: 123179 - DNA, 251 bp, Arabidopsis thaliana columbia
cacgcacaaggacagagcgcgcgcccacgaagccgaggcgcggagggaaccgccacaaaacggagcatggcagcagcgcggcggcgcgccagcgggccgagagcacaaccaacccagcccacgcaagcaccgcgagcagcaaggcagcggcgggagggcgaagcgaacacggcgcccgccacggccccgcgagcaacgaccggccagagaacaccctttacaacacaacaagaaaggggggggaacaaaac

SEQ ID NO: 123180 - DNA, 334 bp, Arabidopsis thaliana columbia
aaaaaaaaaaagagggccttcttattttacaacccccggcctttagggaggagacagcggggaggtgataaagcagaaggcggctttacgacatgcgggaagccccgtcattaaggttggggtaacaagacaggtgttgtgataggaagatataggaagaggaaggaatggatagaaagcgaaaggaggggcggtcttttgggagtgaattttcaactaagtctaacttaaatagagaacacttttggaacgatagggggggaacagcgacttgagtgcacctgagcagttcggtccctgccgaaagaacgtaggaggaagagagaaaggtaaa

SEQ ID NO: 123181 - DNA, 216 bp, Arabidopsis thaliana columbia
  unsure (1)..(216): unsure at all n locations
gggggggaacggggggggggggagggagatgtgactgccttttaccacanggggagaggcggatgtaataaacgaacgggctcggaccgtgttacctttccataatctcctcacatcgccgtgcgtacgtaatctgggataatctgtggatgatggacggaggagagagttagagtataacagtgatgtatacgagagctttttacataagggggg

SEQ ID NO: 123182 - DNA, 616 bp, Arabidopsis thaliana columbia
aatcgggatcaccggcctcgaatatggcgcaaacgggcagcccgagattattttttaacacgtgccccagtttttttatgagggggacaaccaccacacgagtggccgcaaaaccccgtatttagtgaaatggggatagcgtactggccatcacaacgctgagttagaaacagcatacactacgacggtgatgagtgtctgtatgcgatttcatacacctaaataacgagtcttgttttatctgaaatccactaaaaaaacatcagagcgctggtcgcaggctcatcagttctattttttttctccgtaaacggcgtgcgagacgaacgtagcacatcttcatctcctctaacctgccctgactacacgacatcacaaagtcttcttcgagcactatctctcatatcactttcatcgagactttggtctccactcccgtcgagaaaatggatactctccgtgatactacagacgagagacgtgcctccgagatgcatacgcagcacgcaaaggggtgtcggtaatatttacacgtaaccccttcccaccgatacctcggtggggcgccgttcataccaacaacaccactcattctacgtaccggatgatcttgcat

SEQ ID NO: 123183 - DNA, 490 bp, Arabidopsis thaliana columbia
  unsure (1)..(490): unsure at all n locations
ttactatgacgtcgcatgcacgcgtacctaagcttggatcctctanaccgccggcctttttttttttttttaaacaaaatttcaatgcccattcttgaaaccaacgcacaaggattcatctaaaaaatcgaacaatcatataccccttaatgattctaaattacccaaacggaaattaanaagacattaaaacttataatcaagggtggagaaaatttcaagagagaaaaaaaaaaataattcacttatcctctggttggatctcctcctttgtgggttcataagaaaacttcgtaattaatccaaccaatccaccccccaccaaaagtcccgcccaataaaaccctaaggttggtccctttcacacttaccacccgttgtctccaaaccaccgggcgaattcattgaaggctccaaaaaaaagctccttccacctaataattttttctccaccaattaaacccatttcgataggaacaaattgtcccaa

SEQ ID NO: 123184 - DNA, 562 bp, Arabidopsis thaliana columbia
ccccagggttaggaagaggcaccgcccgcgcacgcgagagagcgacacccctttctccccggggcggggggccgcaacccacacatctctctcccctcgcctcccccccctattttgagaggccgtcccatgggcgttcccgcagagcataacggccagcagctcgcaggtcagtccactgcaccacagttgccccagccaccgtcctttctcccccggtggggccgacgctacctccactgacagcgcagacaggggtccgcctggctcagccccccccgtacctgccttccggatccatgtcgccggacagatatcgcgcagaagttcgttgttgagagagcgatctcggctgtcagaacgacgctacgcaccacctcgtttccgtcagacttaacctatccgatctctaaccgcggacccgcgcttccggcgccagcgtttgttacagggcgcgcagttccacacctcctctcaaccaaacccacccactattcactacgatttacccactcgttccgcgacacggaatagccgcgaccaactattagtgtatagcacg

SEQ ID NO: 123185 - DNA, 390 bp, Arabidopsis thaliana columbia
atcaggggggaggggcgctcaaaaaaaaacattatcacactctcccgcaaatccccggcctcgtctcgctgcatataatccctccttacctactcgcccgaggcataccgaccctcctcatcccgcccgaggcgaggcatgcgctgagcagactcagacccacctctttcttcccctacggggggggcacacccccacttctcactccactccccacaaaaacactctatcaccaccctcccccacccgcggccatcttagtatctgcatcgggccttgccaaactaactacaacactcactaaagatatgtcgactacatccggccgctcgcgcccaccccgccgcccccacccccacgcacacgctaccagccccacccaaaccataa

SEQ ID NO: 123186 - DNA, 578 bp, Arabidopsis thaliana columbia
ctatgacgacccatgcacgcgaacgtaagcttggatcctctttagcgggcgggcgaggggccttcttctttttttttttcgcgtaccttctaaggaatgaaccacccttttttaaaaatgctagggcgttggaactttttcattcgcggcctttaagggactaaaaaacgggaatctagaaatttttttctcctgggggggccaaaaaaagccttgttgccgggagaaaatgttctccctccgactctgggaggtctcatgccttggaggggcctcaaatggcggcaattttatagcgtccgtgcgggcgaagatgatccgtctaagcgtgacaattttaacaaaaagaccaccccatcttttgagcccggcaacgttgttgagcgacagagcctcccccacgcctctccattcgcctaagaacccaccgcgagggtcaccggattctcaccctttcgatgtcgcgccgcgcgaaccaggccatatctacaaaatataagccttcttgaacaatgagcattcctgacgcgcagggatccgccgagagcagcgttggagcgggtggggtgtgcccggcg

SEQ ID NO: 123187 - DNA, 500 bp, Arabidopsis thaliana columbia
gggcacactatagaatagctatgacgtcccatgcacgcgtacgtaagcttggatcctctatagcggccggcccggggcctttttttttttttttttttttttttttttttctttttttttttgtttttttctttttctcgggtttttttttttttttttttctgtcgggggtacccacccttttggaaggaactttttagggggggccctttctccccggagggggaggggaattaattttccacccctttataaaaaaacacaacgaagggcgcctttttctttttcccccccccccgatagggggccggagaagaaaaaactttttctttaaaaaaaaaaaaaaagagagtgggccaaaagaaaaagcgcccccacccccccgggggggggtttttttctaccctgggaataccccacccacccctctccgcccaaaaattttgtgacgccctttttttaggcccgggacatatcggggggggctctcttttgggttt

SEQ ID NO: 123188 - DNA, 472 bp, Arabidopsis thaliana columbia
  unsure (1)..(472): unsure at all n locations
aaggccggcggccgcgggcgcgcggggggggggnggtagttacgcggacctccccgactttattagggaacgctggtacgcctgcaggtaccggtccggaattcccgggtcgagccacgcgtccgccccaacaaaaaattaaggttcttttttgctttttaaataaggaatatatatatatatatatatatatatatatatatatatataagagtgagatattctctgggttgcttcttctttaccctttttttgtttccagtcganagctctaaaggttgggtctttgttataaaatttctgaaagagggattttgtttggggtgggggtagagaaagaatcggaaacagcaagtgaaacctagaagaaggtaaatattaaggtggaagaacatttggaaaaagaacgttcgctaaaattaaatttgctaaaaaacttaaaactggaaaaccctgtggttctcaagatttt

SEQ ID NO: 123189 - DNA, 433 bp, Arabidopsis thaliana columbia
cccagtttttaagaaacggtaaggccagccgagcccagatccgtaaaccacacacgcacgtaccgtccggggccgtagagatataccaacaccactaacctcaaccggagaagccggccgaaaaaagaacccaacacaagttgctattctggccgtccgccggctgctaagaagatttatgttcaaagtaaagtgtagcagaggcacgcgcgtcgcggagcccaccggcccctcgcccacagaaagcgaggaacaccctcgcactcgccagcgctacagacgctcaactatctcattcgtatatggcccggttcccgcaaacactcctgctatcggccgcgatcacctttacccgccgggtcccacaaccgccccgagataggcaggtccgctacctgacccctcaatatatgaactcctcatccctctctcg

SEQ ID NO: 123190 - DNA, 442 bp, Arabidopsis thaliana columbia
cccccccagcttttaaacgagacgaccaagaccgccacagacacgaccaaacccagccactttacaaaacagggggaaagacgacgcaacaaaaaagcagcaccaaccacacacacccaccccacaccacccgcgaaacgcccaaccgcaccagcacaccacaccagccaacggaccccggaaacagcaagaaaacaaaaccacacacaaacgacgcaggaacgaggacaggcaaaaagagatttttcaaccacacacgcggggggagcgagacacaagacaacgaaggccagcgcacgcgctgacaaacaacaaacgacaccaccccaacacacccaacacaacaacacaacaacgcatacccacagcgcgacccgacgagacgcacaacacgcaccaacaccaacgaccacgcaccgccagcacccccgcagcacacaac

SEQ ID NO: 123191 - DNA, 438 bp, Arabidopsis thaliana columbia
  unsure (1)..(438): unsure at all n locations
gactttatataggggacgctggtgcgcctgcaggtaccgggcccnaattcccnggtgggggccgggggtgcgctttcctacnaaaactcaaagagacagtggccatcaaatccatatttatcatcatcatcatcagcatcatcacatcaatatctgaactttatgctttggatccttcggttcttcggctttcgacctctctccaagggtggggggttcctcaagagggtggggttggaacaacttcgagggcttatcagagggaaggggcacccaacgttgatggaagagaaccaagcgtatgggatacgtttactaaacaatatccagaaaagatttcaaatgggagcaatggcgacgttgcaaaccaatttattaccggttaagggggggcggggcacatatgaaagaaaaaggggtggcctcatttaggggttc

SEQ ID NO: 123192 - DNA, 572 bp, Arabidopsis thaliana columbia
aagggcgaacgagccagaagagcgcagacaggagggaaagaaagttagttggggcggcgcccgattaagaaggggaaccaaccgcgcacgaggcgagcacgccacaccgttagaagagggggggggggggggcaaaaaaaaaaagaaaacacaaaacaaaccggggagggcccgcgaggggagaaagagacaggaaaggaagaaggaggaaggaggaaaagcgagaaacacggaaggagaagcagagaggaggagcgagaacacgacgaccgtttttcaaacaaacgatgttgggaacgcaaccaaagacagcaccgcacaaaaaaaaacaacccaccaaggcgcgacgcgacacacaccgcaggcgagagcggagcggacgagagaagcggagcacaccaacgggggcgacgaggacgaagagaggaaaacgaaccgggagcagacaacgcagggaagagggcgcgaaaggagaggaaggaggagacggggagcagaacagcaacaggcgcgccgcgcccgcgcacaacagacagaggggaacaccgagaacggaagagaagaagaaaaag

SEQ ID NO: 123193 - DNA, 567 bp, Arabidopsis thaliana columbia
ttaacttgacgtcccatgcgcccgtacctaagcttggatcctctataacggcaggctttgtttttttttataaataaaacaaacagtttcttcttaattttccaaaacatatttatatgcctcataattccttccccaaaaacattaaacaaatctccctttcttatttataaaagctaaaggatatactctaggggtggcgaggggaaaaaaaattaaccttaaaaaaaaaaataaccccctttgaaatccaaatttggggtgggaggggtctaaacaacctttttactttaaaaaaataaggtgcaaaacttaaaaaaaaaactatgctttaaaacttggtctggaaaaatttgtgaataattttttttataacaataagggagtacccttgtgaccctttttttttctgtttttataaaacctacccaggatttttttcgaacaaaaaataatcgcccttttggaccccttttcttttgtaaaaaaaaaaattttctgggcaaataaatttgaacccctccctcggttcgtgaaaaactaccacaaacccctttttttttttgg

SEQ ID NO: 123194 - DNA, 415 bp, Arabidopsis thaliana columbia
  unsure (1)..(415): unsure at all n locations
agggaacgctggtacgcctgcaggtaccggtccggaattcccgggtcgggccgggcgggcgattttctccctcaaaaggctctgttttttttcctttttccggcgaagctctatttagcttgattccggcgtttaacacgcgttttaatcgaaacagacatttgagatccaattaattntgnaccgggctctctcttggggagggatggananagattttctccggaaaaagatcaaaaaattctccgatcactggaaggggggaacccaggaaagctctanagattcacctccccaacgaggaaaggaactgggctttctcaaacaaaggatcagcgttcttcttctgcagttctatccttcaggccaactcaagagaaaaacctaggaagggtggaaatatcatcttcctcac

SEQ ID NO: 123195 - DNA, 465 bp, Arabidopsis thaliana columbia
  unsure (1)..(465): unsure at all n locations
gcccgcctcctaagcttgtatcctctatagcggccgggcttggtttttttttttttttaaattgagcttactcaaaaattttatcctgtaaaaattgacccttgaatttgcggaacaaaatttttaaacaaaaatttggaaaactcgctttttcccaaatggaatgaagaatcctggggaaacatatcaggggtgggtggctctcncggccccaaaaaaaaattttnaactttcttactttttttttgcattcaccggacccgttttctcgcgacccctggagcaaacccttcgccccacccaaaaattccaaactttccttcaggagtaccaattttcctataaaaaagcctaattaaaccttgcccaaaccattggcatcacctcttctctgtggaaatttttattcccccccaatccccccaaaacatcgacgccgaatctctaaattaaaagccccggctc

SEQ ID NO: 123196 - DNA, 449 bp, Arabidopsis thaliana columbia
  unsure (1)..(449): unsure at all n locations
gacttatatagggaacgctggtacgcctgcaggtacccgggtccggaattacccgggtcggggccagggcgtgcgcccacacgttcncggaaagccggtaccggtcaatgcagatgagagtgaacaaagttcaaaagcattttctgtggcatgctaagccagagaagtatgatatgtttcacatgattcttcattcaattttttataaccggggggtggcgatttctgtttaaaaattttagtaaacaattcaatgtacattttttacagataaaaattctgagtgaactccctttacaaaaaaaaaaaaaaaaggggcggccgtttagaggatccaagcttacgtaccggggcttgcgacgtaataaattcttcttttggggcacctaaattacattccattgggcgggggtttacaacggcgggactgggaaaaccctgggctttcc

SEQ ID NO: 123197 - DNA, 503 bp, Arabidopsis thaliana columbia
  unsure (1)..(503): unsure at all n locations
gacgncgcatgcacgcgtacgtaagcttggatcctctagagcgttcgcccttgggggttggggtgtgaaaaaaataaacacaattcgaattaataataaggctctctacctccccctctttctctcttaaagggaactattggttggttagaggctaataatctgttacatgatagaatctatgtaatataagagctctgggtcatcacacaatggggggggggggactttaaaatcatcagactaaaaagaatcttcgcatgaatgccgggtcattatcctgcccaccagaacatttgataaacagggcgggatgcgactttgggcttgttcctttttcttgagagcgagtcctttttgtttaacccaggaggggtggacaaccttggctttatacggagaaatacaaaaacctggttgtgagcattgttgtgggaaggtttggggagcgccccactcacgggggagtgcgtgggccggcccaatagagcgttcaggcacac

SEQ ID NO: 123198 - DNA, 466 bp, Arabidopsis thaliana columbia
cacgactcactatagggaacagctggtacgcctgcaggtaccgggccggaattcccgggtcgagccacgcgttcggacaggtgtagatggacagatcatacacgaggaattttccactatgagaagtcggctgggaaagaaggtcctgcttttgtttgtgggaacaccattagcctaaaaaccggaggactaacacctcttactggtttttatgggggggaagattttccttgggaatgggtcatcctaactggagttagcgaacaaatgtgcggggattccgttggggcagcgacctgctagcggtgagtagttttctcggaggccggaaatggtgtgtttgtagaagaatcgcactggctccgcccaaaagataaactctcccgtgagtcggaggcagcgatcctagagtcgcgggggtcgcccccacgttgggggggagaaaaggcctcacggcgtgattggg

SEQ ID NO: 123199 - DNA, 419 bp, Arabidopsis thaliana columbia
  unsure (1)..(419): unsure at all n locations
nnnnnnnnnnnnnnnnnnnnnnnnnnnnnnnnnnnnnnnnnnnnnnnnnnnnnnnnnnnnnnnnnnnnnnnnnnnnnnccacgcgtccgcccacgcgtgcggcgaaaaccacagtcactgtggcagaaagcgttgttcgggtacaagcatttgcatatgctgctagtggatccaacccacacattatatccctctgccacggatgaccgatatgttgtccataagaggcagagtttgtgttgaacacatcacaaggttgtgtccatggcttatacagagcattgagcgtggattggctacctgtctaacaagcaatagcaaacactgtgcacaaatacaagtccatatatgccaagggaaataaagatagtaagctcactgacaaacctttatcttaggtgtacctatattattaccat

SEQ ID NO: 123200 - DNA, 603 bp, Arabidopsis thaliana columbia
  unsure (1)..(603): unsure at all n locations
cagagcgcgaatttcaagtaagagagagcacatggtgcgcggcctcaggagggtcacacgcgtgtacgtagtgtccccgggggctggcgcgaccttgcggaccgccactcttgttctattctgcaaaaaaccgcgaagacacagatgtcgtagtaacacctgcccaagcaaaatagcggcagcactctgacgggtgggacactatggcgatgtaattactcacacacggccccagtgatagagaagacacgcgagccgacgtgagcccaagagggctacgaacactcgccccacgcgagacgacgagcggggagcgacaaagacgacacgacaactatggggatgcggatacacaaacaaggcgactactggcaatagcgcggcggacgcacccccatcgaggagaggcaccaccaagcagggagcgggacatgcgatcgcgacgcgggggcgatctatatcaccccgacggcgcgctccggaacatttntagactcggcgtgcaagagcctaaatgatatgggtggcgcgaccctctctatagcggtatttgtgacccgacccaccacgcaaaagggtacatggcgacccacccaccgctca

SEQ ID NO: 123201 - DNA, 525 bp, Arabidopsis thaliana columbia
  unsure (1)..(525): unsure at all n locations
cggtttnnnnnnnnnnnnnnnnnnnnnnnnnnnnnnnnnnnnnnnnnnnnnnnnnnnnnnnnnnnnnnnnnnnnnnnnnnnnncttngtggtttggttttttttttttttttttttttttttttttttttttttttttttttttaaaccaccacaacccttttttttgcatataaaactgctccaaatcgaatcaaaacaaaagggccctcatgatctcataatctataggctataacataaaaaatgcggggccctcataatgacttttttttataaagaagaggggatctttattatattttaacaataagggatacacttttttttacaatccatagaacattctccaccggcaccttcaccggcgtatcttttcccggggggggtaaaaaatttgaaacacttagcgggacccctaatttttttggcgttacaagggcctttttttttggaaggaaccgttggtctcaccccgacgcgtgggtccacccggaaattcggaccgggacctgggggggtacct

SEQ ID NO: 123202 - DNA, 496 bp, Arabidopsis thaliana columbia
  unsure (1)..(496): unsure at all n locations
nnnnnnnnnnnnnnnnnnnnnnnnnnnnnnnnnnnnnnnnnnnnnnnnnnnnnnnnnnnnnnnnnnnnnnnnnctttgtggtttgggttttttttttttttttttttttttttttttttttttttttcaaaaacaaaaaaaaaatttttttttggtttaaaattccccccaattttttttggtttttgggacccttttgccttaaatttaaaaaacccttttgtttttaagggtatcaaggggggggtcaatttaaagggatcgggtttaaaaataagggccttaccccgtccaccttttttggttttttgggaaaaccatgggccttgccatttttaaaccttccttggaaactgccgccccaatttttcccttgttccaaaaaaacggggggggggtttaaaaaagttttggcccttttttcaaaaatcatattcccccacaaggtatttgtttttttggaaacattgcgaacccccctttatcttggggggcc

SEQ ID NO: 123203 - DNA, 488 bp, Arabidopsis thaliana columbia
  unsure (1)..(488): unsure at all n locations
ggattnnnnnnnnnnnnnnnnnnnnnnnnnnnnnnnnnnnnnnnnnnnnnnnnnnnnnnnnnnnnnnnnnnnnnnnnnnnnnctttgtgtttttgtttaaaatgaattcatgtaacaatagtcaatagccaatggagatctttgtacatatttttcatggtcagtctcagtccaaggaatttaaattgtacaaagccgtaaaatcaaaaggaaaaaagaattaagagaaacaaaaaacaagttacgaatgggagaatgcactgtaaattttaaattattttcaacgtatatatgtgtgtgtatatcaaagataatgcttagattatataccgtttgttttattttaggatcgttgatataaaatcattttgtttttaagggataaaaggttgagagtcatgaaccaagtggttctgtatcccgggctgattgaacgagataatagccggaatattgggataatactcaccggctccggcggtttcccc

SEQ ID NO: 123204 - DNA, 437 bp, Arabidopsis thaliana columbia
aagatgcgcggtttcccccggggtggggggtcaatcactcggcaggggcgcggcatggggtgcttgccccgccaccggttggcctctgctgtgcactgagtcgttttcccttttaatttggccaacctcggtctccgtttcgtcgggcgcgcagctttttccggggggatttgcaagtggattagttgcgtcgaaaaatttgtcctagctttttttgcttctggttgtctcctcgcccacttggctcctctgagcggtcggttgagtgtttcccccaattccatcggccggggtcgtttcgcgtaagtcccgcaggtcccgccagtggcggcgagtctcagttgttccgtattcccgtcgcgtcacgtcaccgtttgtgccccactatcccttgcgtgctaccggtgagggacggcgtgtttcctaccacctcatcc

SEQ ID NO: 123205 - DNA, 350 bp, Arabidopsis thaliana columbia
  unsure (1)..(350): unsure at all n locations
tgnnnnnnnnnnnnnnnnnnnnnnnnnnnnnnnnnnnnnnnnnnnnnnnnnnnnnnnnnnnnnnnnnnnnnnnnnncttnggggtgggggttttttattttttttttcaaccataaaaaaacgaaatctttccaaaaaataaaagacagtagtaacataaaactggattggctaaaaccaagaaaattgaggtccaacatactaaaaacaaagcaccacttataatccacaacaaaaggggggggggttaacccacaaaatctactcttaataaaacaaaccaaaatcacctccatagtctttttcggcggactcttccttctcctctaccttagcagggggtggggccc

SEQ ID NO: 123206 - DNA, 508 bp, Arabidopsis thaliana columbia
  unsure (1)..(508): unsure at all n locations
cggtttnnnnnnnnnnnnnnnnnnnnnnnnnnnnnnnnnnnnnnnnnnnnnnnnnnnnnnnnnnnnnnnnnnnnnnnnnnnnncttgggggttgggttttttttttttttttttttaaaagaaagcaaacaatcaactttaacaaaagtaaactacaagaataatgacgacgcatcttttgtttggagggtaacacaaggacaaatcatacattatcatctatacgtaaaaccaagataagaattatgggtgggaaataatatcatgtattttaagataattaaacccgaaaaatcacaaaagcccccaaattcaaagagaaagaatnttaaaaaaagccgaaccaaactggttttttctttttttcttattgataccataatctttttaagctctaagcagtagatcccttgagcttcttggagatgctggcaatgtactggccttggagaaatgcttgctgtaactccagctctgtggctggcttgaaccgtctcctgcaaatggt

SEQ ID NO: 123207 - DNA, 461 bp, Arabidopsis thaliana columbia
cccacaaacccatagccggcggagggggggaaataaattaccaaccccgcttgggggagacccggccacaaccattaaattgtcctttttccggggggggcggaaataaaacgactacgccagcctgccatgccgttttcagacagatataccacacacggttaacgttgtctagccatttacctacccgtctcctcagtacaacgggttcaggacttttttacgggggtagaaactcgatgacacatcagaaaaaacatcaccaaacattagccaatgtaccccgttgcccctcgtcacgtcgaggggccagaattatggattctgactgatttccctttagtcgtattttctttataattaagtgtgttactcagtttttatatcgcgatgctgaggtaatgtagtgcgctttgctaattggcagtccgttgcatgtctctttattcagcatatcaccc

SEQ ID NO: 123208 - DNA, 400 bp, Arabidopsis thaliana columbia
cggaaacaaaagaaaagagcttgatgggggctcaacaccgagtcacgaaaggggaacagcaggaccgccagaaggtaccaggtacggattcacccgggtcgggccacgccggcaaagaggagacggagcgcccagaggcccacccgtgggaaaacgagacaagcgggcacacaccggggcataaaaacggagaacaaaataaggagtcacgaggagaccccaggagcaggccacacgcagtagaccgaagaggggagttttttaagcgacggagagagggcgagagaggcagcacgccggggagaaagacaagaggggaaaagctaggcgaggcggacccccaagaggggggagggaaaaggaagggagcacagcacgagaagggagaaggaaagatggc

SEQ ID NO: 123209 - DNA, 484 bp, Arabidopsis thaliana columbia
gaatgcattctccgcgtcagaccaacacaaaccggggttttttttttcacaccccgcacgcgtttcacccccgacactaacaccccccacgtaccacaaatctacatcatccttttaccaccggggttaggggcccgcacaaaaaaccctaaccatacgtccttcaccacaatataatcctcttctcacctatccccttctccttttaacacaattcctctcgtgccatagatcgttatccattttactcattctccccaccgcattactacctcctccccaccatactctcccttacaccaatcgggggtgctcacccatttccactcgctgtacatcctctcaatcaaatacatctcaatacgaatactatattaaccacagcacaccttcgcctctagaccatcaccaaatctcacatatgcacgcactagacccatgttaccaactacccgacttagcttgtctgtactaaaatcaccac

SEQ ID NO: 123210 - DNA, 544 bp, Arabidopsis thaliana columbia
gggtttcgctcggacggcggccgcggggacgcggttttttgtttcccaccctccgccgttccgcggcgccgcgggcgctctggagatggtcgtttttgcggcggtttgcccccggggggggttccgaaaaaaaacccgcgcgggtgggcctggtgcgcccgtgccccgggtcccgtccccggatgctgccctctcttgtctcgtccgttcttattcgcctgttgtcggttgcccctcgtctcttctcctctgccttgcttatgtcccagcttttctcaggggggggtggggcataagctcggcttctgcggccccaaaaaaatggcgggctaagcatagtctcgtgttgtgcgaagtgggagtggggcgcatggcggcattacttgagttgtcgagtgtatctatcctcctccagtctctggcgcggtctcgtcttccttttcctcgcctcctttctcgtctttcggggctgtactgttgcgttagttgtgtttctgctgtccgccgctcctctctgtggccgcacctatttctcattcgccac

SEQ ID NO: 123211 - DNA, 527 bp, Arabidopsis thaliana columbia
  unsure (1)..(527): unsure at all n locations
cgnnnnnnnnnnnnnnnnnnnnnnnnnnnnnnnnnnnnnnnnnnnnnnnnnnnnnnnnnnnnnnnnnnnnnnnnnnnnnnnnncttttttttttttttttttttttttttttttttttttttttttttttttttttttttttttttttgggggcaaaccaaatggggctttgaaatctacaatatcataaagttcacgggttaaagtcctcaacaaacgacttttttaaaaaaaaagcctttcaaataaaacaaaatcgtttagtccaggaaaaaacaccctgccctatgaaaagaaaaaatccatcgggcccctaccaaaaaatataccggttaagtaaaaacgatagccaattactttttttacatatacccttgaacgcctcctcccttcatttaataagccgattcaacccacgattattgctcaaaaaaaacgtacgtagtctaaacctgttacctttgcaccccactgggaaaaatcatcgggatgggcctcaactactacccttttgtttgagggtgatt

SEQ ID NO: 123212 - DNA, 452 bp, Arabidopsis thaliana columbia
  unsure (1)..(452): unsure at all n locations
nnnnnnnnnnnnnnnnnnnnnnnnnnnnnnnnnnnnnnnnnnnnnnnnnnnnnnnnnnnnnnnnnnnnnnnnnnngccacgcgtccgcggacgcgtccgcccacgcgtccgcaaatcaccaagtcatcggagcgatcacagagaagaagaaaaccatggcggaagaagagaaaagcgtgatgaagcaagtgatggtggcgattgatgaaagcgaatgtagtaaacgcgctcttcaatggacgctcgtgtatctcaaagatagcctcgccgattccgacatcatcctcttcactgctcaacctcatcttgatctcagctgcgtctatgcttcctcttatggcgccgctccgattgagcttataaactcattgcaagagagtcataagaacgctggattgaatcgtcttgatgaaggaaccaaaatttgtgctgagactggggttactccaaga

SEQ ID NO: 123213 - DNA, 461 bp, Arabidopsis thaliana columbia
  unsure (1)..(461): unsure at all n locations
nnnnnnnnnnnnnnnnnnnnnnnnnnnnnnnnnnnnnnnnnnnnnnnnnnnnnnnnnnnnnnnnnnnnnnnnnnnnnnccacgcgtccgcccacgcgtccgaccagctgatgatgtgaaaactgatatttcacaatcaagtaggataancgggggacaacactcacaaggattataatagtcctaccgcaaagcgaaggaagaaaggagggaacattgagctgagtccagtggagaggtcaaccaatgattcacgcattgtggttcacactcagactctgtttgatattgtgaatgatgggtaccgatggcgtaaatatggtcagaaatcagtaaaaggcagcccatatccaaggagctactatagatgttcaagccctggatgccccgtcaagaaacacgtagagaggtcatctcatgacacaaagttgcttataacaacttacgagggaaaacacgacc

SEQ ID NO: 123214 - DNA, 548 bp, Arabidopsis thaliana columbia
caccccgggggggggagaggccccgcacacaaaaaaacaccaacccagacaccaaacagaacccgcatcaccaccagagaacaaggaccaccaaacaacccgaccaccacaaaaggcggcacgaccacagcagcaactgtacacgaccctaggaccccaaaacgacggcgacccacaccccaaccaagcacagcagaacaaccgagaggtttttttagagggggggggagaaacaaacaaaactcgcctcccacacaaaaaaaaaacaccccccagacgacacaaaacaacggaacaggcaccccgcgcgcctgggactccgcagcaatccaacaagcacgacagcccccctgctacaaaaaaacaaacacacactagaaccgacaaccataaccgcatcaaagcaacgacagcgaacaacaaaacacacacacagtgaaccacacagagaaatcaacccaacgaggcgccagcacgcacaacccacccgcacacacacaaacccgctaacaacacgcacaactagaacacccaacgacaaaaccagc

SEQ ID NO: 123215 - DNA, 305 bp, Arabidopsis thaliana columbia
gatggcacaacccggcgagagaccgggggcccctcttcccccggaccggcaccactcccgcactctgcgggcccaccaggagagcacaagaacagagacccgcgacacaaccgggccaagcagcggggggcagaaggagtggaatgaggcagggggccctatatgagcacgcacaaagcggcccgcacccccacggagaccgagaaccaccgcccggcaacacgacggggaatattagcacacgagaagggacaaacaaccgggagagaaacgtagccgcacgcaggcaacaagacgaacgccca

SEQ ID NO: 123216 - DNA, 645 bp, Arabidopsis thaliana columbia
aagaagccaagcccagccagggcagggcgccagcgaacggaacggagagggaagaattggtgggggcacagggacaaaatttgaagggagagaaacccaaagcgaccagggacgcaagcccgagggatatcgcaggaggaagaacggggcagatggcgaccccgcaaacacaagaagaaccaggggggaggaaaagatgagacatacggcgcgaaagagacgggcggagagccgcaggagaacagggggacagacacgcgacgaggcaaggagggggcggcgccgcaggaaaacgagcaccaggaggaaaggactcctattccagaaacaggggagggaggaccacacgacagcgaacaaagaacagagaaagacacacaagaagacacgccaaaaaaaagagcagaggaacacgagggaaggagagaaagcgacgaggggggcgcggaaaatgcagcggcggcaagcaggaactaaacgggggcgacgggagcagctactagacacgccccgccgcgggaccgcacaggtacaggcggcgccgcccaacacagcgggggggaaagcggacaaacacacatattgagaaagaagccaccaccagccacgacgagggagggaggggagcccacacgccaaagaaca

SEQ ID NO: 123217 - DNA, 541 bp, Arabidopsis thaliana columbia
  unsure (1)..(541): unsure at all n locations
cagacaaacaaaaaaacattgcgtgcccatcaatctattctctacgccccctattgaccactccaccatttttctcgtcctccactctacaatcctcactctatatcacggatctttccttctttttgcgtattcccccacgtaatcgacctcaccccctctttctcgtataaaacctagacggaccctatttatttaacaaccggaggttttattctccatcctcctacattcgcttagagagacaaaaagcacanctacctctctattactcctatctacataccacgactattcccccacatatacctttacaaaattctttcctttactccataagctatcatttcaataactgttattagatactatatcattactcttttttaattaacgcatattctctataatataatgctacagatttataaatcaaataacaattctgacttttgcacgacaatctattcttcgtctacccaccttactaccgttatcatatgatatacatatctaactattatatcagtcatcctccttc

SEQ ID NO: 123218 - DNA, 508 bp, Arabidopsis thaliana columbia
agggaaacacgggagacgccacgaggagccgcgggccgcgatacaccggaggcggcggaacgcgccgccagaggcactcacgggcgaagaagaaagacccgggaagaacggcaggcgcagcggggggcaacccccgacccacggcggcgccccacgcgagggcagagacgggcggccgccactcgggaaagacccaaacacacgacgccggagaggggttttgcccccggacaacaccacgccaaggaaaaaacaggaccgaagccacccgggacagaaggaagaaggccccgccccaacagaagggtgccaaagcgaggagcagcgccccagaccgggcggtgcaccactaggggcccgtaggtattcaaccggggggcgccggcacaaaaacgacgagcccgagcgaaagagaaataacgcgcccgccacgcaccggggggtgaccccccacacaacgaaaaagagaacgcccccccaaagagggggaggcagcaccgcacccgac

SEQ ID NO: 123219 - DNA, 397 bp, Arabidopsis thaliana columbia
  unsure (1)..(397): unsure at all n locations
aaannnnnnnnnnnnnnnnnnnnnnnnnnnnnnnnnnnnnnnnnnnnnnnnnnnnnnnnnnnnnnnnnnnnnnnnnncttgggggtgggggtttttttatttattttttttttttttttttttttttttagaaacctccccggccataaccagattaagaacaaaagtgccgaaacctcaacccgatttgtcaaataccagcagagaaaaaaactcccccgtgggaggtgaggggttcctttgggggggagaaaattncccaacgactaaattgtttttgtttttaaagcggttataactaaattattctcaggcctcttcctccgggtgatattcacctttttcctcatcctgggaggcaccttttttatccggagttgcattttgggattggggg

SEQ ID NO: 123220 - DNA, 626 bp, Arabidopsis thaliana columbia
  unsure (1)..(626): unsure at all n locations
gcaccgaacacaagcacagccccaccgnggngggggggaaataatttataccacccccccccctttgcgcgacgnaaaacaagggcccgcacgaaaacccggagcaccaaccgggcccctctccccagagggggccgaggcccgaccaaaaaaaaccacgcagcccaccccacacgacatacccacctacacaccagccacgtaaccccccaccacacccacacccacctacgaccatacaaccccgaacccactaaccacaccacccaccccccacaaccccaccctataccgaacatcccctccaccggggggcccacgaaacaccacccccgacgccaaaaaaaaaaccacacccacagcacaaaaacacgataacgacactccacccaagcaccacgcaaacacaacaacgacaccccacacaaaaaagcacctcgcgacaacaccacacaaccacacaacacacaccacacccacacgccccaaaccacccagacacacatccaccagcaccccccaacacacacagcatcatcccacacaacccactcgacaccccacatacaccccctccaacgctccaccgcaagccaaagtaccaaacaagactcacacccaacaca

SEQ ID NO: 123221 - DNA, 362 bp, Arabidopsis thaliana columbia
  unsure (1)..(362): unsure at all n locations
atgtgccctatagaagagcttgacgtcgcatgcacgcgtacgtaagcttggatcctctagagcggccgccctttggtgttgggttttgctcctattctttccaacattaatcatctgaatgaaaaatttgttcttgtgtccccaattcttacatatgcacttcttgcacatcccagggtcttgtgttttttttgccaaggggtctcactaaaaacananctaatgtggggttcaggggggacgcggaanctcactaattgggggaaaaaacaatgaatatctggtgcaagtgctgcactaccttgcgggactgggtcaatatcagggcaactaagggattctgacctaagagatcaattggg

SEQ ID NO: 123222 - DNA, 158 bp, Arabidopsis thaliana columbia
aaaaaaaaagggctcctgcaaaaaatcaacaaaaaattatccgcaaggctatggtgcaacagatgatgtcgaattatgataatctcagtctgcccatcgcaactggtgctatatccgatctctttgccaattatcctcaactccctcctataatcccc

SEQ ID NO: 123223 - DNA, 454 bp, Arabidopsis thaliana columbia
tatacgacttactatagggaacagctggtacgcctgcaggtaccggtccggaattcccggggcgagccacgcgtccgcttttactcctatttttaagtggggtcactgcatttatgcggtctgtctctgtctattagttctgcttacttttggtatatgccctgcatgggggagttaagaacaaaatggccttaagggcctttatagtgatcaaggggggggactgcgggggaaggagctggtgggtaaaaaacccgtgcgcgccagcggggtgcagcgccccacgaaagggcgcactcggcgaggggaggcggttgagtggcgggggccgggtagtgcggggggcgcgcgcaggtgtgggtgggcaccagcagacaaatgtgtgccgcggcgtagcaagtggaatggggagagcccgcgaggggggggagaggtccccccgacggattggggg

SEQ ID NO: 123224 - DNA, 456 bp, Arabidopsis thaliana columbia
  unsure (1)..(456): unsure at all n locations
tacgtaagcttggatcctctagagcggttcccccngggggagggggctgtttaaaaaatttttttttcttttttttctttttttttttttttttttttttttttttcccaggaaccaacccgttttttttttccccaagcggggaaaaaaaacctttagtgggtttttttttttttcccgtaaaaaatttctatacgggggaggaatccttttggggggggagttttccacaaaaaagtaaccccacctaccttggccttttgaaaaaaaaacaaaccccctggcgggtttttctttttaaacttaaaaaatttttggctttgtggccctaattcctttttttttcccccccccctgaagacttcccctttccgattcacctaaaacaaaaaccttgcgtccctcttagaactggaaaaaccctttgccccccttcgttttttttttttaccccac

SEQ ID NO: 123225 - DNA, 504 bp, Arabidopsis thaliana columbia
  unsure (1)..(504): unsure at all n locations
ggtggtataggcggagagtggcgcagcgaatacggggggngnnnggtagttgcgccggacctatacgacttatatagggaaagctggtgcgcctgcaggtaccgggccggattcccggggggggccacgcgtccgcttttgtttcacagaccactttagtaagtggggccacaacatcgagagttactgaatcaggaaaagcaattcgcacatcatctcctgctcggcaagaaaacaatgcaagtggatcaaggagttctaacagttctaggggggactcaagatcttgctctaatgatactgacagggacaggtcttcaggagggggatcaaataaggggaattacgcccacaaggcgaaagtctttttagctttatagtcagaaccggcatgcttgtttgaactctttcaatagcaccgggtggatgggatgaacttagggggggaactctttcgaaaagggatgattcctggatgggggagtttttactggacagaaaaag

SEQ ID NO: 123226 - DNA, 476 bp, Arabidopsis thaliana columbia
tttgacgtcgcatgcacgcgtacgtaagcttggatcctctagagcggccgccctttgttttttgtttttaaacaaaacaaaatgattcgatatttaacagattattggtaaaatgatccaaacccagggaaacagcataatattcaaagtgtcatatccaaattgcaatcacttttttcccatgaactccaacaagccatacaaaagagaaaaagatggctgtggggagttacttctcaggagaaaaccaaaaaaaaccctgtgggcaagaacccaatgaaagaacaccaccctccctttatggttggaatcccttttgcgcgttttggcatcaagcttggctgtgtttccggcggaaaattaagcctttttgttgaacaagggagggataacctttttttgtttctgaaaacggttccttatatcccataaataatattcggggtgggcccaatataaaactgcaatttcctttc

SEQ ID NO: 123227 - DNA, 209 bp, Arabidopsis thaliana columbia
acgacgacgcccaggtgaaagaggagcactgcagcaagagagaggggcggcgcgagaagcaaaccaggaacggccacaacggggagatagggaaccgaacgccgaggaggagcgagatttttttgcggcgacagaccaacgagagggggagagcagcacaccaggccggcgaacgagagagcagcagagcgacaagagcaaagaaagag

SEQ ID NO: 123228 - DNA, 466 bp, Arabidopsis thaliana columbia
  unsure (1)..(466): unsure at all n locations
gacgtcgcatcgccgcgtacgtaagcttggatcctctanagcggccccccttttgtttttggtttanaaaaaacatcatttngttggttctttaaatgagcctcatcaacaaaaaaggttttttaaccacctacggtaaaccaaaataagaatgggaaaaaagaaagtttanaatcgatccccatcatcatccttcttcttcttcatcatccggggcgtgttncctccgattgggtttaaaatactaaaaaaggaccccccctgagtggcaaaaaagggacaaagacanagactcaacccccctgagcttgatgaggatgttcaatgaaggccctgaaatatccttcatggggctccaatggggctccaatcacaggtgctttggggggtcttaaccctttggcccagggtctttttggtctttgatccccacccttaatgttttttttgggtttcccccgccccc

SEQ ID NO: 123229 - DNA, 510 bp, Arabidopsis thaliana columbia
  unsure (1)..(510): unsure at all n locations
tgacgtcgcatcgcacgcgtacgtaagcttggatcctctagagcgggcgcccccggggggaggggcggnntaaataaatatttttttttctttttttttttttttnngggggcaagaaaaggggggttattcaactttctgggaagcttttataacccaaaaaaaatttcattttgggggggtttattaagacggggggttcatgggctcttaaaactggggcggggttcccccggggggggggggcaaaaacaaagggcctggctcctttttccgaaaggggttcccctttcccccaaagggaaaggggcccctggggccccctttgtgggggaattaaaggggggggggggttcaaaatgccacccccctgtttggcctcccccccccggggcccaagacttgttatccctttaaaacacaacaagccggtaatttggggcgccctgggacccccttttggggggggtttctttgcggccgggaaccccccaacacgggggcccccct

SEQ ID NO: 123230 - DNA, 448 bp, Arabidopsis thaliana columbia
  unsure (1)..(448): unsure at all n locations
atgannnnnnnnnnnnnnnnnnnnnnnnnnnnnnnnnnnnnnnnnnnnnnnnnnnnnnnnnnnnnnnnnnnnnnnnnnnnnnccacgcgtccgcccacgcgtccgcatagaaataatggctcagggacaccaaggcttatgctttgggtttatcttcttactatgcttcttcagctctacttttgcactcaggattcttaaggacctccctatgatggagccaagaaagctggatctgaaccatgaaatgatgcctgggatggttatgctacagccagatcatgaggtccaacctgagcacacggtcaagcctggccatacactccagtccatgtccggtgtatcagaacatccagagcacacggttaagcctggccatacactccagtccatgtccggtgcattagaacatcctgagcacaaggaaaagcctgaccataaactccac

SEQ ID NO: 123231 - DNA, 598 bp, Arabidopsis thaliana columbia
  unsure (1)..(598): unsure at all n locations
cccccccacatctcttngcggcccccccccccccccccctctaactttggttccctttacanaccctccccccccggggttttagggcccccacaaataaaaactctccctctcctccctttttttctccggtcccccttcaccacttatcccctttttcctttttcccccccttcancaaaaatttctctttctcccccctcttcctttccccccccccctttcacaccaaagctcttttttcatccctttctttttccccggttgctgggacccaccaaacaaaagggttcttaaatataacaatttcctcccccctttccccccgccgccgcaaccccccccctcctttcgcaatctcctccccaccctcttctcctctccccctcccacaaccccccccttctctttcctccctttcttctgcccttttcccctccccttccncttttctcccgaaccgtcctccccccactcctctccccttctctccccgcgcccacccccccccgtactcttccctcccctcccctcttcaccaacaacctccccccctcccctatttctttctcttctcccccaccgacatcctctcttc

SEQ ID NO: 123232 - DNA, 353 bp, Arabidopsis thaliana columbia
  unsure (1)..(353): unsure at all n locations
tgtnnnnnnnnnnnnnnnnnnnnnnnnnnnnnnnnnnnnnnnnnnnnnnnnnnnnnnnnnnnnnnnnnnnnnnnnncttngggtntggggtttttaattaaaatttttttttttttttttttttaagggggcccttaaaatataaactttaaattattacctcttgaagaaaatattaatgtgttcactagatatctcaactcaattaacaaagaggtcttttgattcattattttaaagcggggggaaatataaaaagaagaatgcttnaataatacttctgaaactctaagatggggtaaaactaatcaatgtaaaaagggccaaaagtagggaatcccgcggagagacca

SEQ ID NO: 123233 - DNA, 447 bp, Arabidopsis thaliana columbia
tatagggaacctggggcgcctgccggtaccgggccggaattcccggggcggccacgcctccgctcttctcctaatctgtacgggtgttatttcgaaagggtaaaaaccaaaagcgacgcaaaggggaaaatcggaaaaagtggtttatttatggcccccgctagtagatacgccggaaccggagactttttttttacggggggggggaaaagaaatcattgtcgttccgaaataaaatccccgttgacccgaagaaaaacagcgcaagtttcaacacttcccttcaataaaaaaagacttttccggaggaggaaaaaccctaaaaaagccaccccccgatctggcaacgggagaaaaaaaaaccaaccccacccacggggttttggcgcttaacggttaccacccaccccaaaagcgatgtggaaaaatacacccactccggggggg

SEQ ID NO: 123234 - DNA, 483 bp, Arabidopsis thaliana columbia
  unsure (1)..(483): unsure at all n locations
gcccccgcgaggggngggggtagtttacgccgggcgtcctacgactcactatagggaacgctgggccgcctgcaggtaccggtccggattcccgggtcggccccgcgtccggaagaagcctacggatgatctgttcctttcaatctcaccaaattttcatcttcaccttcaattttgatagattctcttcaccgaaccaaaaccccaaccctagcttttttttaaattatagagattatttagctaatgggggggcggggagaaattggttctgtctagaaggaaatctaaatgggggtggattccaaatctgactctgagaaaggcctagggcgattcattttggagtattagccactttgttccgccttttcattcccatgggaaagggtggttggcttttgagccaaaaaaaaacgttctttctttaggggcctttgtttatttctcttcgggggtggggtcaccccccccccttttttt

SEQ ID NO: 123235 - DNA, 463 bp, Arabidopsis thaliana columbia
  unsure (1)..(463): unsure at all n locations
gggtagtttcgccgggactaaatacgatttatatagggaaacctgnggcgcctgcaggtaccgggccggaattaccgggtcggccacgcgtccggtcgtgagtacaaggccaaaaaggtctcagaggaggactacgttaaagccatcaaggaagagatcaagaaagttgttgacctccaagaggaacttgacatcgatgttcttgtccacggagagccttttataaacgacgggtgtgatcctttggtgagcagttgtctggatttgccttccctgcaaacgggtggggccaatctttatggtctcgctgcggaaaccccccattatctttggtgaagggagccgccccaggcaatgacctttttttggcccgcatggtttaaagcatcacctttcccccataaaagggatgctttactggccccgccccctttttagatggtatgtttgtcagaaaaaccag

SEQ ID NO: 123236 - DNA, 425 bp, Arabidopsis thaliana columbia
aatacgacttacttagggaacgctggtacgcctgcaggtaccggtccggaattcccgggtcgggccacgcgtccgtataatccgaaataactcttttcttatcatggagactctgtggactcttttgtatttgctagaacctgctccagctactctcattgtcacagctgtcaccgtgacatttgcatccgctttccgtgcacttaactacgggagagagatggagagaaaccgtgacttctctgaagcatccataacactagatagctttcaggccttgatgatcccagttatgagctcttgcagtttgcttctcatgttctatttgctctcttctggttctcagctcctgacccggtttacagccatcgcctctggttattcattcttctattgggtatcaaccatacgcggtatatatgaag

SEQ ID NO: 123237 - DNA, 147 bp, Arabidopsis thaliana columbia
ccccacccacctccagcacgcatcaactgaccgcgatcgcgcttcggcggcggtcccacgcgtcggtgaggtccgccaatccgccagctttctacgcgcacaccaactactctatggtccatcctactatccctagttgtcgagcct

SEQ ID NO: 123238 - DNA, 243 bp, Arabidopsis thaliana columbia
tctgtggaacgcgtctggagatgcatgagcgtaatagagctcatcgacagacacctcgcatactgttatttcgtgcgcgcggcgcgcgtgtcagttagtggacaaggtgggcatgtgcggtccggggtgctgcgaagactactgtagtggcggtaattattatcatggtgtcggtggtagcacgtagtgtggaaaccggatatacatgcagggggtgttgtctctttctatcttgtaaccggg

SEQ ID NO: 123239 - DNA, 108 bp, Arabidopsis thaliana columbia
cactcattctcaatttatcatacccctcatttcactctcacattccttctctagactatacctatcacatacctccctccaccttctataaactccatcaccaacctc

SEQ ID NO: 123240 - DNA, 548 bp, Arabidopsis thaliana columbia
cctactatttcctctctctcttttctttatcacttctacacccctcttcacacacacccacatcacatcctctcccttcatctaaccttctcacttttctcctcttttacatactattccctcatcttccctctacattatcccccaattggggcatctactccacttaatacaacacccattccccccttccccctattattaattcctacccatttaactatcactctccttattttattcttcaacctactttacatactctcatatctatttctcttcatttattttttatactctatatataatttttattcttatctccactattatctcttctttataccccattttctcctattctttctttttttcataaatgggatctcatctctcccatacttaactaaatacgcccccaccaatatacataataatcttttttttatcctttttcttttctatctttcactttactactaatatctataattttcttcttccctcttccaattttattatatctctaaccttctcctaattacacc

SEQ ID NO: 123241 - DNA, 411 bp, Arabidopsis thaliana columbia
agatcagggtatgagacgaagggtgcagtgacgcgttcgtgtaagctttgtctggacgtcattaaagtgctgcgttcccgggagcggcgaggagcgtagtagacggccgtggagagggaggatattatgttaaagttaaatgatcccaatattcctctccttcaacgttgctttgttggtttgtgtatatcttgcgtgttatttctcaggtttatagttggtagtattatatgattctgttatttgggtagttattgggtcttggtcggactatgggtgtccttgccttcagacactgtacattgtgaatgatagtacagttgatctatgcactacttgttgtttagctacgccacgcggcggcgcactcccgctaactacgtccccgtccgtatagtacgtaacggagtt

SEQ ID NO: 123242 - DNA, 404 bp, Arabidopsis thaliana columbia
  unsure (1)..(404): unsure at all n locations
aacaacatctaccaaattatcaatccactattatacccaaacacaacatataacatattcatcattccccatttaccccacactaaatattacaacattacaccaatattttatattctcataactattataacaaacacacctacattactcatcccattctatccccccaaaatctcattcactaaataaatcctccattcccccactcttaccccctcatatggcttctccctttttacaaacactatttttcctccctttattaatcaaactaccaatataactatccataactcaccacttaaattccccccacccaatcactcactcactcactcaaaccctcatccaaancctacaaataaccaaccacctaaaccattacactacctcaactcctc

SEQ ID NO: 123243 - DNA, 451 bp, Arabidopsis thaliana columbia
gtcatacgaatactatctctgctcgcgcgccgttatatgattctattaaactaccatcttcgtgacatcgtaatccgataggtatcgcttccgaatggttttataattcttggggggggggtgtctgtcgcaaccgccttcttataaataaataaaacttactcaacgcctaaaaatacgatagattaacacgcatgtatcaccgatcctacctctaatgttaacttcgctgattttcttgtctatgatcagtatcattctaatgatagccagcaaggtgtgtccacgatgcgcgacacccctatcaccgataagtagtcattaaacgaccatatatagtaatagtgctcaacctaacatgagacatacacctgcgccattatcttctataatagtctcttgcacgcccagatcgctgcctcagaaccagagcacttcgttattgacactc

SEQ ID NO: 123244 - DNA, 174 bp, Arabidopsis thaliana columbia
ttcaccaccatcaccccccacatattctcgaaacgtttcaactacattactcttttctctcacctatatcgcaccgcccgatcacttaataccgttctttttcccacctacactgacccatattacatctatttccctcacttatatttccttccccgggggggaaaacctccc

SEQ ID NO: 123245 - DNA, 299 bp, Arabidopsis thaliana columbia
ccacccccgtccctgtcctcaccatacacttttcattctatattatactattatctcattatattctcctcaatattaccccacactatttatcactatacttatatttactctacttctcatctcccacacctcatcaactgaataaatactcccactcttaacaatatctacatcccacatcctctatcatctgctctccccttacttccttcttcctctccacaaccttcacattaccctctctctctctctaccactcagtgggatattaattacctacactcaatataaacccc

SEQ ID NO: 123246 - DNA, 414 bp, Arabidopsis thaliana columbia
cacaaattaaattaaatacatcttacccataatagagtcgatgcactcaatattaaatcgcagatatcactcaccactcactacagaagcgccagctgcctgcacgcatcgcctatttaatgtcccccacggttgtcagtccgttgtaactagacttactgttatatcgaaagtatatgtatgatttgaatatgatctgtaacttcgagacagcagtcctttgagtagtttctatacttgttaatgtttttgttatcttgattaacggaacatgcgacctgtcaccgcgcagtatctgtacaatgaatgatatattgactgctaaattcgctccgaccgtgctgacgcgttatattacatactaatatacaagaagtcatctcccgctagatataatacaccacccacagacat

SEQ ID NO: 123247 - DNA, 111 bp, Arabidopsis thaliana columbia
cacctaccgtatagcgttatctggggggcacgcgaggagactagagtcgaggacggacgccagcgcgcaagctccgatcgtgcatatgccacatgcgcaactcaatacgtt

SEQ ID NO: 123248 - DNA, 224 bp, Arabidopsis thaliana columbia
tatcacatcatcctaacttcactcgtacatcacatacgccatcatcacctctcccattaatccatctccctccactcctcttcagtcctatccattttattactccctcttcctctccttctttcgttattctctattcttttatcttccaggggggctttaacacaccatactattatcactccctcctctcccctccaatatatacataaacactcacctat

SEQ ID NO: 123249 - DNA, 368 bp, Arabidopsis thaliana columbia
  unsure (1)..(368): unsure at all n locations
cccccctctttcgcgctcgttccgcagtttcgtttttccctcatcctacccaacttcttttttctctttttttccgcgatttcttcccatttatttcttgcccctcttttgtttttctcggggggaaaggcgccctccaaaaaaaactctcttcccgctcgtcttcntatgtgtctttgtctcccgtcgatgatttctacccatcgccacacatgttgcttatctattccgcgccaccttccgaacgtattattctttaccttctatttcccccacacgttcacacactccgtctctctctccccttttcctcctctcttggggggggtggggattttctcttatgggtctttttcaaaaaaaaaaaa

SEQ ID NO: 123250 - DNA, 379 bp, Arabidopsis thaliana columbia
taaaattcacatctccacctctaaaatctaatattaaagcagtactcatcgttattcctatcacattcatggggggttctaaaccatttctcccacacaaaactattgtctcgttctttctcctcttcacttgaccctatactctattatccaactcaatataactttacttactcttatccaccatcacccaacagtatctctattcatcactctcctttactgaattttacccccacacacctcacctaatttctatcacaaactcaccaaaactcaatatattttcacccaatcctcataacaaaattaatattatatctggggggggacacaatctctcactttatcttaacctgctctcctccttttaaaaaaa

SEQ ID NO: 123251 - DNA, 529 bp, Arabidopsis thaliana columbia
  unsure (1)..(529): unsure at all n locations
tttttctttttccccccctttttctccctctttttctctcccccttttttctctgggatgtcccccccaacacatttcctttccccctctttctcctttcttttctctcttcccctcccctttcttctcctcttttttccttccctcccctacttactttctcctttttctcccctttctttctattccttccacctccctccccctccctccctccctttctcttgggtggtgtccntctctccgcgtcgccccctataaaaaaatcctcttcctcttcacctgctctccctcctccttctccccctccccctctcttccttcctctcctcctccccctctccctctacttccctctctcaatctactctttcaccttcctcttcccactcccccccctctcccacttccgctcctaccttaccttccacccttttcctctcccttttcttcctctctttcgctccactttcatcttctcattctactcttctctatcccatactaatatatttttatccctttccac

SEQ ID NO: 123252 - DNA, 599 bp, Arabidopsis thaliana columbia
cacccccccccctcttctcctatcattcatttatcttcgtcaacttctcctcccactctacataacacatacctcattcactctaaccacccacatttacattccaatatatctcttttcccctctccttcctatataattatcatcaaatcacttacatacttttaccccaaccttttccaattaactcctacactatcccccctgggttcattcttattcaaaaacattcttccatcacttcttacccacactttatatccctctctttaattatttcattcttcttttgcttctcattccctctttatccatatcatctttccctctattaacctttctccttatttaactatacctattcctcctcttactcattattttaataattctcctcctctcccccccactcatctttattctatactaaggggattcacctattatccacttcacacaatccccactccctcctcaaaaaaaaaaactccctcttttaatctcctcatatattatatcttctcctatttccctagcaacattcctccctctccactacatatttaatttatcttcctccctaccacaccccccccccc

SEQ ID NO: 123253 - DNA, 416 bp, Arabidopsis thaliana columbia
cctttacttctctaacacactcaatctactccccataacctactatctaccactaccacttatatcctcacacacacaccaactaaccctacatcccaccatttttcatacccttctccaccctttccttctccccctctccaccttttactctccatccctcctcccctcttttctcttctctatcatcaaatactaccctatctctttcttatcccctcctcacacctcttcatattatattttttactcactatggggacctcaattttacccattttcatatacccattctatttacttaaaaataacaatttgtcttttatttaattcttcttccactctctttcctttcatccattatcttatattatctacatcaccattccccaattttatattacactatccaaatt

SEQ ID NO: 123254 - DNA, 162 bp, Arabidopsis thaliana columbia
attaaatcccaactacaaaatataccactttcttacattaattcacctacttaaacatacaacctaatattattaatcaaaccccactccaaccatctcccacttatcttcaaacctaccccctacataccctcaacaatcatggtaaatatcaattatcac

SEQ ID NO: 123255 - DNA, 627 bp, Arabidopsis thaliana columbia
  unsure (1)..(627): unsure at all n locations
cacccccccactcaccatcatcctctctctcattatcttattttactatcacatatatcctcattcctgatccagattagtttntatcgttatcatatattatatatctcacttcatcccctaatccttctcgccataatcccatcctctctcttttatcatatactactatcactctcccacacctctacctactcacccacaataccttcatttatcctccctacctcctccacctccctatacccctccatattctcaccattactattcctccaactttattatatacaactaatagatacagggggggactataataattacctcctcacacatttctatttcacttattattcaccattttcattctttctatatactcaacttcccaacatatatttacttccttaattttctacactactatcttaacttatttttatttctttacctttcatcccttttcacctctaaatatccaacctccgacttatctttancctccttcatatacatcttttccaccttttctaaattttcccccccaaatttactctattcgctttatttactaattcttatattttaactaaccacgtgggggggtctcttacaatcatcatc

SEQ ID NO: 123256 - DNA, 373 bp, Arabidopsis thaliana columbia
ataacttatattctccatcctctattattattacctctatctttataccttatatatcttacatatacttactctcatacatatcttattctctcacctctcttaattctccccacccattactctttttccctccttattaatctaacactccctcacacaccctttcctccactcccttactcccgggtcccaaacataattccatacaaacaatttctatctcaatacacttcatttttcctcttcatattctaataaccctctctataaatttcacatacactcaaattataatcccctccctctcactcctcactatttcctcacattatccaacacacctaccacaacttttcatccatctcctccc

SEQ ID NO: 123257 - DNA, 345 bp, Arabidopsis thaliana columbia
cgccgcctccgccgccccggtttcgctccgtgtggcggtgcttttgttgtcgcctttctcccccgggttttgtttgtggcgtctgtttccccgtcgtgttcgctgtttgttttttttccgcttttttttgtgggggggggtggtgcgtaaaacattgggttggcgcgcggtctcgtatcgtctgtggtccttcgcttcgtccgcgctcgtccgcgccggttctgttgtcggcgtgggggcctgttccctgtgtgttgttggcggtctggttgcttctgttgcggtgttgggtcgcgctctagcgtgtcgctctcgcccttctttctctactccgggggggggggg

SEQ ID NO: 123258 - DNA, 107 bp, Arabidopsis thaliana columbia
ctctgatccgtgtacggtttccgcccatcaggtatgcacacgagttgtcgttgtgttcccaacaccgcccgcgggcgtttaatgttttccgatatgtttccgcccga

SEQ ID NO: 123259 - DNA, 531 bp, Arabidopsis thaliana columbia
tcccccacataattctcctctttttttatatctcacccttttttacatcggggggaatattccccataaaatttactcaacccccgcataattattttactcataatctaatctacccacaccctatcacatatctcttctcccacaccccatacataatccatatacaccgccatattgttttttgcctcctcctcaataaatcataactatgatatatactttcggggggtggtgcttcttccctttccggaccctccccaaataaaaaatatccacaatccacttagtgcacgcgacctttaaaaccactaattctccaaccttcatcttcacccttcacgcaagcctccccatcccgattcatcctaattctaatgtcctgctcgcatattccccttccaattacatgatatgctcctcaatattcctatcctctcttctctcacaatttcacttaacaaccgagttatatcatcattcttacacttctaccaccattctccctatcccgctctttcactaaccacc

SEQ ID NO: 123260 - DNA, 512 bp, Arabidopsis thaliana columbia
accccgccactacgttcccccccttcttctcactccgatcccttatcgctcctccctcccccttctccaacactccacataattaccttcttaccactacctttttccttattccccccccccccccccttccgggggtacttttctcccaaaaaaaatccacctctcctctccttccccttttttttttttctctcttttcatctatctaaagagatttcccatctccacttcccccactaactttcctcccctcacctctattattactattccccctcctcgcatactaaaatctcttctcaaccccaaacatccgccggcctccacttcttctttccttcatcatcgcacgggggcgcccacacaaccaccctatctataatccccgtccccctctcactaaaaaaaaaacctgttttcccatctacttcccccgtccctgactacattagcaaaacacagacccacacactactacaatacctcacacgtcacctcaactcaatccc

SEQ ID NO: 123261 - DNA, 533 bp, Arabidopsis thaliana columbia
tccatttcccccctcgctttaatttttcgtttgtgtcccctcttttccccggtttggtatttcccaatttttctttgggggtaatcccgtatcaacatacccggtccggcatacgtttgatatgtagttatatttttgtcaccacgcccgtacaggtttattatactctccgactctccgtgcctatttatttattcattcgcttgtatagatcggcgtcaccgccactatcttccatgtggttcgtatatatcttctggggggggtgggagctattctcctcggctgcccttcttataaaaaaaaaaaacattgtgttttgtgctcgtatctcagtaatttctctttacatcaccattctgtaccagatacttcttcattttcactacttccgtcgtctatctacatatttcactatcatctaaaccttccttctgccccgctatattttattcatcattggtgttgccgcctagactatatctttctccttctcctccctttatattcacattatttcgcctcttaattga

SEQ ID NO: 123262 - DNA, 122 bp, Arabidopsis thaliana columbia
ccgccgccgctcgcccctggactatgacgtccgggctaagtgcggacgctcccgccgacctgcagtatgtgacagcatgatgatcgttgagcagacaccgcgcgtgccctaactctctacat

SEQ ID NO: 123263 - DNA, 608 bp, Arabidopsis thaliana columbia
  unsure (1)..(608): unsure at all n locations
tatacgactttcttagggaaagctggtacgcctgcaggtaccggtccggaattcccgggtcgacccacgcgtccgccacgcgtncggtcagaatatgaagaagaagaagaagaagaagagaaagagagtcagagacgacgacggacgaaacgacgctattctttacgctttttcgatcgtcgatttgattttttccctttcctctttattnntctggggtggaagtagaagaaaaaagcatcggatacttgatgggctgattggataaaagttctcttccgagaaggtcgggagttttttttttaaaaaggaacctttaaaaaagatggcagtctagtctccttggtttcccaagggggttggggggtgggtgggacccttaagattggagagagaaaggagccattcccaaaggatctttttcaccttagccctcaccggaaaaaaacccctcctggaaaaacgggtcttccctttcattaggaggaaacaccaaaaagggtggttgggagaaggggttccggtccgggggcggagagggttaagatgggaaggggggtttccggacccgaggacccaagggggcattggggggggtgggcccatgg

SEQ ID NO: 123264 - DNA, 555 bp, Arabidopsis thaliana columbia
tatacatcttataggaaagctggtccctgcagtccggccggatttccgggcgaccacgcgtcgaacgtacatatcggggcctgactaggtttctatacaacggtacatacagggtggacctttaccatgggcgttcaaccgaataacgggaaatcggttttatccggggagagaaaaaccgttgtggccactaatggtggggggggcataaagcttttacccttctgggccacaattaaaaattttttgagaaacggagatttgaagaaagtcccttcgtactttcaaaagcaaacaaccggggggtgttggttctcccctttttaaaagaaaaacccatcttcttttccccgggggggtggcgaacactcaaagcctaaaatactgtgatttcaacctttcttggccccaaaggcctaaaccctgaattagggcagcaaaaaaggccaatccttatgggagtttaagacccctctggagaagaactattcgtcctttttttttgggggtgggaagaaccaaaaaagactttcccaaggatctgaagggtggcta

SEQ ID NO: 123265 - DNA, 623 bp, Arabidopsis thaliana columbia
  unsure (1)..(623): unsure at all n locations
nnnnnnnnnnnnnnnnnnnnnnnnnnnnnnnnnnnnnnnnnnnnnnnnnnnnnnnnnnnnnnnnnnnnnnnnnnccacgcgtccgcccacgcgttcgcaaagagggcatttaccagattatgctccacaccctgctattgtctttgataatggaagatggaactgggcttctccttccgattatcgncttgggagatgcctagtgcgttacttatgggaaaaattgaccgttgtgcaaattgcaaggaccacccatgtatcaagtggtgaaggaaatggggggccaagatggttacaaaatttgtacttgtttaagtacccaaaagattcacgaagcattatttcgcccatttttctctttcaaaggggggtaatgcctccgaaagtgaaaattttatcctaaggccttaaaatcaaacatttttcttgtagattcagaatacctttcccaagggaccaattcccttgctattgggggggaaaaaaaacttttgtgtcgggaaaatttaaaacccggtcccgctgcgatggggtgatttttactgaaacaaccgccacaagggtggttttgtttttaccaaagatttatatttttgccaaatggttctacccctttttaaaag

SEQ ID NO: 123266 - DNA, 190 bp, Arabidopsis thaliana columbia
acaccaccaaaagagaaggagggttataaaaaaaacaaacccccccgcatacaacaaaacaagagcgccgacgcggcgcggagcagaggcacaggccacacgtttcaagacaacgaggggaggggcgcccccacaacaaaaccaacggcagacaccagacaacgccaacccgacacgacagcccgagccc

SEQ ID NO: 123267 - DNA, 596 bp, Arabidopsis thaliana columbia
aatacgactctctatatggaaagctggtacgcctgcaggtaccggtccggaatttccgggtcgacccacgcgtccgcggtctcttgggtagaaatactgatttcctcccaatgcgcagattcgattgttcgtggagatctcaaagatttcacaatggtcccggatcatagaatgtggacgggtcataaaaattgccataaaatgtattctcgggcggggcctgacttcaacgatatcgggggaaacaaacgaaaaatcgccgggactataaagattcctttggatttagcgggatgacgattattttccctaaccttgggccggttataaaaacatgggagtgatttttagtagaagaagggatttttgccccgcctttgtaggatattttctcaaatcggaacttagaaatggccaaagccttttccgataacgaaaaaagggtttttactttttataccccttttagagaaaccatggcctttgccagggagaaaaaaatttttgctcttcccaaggaacgttgctttagaattcaacaaataatttgtgtctttaagaccagaatttgacaaacgccttaagggaaaaaccgg

SEQ ID NO: 123268 - DNA, 441 bp, Arabidopsis thaliana columbia
ccccccccctcctcctcccccccgcgcctcgctccgtgtttcccgccgcgcgtgtctcgtgtgcccgccggcgcccgcctgtcgccgtcgcccttcgctcccccctgccgtcccggcatccgttccgtggttcgcgtcgccccctttttttccgcttgcgggggtttggggctccccctccctcccgcgtctcctcataaaaacatcccctccgcgttccgcgttgcctcgccgctgcgcgcttccctcgcccgtctgcgcgtctcctgctccccggctcgttgtcctctcttttctgccccctcgcctctcgcccgcgtggcgccctcctcctgggccgcttcttgttcctccctcgtccccctcggccctgcccgccgccccccgctcgcctctgccctggtcccctcgctccgttgcgcggttcgtctctctttttgc

SEQ ID NO: 123269 - DNA, 316 bp, Arabidopsis thaliana columbia
atttattacaaatgtccctccccctaaaggtaacataccttgaaaattaaaaaaaccccccctttttaccaatccttattccatatttgggtgtatttaaaacctacgttccaaaaaaaaactccttccacctttttttttccccctttcccaatttttttttttaaaccttccctttaaaacaataccttttttccaaaacctataatctaatgcttttttctcccaacaaaaaaaaaaaaactctcccaataccaatttttcttttttttaaaaaaaaatttcaaaaaacccggaaaaccctttcttttctaaa

SEQ ID NO: 123270 - DNA, 576 bp, Arabidopsis thaliana columbia
  unsure (1)..(576): unsure at all n locations
aaaaagggatgttctggggcctctccatttattagggacgctgggcgcctgcgggccggccgattctggggggcccgcgccgaaagaaaacccaacaccttactcagcttctaatttttcctcgcttccggacttgcacgcatttgcattcacaagaacccatattgaagattcatcctacatatatttttcttgggtgcagggggtggggcctctttttggccggatacttcaattagatataaacttttgggggttactccgttggcgggtcgaaaaaagatccccccccactaggtgctgtgggtggagaggaattaanaacccaagttagtgcttgagaagcaaaaatgctctccgagagatgccatactttgagtgggggcgaccacctccaaccgcttttggaggaaagccactcttattgggatattcgttaacacaggaggcgacagcttcccgcgggagggggtcccaatgaggccctcgccaaagagaacgctaatcccccggggggagaagggggacgactttcaacgcgtccggatttttaggcggggcgcttgcgcggagagt

SEQ ID NO: 123271 - DNA, 208 bp, Arabidopsis thaliana columbia
ggaaaagaagtgcttcgccagccctatacgacttttatagggaaagctggtacgcctgcaggtaccggtccggaattgccgggtcgacccacgcgttcggttaggagttcgttctaaaaatcatcaggggttcggaaaagacacactggaaaccttcaaacataagcaaggggtcttgaagaaacattctagatgaggcgttaattgc

SEQ ID NO: 123272 - DNA, 360 bp, Arabidopsis thaliana columbia
ttttttatattttaattaaaaaccacagaggcggggggggttatttttgaaacataacaccctttttttaaacccggggacccttttagttcgctataacgccccccccccttttacccaccccaggggggggacctatttttttattttcgagggggggggaaccccccccaggggagcctccttaaaaaaaaaaaccccttcccccccgtaacctgggtgctttcccacccaacaccccacctccccccggcttcttcttctctttcagaaacccctctcgaaaccataaaaacccccttttttagcctacacaacaccagggggcggaaagacgattccacgtcccccccttcgcca

SEQ ID NO: 123273 - DNA, 442 bp, Arabidopsis thaliana columbia
ggacgggggaggagcaggggggctttaaaagggaaaaccagatacccttccccactccctccacacaacccccccccaacagcaattaaaatcaccccgccgcggcggcagaaagaggggcgaagaacaaccagacggcgacagaaaagagccaccttttacaacacgagagggccgcgtaactgccgcacaacacaaaagagtagagtggacgagaaggacgcggaaaccaaacgcgcaacgagagggaagcgaaagggaagcaaagaggataaagcagagacgcgcaccaagacaggaagccacccctaagcgtacccaaaccaaccaacacaaaacaccaaacgccaaacacacgcccgacagcacgcaaacataacgccacagagaacacacacccacatagtaaacacccactgaacacacaccacagaacaaaaca

SEQ ID NO: 123274 - DNA, 294 bp, Arabidopsis thaliana columbia
  unsure (1)..(294): unsure at all n locations
gcccctcattaaaactgtggaccccggcctgggccgccctngcgctgagcctttggatcctcttaaaggggggggggccggggttttnttttttataaaaccaaaaacccccatattnaacctactccatatcaaaaaaaaaaaaaacccctcttanttttcatggcgggcccacaccccagggcccaccgcacctcccctcgtgaaaaaggcggagaaaccacccgcgcccccggtcgtntccacccgggcgctttgttcctttgaaacgggggggggaggtttttttttttt

SEQ ID NO: 123275 - DNA, 587 bp, Arabidopsis thaliana columbia
ctaatacgacttactatatggaaagctggtacgcctgcaggtaccggtccggaattcccgggtagagacctgaagcttgagaacacactgctcgatgggagccctgctccgcttttgaaaatctgtgattttggttactctaagtcatctatactacattctaggcctaaatcaactgttggaactccagcttacatagcacctgaagttctttcacggagagaatatgatggcaagcacgcggatgtgtggtcatgtggagtaaccctttatgtgatgctggagggagcttacccgtttgaagaccctaatgatccaaaaaacttcatagaaacaatccagcgcataatggctgtacaatacaagatcccggactattgttccatatttgaagaatgcaaacatcttctctctcgcatattcgtcactaactctgctaagagaatcccacttaacgagatcaaaaatcttccgtgggtctttgaaaattagccaaaggaacctgttagaatcggctcaagcggggtttacagaaaaaaacaagcttcttctttaaaaccttgaggaaataatgatataattgggaa

SEQ ID NO: 123276 - DNA, 365 bp, Arabidopsis thaliana columbia
  unsure (1)..(365): unsure at all n locations
gcctcggcgcagattacagggggcagccgtaacttacccgcggagaggattttttttgtaggaaggggggggggaaaacaaagaaacaagaatggttgagaaatataatagatcctccatggaatggataactaagacaatcacccaattaattggaatataggccgttggtacacagtctaggtaaagcaagaggcgactagnctaggttagatagtgttagaggtaatgcgaggcgtggattgaaagtgaggtaggaggggtgtagttagaaaagtagagagtataacgcggaaatatggacagtagctagagatagatggtgtaagagatgtacggcagcgaatcttaagtctagagagaga

SEQ ID NO: 123277 - DNA, 577 bp, Arabidopsis thaliana columbia
gccagctctatacgactctcttatggaaagctggtacgcctgcaggtaccggtccggaattcccgggtcgacccacgcgtccggttctctccaacggagaggagaagaaggggaagattgctgagatcaagtctggaatagacgaagctgatgtcttgatccggaaaatggatcttgaggcaagaagtttgcagccgagtgctaaagctgtgtgtttttctaactaagagaggttaaatctgttctgacccatttgaggagggatttcaaacgagttttttcgcaaatgctaacccggtttcccgggaaaggtgatgggattccgatggggggtctgcttcatttctgctgaacaagaagaaaatggcaatggccgggagaagcttgccattcagtgccagatcgggagaggtgaaactatgcctggaacaagaaaggtgggtttcaatggccaaaattgaggcaaaaccccaaacctcttttttgcacaaaaagtttttggtgggtgaccccttgcaaaaacaagaaggtttgccggttttcaagggaatgacttgacaatgggtctttcttcggg

SEQ ID NO: 123278 - DNA, 392 bp, Arabidopsis thaliana columbia
gacgtcgcatgcacgcgtacgtaagcttggatcctctagagcggcgtgccttgttttttttttttaaaaggaaacttaaaagtaattagagtgagcttaatttgcatagattaataagtaatatggacacatcacgctacatacatacattatacatttttttttggttattttttagggaaatgggtaaagtgcaggggggttcttcaatctccggtgtacaaaaaaaacacttcaggcttcttcctccactttgatccccaaccaaggactttcttcttagtttatggacaccccccataattggggatccagctctttcatggggatttcctaaaagtacgggggggcccaaaactgaccaacctttgctttcccctcagggggttaat

SEQ ID NO: 123279 - DNA, 420 bp, Arabidopsis thaliana columbia
aaaaaaaaaacttcttttcaaacgctaaaataaaaaatttccttatttttcccttcaaattattccacaaaaaatttttttcttttatttgaaactgtcggaatttctaaaaacaaaaattaattttccttacaaaaccctcccctctacccccccctttaaattaaaatggtgtggttttttcccccccaatgaatttttttaaaaaaaaacccaattttttttaaccccacacctcccctccaaataatcctctccacccctaacgttcccctaacaattttccccttttctatccccgccgtttcccttatttaactctcaccaccctctaatccccattaacaccactcccccccaccaacacccacccaaacctttccccccccactctacatttctctccccaaaaaaaacccc

SEQ ID NO: 123280 - DNA, 179 bp, Arabidopsis thaliana columbia
  unsure (1)..(179): unsure at all n locations
gccaccccaccagccacggcgcgcacgggcagattcatatataaatacgaacccccccacgtttaacagcaggaancaatgagtgcctcggtgtgcttctgttgaccgtaagtcgtacattttcatactaccgcgggggctgatacgcgtcatcacacgagacaccaactacgctgtcc

SEQ ID NO: 123281 - DNA, 401 bp, Arabidopsis thaliana columbia
ccaacggcactacagagtcgaacgcaagctaacccccgcaacaccgagctcacgtcaggagagaagaaagacacctaatattaaaaaaccaaacctccaaagtttcacaacgcgaaaaaagaatgactagatagtaagaaatgaaggaatcgtcacataatttgcccttcccaaagggggacgcgcccccccccaacacaacaccacacgacgtggcgaccaatacaatcgatagattgaaacaaatgcggctcgcacaaccgaatatcgaaagagactacacagtgtcaacccaccggtggcgcaaccgcaccgctacccaactgcacaagacaccgcacaacgccgctcacacatgaagagcacgtatatcagcgagccacgacggggccaccataccc

SEQ ID NO: 123282 - DNA, 620 bp, Arabidopsis thaliana columbia
  unsure (1)..(620): unsure at all n locations
nnnnnnnnnnnnnnnnnnnnnnnnnnnnnnnnnnnnnnnnnnnnnnnnnnnnnnnnnnnnnnnnnnnnnnnnnnnccacgcgttcgcccacgcgttcgcggacgcgtgggaaatacctaaatctcaacttcacggaacaccgatacataaagacaataagagtggtgataattgtgttgagaccaaaagtaattaaacacattacacatggggaaaaaaaacggctcttgttctttgctcaccgctggaaagcgagctcttcgatctccggcgaaaaaagatcatagtaatgccgtcgaaggagattgagaaaaggagaaagaagagaaaacgggggtttaaaaaaccgggggattaaaaattttccggggaaagttttcccggttttcttcaccagcccttggagaagattacttaacggaaaaccaaaaaccttttcgggaacaagacccggtttagaaaattaaaagccggcttcaaagccgggtaacccccggccgcggtgtcccctttgcgcctgaaggttttaaaaatttgacccggggggggtttttttcccaagaaaaaattacgctggtgtggggcatccaaacttttttaaaagatttttgggaaaaaag

SEQ ID NO: 123283 - DNA, 394 bp, Arabidopsis thaliana columbia
gactttcttagggaaagctggtacgcctgcaggtaccggtccggaattttcgggtcgacccacgcgcccgaaaaaattcctttattttcttgattaattttgcgaagaacaaactctttttacccaatatatattcctaataagggagtttttttgacataatataaaatggaggtggtaactttttggaaaaaaaggcaaaatatttcctttcaaagggtcgtcttgattttagaaaagtccctcttatattttttttgtaaaaaagaacaagatacaattttgtgataaacgcccgccttattggcacctcccaccccttaacccttgggcttacgaaaaggcgggagtgtgttagcctcttgcgcctaagcgggggtgtacaatataaaaa

SEQ ID NO: 123284 - DNA, 626 bp, Arabidopsis thaliana columbia
  unsure (1)..(626): unsure at all n locations
ccccccacgccaactcgccccccccacccccacccacnngcaccannnnnnnnccgttgtacaaactgaggccgcacctctcagtttgagctatggacgcccgcctgccacccgctaccgtaaggcttgggatccctctaaagcggggcggggctttttttttttttttacctggggactaaattttggagtcaacccttcgagacaaaagggggaacctcgagagtccccccccccaacgagaaaccccagtttggatccacaaatcatcgcggggaaatggccttaaaaccaccctggaacaccccattaagggggggggccatcnactaggctaaaagaaaaccctcgtaaaccaaanccccccgccccacaccccgcgccccagccgccccccccgcccatcacacgcccgcaccaccccctccacccgccgcaccaccactccctacagcacacacacaaaaccgaccaacgccccccgcgcgcgaccacaccgacatcaccacgcaccctcgctcgaacacacacagctgcacccccccgccggcccgcgcctccagcacgcccacccccgcccaccccctccactcaccacccgccaccgccgccccggacacgcgtcc

SEQ ID NO: 123285 - DNA, 545 bp, Arabidopsis thaliana columbia
ataccacgcccgcgcaccgccttcactttttatcagagagtatcttgaaacgttagtagtgggcgtgacgggccgccgtcgacagcggctgggttcttattttttgttttgttgtcttgcctctctctttcgtcttcatgtcgcgcgcgccctcgtaccgcctctcctccggcggtctgctggagccgcttcctctcccttaaccccccgccggcgcgcgacgaagagtttcggatcgtggttcggttctctccacttggattcttcgtccgcccgggggtccggcgcccgggccgcctttgtgttccccgccttggttgcttttctgggcgccgcctgcgccctattgcgccctcctcccccgcccgctgcttcccagtggccagcgttagctgtcgggcgtcgtccatcgcattgcgccgtgatggtcgagaggaggtgacgagcgttgaagacaaccaccacagtgagcattaatttcctgatactagctcaacccagtcgatcctatggtttaatacagttgcattatttttatggtaata

SEQ ID NO: 123286 - DNA, 323 bp, Arabidopsis thaliana columbia
aacagagaagaaccgacgaagacgcaccccaagaaccaaaacaaaaagcccaacagaggagttgaaaaaaaaacaaacacccccaacaacaaacgaagaccaaaccgccccaatcaggcagcgagcagccccaccagaccacattttagaaaaaacaagggggcaagcgccagcaccaccaaaacaaaaagtagagccggcaggcagaccagccaacagactgaaaagccgcacaccacccaccacacccacacgaaaaagagagaaaaggcaagcaccaagcccgcacaaaaaaacacacacgaaacaggacgcggcggacc

SEQ ID NO: 123287 - DNA, 443 bp, Arabidopsis thaliana columbia
  unsure (1)..(443): unsure at all n locations
ctatgacgccgcatgcccgcgtacgtaagcttggatccttagagcggccgccttgttttttttttttttataacaaatcttcaatctttcataatatcatttggaatatggaatcattgtaatattatcaaaacttgtaaccttctaaaaatgttgattttggttggggagggaaacccaaaaaggaataaataaacctggggggtggttcaaacaaagagcttttantcaaacaaaacaagttaaatcaaaataataccctttacccccattccgagtttgggggatcccactttgagaatcaaaatttacatttttcccatgtttttcccccaacaatttgggggttccctttaaatcacttaattaaacaacccctttttattgcttccacaacccaaaactttttttttcccggttttatatacccctccttgggggag

SEQ ID NO: 123288 - DNA, 526 bp, Arabidopsis thaliana columbia
  unsure (1)..(526): unsure at all n locations
ggggggggcccccncccccccggcgccgaggagggaaacctttaaagccgggagcgggggggtttttaaaacataaaaacaaaacccttaaacctgtcccaagacggaattcgggggggacgaggggcgccggagagattccaaaaacccgtcggacccctcctcacaagcgcagccgtttcggcgcgcggggcgggcgacgcccccacacgcgcttctatacccccggggggggtggcggcccaccacagagcggcgcctcgtcccgaaaaacaaaaaccgccgcggcgagaggcgagtccgggcgaccgccaccgggcggtgcgccgaggcagaccggatggcgcgagaggagggagaagccggggtggccgcctactgcttgccgcggcgccgccgcgcgcgggcgcgctggaagctagccggcgggtgcggccccgcagccgaggcgacgcgcgcgaccgggcgggcggcggcccggacccggcccaagcgcgagaccgggccgagagccacggggacgcgc

SEQ ID NO: 123289 - DNA, 452 bp, Arabidopsis thaliana columbia
aaaaaaaaagcctcgccgagactatacgactctcttagggaaacctgggacgccttgcaggtaccggtccggaatttccgggtcggcccacgcctccgcgatgaggaatcaaatcataacgaagaaacttcctgtcgaagatgaagatcctgagatctccaagtgggaagctctcatttgggcttcaatattagactgcttggggctcctcttcctttctggctcatctttttttttgccatgggggggggccctcaacctccatgggatactacccaaaatcttttatcagagcccattttgctttcctttttctgggaaccccgacttgaccatggcgggggctattattgtttggcacgaaaaaaaagaccgaatctgtcttttggaagggggttctggggggctccactccaaatttcccctgtgtgcgagttgccatcctgggtttg

SEQ ID NO: 123290 - DNA, 155 bp, Arabidopsis thaliana columbia
tatgtgcatcacagacccgttcacccacgaagggggggtgtcattttatataacaactccgcaatttttgtagcctgacccatggaactcactctctcttcagatgcgtggtttttgattattgtggggtgtagagggtcttctctctcaaccac

SEQ ID NO: 123291 - DNA, 451 bp, Arabidopsis thaliana columbia
  unsure (1)..(451): unsure at all n locations
gaatttcgtgagggcgtgaggccgagtgtttccgattaatatattattactcgacgcacagacaacaagatgaccaactaactcgtgtaaccacataactttgttgggatgtgtcgagcgagagggagagtgagtagggacgatgggaagaaggtggctttttgaacgagaggtatgcgcgtcgaagacaacaaggagaagggcgactcgtccacggaaggagacgttgttttcaccatatgaatgaataaactaattaaaaccgtgagtaagantatgagtaggcaataaaagtaggagagaatagcgaagggaggaagtgtgggggtagagggggggagaacaataggggaaggtgcgggagggcagtacggtaggaccgggtgagtcacatgaacactacatctctgttgtggtatgacaggtgtacgaaacatgcgatagtcatctc

SEQ ID NO: 123292 - DNA, 380 bp, Arabidopsis thaliana columbia
gggtttccaaacgtctccgcctcggcccgcacagtcgcggcggtcccgtcgtgcggtcgggggtcgtgctccgcttattttttgcggtcctggcggggggggaggatctccctctctacgtggggtctggaggagaaaaaaaatcgtgcgatggccggcgcggtcgccagtctggatggccggcttccgtgcgctcggctccgcgccgttgctgggcgtgcggtggcggtgctgcgccttcgcacggttcggagctgccgcgctccgcgctagcgcgcggcggggagtgccactctttcttctccctgcgatgaccgcggcggccgctggcggcggggcggggggcgtgtgggatgcggggctgttctgctgcttcgctg

SEQ ID NO: 123293 - DNA, 337 bp, Arabidopsis thaliana columbia
cccgcgaacgaacgatcttattttatatataacaaaccccccaccctatcacacacacccacccccatccagccacttcttactacacctaccttatatcacgactttttcatacccccccgggggtatccacctccccccaaacaacaaacatcaccaaacctctccctactcaatattcctaccatctctcctactatacacacatcaatcacacacatttccaacacacatataacacacacttactaacgcgcccgtaccactacaatcccaccctctcccccataaactcattatacacaatcactctttgaactataatatattttattag

SEQ ID NO: 123294 - DNA, 530 bp, Arabidopsis thaliana columbia
cgggccaaagccccacacaaacgcagaggggggggttaaaaagaacaacccccgcctttaacgagggaaccggggcgagagggacgaaaagataccatttcacccaggggggggggggggccaaaacaaaaccgccaacagacgggaagcgcgacgcgacacgaacggccagacgcgcgcccgcagcgggcgcacgggcgcaagagcgggaaaccacaccgagcaccgaccggacgaagacaagagccccacgccccactttttcagagcgggggggggcacccacgcacccccgccgcgccgcggacaacacaccccaccccgagggaggcaacggccgacacccccgaagcaaacccaccggggacaccgggcgccatagcaacccaccgcctaagccggagagacaccgaacaggagagagggcgccgcacccccgcgcccgcccgagacggaaacggcccgacgcacgacccggagaccgacaacatcccacacaagcccgacacaggacaagagatagcccaccg

SEQ ID NO: 123295 - DNA, 596 bp, Arabidopsis thaliana columbia
ccacacccacaacgaaacacgagaagaagagggttcaataaaaaaacaaaccccccaccttcaaaaaaaaagacaaccgacaaacaaaaacagacgaccaacagaaacacctttagaagaacaggggggaaggccgacacccaaaaacaacaacaacaaaaccacgatcacaccaccacacaggaaaggcacaacacaccaaaaaacccgcccacaccgacgacgacaacaaacacacaaatagccacaacccagcaaacaccacccacgacaccagccacaaaagccaacacagtagcccagattttataacagaccagaggggggggacaacccggcacccacccacgccccccaagaaaaaacaacacaaccaaagagaaggagagaggcacagccgaccacccacaacccgccaagccaacgacacagaaacacacggcgcaccaaatcaaccgaccacaacaaaaacagaagcacaagacacacgccccacacacaaaaaaagacaacaaacccctcgaacaacaatcagagaaacgacacagcacacacaaccagcacagacccacccctccccaccaccccaaccagaa

SEQ ID NO: 123296 - DNA, 253 bp, Arabidopsis thaliana columbia
aaaaccaaaccagccaaaacattcgaaccacgaacgctgactagtatccagacaggaagccgcgaaacgaaccaaccatccattttagtactgcagagggggggacacggaacacactaccacaaaccccccgacactactcgcaatacatagaggaatacgaacagcatagccttgcgtgtcacgcgaccacaatctctatcgagcacgacacccgaaacagcgagtcaccaggaatgccgcaacgctatat

SEQ ID NO: 123297 - DNA, 562 bp, Arabidopsis thaliana columbia
  unsure (1)..(562): unsure at all n locations
actcttnnnnnnnnnnnnnnnnnnnnnnnnnnnnnnnnnnnnnnnnnnnnnnnnnnnnnnnnnnnnnnnnnnnnnnnnnnnnnnncctttttttttttttttttttttttagtaaccaatataaattggtttgttttggcgaaaacacccagagaaagggatcttttgttaccgtgaaaataataaacctcngtcgtcacccgcttccttttgtatccgggagtacctaaagccttgtagtttgtaaaataagaatttctcacacccttttctcaaaagaatgggcctggtcattgacctttttgggcttcacctgaccaaaataatttggccacattgttggagtcaccctgaattgccctccctcagaatgtggggatctcaaaaataaccccacttccaaatgcctttttttttgggtgcccattgggaaagggcggccccaggtgttcgtttttatctgatatattggaaaaaaaactttaggccaatttcccggctttacttccccgtgcgtgtgaagttttatccttttttttagtggcccctaaaataaatcccc

SEQ ID NO: 123298 - DNA, 307 bp, Arabidopsis thaliana columbia
  unsure (1)..(307): unsure at all n locations
tnnnnnnnnnnnnnnnnnnnnnnnnnnnnnnnnnnnnnnnnnnnnnnnnnnnnnnnnnnnnnnnnnnnnnnnnnnnnnnnnnnnnnnnnnnnnnnnnnnnnnnccttcntttttttttttttttttttttttttaagaaaaacagaagaatccttaaaccgaaatgtgtaaactttacaacaagtttcttgtaaagactcttaatcatttcaatagagatattacattgtggaaactctcctttctcctttctcctcaatcaattagctctgaatctgaatatgaatctatgataatcaactttgat

SEQ ID NO: 123299 - DNA, 526 bp, Arabidopsis thaliana columbia
  unsure (1)..(526): unsure at all n locations
nnnnnnnnnnnnnnnnnnnnnnnnnnnnnnnnnnnnnnnnnnnnnnnnnnnnnnnnnnnnnnnnnnnnnnnnnnnnnnnnnnnnnnnnnnnnnnnnnnnncctcnntttttttttttttttttttttttttttttttttttttttttctnaaagagatcaaacccagtggtgcctaaatctcactggaggttctgtttttccataaacaccaaaagttttgcgaagggagaaagggaaaaaagaaattttccaacccctcaaatttttttcggtgttctcaggacaattttccgaccgatgggggagaaattgccgccctgcccgttgtcggtgtttagggataatggggctttgctttactaacatttttgtgacttggtcatttttttggatttggcaccccccaacaaaggggatcccttttctctggttttagagagaacccgggaccttttccccccctgggggggcgggttccttacccgggggattgggttttggaaccccttcaccaaaattttttgg

SEQ ID NO: 123300 - DNA, 528 bp, Arabidopsis thaliana columbia
aaaaagctcttcgggctcactcgatctcttggaaactgggccctgcggtccggccggatttttgcggggcgcgagccctatcggggcgccccagtagcttctcctttcctcatgaaaaatctgtctaaaccggaccaacacttttttgaaacacacttagtgccctttttttagggggggggccacacaataatttttaacaaaaaagcgcattttgtgctgttggcgtttcacccccccttcaaccaataaatttcccttgaaaaaaaaggaaaaacaaaggccccttttctgtctctttctcccctctccttggaaaaataccacgcctttcaaattttcccggtactgacaatcctttctggcgcccttttttcccccaagaaaattctcatgatccccgtgtcccaaagtataaagctcttggtgggcacgccctgcaagatccccgttcaacccgcccgccctcatattcctgcccaatgtccgggctcggcctcagatacctcttgtcgaaggcccccataa

SEQ ID NO: 123301 - DNA, 413 bp, Arabidopsis thaliana columbia
  unsure (1)..(413): unsure at all n locations
gggggaggggggccgctcgtccacggccgggggacagcgggttttagaaacagggggggggaggaggcgcccgaacaacaacggagccaggcgctgtcggccagacgcgcccccgagccgagagataccacacggagtcagcncgccggggcgaagagatgggggtggtgaggggaccggcgcgccgcgcacgagctcaaatcaggcactgggcggaggatcccccgatacacgcacgcagacgcgcggctgttttagccaccgatggtgggtgggggccccacgacaccacacgcgccacccgcagcgacacaaaaaacagcctcgcgccgtcgagacgactcacacctgcaagaacaaccacagacgccccacgcggaccgacacagaccgcacacctccgtccgcgcgcc

SEQ ID NO: 123302 - DNA, 458 bp, Arabidopsis thaliana columbia
cccccccccccccaccccccccctctatctctcggcgtccgcgtcccctcgccagtgcgggttccactcgtcctccgccgcccctccctgccccacctttatcccccgttcccctcgccgcttttgttacgcgtcgccgcgcgggcttttttttcgggggggttttcccccaaccgccgcggctgccaaaaaaaaaggcccgggggtggtgcgagaccgcggatggccacgggcgagtggggccgtcctgtttgcgctctgggcgtttgttttcgtagttcgcccgccatgatccgagcgtgatctttggtgtgtcatttccgcctgccgtcgccgcgcggcccgccgcgtttttcggcggtttttggcccccgtcattcgccttctctctgccttgcgccgctctctggccgtttttgggtgttgcgctcaccccgccatgctcgcgcccgcctttc

SEQ ID NO: 123303 - DNA, 383 bp, Arabidopsis thaliana columbia
ccccacccccccccccccaccccacccccccccccccgcaccccactttttttggggggggtgttcccccacaacccccgcggcgcccccgcaagcacgtccccgtgccgcggcgccgcccccgcccgccctccttcgtgtgggtcgcttccgcgcccgtttccgccctgccctggcgctgttcccctgtccctccgcatccgtcctctcgctgggcgctcgttcgccctttctccgcgctccggtgctggggtgtcctctccgcgcttttctggcggtttcttggccccggtctgtcgtggttttggggtgcggcgccggggtcgtgcggtcggttgttcgcgtttgcccccggcctcgcccttcaccgcggcgccgcgttc

SEQ ID NO: 123304 - DNA, 549 bp, Arabidopsis thaliana columbia
  unsure (1)..(549): unsure at all n locations
ctccaccatacatatttttattctcgtgttccccgtccttcaattcccccccttttctatccccccccttttcttccgcccatctcttgcttttcttccttgctctttccgctttctctacatcgtcttcttccctctatcgggggctgtcgtttcttccaaaaatttcttctctcttctcttttttctcgtccctttttactcgctctcttctatcattcttcgtcttccccgtcccgtttttccctctcttccacccttcctgctctcccccctttctttcccccatatccctttctctcttttatattccgctatctccccgtctttccctttccccttctccctcgggggggtgtccccttatttcctcttcggtcttcttctcaaaaacaatctgtgtgngtcgacttttacctccccttcatcctctatctcctttctgttctcctcccctcgtatttccccctctactgtttctatctcttcctatttcttccgctctctctccctcactaccgtttctcccgtctgcccctcttttctctt

SEQ ID NO: 123305 - DNA, 216 bp, Arabidopsis thaliana columbia
  unsure (1)..(216): unsure at all n locations
ccccccctactctacggacgcacacccccattatccatctccctccacccactcgcctccctccccttaatcccccctttcccatacacacttattatcccctgtcccccaaagtcgaaccccctctttttacggtggggtgttggcaanaaaacacctatgggtccgtgctcccaccaaaaaaatatcgtatacatactcgcccacccgcctacg

SEQ ID NO: 123306 - DNA, 418 bp, Arabidopsis thaliana columbia
ttttatagcccccgcatcccctccgcctaccttttataaccgccaatcccacacactcatcctataccctctccatccttccttttcttctccgtgtttcccccccacaccacccctctctcccccattcacatcacaaaaaacacacgtactctccccaccaccctccccaccaatttgtatatacttctccctcccccctatatcacccctccaccactttcttattccattctaattttcctcccccctcccacctcactactattcagtccatacagtcctccttattctcccttatccttgtcccctgtctctctccgacccacttacacccaatcttttttctccccctctctatcctcattcttctcaccccttcattatctctctccacatttatatctcttttcttccc

SEQ ID NO: 123307 - DNA, 531 bp, Arabidopsis thaliana columbia
  unsure (1)..(531): unsure at all n locations
ttgcgccccggccccccctcctgcggtcnctgtgtttgatgttggggttggggtttcgccctcgggggcccggcccccacaaaaacacagtccgcacctcgtgtgggcccccggtctcgcatccctgtccgtattcgccgtgcgtttgacgtttcctcttcttcctgctcgctttctgcgctgtcatcccgtaacttccgccccatttcccatcctcccttttactttcgccgttcaccgccgcaattgtttttttcaccctggggggtatttatttcccgcctacgtgccgccccccttggcacctgtaacacccgttcgcctcgtgctctggtcttcgaacgtcgtggctctgtttgcttgtttgtgtgtctgcatattccctcccgcgttatccgccgctttgcgccacacatccatcctatatttgtcctctgctcttcagctcgcgtagctgggtcgtcattgggtccctcctttccgtccaaatcattgtccgctcgcccccgcccgcacgacttcctcccggca

SEQ ID NO: 123308 - DNA, 614 bp, Arabidopsis thaliana columbia
tttttccatttcccttccatctttttatctttcatgtaccgccccctttcccccggagccttgagtcgccctgtgtgtattaggatcttgtgtgtttttactcgggggttgtattttccatataactttgacagaatattcgcccctatttcgctcctacatctatttgacgtctctttgtcgttttcctttatatttcgtcgcatccgtctcgcatccctattttgcccactttcccgttcttctttataatacgctatctccccgcttataattattattttccgcgggtggtttccccatattcgccctcggatctccccgtaccacagaacccgtagaattgagcttatccggtcgtagtcttctgttattgtctttgttcgccccctggttttgcggctgtggtcctttattggtttctattatgccgcgggtgccaggattaatctccagatcgcagtggttcgcgtctattttgcgttaccgtgccctagagttcccgggagcatcttagcgggcgtatttttgcctcgcgtagttatgcatatatagcgctggttaggttgtggctccgctttgatttttatatttttcctcctgcacccgctatt

SEQ ID NO: 123309 - DNA, 292 bp, Arabidopsis thaliana columbia
cctccactctacatctcttccgtttcccttcaatttcctccttcctacccctatttccaccacgccccacttcctcccagtatctctacacaacttttttttcactggggttatattgcctaaaaaaaaatatattccaaccatcatccccccactattctagttcacattcttatcctccaccattctatataccttatttattccaccacattcctaattatccccttatatatacacatttctccaaacaacattattactccaccatacccccaaaaatttttttccc

SEQ ID NO: 123310 - DNA, 409 bp, Arabidopsis thaliana columbia
cggtcctgggggtggcccgtttttacccggggggggggggggggtcgcaaaataaccgtgtggatgctcgcgccataactagtccgctgggcttgtcggtcgcaattcgcgaatggagcattctctcgtcccagccggagggccctcccttaggttccgccgtgagcttcccggccgtgtctgcacgattcccgccgcggggcgcgcctctttttggggggggggggcaaacgccgccgggcgggcgcgcgccacaaacaaaacgttggccaagcggtcccgcccggtcctccttgggtgtgtcgcgccccgccctcggattcgcgcacgcgggttgagtgcgcccgggttgtgcccgccgcgtatccgagcacgcgcgagggcggggcggatggcgcgcttctatcgg

SEQ ID NO: 123311 - DNA, 660 bp, Arabidopsis thaliana columbia
  unsure (1)..(660): unsure at all n locations
ccctccctctttactatttccaattccccctcccttcgacttcccccacttccatccacgacccccgtcatttcnccgaggcagccctgggcgcgctcgcctgttcttggtttttgtggtntgagcgtgtttttttatccggggggttgtgttctttcgcaaaaaacttgccttccgcttcgcccggccgcttgttctcctttcccgcttcgttggtcggagcgggaatcgactttgtccgtcatttcctggcccgcattctgtctgccctccgcctttcgcgccccgcgtctccccccgccctctttttccccgatcgctccccgtggctgatcttttttttcgggggggggtaccgcctagactgctccgtgggccctcctacgaaaatcgcccgatgtctgtctcgttgcctcccctgtgatgtcggccggtgcccgtctcccctcccatttcgggcttgcccttttcttcgccgctcttgtcccgcgcccttgacttgagcttggaggctcgggtgccccctactccgtgcttcccggcctgcgctgcccctggggtattcccgtgcgttttttgggccacggtgtttgcttatttggcccggcttgtccggcgtgcgtgtttttttccctttttgctttggtcttccgtttcatc

SEQ ID NO: 123312 - DNA, 608 bp, Arabidopsis thaliana columbia
  unsure (1)..(608): unsure at all n locations
catttccccatacaccttccccccgatcaccaattccttttcgccccgacagcacccagcattttaccatcacgctncacaacatcctctcttcctatatctgcgctttactccccttttctccagtggtgttctcccctatcaaaatccgctcgtttccccccctttcccctttccactcataaccgcccattctcttgtccccccctatttttcccactttctcctctctcctatttactcccttctcccttcttttcctctcctcatcctcctatcttttattctcattacctcccccgtcgctcctctgctcgctttccacctttttcgttgtttttacccgccgcaataatctctttcttctctctgttctccctctcgttttcgccctttttcatctatttctcttcttttcccccctcctccatccgtctcttcttctcccaagaacccgtcatttctcccactcctttctctttttcccccccgcctttctctcccctttatttacccctcctttgtttctatatccctcctccttcccgttcctccctctttctatttctcttttctcctcactctcccatttactttcgtcccttttt

SEQ ID NO: 123313 - DNA, 327 bp, Arabidopsis thaliana columbia
ctatccccccgcgcgcgcgtttacaaaaaaacgtgctcccgtggcgatcgcgccggtgccccttcgctttcgttcctcgctcgcgtgcggctctccgcgccgccgcgttgtccccgcctcgcggctctcgcggcttctgtatattcgccggcgcgccgcgcccgctgctgttgcctcccctctggctcctcctgtctcgccggttcgggtgcgccggtgtgctctcgcggcgtcatccgggcggctatttccgcccccgctctcgcccgtttttcgtccggcgctgcgcctgcctctcctctcgactctctgtttcccgtccccccc

SEQ ID NO: 123314 - DNA, 674 bp, Arabidopsis thaliana columbia
cccccccccctccattttttcccccccccaccccaacatacatcaccaacccttatatatctttcttttttttccaagtgttcccttccctacatacaccacccatccactccaattattcccccctttttctccctcccccttcctttatcactccacatttctctattcccccatccttctccacccccaccctctattcgcttcccaatttatatccccctatttccctatcactcccgtttattcatcccaatactaccctccctaattttttttcccatctttgtttccctcataatctccccatttatccccctcatctcaccaaaaaatacacccatcccctcaataattatttaactcttctacctccccttatattcccttcttctatacttctcctcccctctccataatccaccccatctaccattgtctcactactatatatttcctccctccctcttctcttcaccactcttattcgtcttatcctcctatttctctccatatcctatcactctcacatcccccctactcctctatccatccaactatattcccccccaccctctttcccatctttcctctctacatctcacttctctctctctattattttataaattttctcccaccatcctctccctatccttatctcctccccctct

SEQ ID NO: 123315 - DNA, 556 bp, Arabidopsis thaliana columbia
  unsure (1)..(556): unsure at all n locations
tatatcccccccccnctcttctcccctttttccgcctccgcctcgttgtcctctccccctctcctccttttctcttttattttgctccctctccgtcttcccccgccttttatcccccgtttccccctccccccttttctnttccccttttctccccgccctccttttttttctcccggggtgtgtgtcatccccatatccccccggcgggtctttacacaaacatattctccttcgtttatctacctctttcctcccgtatctttctttatcttttattctgttccctctcctctttttccgctcttttgttttgactttcgttcgttcactcccgccgcgcccctccgctctgcccgctgcgctccttctcgttcactctcgtttctcgcctttctcatgtctctgtgtgttcctccccgctcccttcttcccgtgcccttttcttcctcccccctgttctttcgtcttattcccctctccctccgtcgtctttcttctgcttgactattcttctcctttcgtccctcctctccctctcctatttccttgcttc

SEQ ID NO: 123316 - DNA, 390 bp, Arabidopsis thaliana columbia
atctcgcgtcgcgcgctcgaaaccgcacgccgatcgcgaatagacaacaatgacggcagcaccgcgagagcgactgaatggatgcgccagtccgagctcccgacgaatcccaatccacgcgacattttttggggggggggacacgaaagggggcgggtgaaaaaaaaagcgcaagagataagcggcgcagcagtgatcgcggtgatgacggccccctgatatcgcgtagcgctcgttgatctatcattggggatgggagtaagggggggggggagggcgtaattggcgtacagaaacaaggcccggggctttaggggggataagagccggggaagggaataggacagggcaaaggccaggatggaaaaggatgtcgctagatggcatgag

SEQ ID NO: 123317 - DNA, 758 bp, Arabidopsis thaliana columbia
tccccttccatcccctcctttttattccccctatcaccacaccatattctttcccctctaccaccccccccccattttttcctccacagaccccccagccctcccgtcctcttttttcctatttcttttttcccttttttttcccaccggtgtgttctttctccataacaaccaattcttccttcctccttctactgcccccctcattccctttcccaattcatatatccctccctctatccctttctcatcatctacatattccctcctttctcctcattccactcccctttctacaccacctattttccatctcctcgctattattttaccccatcttcctccttctctttccttctttctttttcccgcgttgtttgttttattacacctttacctcctctcctctcgtctcataatacaaaaatattcttccttttatcttatcatctattcttcttctctatattactcttttatctctattacactatttccctcctcctttaatcccacctctcttcttttgttttacttatcctacttctcctcccatgtctcatcctactacatcactcccatctccattcatcctctcttaattctcccttttcctcctctcttcctcccctctcttctccttttctctttcattatttttcctcctcctccttttctctatttttctctctctatctctcttctctttctctctcttttattcatttttccccttctccctttctctatctttctcc

SEQ ID NO: 123318 - DNA, 203 bp, Arabidopsis thaliana columbia
cttttatccccatatacgatcgttcgcattatttcgcgatacatcacactacacatactttttctccggggggtttaccaccaacaccccgcgggtgctctcacaaaaaaaagaacccgtattagagtcctatctcctctttacattacttattttatgttcatgccctctactcttttcgcccaacttcttatttttcaatc

SEQ ID NO: 123319 - DNA, 264 bp, Arabidopsis thaliana columbia
  unsure (1)..(264): unsure at all n locations
ctctttgtctttttataacttctttttaccctgggttatagtcctctaaaaaatcttctttcctattatcctccgattctcaataccccatctcttctcccacataccatatcatccaataatcctcatatatattatccaccctttatacccccactaccatcaactctttttatccacatacccccgacccattttttccggggggtggttttcctttattcgcccgctctccaaaaacaaacaacaacctncccctatcat

SEQ ID NO: 123320 - DNA, 584 bp, Arabidopsis thaliana columbia
ccctccacattccccacacccccacccccatttccccacactccccacttcctccctaccacgtccatatactctttttctcctcgggggtagtttccctacaaaattacccctccttctatcccccctatacccccccgctcccattcctcaccttcgtttatcctcattcctcccccatacttttatcccccattcttacccccttctccacccctccttatttccccattctccacccttaacttttttctccagcggggttttttaccctattgacccccgttcccataacaaaaaattctgtcttcgtatggcgtccttttccctagacattatcacatgttactgccattccccacctcccttaccccccttcactccttcgttactacattccctcgcccactcactgttccctctactcttaccccacctgctacctcatactcctcttccctgccctccactcccccctatcctttctcctcccacatatttgccccaccattttttcattttttctccccattctacatctccctcatcctaaaaccctaattcccctcaccaccgccatattc

SEQ ID NO: 123321 - DNA, 315 bp, Arabidopsis thaliana columbia
  unsure (1)..(315): unsure at all n locations
ccacccaattttcaccctattaccaccaccacttatatacccanacccccccaatctttttctttcgggggggttaacccacaaatagccttccgcgctcaaaaaaaacggacatcggagctaagagctcatcaatataacatgggatgtagagacccccgcgaattccacttgtaaatcgagtgttataaaacgggcgcgacggtatcgacgagaagcgcgacacgccgcaaccaccaatcatgacagtgacacaccggtgcatcttacggagatatttagccccggtaagttaaaaataagccctagtcaacg

SEQ ID NO: 123322 - DNA, 586 bp, Arabidopsis thaliana columbia
ccccccgcccccccggaatccgtcccttccgctgatctttcaccctattttttccaccggtgggtcagttattttcaaatattacctccgtccttctattcccgccctatttacttttccctttcatcttgtccgccctactccttatcgctttattttttctcccttctctctttgtcatccctttatttccccctatccccatccctcgttttattgcccctctccccccaaccgattttttttcagggggtgtgttccccctaaagtcccccccgtccctattcaacaaaccctctttttccttattttatccccccttctttcccctattctcttctcctctccctccttcgtttccgccctcctaggtctgatttcatccgttttctcctcgctttccttctctaatcttttccctgttggtcctcattacgtccttttgtctcttccgatgcccctggcctctttcccctcgtgtttttgctccccgtactttttcttttttctctctcttacccatcttcccccgtcatttaatcttgttatccccctctctcccaccttattcctccctccgtctatt

SEQ ID NO: 123323 - DNA, 381 bp, Arabidopsis thaliana columbia
aaaacgatccccctccccccctattcacactggacagcatcaacccatcacatactctattttcccccttacaatacccccatataccaactttaaactcccatacttcacttcccctcactaatacctttttagggggggtgaaaccacccttagcggtctcaaaaaaaaaaataacataataccaataattctctattattattaccacacaataacctgacatagatcatcaaacaccacccccaccaaccacatcacactccctacacaacatcctgcgactatcacgcgcatcactagatttatcccacaaagtccatattgcacaccacccctcccataatacgatattcccctcttccataataatcccaattt

SEQ ID NO: 123324 - DNA, 519 bp, Arabidopsis thaliana columbia
  unsure (1)..(519): unsure at all n locations
cttctttactatccattttcccatcattctcaccccccactctccccccttctttccccacccacaccccacctcccaggcttttattggttatgacgcctttttttacttgaggtttaaattcncnataaaaaaanccttcctccccctctcccccccttttcccctcccttatttcttccctttctttttcctttttttccccctaccttcctcctttttccccattacttctcccttctcctctcccccccctcttttttcactgggtgatctcccccaaaccccccttaaaaaaaaaaaacatcctcccatactttcaccactccccctcttatttccttcttttcatccttccctccctaattccccctcctctcttctttttatactatctcctcccacacacgctcattcatattcccatcaactcccctggtggcctttccccacacatcttctccctctcttattcccgcctcattattcccacaaatattctctttaccccccttccct

SEQ ID NO: 123325 - DNA, 510 bp, Arabidopsis thaliana columbia
cccgcgttcccaccttttcccctcctcttctcgcacctcttccctgacttgctcctccttctattccccccttttcccctcccctccgttttcttcattcccgatttcttcgcctatacccttttcttttttcgggttgtttgttcttacccaccaaaaccggcgccgtgtgctccataaaaacatcttttctcttttttttgctctcttttccccctcgctctctttcctttcttccctttttcgcttccccccccgattttcccctcttgatttatctctctccttcttaattatctctccccctgtctctgcgttcttcttagtcttctctctctcctttcttccgctcattcctccccctctttttccccgtctatattttctctgttccgttttttctcccccgttcttcctctcttgattctccttcttttttcccttcctctccgttctttaattttggcttatccctccgtcctcctccattcttcgctcctcccgcttttt

SEQ ID NO: 123326 - DNA, 621 bp, Arabidopsis thaliana columbia
  unsure (1)..(621): unsure at all n locations
ccatactctcctcttccccctcctccatatccccggatccacccccccancctttcccccaacccctcactccccccctttccctcccctcacatttccatttcattccggggtcaaatttccccaaaatacattcctctactcccctttcaccctacccattatctcccccccatcccttttccttcttataccccccctacactacctcctcccaattaccccatatccaccctccctttatttccacttccccccctttctttcccacccttttttctcttggtttgttattccccaccacatcctctcctcctcctccataaaaaaaaaattctccactcaacccctctctcaattcctctaatccttctccccccccccctctcttttcctccatacccattacttcatactttatttcccccccccctctccttccccacataccctctccttattcattccaccctttccctcccccccacgccctcctccctcttcttctctctcctctacttcccctcaccccatttcccttataccacctacatacatccaatcctcctattatataatacatctttcccctcctctaccctatcttcaacccctcccttt

SEQ ID NO: 123327 - DNA, 511 bp, Arabidopsis thaliana columbia
ctcttttatttccctctccccctactcatccacccactccaccccccaccttttcccccgcctcacccctttcccctctatttatgttctctcacttacttttctccctgggtcatatcccccaaaaactttccatccactccctctatccccccccacctccattcccccatcctctccctccccctatactcataatcctcttcttcattcacacacccaccccgctctccctcccctatttttctccccatttcacctcctccccccatttcctccccctcacccctccctaccctttccccccccgttttttcccctcatacccaccttttaatccctccactcttcccaaacacacaccccctctcctcctcaattagttctactaatccctttcaccataatatcacataccatcttaattctattacactccctccctatatcgtccccactctgctacttataacctatcctatactaccccctcatcctccacatccttcta

SEQ ID NO: 123328 - DNA, 469 bp, Arabidopsis thaliana columbia
acacggaccgcaagacgcccgaacaacgtcccccaacaaaatgcccgacatcgaaaaccaatcattacccccacaaccaacatcaacctaataaacacccgtacaccaccctcgagtatcatcccatacacccgacaatacaaatcttttccacgggggtggtcatcaccatacccacagaggtgcactaaaaaaaaaagagattcaaaatacaagcatactactcccaaagtaaataggcgagtaagaggatcccacacgaaaatcacccaaaacagctcgttacgcaccttattaaccgcaagcacaaaggccccgaacgatgagccacaatgtgctacccattctgcgcaatcagggcacaacaaaagcccccgacataaataacgaacgaaaattacccacccaaacaaaacaacatatcacgcgcgcacaacccatcctccgaaattcaaaatagatactccct

SEQ ID NO: 123329 - DNA, 530 bp, Arabidopsis thaliana columbia
cttccctccccacctgtctcctcctgttcctcagccatcattcctcccgtttcgtcccgccctttttcgccctggggcccatgttgcttcctgttccccatctacgcgccggggttttcccctgggggttggtctcactaaacatacgtttatccttatttcgccctgttcccttcccttcgcctcgcgcctctccctttttactgttttcccccaatcctgttgctcccgattatcccccttttcctctcctcgtttttttcccctttcccctgcggcggaccgttttcctcgtggggtgctaccccatatccgcaccgctgtcccacttcacacctgtgcgcttctattttgtcgccaccccggtcttaaattcttgcgttgctctgagttccgccccgcgtattggccgtagacctttcaatatttatttataccgtgcccgccgagcactcgaattggtgtggcgtggcggcttgtttttcggcgtattcctgtctgctctcttcccccttgcgcttttatctcgg

SEQ ID NO: 123330 - DNA, 226 bp, Arabidopsis thaliana columbia
ccacggtgcccaacgaccaacctattctttgtattgtcgtggttgttttcaaatggggggtgaggagtaccgaagaaaaacgcagctttatattcccgagattatccggcacgcctacaattccgcacacatcagataaatacatttactacccccaaccgtgtatcacgccattaagccgccgaaaccgaattcccttaatacccgttctccccggggatatcct

SEQ ID NO: 123331 - DNA, 613 bp, Arabidopsis thaliana columbia
  unsure (1)..(613): unsure at all n locations
accccccccccccctatttccccacgccgccaaggagctccgcctccccactccatccgcctacacgtttttcatacgtggggtttgtgttcgctntacacaaatctttcgcacccgtacttctcgcacctttctcccttcgcccctccccatcccccccccattccccatcgaccactatttgtttgcccgcccacccctctatcccccgcgtttatttcccccatttttcctctcccttcttcttatatcgcgctatccccgccagatccttttttctttgtgtggtgtgtttgtcacaccatttctctccgtcccctctctcaaagacaactaccccttttgtttgtctatcatctcctccccattttccgtgactctcctcattccctccctcatttctccctcccctttttgtttttctttaatttctccttccctctctcttcttctcttttccccccctcccactttcttcccccattctctcgccctcggcccccccctcgcccttccctccctgatattctcccccgcttatttttttatttcgtctcttcttctgctctctctcgcttgtttatctctgtttcctcccgtccttccctttcat

SEQ ID NO: 123332 - DNA, 734 bp, Arabidopsis thaliana columbia
  unsure (1)..(734): unsure at all n locations
tctccctccccccgttctctctccctctcgtcttcccctttctttccctcttttctcttttccccccctctttctttttcccctaccatccctcttcctcttcctcttctttctccactgtccccttctttttcgcctcctggggtgtaccctccttcctaataatttctctcttttctcctctttttctctatccccatactcattctcccttcctctccactccttcttctctcctcatcacccttctttcttctcttcctctctctttcccttcccgccccccttcccttcccttccccttttctctctcttctttcctcttctctccccgtccgctcgngtccctctccttccctgcttacattctattcctccctcccggtggtgtgttactccccttccatctcttatcgcgctctctcctcaaaaaataaaatattctctctctcttccccttcctttccccatttccttgtcttctcccctcttcttccccttcttcccactgcctattcccctccccatactctcctccttttcttacttttccccacccctccctcgactctttttctttccaccccccctctcccttctccctttctccctttcttctccttttcttctcccccccttttccccctctttcttcctcccccctcctacctttcctcccctctattttctttttcccccctcccctctttaaccctcatttttatcctcctcct

SEQ ID NO: 123333 - DNA, 602 bp, Arabidopsis thaliana columbia
cgcaacaacgacaacagaaacgcaacagcagaccggacaccccgcaagaaccggacggcagggaaggaaggttcagagggggggcaggaaacccaacgcagagccgcacaaatttccaacacccgccagcgaccccgacgcgccagcgccacagacaacaccacgcgaccgcgggcgcagagacagaacgcaacagagcatcgacgcacaacaaaagggagcgcgaacaacgagcaacaaggaacaaacaaagcaaaaacagacagccaagcgccaacaacacgcagcgccgcacagccacagcaaaaagccacgcggagacgcgccagcccgagcgcagagaaacgcaccagacgacacgcccccaaacaaaaaagcgccaccgaccgcacaaccgacccaccccaccgagacaccgagaaacgcagcacacaaaagcgggaggccaacagctagcacacccccaaagaaaaccaccacagacccaacacgcgaggggcggacacaacaaaaacaaaacgcgcggaagcgcgccgcgaggaacgacagagaaaagagaccccccggacagacgccacaccacgcgcacaaaagaagagaac

SEQ ID NO: 123334 - DNA, 407 bp, Arabidopsis thaliana columbia
cgcgctggtccggggcgcgtctcttcctctttggccttctgtcccccctctcgtctcgtgcgcgggttcctttcttccgggggggggggcgtcctcctccctggggggcgcctctcgtgaaaaaattggtcctcgcccgtgcgctgtgtgtttgttctgcgttgtcgctttttgtgtctcggttccttctcgcgtccccgctctgtgcgtgcgcgttctcggcctgcgcgctccgccctgcctttctgttctccctcttcgcgctcggccgcgtgggcggtgcgtccgtgcttcgtcgcgtttcgcttttggcgcggctctgtcccgtcgatttcctttcctgcttctttcgttccgtcgggcggcgtgtctctctcttccgcgcgccccccttccccccgtttttt

SEQ ID NO: 123335 - DNA, 391 bp, Arabidopsis thaliana columbia
ggccgcgaaagggacgccggccggcagagaagccaacgagaaccccccagacccacccaacgccacagaccacgaaaacgcacacaacacccccgccgccaaggaaaagcagggacagcgcgggagcccgaggaacgacgaggaacacgcgagccgcgacgagcggagcgacgaacgcccaccaacacccccgcaccacgcagaacaacaaaacacaaaggcggcgggcggcggcgaaaggacacaaccacagactgcaggggacagaagcgcaaaacaaaagagaggcccgcgaggacgacggcccagcgcggacacggcaaagacaccccgccgaggagacacagcccgagagcagagggcgcacgccagagcgccggacacgccaccg

SEQ ID NO: 123336 - DNA, 619 bp, Arabidopsis thaliana columbia
agccagcaaagcgagaacggcagagaggcgcggaaaaaagagggagtttccggagaccgccccccaacccgccaagcccacaacatcacacacgcagcagacgccagacaacccgcggcaagaaaacagaagccgaccgaggcgcccgaggagacaaaccccacacacagcacccgccaaaggggggcccacacacgcccccatagacagaaaaaggccagaccggcagccatccgacaccgcgcaaaaggcgaggacaagccgccagcgccgggcacagaaccccaccgcacagcaccggacggcccgaaagaggggagaaagacagcccgcacccgaccgaagagaacaccggcagaggcgaggccaagacgccgaaccgcgaggcgcgcgcaagccagccgaaaagcgacgcgcggggacccagagggatcggccgccgccccgagacgcgcaacagacgcccagggggggggggcagcgcacacaccaccgcgcagcgagcccgagggccaccaaccgcacgagagcaaacccgcaaagacggacgagcagacgcagcagaaaacgaccccaccgaaagccccacccccgaccaaccgcacaccgcaaccaagcg

SEQ ID NO: 123337 - DNA, 407 bp, Arabidopsis thaliana columbia
agtcctcgcgtcgcccgccagcaccacacccgcccaccacctccacccccccaagggggggcaccgcgccacccccccccaaaacccccaccgccctgcgcgacacgaccacgcacgccgccgcgcgcgccgcacacatcacccagatgtcccgcacgtcactgagcccgctcgcacagcaacaagcacgcagcacactcccgccgccccacgctagaatccgccaccacaccctcgcaggccgccacacccccctcatgctatcaccaccaacgccagcccacaccccaccaccaccgcctcaccgctcaccaacgccgcccgcacgtaacacccaccatcccccccaaaggggggggtgggcgccaccaatctcccccaccactcacgccacccctccccccccc

SEQ ID NO: 123338 - DNA, 412 bp, Arabidopsis thaliana columbia
cgtttatctcccccggccttccctggtagattgcggcatctttttctgtgctgtcctgccgcagctcctttttcgtctccatcggtgaagcgtgcgttttgtggtttttgccgccttcgaggtcgtcgtagggatttttttatcggggggttcgggtcgccgtaaaaacctcgtcccctgcgtgcggagtgattgtacatagcattcgattcaccgtagacggcaccgtgtctcgcttgtccccgcaggcccatgcgtgttgtgcttttgatgtggcacgggctccgcactggcggttccggtcacatgccagagtagctatgagggcgcacgtgaccatcccgcccgatttttgtttagggtgggcttatccaatcggtccactcccgatcttgacccgcccacggtcggc

SEQ ID NO: 123339 - DNA, 710 bp, Arabidopsis thaliana columbia
ccccccctatccctcaactcccctcccccctccctcttttttttttttcctcacctcctccctacttttttcccactcctccctctctccatcccccccccctctcaccctcacaccctattctattttttcccctccccggggtctccatacttcctctcacaaatacgtttctctctctccttcctatctccatctttcctcttcccttctcacttcgttttccctcacccctcccgcaccccatacttccacatcatcctcctcctttcatactccactctctctcttcatcctataccaccctccctcccctccctcaccaaccttactccctactttccccttccttcatccgctgtgttattacccttatctctcctcctctccatcctgttcccctaaccacacaatcctccccctcttattcccctcctatccccacactcccctcacttctaactcctattcctcatttccctatcctcccccattatactccttccttccctacacctatctccccccccccctctcttctcattttaccacaccttatcccctaatcgtcacccccatcccaccctcgatcccttttccctcttcatcttctcctctacatccctcgactctaattcccctcaccctctatcctctcctctcctccccattacacatcccctttccctctcccttatatttcttcctct

SEQ ID NO: 123340 - DNA, 477 bp, Arabidopsis thaliana columbia
agagtttccgacggaacgaaacaccacacagcacagacacaccacacgaaacaaacaacccagacgccgaggccgagtgaaacaagaacaacgagcgcacgcaccaatcacaaccacaacgggggggcaccaacaacctcacacaaccaagaaaacaaacacacgcccaagcggagcccagagaacggcaccccgcgcagcgaccaccaaggagagcacagaaacacggaccccgcgccccacacggcgcgacaaagaaagacgccaccgccaaaaaaaaccgaaacacaggcccagacgcccaggcccggagaggcggcgcgaccacgccagggaacgccggagcggcccgccagacagcgcccaaccgacccaaaggaacagaaagacacacgccagcagggggggggaaacacccacccgccgccgagaggcaacccaagccgagaaaaacgacccacgagcccaggccagccc

SEQ ID NO: 123341 - DNA, 535 bp, Arabidopsis thaliana columbia
gtgcacccttttcccccgggttccaaggaccgttttcagtgctccgccgtactctacgtccgtctgttaccttttctgttcttacggtattttccccgggggtatccgttaaaaagcgttctttggtatttctgcgtggacccgccttgcctcctggtcgtcccggtcctggcgggtgttgttttcctctctttaccccttttctcgatctccgtggcccgtgctctgtgttcttttccccggggggggtgacatccccggggcccgatggtctgcgagtatcttcttcctctgcgtgtgatttgtgcccttacccgcgtgtagagacctctcccttccgccggctcgatcctgctactttctacacccctcctcccggtttagtgctttgtgctcctctgcgtcaactaattgtttctttcgccggcattccggttcccccgctttacgcccgtgtttcttgtagctccatacgataccaagatcctgcttttctccacctctccccctctcttcgcccttttgtatccccccc

SEQ ID NO: 123342 - DNA, 524 bp, Arabidopsis thaliana columbia
  unsure (1)..(524): unsure at all n locations
caagccaaaaaggggggggggggccccaccagaggagagggacaggcgggcaagggggcggaaaaacttggagagacacaccaacggggggcggccccgggaaactctggggggcagccgaaagaaagccgccgaacgacaggagccagcccccacgacaagcagaccgagccgcacaaatatttaaaaaaaaaacgggctgaaggaagaggggccccacccaaaaaaaaaaaaccccccccccaccccgaggcgcccccgccgccgccggtgccgggcggggccgcccgtcgcgccggggcgcgggcggcggggggggccgcggcccgggcgcgggcgggggggccggcccccgccggcggggggggcggcagcgggtaggcaggaggaaagcacggagcgcaaagaggagggccgagcggagggggcgcgcgcaagagagagccgaggcccgacaaccccgggggggggggggaaccacacacaccgaacacaccnaaccaaacancccnacaaaaaaaaag

SEQ ID NO: 123343 - DNA, 632 bp, Arabidopsis thaliana columbia
cgccgccgcggtcgtcgcccgatatttccttttttgtatgtttttcttcccggcgtcgttatgctatatcaccagtttgtcccgtgtttccccgtactaccaaccgctcctacttacgcgccgattttttatcccccgggcgctaattcgctctaaaagattctgctattggctgatggcgggccgttagtgctcgtgcgtcttccgcttttttttgccggtatttaccttttgcctgtctattgcgggtcgggtgtggcgcgcactttgcgtggtctcatcccacggcacggcggtcctcgtatttttttcccccgggtgttgttgcttcaatattccgcttgtggtgggtcggcatattggtgttccccgggtggtctatggctctgtcgctcatatatttcaatcacaaaagcctgatcgacccccgttccgccacgggctgtgagcttgcccgcccccccccgcgcttaatccgcttcttccgttccctcgaacacgatgctcattggtcttctttctacttacatttaatgatccgcccggcaatatctggcgccatattcgtgattcgccccactgcgaaaccgatgcctcgtgcaatgatgcccatccgcccccctcccgcattt

SEQ ID NO: 123344 - DNA, 528 bp, Arabidopsis thaliana columbia
aacagagagacaagcgacccccacggacccccccaacgcgcacaaccccccgctccacccgccaagcaaagccgccccctcggtacaacacaccgcacgatccagaaacgaaacaacacaaagagggtctttgaggggaagaagagccgaaaagagcagagaggagattcagcaccgagaaccccggaccgacccgcgtgccagtatccgaggaccccagcgtccgaagacggagagccacagccgccccaacaaaacaagggggggcaaccccacccacacccaaaaaatacacatgaaaataccccaacacccacacgcgcccgaacgcggaaaaaaacgaccagaacaccaccccaaacaaacatcagccacaggacggcccacaagaaggccgacaaagcaagaaacgcaaccaacgatcgacagacagcaccaaaagcacgacccgaccgacaagaaaacccacgcacccagtcggcaacccaccaccgaccacacaaaaggggaagaaaaacaactaccaga

SEQ ID NO: 123345 - DNA, 617 bp, Arabidopsis thaliana columbia
gagcgagaggagcccaacagcggcccgggaaaaaaggcggcccccggcccagaggcacggcgggccagcgacggcaggagaggcaggagcggcctcagcgggacgagggggccagagaggcggaaaaaaatttaaggggggaggggcggggaagcgagccgggcgcgagacgggggcgacgccgcagacacggaaagacgcagccggcccaagccccacacacaacccggggggggggaggggggggctcccctcgaaaaaaaaaaggggccgggggcggcgcgggcgcgggggcggcggagggcgcgggcgggggaggcggggcgggggcggggggggggaggaggcgggagggcagcggcgcggcagaggacggggcgggggagcgacggaccgggcggcggccaggaggcgggaggggggggcggggaggggggcggggagagagcgccgccggcagagaggagaagaaccacacaaaccggggggaggggaaacacaacccaacaaaaccccaaccccccccaaaaaaaaaaaaaccccctccccccccccccccctttctcccccccccccctcccccccccccccgccccccccccccccccctccccccc

SEQ ID NO: 123346 - DNA, 545 bp, Arabidopsis thaliana columbia
acttttggaccgcccacaccgcagagcagacaaccagaacagcgcgagccgggaccaagaaacgagaccagaacaccaccccaaaacacccgggggaacccaacaaagaccacccaccaacaaagaccccgaccgcacacgagagcaccgaacacacacggagaacagacgacagacagggcgcgagagaggcgggaccgcagcgggccagcgccacggagcgacagacagcgcaaaccccccaccccaaaaacgaaaacccagagcagccccagagaccgcccggccagagacaagaaggggaagaaacacaacggaacacagacacccaacaggaacaagcgcgaccaggggcagcgccagcgcccgaacccccagacccggcggggcgaccggccacgaaccacccacagcaagagccaaccccgaagaaagcacccgacacgacagcaggccaggacaacggagaagcaaacccccccgcaaacaccacggcagaccaccgaaaccgaagacgcgcggaagcggcagagagaagaagaagg

SEQ ID NO: 123347 - DNA, 154 bp, Arabidopsis thaliana columbia
cccgcgaaccaaagcaacaaggcacagcagcagcgacgagacaacggaacgaacggcacgccccacgaacccggggcgggattttccgcaccgcaacgccggaagagagcggcacaagaggcgcgttctagccccagcgcccgcacaacacgaa

SEQ ID NO: 123348 - DNA, 467 bp, Arabidopsis thaliana columbia
ccgcaccacgaccacaccacacgggcgggaacttcgaaacgcacaacacacaacaaaacagccagggcggttcgggcacccacagaggccgcaaacaacacgcggaagggacacacaccacgccagccaccagacgcaacaaacccacaccaaccccaccaaacacggggggcaaacaccccactccccccaaacaaccagaagctccaacccccaggcgcgacaaacagagcaccgcacccccacccgacgaacacccacccacaagccgcccccacccccacacaacacacacccccacgacccccgccccgcaacacaggccccggaccaacccccccaccacgcaccccccctgcgaacagcagcggagccccgcccacacaaaccagcgccagcggggagcacacccccacaccaaccaacacaaccaccccacacacgcggggggggaccaacaaacccca

SEQ ID NO: 123349 - DNA, 441 bp, Arabidopsis thaliana columbia
tatccgatccccttcttttattctctccctccactgttggcacaactaccaaatcctaatcccccgctccgctcagccaacctatacagctttaaccccggggagtatcctccaccaaatatatcccctattccttggtacatattcacactcgtcgcactatttaccccacccactactttactctgttggccataaaaaaaagctcaccccgcgctttcgcgactctactatctctatcataccccgtccaccctccctaatcatttatatctctaccccctttctcgccgttcgcatacgctttacgttcatagttccattccttatatccccaacataatccccccgcgattctcctaaatcccctcattccatatcgaccctccgtcttatttacttattatcttcccccttcattttctctctttttattctccc

SEQ ID NO: 123350 - DNA, 247 bp, Arabidopsis thaliana columbia
gggggggcaaaggttctcccccccaaaaaaataactcccacccaccacccaacccatcaccacacacctacccaagaatggcccgagagccgaccaccacaacggaacacgacacaccccccgcaccaatatgaccccaaactccccacgacccggagcacggtacaacgccttaaaactacgacgcaaacgaaccagcacataaaacaaccacgcccccctagaacacaacccctccaccgggggg

SEQ ID NO: 123351 - DNA, 580 bp, Arabidopsis thaliana columbia
  unsure (1)..(580): unsure at all n locations
cgcggtccggcccggcgctttccccgctatattcgggtgttgttcattgtttcggccggcgtttcgaccggtcgtcagccccgtctccgtttcttcttgtccgtggccgctcgaactttcctcctgggggtttattcctataaaaaatcatgcctccccgcttttttgtctttggttggtccgcgatgcgtgtcggctgcctcgggctttgacctagcttatgggcctaatttgctcgggttcctgtccggatagcgatctcaancttgggtcacccttgccgcgctgaggtgctcacccacttttttttccccgggggggctgctagctcgccgcgggtgcgccagtggtacggagccggtttccacctgggggccgctggcgcgtcatggctccgcttcggctggtgtcggagtaactatagcccgaggcgcgccgtacgtgtgcccgataggcggatagccccgcccgcggcgggattagtggtatataatcggcggtatggacggggtgtgggccagtattggttcatcgctccgtatgcttaatttcgcgggcatcttcgccccccatatgctct

SEQ ID NO: 123352 - DNA, 360 bp, Arabidopsis thaliana columbia
  unsure (1)..(360): unsure at all n locations
agtcgcgcgccgcccgaaccacgcaggcgggccggggttttttttttgttttctctagcgcgatcgccttttttccggtggccggcttttccgcccgttccgcttgttctctctcgtgttctgcgcggtttttttgtttctcgggggtctgtccggtcgaatatatagttttgcgccctgtctgccgggtgttcgttcattttctcttccgctgtcgggtatgcgttgagctcctctgtctgcttgcctagcctcatcgtccgatgctttagtgtccttgtgtctcgttccgtgtcgtgtgccgtgcttttatctctcttgtgtatgctgtgcgccgagcccgcgntgttttttttttct

SEQ ID NO: 123353 - DNA, 712 bp, Arabidopsis thaliana columbia
  unsure (1)..(712): unsure at all n locations
gctacgggcgcgcgcccccccccctccacatcccacgccgcgccccgccgccccctctcttttctttctcgccccccaccccgcccttttcacccccccccgcgccgcccgcccccgcccccgccacccgcccccgcggcgttttttccgcccgggggggaggttccccgaaaacaaaacgggcccccccccgccggcacacagtctaaccgcagtcgtggccgcgcacccccccccccccccccctcgccaccccccccctctccgcgccgcggtcggcggcccctcgccgcacaccccaccgcgcgcgcagcccccacgccccgcgaagcccggccttttttttctcgcgcgcgtggccccccccccgcgcccactgggcgctgtccgcgcaaccatacgtccatccccggcctgccccgcccggccgcgtcgcgccgcgccccggcgcccgcccccgccacccgcggccacccggcgcgccggccacccgcgcgcgcgccccacccccccccgcgcgcgcgcgcctcgccgacacggacagacccacgccggcgccccccccgctacgccgcgcccgaggacgcccggaccccttctcaccccggcgcgtccccngcgccgcccacgcgccgagtaccggcgagacgccctcacgccgccgcgcgccggccacgccacgccgccccgccccctgctacctcgcggcccc

SEQ ID NO: 123354 - DNA, 652 bp, Arabidopsis thaliana columbia
  unsure (1)..(652): unsure at all n locations
ccccgccccgccccctcttctttattcttccctctcctctcgcccacatttttttcctctcctccacaacaacacgccaccatcagcatcctccttcccttcccnccctctctttcctatcgggggggccagttctctctccacaaaaaaaatgcgccactccactcaccatcagttctcatactcccttaattcactaccacacacatataaaccttctatctatccttttccaccatctatcattttatcctcattcctcccctcttctataacccacccttcaatctcatctcttccccctccccccaccctttttcttccgcgggttttcccccccccttcactcgcccccccccctaaaaaaaacattccatctccccgccttcacccaccccactcctttcctcatttccacttttcccacactccccctccgctaacaccgacccgtcactccaccacgcccgcccaccactccctcctctacctcctacccctaccgcaccccactgtcactcccactttctccatcattccaccagtcaacaccaccaccacccacccatcctgctcccctgtctcctatcctctcattatttgaccaccttatacttcccttatcttcatttctctcacttacatttcatct

SEQ ID NO: 123355 - DNA, 601 bp, Arabidopsis thaliana columbia
ctctcgcgcccgcggcgcgccgccgctcgtcttcgccgccgcgcgtaattgtatcgttttttttctccgcggcgtggggggggcccccatacacccaccccgcccccctcccgtgcggccggcgcgttttgtgtgggtgggttgcgtgtgcccgcccgcgccctccccgctctgtccccgcctccctctgctctccgcgcccgcgccgacgggtcggcgtgcctgtcggcccgcgcccccccgcccgcggcgccgcctttttttttccggggggtggggcggcccccccccgggcccgcggccgtgctcgacaacaaactctgcgtcctcctcgggcgcgcgccgctgccctgcgtctctgttctgttcgctcggccgcgtgccgcgtggtgctccgcccggccgccggcctccgcccgcccccccgcctgcgcgccccgccgcgccgtccgtctcgtcctgcccttcttccgctcgtgtccttctgtcctctgcgcgggtgcgccctcctcgcgccgcctcctgtccgcgtcgtgtttggtcttcttcgctggcatccgcgcgttggtgtcgcgtcgtcggtgctgtcgctctcgcgtcc

SEQ ID NO: 123356 - DNA, 572 bp, Arabidopsis thaliana columbia
cgcgggcccccttttttgttcctttatagcgcggcttttctcccgcggcctcgagccctcccgcttggccacggacgagcgccggcctctttcctgccggggggcggggttgctacaaaaaaatcacgcgcgcccccctacgttctcgccctccaagctgccctggcgcctctcctcgccgcgtctttgttgctgcaccccgcagatctcctcgcatgtctcggtcgccgcgcccccccattcgtcccgcacgtcccccgatgcccgttttttcccgggggggggtgcccccccgctttttcccggttgccccacaatttcttcttcgctccttcttccctctcccgtaccgttttcgtttccgccgttactttcgccctgccctcgtttctctcttgccccccccagcccgtctccgctcagcgggccggtcttccccgtttctcccccctgtcgtttcactctcgttgtgcctggccgcgtagcccgttcacccagtccccggtcgggggcgcttttcttgcctcctatcttgtctctctgcactccttcacggtttccgccccacgctt

SEQ ID NO: 123357 - DNA, 262 bp, Arabidopsis thaliana columbia
ggccccacccctcagaccgcgaccccctcgcctcgccgtcttcccctttttttcttttcgctttcacgtccgctttttctctcgtccggattgtagcccacactttctacagccaccctcgtatcctacctttttcctcgcgggggggccagcggtctcaaaaacaaaacaggcgctctcccctcccccgccttcttctcctcccgtcctctgtcccactccctactctctcctctgtctctgtcttctcctcccgtccctc

SEQ ID NO: 123358 - DNA, 513 bp, Arabidopsis thaliana columbia
ggcccgtcctctttcgtccccgcccccggcgccgccggcggccccttttttttttttcttttccgctcccttttttctccgcagccggtcccctaccccgctccccttgccttgcttttttctctggggtctgtgccttctacacaaccttcccactctcccccactttccttttcccctcgttcccccgcccctctatccttcccgtctcttccttcttcctctctcccctgccccccccacccatccctccagtcttgccttcttcctctactatcgaccttcgcccgcgcaactacctctttttctcctgggtggtgtgcccccccacctctccttctcctcctttccctccactacttctccattatcccccccatcacgctcctcccactctttcctttttcctctttctatcttcactgttccctccatccctcttctcgccctcatcccccctccttcctctctccctctccctctcttctcccttcctctcacttctcctctctt

SEQ ID NO: 123359 - DNA, 576 bp, Arabidopsis thaliana columbia
  unsure (1)..(576): unsure at all n locations
acccacacacccccccacacgaacctctttttttatcaacacagaccccccctttcttccggcaaacacaccaaccccctcaccccccgcaatccaacaaaaacaagaaaagacctttttccaaccgcccggggcggacaggtgcccgcccgaacaacaaaacgacncgcgacccagagcagacagcaacaacatataaacagagaagaagaaataacgacacgccacccccacccccgcgcctacccctaaccgcaacaaccaaactaaaaacaaacccgcccagcaacagcagaccgagtaaaagtgagacaagatcctgaccagaaaaacgacaccccattatttatcaacggtgtgtgcaccagcccaccctcgagacagacagccgcacaacaaaaaaaccacctcaactagcgccccaaccagccccacacctcacgaccaccacaccacgcccccagaccaccacgcgcgccacaccaccaccacaccctccatgacagccaacccaccacgacgcgctccgcacaccacacgagcaacccccaacctccacgcacctcacccacacgc

SEQ ID NO: 123360 - DNA, 229 bp, Arabidopsis thaliana columbia
ttttcccccggggggggaagcgcgcacaaaaaaaaagcggcaccgaccatgagacgcaagggttagagtggatttgtactatttcggccccggcgccctcggaatgtaaggccatgcccccacatatgaaacactgagagaagcagtcaggcgcggagtgccgaagggaggcacagttttttttttccgggggggggtgcgcccccgcgacgcgcgcgatgagcgaaaa

SEQ ID NO: 123361 - DNA, 497 bp, Arabidopsis thaliana columbia
  unsure (1)..(497): unsure at all n locations
tttttttttttttatctcctctcctctttcttcaagcgccccgaagccagcgcgtaccttcctgatgccgctctctctagtatttttcccaccgcggtgggtaatgggtctcaaatataaaaaatgccggacgcacgcgtgcgatagattgaaatatgttagctaggctggacgcggtacgtcccgccgccgtcgtccttgctgatcttccgctcccctcggcggtgtacgtcgcctatcatcgtattgcagcctctagggcataagacctattgcggcagcgacgacatctttttttatagggggtgggtcgacgncacgtgggactacagtatgtcatagaacatataaaacgtcgccacgatagtgtccgacccgtccctccggagtcgcctactgctagcaaccaccgggccgccgtggctccctggccttgtcgggatgctctggggtgtacactcgatgagtgtttaatctggcggactgtatcctccttc

SEQ ID NO: 123362 - DNA, 643 bp, Arabidopsis thaliana columbia
ggtgcttcctccctctcccccccccctcccgtccgcggccaatttttttttttaaatttcccccctttttttccgcaaaatgccaccacaccactaatcatcttaccccctttttttccgggggcagcgtcttccaaataaaattatccactctccttactgcatcataactttacattctctttcatttctctgttcacctcctttcgatcttattacttcctttttctattttacatattccctcttgtttcattttcctttccctatcccacaatctcccaactcatcctttttcttttttcttgtggttccgcccactttcctaaatccagtcttttccgcaacaattccctcttcccttacttctcctatcttctctcattaccctatttcgtctttcctactcatcttcctcatctatttctctactttctcatattcctcttccttccttcttccattatcctcctcttacccgttccccattttatcctctctatcctcctcatccttttaattcctctctgttatttataatattttccctctatctttctttacaaacttctctatcactttctgccattacccctttaccacctcgttttacttcagatatcacactctcctctctccctcc

SEQ ID NO: 123363 - DNA, 571 bp, Arabidopsis thaliana columbia
  unsure (1)..(571): unsure at all n locations
tccccacccttctttcctccataacaccccacaatttttttttttctacacacccttttttaccgcataagcaaccaagcctcgcataacctctacaagaattttacccacggggacatgttcccaaaaacaaataccccccccccccaacactaatctttatagttttatgatacttacctcgccgaccacgcgcctagccttttcttccgctttcccccctcttcgttcactgccttcatctctattcaccctactgtattgatagccatctctaccaacagagngagcaacttctcttttccggcgcgggggttccacccagccttacagtccgcgccctctagacgacaaaacaaattgcccacaccacgccgcgcgcaactttcgctctccccccaaccagtcacccctccttcatctgtatgtacttgaacttcatttattctcttgtgattatcccctcatctatccctccccttctgcaaccattctactacgctagccccaatcgtgcgttagtcagcctacgtatttatgccctcattccgttggacacgtcattccagct

SEQ ID NO: 123364 - DNA, 204 bp, Arabidopsis thaliana columbia
ccccccccccttcttcacagccacaaagcgaccacacgccccgcaggcgcgacgcatctctttttcaccgggggggtagggggtccacaaaaaaaaagacacaccgccgcctgcggacgagggcatcagactgtagagatattggtcaccccccgcgcccgccactatgtatcataggcgagctgaaagcgacaagcctctcgg

SEQ ID NO: 123365 - DNA, 291 bp, Arabidopsis thaliana columbia
  unsure (1)..(291): unsure at all n locations
ttttattaccccccctttccggggggagagggccccgggagagcccaaccgcctcnccttttcctgggggtggggggcctacaaaacaacncctcaccccctgtggcgtgcttgctccgtgtttcgtccgcctcgcagccccggctgttagtcgccctctccttactccgtccgctgtgcacccgtgcgccaactctccgccctttctaccacctagaaatctttttttcgggggggtgcatccccacttggtccagtctctaaaatagttcctcttcccctcttgcctgt

SEQ ID NO: 123366 - DNA, 520 bp, Arabidopsis thaliana columbia
  unsure (1)..(520): unsure at all n locations
tttttttattacccccccccccttaccgcagaagcgaaagacccccccaccacccccgaagcaacgccagccacacattttcnccgcaggggtaggggggcccaacaaaaacccaagcaccgccggacgcgccagccccaagtacgcagagcagcagagcacccccccccccccacagaacaaccagacccaccacaagcgcagcagcgccgcccaccccccgccccgccacccggccacgagcattttttttagggggtggcccgcccccctcgctttgccggcatagaaaaattaagcccaaacctgccggtcccctctgcatctcccttctttcgcccccgccttcagttctagtcgtctgggcaacaagcgaccccccgctcacttcgtcaagctttctgtcccaggctgttggagttgtgcatctcgtgtgtctccgccgcatctcttttcccgcccatagtcgcccagcctagttgtctaccttaccccccatgactcctcacctctatgaatc

SEQ ID NO: 123367 - DNA, 240 bp, Arabidopsis thaliana columbia
ccggacattttttttttagttcaccgaatttttcgcggagagacgccacatcaggagcaagcaacgggacgcctctgggggggggtagggggcgaaaaaaaaacacggcgggctccgtggggactaaacacaaggacacacagccccgttcgtcatagcagatctaagcactgaaacatcaaagactataccgcctcggcgcggaccccagcaacctgcgcaccccgccccgcacttttt

SEQ ID NO: 123368 - DNA, 504 bp, Arabidopsis thaliana columbia
ttcggagggggggcagtgtgtgccaaaaaacgagagggcaaaagtaccaaacgctccttgagacgattgtaaaataaaacttcctcccaccccctacaagacctatttcatcatcctgagcctacgccgaccgcgccagcgtcaccgcgcgccgcaagacccggaagtttttttttccgggtgtgtgccagcccccaaagcggcaacgttaactaaataaacctactcacattcgaccccatcgcagcaccccctctcccatcccgctgccactgacaccgtcagcctagcaactggcccgcacccggatccacatactttgtcactaccaggcagatagcatctctgtggatctacgctctgctccccgcgactgtggcacgcgcccccgctggccgcccgtccaccggcgaccaatacagaaaacatagaacaccaccaccgcccgcccctctccatccgtccgcctgtgagcatcttatcattgggctgtaagcgacgctg

SEQ ID NO: 123369 - DNA, 443 bp, Arabidopsis thaliana columbia
  unsure (1)..(443): unsure at all n locations
accgcccaccccattttttttttttttttatctccccccttttttccnacaagacagcacccgccccccccacccacacgcagtcccttgctcgaccctttttacacccgcccgaggaggccagggccccaacaaatacacaaacaatctcccgccctccctaccgagtgtcccagatttccctcatcccccatccatcctaccttcatgcttctactcactcatgcccttttctcctcctatacgttctcttctctcctgtcctccctccttctctcctcttccctccctctccactcattcccttgccccatcttctttttttttcccgtgtgttttagtggtcgccctcccttcctctctttctctctcttctccacatcatcatctctttttcctcctttttcttctcctttctctctctaatctcctatactctctcc

SEQ ID NO: 123370 - DNA, 536 bp, Arabidopsis thaliana columbia
accgcccgccccacaccaacgcccggacaccagaggggcggctttttttttattcccccccccttttcccccaaccaccccccgcaaaataaccgcaaccgacgttttaacacgcgggaaggccgcccaaaaaaacgcacccccaccccccccaccccgcccaccccgcccgcacccccccccacaaagccccccccaccaccaccctcccgacgcccagaaacacacaaacacaccaccaaccgccacacgcccaccgacaaaagcccgctttttttttctaccgcggggtggtcccaccgcacgcacaggccccgcgcacaccaccccctacaaccatgacgccgccacgccacacccacccccacacagcaaaaaagcagtcacgcaaccgccgagaccagataacgccaccgacaaacaccgaccaaaccacacatcccacacgccgaacctacccacctaacagcccgcgcaaccccccacaccagccacataagacacatgctacccacacccccagttccccgctcccc

SEQ ID NO: 123371 - DNA, 524 bp, Arabidopsis thaliana columbia
ccatacacaacccacacagacacggagatttttttttttcttagcctccgttttctgcacgcctaacgcgcgcggccgcccccggagccagagattgaaagttcctttttccgcggtggggggaagtgggtcgcaaaataaaaagattcctcacccatctgtggtaggtacacttcttgttcgattatagtattccatcccacccccgcccatggtgccaccgacccacccggtgcccgttcttgttcctgtctttaccgtgtactgctccccgcgcaacgcaaccggctttttttacgcgggtgggccgtcccggcgccgcggggccccgccaaaacaaaacgttttatcgcgaggcatggatatgtcctgatcctgtcctcttcccctgtcctctcgtaccctctccctcgctttctcctaaccgtctattcacgactgcagtcattgttgacgtcggccggccactctgccggtgggtcgccgtgctcggggctcccccactaccgcgcacgcgttcttga

SEQ ID NO: 123372 - DNA, 648 bp, Arabidopsis thaliana columbia
  unsure (1)..(648): unsure at all n locations
gagccaacccccccttcccccccaccgagccacccgggacgcatttttttttttccacctcccccacatttaccccaacgaaaaaggacaccctcatatccccactcacttgcgntttttttcccctggggggcacgccgcctcacaaacacaccctccagcccttccccacaacgccgaccattcaccccgtcaccacatacccctccaccctcacctgccctatcaaatcacaatccacaacacatcaacaccaatcatcacatacccagcaagccgatatatcccccatcttcaccccgcgcacacagcgcagcaattcttttttcctgggggggggaccccacctccccacctacgttccacccaaacacaacaatcctcccatcatcccccatatatcgccacacacccaaatcccggctttcttcgctccgcccactatctcttatccgtatatccgactcacgtcccaagcttcgtctcccttccagctccccccactaccccgctcctaaacgacccccgccatgactccctacctatcgaccacgcccctcatcgacgcaacctaaagttgccacctgtagccaatgctcacttctattcccctgataccacaaccatacttacactacgcttatccca

SEQ ID NO: 123373 - DNA, 273 bp, Arabidopsis thaliana columbia
tccccctacccccccgaccttttttttttttttttatcccctccaccttttttccacaccccaaacaacccctccatactttctcccgatactcacttacccatttttctcccacacctgggggtgtatattgtcttccaaaaaattaaatctacatcttcccacaccattttctttcggtttagatttaatcccatgttattgtttattatttccacctttcctcctcctctcccttccttactctcttgtttattctctatacttttccta

SEQ ID NO: 123374 - DNA, 287 bp, Arabidopsis thaliana columbia
cgcccctcccctcgtcgagtaggccgggcgccccgttgttttttaataaccccactttcccagcagagcagacgcccagcccgaccgcgtaatcatattttttatttcggggggggaggggggcaaaaaaaacacagccgctcagtcatcttatcatctattgaagtgttattgtgtatttgagtatattatcgctctactccccgtcatttactgttactgtccttactttattgttctggctttttgcgatgttctctgggtggactggttcagagctttctttt

SEQ ID NO: 123375 - DNA, 461 bp, Arabidopsis thaliana columbia
agctttttttttaatcccccttttttcccgaagaggacctcccgcccgcgcggccgttgtgttttttccatgggggggggggggttcataaaaaacacggatcccgcttccccgatgttcggtctttggtctctcgtcaatcttctgtaatacttgtagctttgtaagtgctgtgctctattacttctgtatatctccgttggccgtatccatgtctggtcttttcagtgcaccccttttttttttctgtgtggtggcgacccgccccgttgtgtgttacgttatttatctatttttttcattttcgtcttatatgttgcattctgtgattgttttgtttcgcttgagttgttatgtactcagtccttgccagcgattattcttttttcacgctcctgtatgtcgctctcggttttcatattttgtatatatttctatctttttagctctctgccacgctt

SEQ ID NO: 123376 - DNA, 387 bp, Arabidopsis thaliana columbia
tctaacccccgctgtctccccccaggagtcgctcttttttccgggcggggtctcgctccgtctgctctccggcttaccccacatattccgtcctccgcccagtacgcccccccgcgtcgcgcctccccgttctccatccattacgctcgggtgacaccactcgtgatctcctggccccatctcccgcaacgacctttcctctcctttgctatgcctcacgtctcaccgtcgaccgctctcggttgcccctgggagcgcatccgatccctctcccccgcgagtcccttcccccacccccgccgccccgccccctctctctctcgttacttgagccacggtctccgccctccttttcacctcaactctcgtccccgtctcgtcccccct

SEQ ID NO: 123377 - DNA, 619 bp, Arabidopsis thaliana columbia
  unsure (1)..(619): unsure at all n locations
tacctactacccccctctgtttccatcaccaccaacaagcgcacgaaccattttttttttttcttnccacctcccttttcacacaccaagaaccgcccacctttcccttatgcacttaattatatatttctcccccgcgggtgaaattctcatcaaaccaaaattccacttctccgtcactaagaacgccttatccgttttattgatctagtgccctctccccccccccgctctattcagtacgacccccccagccaacacctccttcctcctgccctccctcctgctcctcctcccctctactggtcactctttttttttgggtggtttctccacctcctatctcattcttttccatcaatcaaaaccaatacttttcgtatgtcgccatctatctttcccactctcccaactcctctctccccttccccccctatcccccgcccgctcccgcgctccactcctctcaaacctcatatcttcctctttgctttcttttctcattttgactctccttcttcatctttttctctctccctctcccccctctctccatccccttttcttttccttccctctgtttcactatacttctctctaatcctcccacgcaattctt

SEQ ID NO: 123378 - DNA, 239 bp, Arabidopsis thaliana columbia
gggcgcaccaagtgcactagtctcgttgtatgacgccggctccttatttatttttctccatcccgcgaccttttggtagacagcaagcgaccctgaccgtcatatggtccgcggtgtgtggtcttttctccctgggcgtgggtgcggtggtagtatcaataaaaacttgcgtccgccactccaattagtatatagctctccgctggtcatcaggcggcgccgcttctcgctcattattt

SEQ ID NO: 123379 - DNA, 507 bp, Arabidopsis thaliana columbia
cccccccgtttttccccagcacaacaaagagacacacaggcgtacaaaaaacccatagccctttttccaaaaacgggggccaaggggcccatacaactaaacaataaaacaactactatatattaagtgctgacacacatagcaactaaatccaacacaacaattatagtatatttcaaattaccacaccccgcaccaacttaactcatcaaagaaacacccacaccagtacaaacaccgcccacaaataacacttttatccacggggggaacaatccttcatgatgtaactatctttaatcacactaaccacattcacccccatctcaccaatcacacgaaaacaatactcactaatagcacattacgacttcagtattaatgtcactacaaacgatacaccacctcaaataatagtatgtcaccattcttatggcccccataatacagctacacaccgtaatcccagtaaactaatactaatagcataatttctcacactcacat

SEQ ID NO: 123380 - DNA, 665 bp, Arabidopsis thaliana columbia
  unsure (1)..(665): unsure at all n locations
cacccgcccccgcgcgccccaccctttttttttttttaatcccccccccctttctcccccccccccgccctcccctcttcccccctccccaacttctcatttttcccccccgtggtgtccttctcttcccaaaaaccaaccatccgcncacctcctttctgcccgctattgtttttttgttgttttttaattctccctccctcctccgccgatcgtctttccttacctcttctccttcttctctctcatctcccatctgccctccttctgttcatctcccttcctactacgcccactgtttttcttctcgtgtttttttccccccctccgttctcctcttcctctcgtctccatacattccgttcccttcctgctctcacactttctacaccctatctccctatctctctgccctccgtcttccttcttttcctgcacgcccctcattcgtctcgcttgactactatcctacttctcccttcccctgccttccctaccccctctcctttcccctttttgtcctcttccactctcgctcctcctcccttcccctccgtgttctttctttctacctatgcccctcctcttcttgcgtttcttccttgttctcgtcctcttactccgctctgtatttcttgatattaccattcctatttcttgcttct

SEQ ID NO: 123381 - DNA, 512 bp, Arabidopsis thaliana columbia
cggcgcgggttttttttttttttttcttccgaccccctttgtcccgcccccagacgagcacccctaagcctcggcgaccaccccgagcagatgtttttccgccgggagtggggaggggttcaaaaaaacaaacggcgctgaatgcctgccgaggattgcgtttgtgtttgtatagttttgatatatggcttccggcgccccccctcactgcttctctgggaccttccacgatatctccttaccgtgcggcacgctctcttgcgccgtacgagcacccgcgaccgggggcgttttttttttgggggggtggtgacggccccgcctagggttcccggcacgaaaaaactcccggcctacctctcgttcgcgcggcgcttctccccccctactcgcacccttgtcactggcgccccggcgcgctcgcttctccgtcctgtcttccggttcacccccccgtagctcagctcgccatggtgttgttatatgtgcgaaagtttgtgttgtcgctcatc

SEQ ID NO: 123382 - DNA, 394 bp, Arabidopsis thaliana columbia
agcccacgcgcgccgggcaggttttttttttccccagccccctttcccgcgcgaaccagcctccgcccccgcgaccccgcggggattttcccgcggggggggaggccccaaaataacccgccacccccggcagcggaggaaatggttgagtggtgtaagatcctccgcgcgccgcctctgtgtcgcgctgccgcccgtgtggccgcgccgggcgcggcttctcgtcgcgtgcatagcccgcggcgcgcacgggcacgctttttttttggcgggggtgggcgaccacggcgcgccagtcgtcgtcccgcgaaaaatacgatctcctcgtggcccagtctgactcgtctcgtcctagctcgcgtgcctctgggcctggatgcgcccggcgcgcgga

SEQ ID NO: 123383 - DNA, 644 bp, Arabidopsis thaliana columbia
  unsure (1)..(644): unsure at all n locations
gtagtaccccccttatccctcctcccacccagcagggagccaatttttttttttttcttctcctccacttttttcagagaagaaacacaccccccccgccaccatccctcccatctccttcctttctctctggggggcaagttgtcttacaaacaaaaccacataccccgcacagtccttagttttctccacataacccatacctccccccttctacctcccccttctcctatttcccctcccttttccccttccaccctttctcccttttctaaacactcgtccttccactcacataccccaccancattttttttttcccggggggtcacaacctattcctcatcatccacctatcaaaaaaattctccgtctccccctcttcttcctcctattttatatatacccattcctcatacatcactatccttttccactctcccctacctcccttcctccattcccctccccccatattccccctcccatgtcctcctccttctcccttctcctcgtctcccctcctccctctccttccttctctatttctctatctccccatccccaactcccccaccatcacccacttttccacctctcctattctctcacttacctccaattccctctcaccgctcccccca

SEQ ID NO: 123384 - DNA, 379 bp, Arabidopsis thaliana columbia
caacgcccgccccagtaataattatagacataagccgcagcgttttgaattgtcaaagttaaaaattacacacaccgccgctttgtcttataccttcctttcgagaatcattattgtccactagagcttcccacaatttttttatggcggggtggggccacccggtgagcggtccaatcataaaaaatgactcagcgacccccacaccgcgcctccagcactgttgtttatacgtttcgtcaatgatcttatcttttactcttcggagatacaaatgcgtgtactccaaataccatgtagttttatcgcgagtcgccgaatatctaatccaccccccctcgcacctctggcgacagcattgtaccctagtcgttttgtt

SEQ ID NO: 123385 - DNA, 577 bp, Arabidopsis thaliana columbia
ctcagtgaacgccagccgccgcgccctttttttttcatatccccccgtttcccgcggcaagggccccccgagcacctcgcccaacgggccgtttctgtcgggggggaggggggccaaaaaaacgcgtggcccttctgtagctcgccgcctatgcctcttttatcgcttctttgtctatatttcttcctgctccgtgcctcgtccatctccccaccccgctccatcctctcacctctcgcgtcagccctcagctcgacggctttttcaccgggggggctcaatctatccgcgtcttgtccccccgcatgattagtccgcattactgtcctgacatttccattttctcgctccacttcctcttttccatctacactcctagttttataccccgacgaccctccgaccaactcccacctttctgaaccgcctgatctcccctcctaccgtcacctacgcgtggctcacggcccgttctctattctgtgtatcgcctttccagttatgctcccatggatccaccggtggcttcctcttcaatacctccttctttttccggaggtgatggtgtaacctcctg

SEQ ID NO: 123386 - DNA, 321 bp, Arabidopsis thaliana columbia
gggggagcccccagagccaaaacgcgacaccccaaacattcttttttattcccccgccttcgcaccccaacacagcgcccagcccacacataaagaaatatatttaccgcgggggtaagcgcaaaaaaaaaccttcatccgagcgtaaatgagtattggttagtaagtagatcacggcgtcgccgacagacgagcaccacgcaacaaggcgtcagacggattatcgttgctgtggtatctacctaagacaacagagtttttttccaggggggtccccgtcccccgtcgcgcaccagacgaaaaaaattaggggaaacaatc

SEQ ID NO: 123387 - DNA, 430 bp, Arabidopsis thaliana columbia
  unsure (1)..(430): unsure at all n locations
caaacatttctttttttttttttatttatccccactcaccacctttcctcaagccacccaacaaaaccactcccccactcaccccatcatctacccctctcctacactattttatctccctcggggggtaatacttccatccaaaaaaaactaatcagtcccatacgccctactatatcactatttatataaatcttattagttgtaatccactaaccncctcccaccccccactcatcttattccccccccccccctctcctattcctctacactcctttcatttacctccccactccccgcctacctcttccctcaccccgagacacctcttcttttatctagcttttgttgtacccccctcatctcaatccacgtgacagtacaatcaaaaaaaccttcacctacaatcacatatcccaacactcgc

SEQ ID NO: 123388 - DNA, 302 bp, Arabidopsis thaliana columbia
actcgggggggggtggtcgcacccaaaacaaaaaatctatgcacccctccgcgttagtctatcacacccgttccttcatttttctctgggaccaccaacaccaccacccttcttgctcctccatcgtctgttatcccactcgtgttacctctccctctcatcgatcttctctcgcgctcatcatcccatttttttttaccctgtggtttgcgcgggaacatcaccccacattctatcccccccttatcacctactgccccacctcattacctctctcaatatccaactttctcccctccctc

SEQ ID NO: 123389 - DNA, 512 bp, Arabidopsis thaliana columbia
gggggcggtcgcgtcggcgggccaggaggggagggatttttttttttttccccctttttcgcgacagagggcccccgcgcgtcccattccaccactcttttcccaggggggggggggtctcaaaaaaaccttcgcgcccctgtatcaccctttccctcggcagaggcgccctgtttcctcttgctgtttgttacacgcccgtgcttcccgtattcctcgcgcctgtgtccttcccctcttggctccgcgacgattttttttccggtgtgggttaccccccagtgtggtccagtttaaaaaacttttcactcgcccacaccgccccttcggttcttttacgcgtcgccactgctctcctttctcccactttacctaactctccccctcatccatcctcctcgcacgtctcctagtctccttgtctcttccgcctcattctgttgtcttgttctttcccattcttgctttcgctagtccttcctctctatatctcttcattcctctaatatccc

SEQ ID NO: 123390 - DNA, 417 bp, Arabidopsis thaliana columbia
  unsure (1)..(417): unsure at all n locations
cgaccctttttttttttgttttttccctcctccatcttttttccaggcacccgacacatccccctcatttttcctccatatatcttcagtcgactttttttccccactgggggtttatgcttttcctataaaaaaaatccactccacctactcttttatacatccctactgttgtttgattttcgtgttttatttcttttctcnttccgtcctctccccctntatcctgtctcttcccatacctccctcttcgttctcactcatttttacctcccttccttccccttactttcctttagtaatcctctccgccccacatgactttttttttcttgtctctgttggttgagctcatctctctctcctctccttcttgctntctttctcattacattattcttctcttctcttccttcc

SEQ ID NO: 123391 - DNA, 210 bp, Arabidopsis thaliana columbia
gatctctcatatatcacgcgtgcccatatctccggaatactctcacctctattcgtccctcttatttctcatcgtgcatcctgcctcacacacaatcacattcagatggcgtcatatctcgctctttcttcttttcctctctttgttctttttatctacgtaagttcaaactaatgagataccgctactccccatccgtatgagacgcag

SEQ ID NO: 123392 - DNA, 597 bp, Arabidopsis thaliana columbia
gggggggcgcgcgcgcgagagcgcggagaggcgcccgcggctcttttttattatccactccacacgaatttacgccgggcgaggaagcctactaggaggagcgcgcgcagcgctccttttttatgcggggggcggggcgtacaaaaaacttagcacgcccagtcggtgtccgaagactgggatgcagtagtcgtaaccttggcatcggccatgccgcgtcatttcatatccgatgctctgtatattagtagcaagcacactaacaagatgtaaaatggaagcacaccatttcacagcggggtggtcccctatccataatcagctattcgcctcgttacgactacgtgcgaccacccagacagatacacatggtccgacacgccacttacttacagtacaccgcagagatcacattacgactgaactcgcatctagcaaaccggctccgtagcggctactacagcgactatgcatcccgatcacacctctgccatcgagattcgaaacttgttcagacgtgttcgcgtccgtcgacgcgtaccgtcacaaccacggcccgtgctatcgtagcagtagcccatacttcgtggcctacgg

SEQ ID NO: 123393 - DNA, 652 bp, Arabidopsis thaliana columbia
cccccccgacccccccccccccgccccgccattttctccgaccaagcccccccccacctttccgacgcgcgcagagacgcccccggagccccccggaggaccccgagccacaagttttccaaccgggggggggcagggcggcacagaaaaaaaccggcagcggcagagacccagcgcggcaccgagataggcacacgagggcgaaaaaccggctccccccccgcccggcacggccgaccaaggacacacgacagacccacccgcgcgcgcccccaccccaaccgccgcccccccgcagccccggcccgacaccaccgcccccacgaccgcctttctcacacggggggtgggcccacgccaagccacgcgccggcgcgaccgcaccaaaaactccacacaccgtgacgcccccaaccccgacgccaccacagtccacgcccacccaggcggcgcgagccagcgccgccgcgccccgccagccccctccagcccgccccacacgcacaggccgctccgagccgtcgctacgcaccacaccgccgcgctaccagaggggcgcggcccaatgccaccagacggcccggcagcgagccaggcgaccacgccagcccgccgcccccacggcccaccccccccggcgccgccaaccgcc

SEQ ID NO: 123394 - DNA, 646 bp, Arabidopsis thaliana columbia
tctttcttcttccccacctccctcccactcccttttttttttccctaccactttttttaacaatcctcccccacttctcccctacccccctcactcttcttttccccacgcggccacgctcctccaacacacaccctattcccccctcatttactccctgccgcaaccttattatatctcccccccatacgatcactgctttctcccactatcacctatttctccccttatcccctttttcttttatcatatctgctctccaatctttcccccgcctcgcccacctttttcggggggtgtggtgtttcagtatccctccctcttctcctttttaaaataaacctctccgtcccccgcctccttcttccttatttcctttttctccttctcgcatcatttcacatttctcttttcccatccatatctttcccccaattacctatacctctgtctttatcctccttccctcaactcacttacaacacaccatttatctcctccaaactcctcacatacacacttcaatctctaatctccagtatccttcttcctctttcattcttccctcattatcctcctttctttatccccccgtcatcttcgtttccctccccctctcccacccaaccctttttcccctcccccc

SEQ ID NO: 123395 - DNA, 562 bp, Arabidopsis thaliana columbia
  unsure (1)..(562): unsure at all n locations
gggggcgattttttttcttttntactccccccatttttgtcctccgccgccggctggtacggccgtaagtggtggtggatggcctttttcagcgggggggggaggtaggaaaaaaattggtcccgttattttgctcggccgcgcggtatacgcttccctcccacagcggtgcacctcctcagtgcttccttgcggatgtccgcattcgtgtgtcaatcgccctggaagtgccgagcgcacgaccggttttcgcggggggttgactcccccgttgcgctattttaaaaaaaaaagagcgcggccgcgtcgtgcttttccatttttcgtccggtgaatcggcggtttcgttgggatccttcgaggtccgctttgtctggttcgttatgcccccttcgctgcaccgtagccggcttcgggtggggcgccggagacaaattccataggtccgactcctcctctctggcgggctcagttcgcgcctcgcatcttgcgggcgctcgttctgcagacgagtcgtgggtagacgcgcaaatgcgatcgataacaatggtttgtaacaccc

SEQ ID NO: 123396 - DNA, 521 bp, Arabidopsis thaliana columbia
actcctacctccgcatcactccctccgcactccaccccctccttttttccttccccaacccaccccccccttttttcctccctactccccctctcaacctcccatcttactctccttctctcctcttcctccatccgggtaatatttaccaaaaaaatacccccctattattcctccccccttcccctttttttcctctctctcctacttacaccaccttctacacctcctcctcctccacttccccaatctcccctctttctcctgatctaatctcttcccaccctcatctccactatcctactccaatctccactctcctctcgtgggtgttatcctctccccccttctcttatttttataaaaaaaaaaaccccctctctctccttctttttttccctattctccaccccatatttcttccctcctatacctttcccctacacatcactttttcctcactgcatacatatactatccctcctatctcaccccgtgcccttttccttcctttcctcttc

SEQ ID NO: 123397 - DNA, 591 bp, Arabidopsis thaliana columbia
caccacaaggccgactattatccgacacgaaattttttttatatcccctcgttttttcaacgccacccgcatcaaacaaaaacatcaccattacttttttctacgggggtaagggtatgtcaaaaaaaaaattcccccaatattattactcctccccgccaagttaataccatatcttactaaaacctatacatatatcatcaccaggacttatactataacactatatgaccctcattaacattatctatactcaatgaaattggcccagacttaatctaagtatcttttgggggggtgggcatacttcacacttttgttgttatattcaaaaatacttcccacttctcccctatttatctattaaacaatacgtgttaaccgcattaatctatccctgctccctatttcccccatattccatttttcacaatagaccaccatactctttagcaatcatcccccatcatgttctctatacatttatacttatctacatatctgtatagactatcttccacacactctttcttttaccacacacatccatcgctcttcagatcaattgtcattaatactcgttatattgta

SEQ ID NO: 123398 - DNA, 570 bp, Arabidopsis thaliana columbia
agtgcgggataacttccgacttcaattttggcgacgccggtgagctctaagattctagaggtcccaaaaagcccctcgagatagtggttgcatatgtaggctaacatttatcatcccacattacagagcgagagatacgccttttacgccgccggggtagatccgtagttaaaacgtctgcgggtgtggctcccggttttatcgacccgcggcgtctcctcgatatgtgcccccggcccttcgggctatgcctatgggcacacgggtcgtgacgtgacggccatgttcggctttttaagcttatctgtgttctctcacccgtcagaggctctcgcatgcactgccgatcctgttcttcgggggtgtgtgccttcgatattgcgcagggttgccggagtgatatgtcacatcagcacgacggggtcggcgtggctacgcgcgcacttagtcgcgataatggacgaccccaggggctgccgaggagatcaatacgacccatctcctggagtacccgtggggccctgcctgtgctgttttatccgcgtgtgctctgttctacagtcgcgcggc

SEQ ID NO: 123399 - DNA, 402 bp, Arabidopsis thaliana columbia
cgctcccgtgtccgattctttttttcccctgtgccctctgggtttttcagtgcggccccacgtttctactaagttacgggccgtatatctccacattttagcccggggggagggctcctcctcaacaatgctgcccgagtattttgggtccgggttcgtttaattcccgctctcctgagagatcacctcccacctcctggcctcctttggtaccggtaatggccgctttcacgtatactatccccgcctgggtgtgtctgggtgacatctatagatatatttccccggggggtgggtccctccccttctcgcgtatccttacacaaaaaacctcccggcctcctctcttttttctcttacctcctcccgtggtttttgccgtgtaccttctcggcgcctcgt

SEQ ID NO: 123400 - DNA, 569 bp, Arabidopsis thaliana columbia
cacacagacaattcccgaatcccccaatttttttttttttccccccactttttcacctacccccccactttcacccccaataccctcccattaccctctttcccccccgggtgtaagggtcttctccaaaaaatactatcctcccatctttcctactcctttatccatcaattattctcctctccccaaccctcccctcgcctatcatcctccctccctctcccattgtccccgtatgccaccctttaccacatacctttactctacctcctacatcccacctcatcctacctcacactatttttttcccgggcggtggtgctatccctccctcccccttcatctccccttaaaaaaaaacacccccacctcttctcccattattccattttatactcccgcatttatcccccacttccttcccctactctccttccatccacccctatacataacttccatctctttcccctacctctctactactccatccccaactctcctccctctacatacaccaccccacctcccatatcctactttcaaatacatcctcactacctacccat

SEQ ID NO: 123401 - DNA, 415 bp, Arabidopsis thaliana columbia
acaactcaccccgcacacgtctgcgcatctttttttttttttttttcctcgccaccatttctactatctcaccaacgcgcccacaccttctccgccgatcactcctctactcctatcacccttttctctaccgggtgctagagagttcctctaaccacaaaactatatcccccaacctaattaccccctcccaactcccttttaatacaccacctttctttcccagcttatcctttccacctcctcaacctcaactcatcctcccatttcataatcaatcctcttcaataatcccttctacttcatttcctcaacccacaccacatttttcttactcggtggttttcccattcccttccctcttctttctttaataaaaacaaaatcactcccccccacactcccccccaattat

SEQ ID NO: 123402 - DNA, 165 bp, Arabidopsis thaliana columbia
  unsure (1)..(165): unsure at all n locations
tctccaaaaacaaaatataccccccactacatactcgctcccctcttttcctcatttatatatcccaaccccgtcccatctggtgcatctccatatccctcctcagtcgcncctcacgaaaccgttatcccctgctttaacatattcataatctctcctactaaa

SEQ ID NO: 123403 - DNA, 492 bp, Arabidopsis thaliana columbia
atatatgtccctccacgacacactcaagcatggagccgaaacctcacagctcagataataattaacccgttaatagccaacctatacaaccatcacgtcatatcgggggcccaccgtctttctgaacccacggtacgacgccgctagaacaagccgtctgaacgcaataaacctctccaataagcaggcgtactgtaacccccacggcgcccacaaaagttctctatccgagactttcgacgttagtgtcgcgtcctccgtgggtcttggggagggcgctccgctcgggccgcgggggcgttgagtatcccttgcgcgtaggcgctctcgtcgtcgaaaacatagtgtgtcggtgcggatcgaaatgcctcataattatcgtatagctgcttgacgggggtctattcgcgggagattctttaccggcttggcatccgatctcgttcgcacctctgacacttgcgcattcagaccattgaaccaccggcccgc

SEQ ID NO: 123404 - DNA, 149 bp, Arabidopsis thaliana columbia
ttcggtcacagcgcgcggtgtccacgttatcccctttagacttctttctttgctgctcgtcgctgtggtgctgacgccaaccctggcccaccatatttttcgcgcggggggggcgctatctctcctcctctacattattatacaaaaaa

SEQ ID NO: 123405 - DNA, 292 bp, Arabidopsis thaliana columbia
cctacccctatccccccctggggggggtggactttcctctccaaatcccggatctctctaaaaaaagaaaactctcccctccccttgtggtttttcttttacgcctaattcattttctatgtttgtataaacaaacagctcgcttgtccccctctatacgtgccactcatcttcatcgactcccgaatacccctgcatcagatatcttatattcgcgactgaccatcctttcctatcttacctctatatcttacgctgtctcatacatttacctgtcgcacaatttatctct

SEQ ID NO: 123406 - DNA, 231 bp, Arabidopsis thaliana columbia
gctcggttaatataaacactggtgtgcataccaataactacaaactaatagcccccacaccccctgctactgatttattagtcgttatattcctaatttgtagcgaaactgccattagctcatggggggtagctcggatttaaatccaccacattctccccttaatataaacgttctcgccccttacatattccccctccaactaaagcaatcagcaaacaccgccacgag

SEQ ID NO: 123407 - DNA, 635 bp, Arabidopsis thaliana columbia
tcttacatatatcctttcacgccatacactactctgcggctgcccgacaaatttttatcttctcttaacataccacactttttttctaaaccacccacctacgatccaaacgcaacccaaaccgccattttccccgggggcagggggctatccaacaaaacttaccctcataatatcaccctccgtcacctttatactctacccccatacacttaaccgtatcttccacttctcactcttatcccttatacaaataaatcactaccattcccgccccaccacacccactttctcatccatacgtttttttccggggtggggtgtccccccccatattctattttcacaaaaaaaaaatccctaccttatatattttttttcctcttctcattctccgactaccagcgtaaattcatcacctcacactaacctccccctcatcccttccttccacaattttccccctacttcctccttatctcccctcatattctcattcacacttcactactaatcctaccacataaccgtctctatctcctctactcccactcccccactccaatccctctaactttttatccaccatctatctctttttctcacactccatcatacatctcttttatcaccac

SEQ ID NO: 123408 - DNA, 385 bp, Arabidopsis thaliana columbia
atcatgcaccaatgcttggacagcatgtctatagttgtcccccctagtctccctccagtgcagtgatacatctgcttcgggccatcatgacctgcccgtactcggtaggggagtgacgctcagccttagggggagagcggtgttccaaaaacacggagtttgcccccagttattggattctggctatccccagtaatcgccacggcaccatgactctaaacgcttatatacccagtattaccatcttccccgtatcggaacgttcgttggttcagatctgatgtcggagagtagtggatcgttctactgtgtcggggggggcggggtgtagggtctgctcacgttacatgagatataaaaaagacataatggacactgtgcctac

SEQ ID NO: 123409 - DNA, 629 bp, Arabidopsis thaliana columbia
  unsure (1)..(629): unsure at all n locations
tttactaacttccctccccctatccacccacatttttttttccccaaatccacccaatttttttatctcccacccccattaatattactattagccaccccaacccccccttcccaccgcgggaaccctcctcccccaacaacatattctcaccctaacttctccccccccgccctcataaaccatcctatcaacgctttcctataccctccgatcctcaccccctctttactcatcacatacatcccctttcagtcaagcactacatacccactccacttttttcctggggttttacaataccctcccttctctccttctttactaaaaaaaaatccacacctcaacacccctttcctaaatactcaatttcaatcctcaatactattattaataatttaccataacgcaacgtctatatattctcccctctctctcctgccctcacacacctaacccctatcctccttttctcattccaacacctcttattactcgttcacctctctctcctcatcccaacccgtctaccacaccnttcctatctcaccgcctactgtatctcatcccccctccatccataacacttattactctataaaacccccttccttaccccactatctcat

SEQ ID NO: 123410 - DNA, 534 bp, Arabidopsis thaliana columbia
tttcaaccctgggtgtgaagcgtctccaaacaaaaaaaattatccccagtcaaataactacactctttccgtaataatacctctctacccctcctaactttctactaccacccttctaacatctattttccatttataccaactttaacctcctagtctccccttcatacagcccacacataattatacctaatttttatgggggggtggtcatatttctttttttcttattttatttaaaaaaaaaaagacttcttatttttcctgtattattactttattttacatcctctatattcccgcataatcattccgcccttacatttataccccactgttcgtttcttccacactttctacacatcacaatacccatactgatcccactcaactaacctcaatatatactcttatttacaaacttcacccataacttgaaactcgtagcttctataaccatacttctctcaattacattacaattactatatgtattactcctcacactccccatatttaatcttcttttttttt

SEQ ID NO: 123411 - DNA, 624 bp, Arabidopsis thaliana columbia
ttcacgtcatgttttttctttcttcttcccccccccttcctcgtaattttattttcccccagcaccacccgccttttacattcacagccccctatcatctcccccttcctaacccccatacggctccccattatctcctgcgggggtcccttcgtgtcaccaaacatataccaccctaactatatgtcgccacccccctccgatattattccctccctctccacattccaggccttcagtggcacactccgccgttatcttctctcagtatacgtcactctacgatcgcatatttcagtcatcctattactctatctctggccactttcttacacgtgatcctagaggcttcctctctgcgcggggggtggttacttccattctccgctccacgcttttgtttccacgagtaataacgcccgccgcgcgcgcgctctgtaattatcctttatcgtgcatcaccatatattacttgactctcgtctcccgaccatccttccttcgccccttatcctaaccttacattctgactcctgtcctcacccgttggtcgcttttatcgaactgccctatcccctatgctcctaattgtgccacaaattttcatccttccagtttcagccc

SEQ ID NO: 123412 - DNA, 214 bp, Arabidopsis thaliana columbia
gtatcgccgtcatatcaatatcgccaaatctcgtatttctatttagctaatttttaagaataggttatggtttttaaaaccacacagacattgcccgttataaattatacaagcaatgaagaataattacgccatcaacagcgaatcggagcatatatgcatccgctctccgcgtacctctctattaaccacacaatagcacgacattatgctc

SEQ ID NO: 123413 - DNA, 698 bp, Arabidopsis thaliana columbia
gctcgcgcttgctcatcgtgtgctgtcgacgccgccccatggggctcgtcgatttttgttctccctcggccccggcggctttggtttgttggataggccgtgccgttttcccggggcagccgccggatttccgttttcgtctttggggttaggggggtccgcacaacacagggggttgcgtcccgcgttgtgtttcgcccgtctgcgcgttcatttagtgtacctcgggtacagggctctcctgtctcccggtcgtgtcgcgtactagtggccgttgtgcgccgcctgtggtgggtcccagagcgggtctggggggggtctcggcacggcgtccctcttctttctgcgggggggggtgtgcacattttctctccgtggggtcggtattcaataaaaagaaaagggcgtccgggcgctgccggtcgcctttgtctgggtgagggtccctgcgtcgtgttcttggcggcgtgttcgttcccgcttggcgccttgcattcgcctgtgcgtcgttgcgatcgcgtctcgcctcgggtgccagacgccgagtagtggcggtggttttcgtggtcagtttcctcgacgttttcgcgctgttccgcttcggtgccggatctctcggcgtccccgtgtggcattcggcggtgttctgtgcggtgtgtattggtctgacgcggttcgttatgtttcgcgcttcgcgc

SEQ ID NO: 123414 - DNA, 644 bp, Arabidopsis thaliana columbia
  unsure (1)..(644): unsure at all n locations
cccctcctacttaatccttaaccccggctaggggcnaaaaatatttttttcctttttttaaaaaaaactctttttttttttggtaaaataacccccccactaaaaattccttttaaaaaccttatttcccaaaaaaaaacatttttgtcttttttttaaccctgggagcagttgtnanaaacccctcttccaaccaaaaaaactaaaaatccttctccttaanccttttttaaaaaaaaaaattcccaaaccacaaaaacccccttttcccctttttttaaaacaaaacctctttttttcccacaccttatttttatcgctttttaacccaccttgtgttttaaccttttccccctataaacaaaaatttgtccccttttttatttctctaaaaaaagaaacaaccaaaaaacacatttgcccccttgaaacattattatatccacaatgtttttcaaaaatcttttggaaattaactttagaaaaagaaccttcttctctctccaaataaaactcccccacaattttttttgttgaaaactttttaacccccccaccaacactttgaaatatttttttaaaccctcttatttaaaaaaaaaaaccttttctttttgaacctcttttcctcaccacccccgggg

SEQ ID NO: 123415 - DNA, 595 bp, Arabidopsis thaliana columbia
aaaaaaaatctaataaaaacaaccccgagttgaaaagagaacaacacctcgacgaattaagtaaaaaacagttaaaacggggtaggcgagcaaacataatttgcactttgaagcggaggatagccaggcagagacatttctaaagtttccatacctcatatgaaacatatcttccacaacgaacgcggctcaagggcatctaagcggagcggacggtttttaatagatggtggggggagtaagcgagtagggagaaaagagcacaaacaactcccgacccgacaacaggatgcagaagacgatacgtgtggtctgcgtaagccaggtagaaaggccgcctcttgggagaagtatagatattccaaaaaggtagaaatcattattcttgtgtggggctcacagcatagataccgatagatgagataactaagagtggtggtcgatcacggtagcgttcgcatctctctaatctcgagtgttgcgctcagtctacccatcacaagcaataaattagaatcttctctgtagaggagagctaattctataatattgctttatcctttatagttctcgtgtaggtgtcggtacgctcccg

SEQ ID NO: 123416 - DNA, 550 bp, Arabidopsis thaliana columbia
cccgggttggggggggacagaacagagattaaggtagaatagtattcggagggggggggccgccggacacttccgggcctggcggacaacacaataaagtgtgcggtttatggttagcaagtcgccatgttaccccgcgcgcccttagctcttttcgattaagggatcacggcactttttgtagcggggtgggtgaagactactcggccgttaacacaacccctcaggctgactgggattgtcctaccaagctggtcacgccggactgccggcagaataaaaggctgagcacgacacaatgtgtagggggggcgggggagcccgaactaattaatattaaacggtaacatcaaagtgagcaccgcgctcgagtcgccacaacatccagccccaccccgccttcgtggagacgagagcaagtttgaggtcgagataccacagccgctgtgggcgaactccttgaccgccgtcatctctccctccctcccctcgccgggcgcgcaagggaaatgataggacggaaacggagacgtaacacaccagcaataaa

SEQ ID NO: 123417 - DNA, 109 bp, Arabidopsis thaliana columbia
aggggagagggccctcacgagagctatgattacactcttttctccctggggggaggggcgttcaaataaaaatcctccattacttacccggacttaaaacaccacctcc

SEQ ID NO: 123418 - DNA, 175 bp, Arabidopsis thaliana columbia
  unsure (1)..(175): unsure at all n locations
gggaaagcgtggtangccctgcaggtacccggtcccggaatttcccgggtcgagccacgccgtcgcgatgctgtttcaagaagtgagtaacaacaaccgtcgaaggtatcaaatcacttcaccatgaaggagcaggactcgagggngtgataaattanggaaacaccattaatct

SEQ ID NO: 123419 - DNA, 367 bp, Arabidopsis thaliana columbia
accccctcccctttaggcgcggggagagagggataggacgagatagagagtaagataggaggggcttttagatgtagggttgcggacagacgaagagtgaagactccgagcggcagaggacatgagagggagtggtgcagccatggagccgctgtggcgagcgaacgagcaggcggggcggagcgcgcccaactggctacgactcggcgactgcacgacgcggacgctgatccgagaacagaactcttttgtaaggacgtggagcgcctggcacggcgcccaccacaagaaccacacaacatgaccacgacactcgcgagagaccgcgatgacccgctgcatcacacgatacagaaacacaaatcca

SEQ ID NO: 123420 - DNA, 296 bp, Arabidopsis thaliana columbia
cggtctaattgaggcgaactatagaatactatgacgtcccatgcacgcgtacgtaagcttggatcctctagagcggccgcgctttttttttttttttctaaacatagaagatagctaaaatccacatcgaaaaatcacacaagacaacaaatagtaacaacagagaagataaaagttcaataagaggacgataagataagttttcctacactacttaaaccaacacagagcatggtcttcaagtctttaagccatttttaaaccacaaacactcatgaactcatcatcatcatttt

SEQ ID NO: 123421 - DNA, 528 bp, Arabidopsis thaliana columbia
gccagccctatacgacttacttagggaaagctggtacgcctgcaggtaccggtccggaattcccgggtcgagccacgcgtgcgacattatttatgttaatggaaatcgtattcctaagaaacttcctccaaaggtttattttgctctgaacaagcctaaaggatatatttgttcttccggagagaaagagatcaaatctgctattagtttgtttgacgaggcgtggggctcttgggataaaaggaatccggggactcccaaacctcgcctttttactgttggtcgtcttgatgttgccacaacgggattgataggtgttacaaatgatggagatttcgcacagaaactttcacatccttcatctagtttaccgaaagaatatattaccacgggtgtcggtgatatacacaaacgacacttaatggctatcagtgaaggcacatgggtggaagggtgcactgggtcccaattcaggtgagttgatgccaaagcagctgatataccaagagcagggctgcgtataggggt

SEQ ID NO: 123422 - DNA, 383 bp, Arabidopsis thaliana columbia
agaaaaaaagagaaaggctcatttattacaacccccaaggttgggggaggaaaaataaggagagagatagctccaactctggagtttttgtgagagggggggggggcggtgaattaaaatcatggcgcgcacgaaaaactaataacacatagttgtatcgtaagacactgatgaaattttggcgaattaggcgacacggaggcgttatatccacgtaccccgacacccaaccaacaaaccaccgtttttacaaaaaaagcgggaatacacgcccaaactcttactcctctccctattcccctatttcttgatactacgtagtgtcaaacaagagcacccgtggacacgctctattacgagaaaacttactatagcgaggtctc

SEQ ID NO: 123423 - DNA, 547 bp, Arabidopsis thaliana columbia
aaaaaaaaagaggctcttttaaaaccccccttgaggagggaacacccagtttcctaaataaaaactttacaaagggggtaaggtaaaacatatgtgctgatcttatattttctttacccgcataatgaccaccacatccttacctgctacatagaatgtgcataaaatcgttcgctgtgaccaaatggcccatggtgttttttcatcaggggcgtcactccaaattaaaacctccctcatactaccctggctgaccccacgctctacattctctctccatcatttttcccccccatacgcccccacaccctagctcacgcaccacaccaccacggcgggctcagcgcccccattcggatagtgtaggactgatcacgaagcacgcgcggcctcccaccacccctcccactatcgacccgttatctcgctccccttcctcccctacccctctattcatcaccatagtctgtgaataatagatattagcacatgtcaccacagatctctcgtgttggtcgcaatatcatcattccgccctacctacatt

SEQ ID NO: 123424 - DNA, 567 bp, Arabidopsis thaliana columbia
  unsure (1)..(567): unsure at all n locations
nnnnnnnnnnnnnnnnnnnnnnnnnnnnnnnnnnnnnnnnnnnnnnnnnnnnnnnnnnnnnnnnnnnnnnnnnnnnnnnnnnnnnnnnnnnaagcgggcncgccccnnnnctntntgttttnnngtgtttttnttgnctggggttcaattttcattttattaaccaagcctcttaaacaattaacacacccccccaaaaaaaaaaaatccccccttaagaaggggggggtgggcccccttttctaaaagagttataaaaaacacgcaaaagcccttagatcaaacgttttttttaaagagattgaaaatcttcggctccttgggttataatgggaacaccctccaaattcttctctttggggcaatattcttaaaccatttttaaacggattaactctccacagttttttggaaaaaaaaaaaaaaaagggtggttgggttttttttcctctcaccaaagacgaaaaattcgaaaaaaaacctccttgcaccttttttttttttttggtttctcaaaaacaaaattttaattttaattaaaccactctttaaaaggttggttttttt

SEQ ID NO: 123425 - DNA, 229 bp, Arabidopsis thaliana columbia
ggggggggcagagaaagaatatatttttagactggtcgtcgagtagcggaccacccccgagcaaccgcactcaatccccgggtcagcgccacggaacgcgctgcagccagcacagtcgccgccgcgtgcccaccacgaacagccaccagacgtcgagaggagatttttttcctcccgggggggacggaatacataatgagtagccgcaccaacaaacacgctcacagac

SEQ ID NO: 123426 - DNA, 146 bp, Arabidopsis thaliana columbia
  unsure (1)..(146): unsure at all n locations
aaaaaaaaaagccctttttgggaacacacctccngtcttcaagggggatactgatccatctaataatcgcacgacagacaccttttattacggggaagggaccataaaataaaattctgtttttcattatatgtaatactgtggta

SEQ ID NO: 123427 - DNA, 526 bp, Arabidopsis thaliana columbia
cccccgggagattgggtgactgtagtttttttgggggggggggctatgaatcatcattgcgaggtgttctgtttcgtcctccgatcggcatcatcccgatctcctctctttctgcgggcgcggcgggatggtcgagcacccaacttaagagtacatgcacacaaaaaaaattcttaaaaaaagggggacgcccggaagtggtatttatgtaactacatgggtattttaaacgatcgtgagtgcagtctttatgtttaatattatagctcgttcattgtgggcggtataagtgtaggttcagagacggcgccgccttgctctctgtcccctcgcgggtgtggtctgttgttatgcgcgtgttcccgtctcgtcgctcgtggtttgtggctgtaacgttttgtatttagttattggccgtcgccggccgcgctgggggggcggtcgatgttatagtctacttaccgctgcccgcccgtccttcttccgccctcccgcttccggcggggccgcggggccccctcagctc

SEQ ID NO: 123428 - DNA, 524 bp, Arabidopsis thaliana columbia
ctatgacgccgcatgcacgcgtacgtaagctcggaattcggctcgagctaaaatggcgacggcgttgaaaaagaacagaaagaagagaggtcacgtcagcgccggacatggacgtatcggtaagcaccgtaagcatcccggaggtcgtggaaacgcaggaggtatgcatcaccacaggatcctcttcgacaagtaccatccgggggtacttcgggaaagttggtatgaggtatttacacaagcttcgtaacaagttcttttgcccaatcgtgaacctggacaagctatggtcacttgttcctgaagactgaaggcgaaatcgaccaaggataatgttccgttgatcgatgtgacgccacatggtttcttcaagggtttggggaaaggcatttgcctgagaacaaaccttcggtgtgaaggctaagcttatctctaaaactgctgaaaaaagaataaggaagctggtggggctggtgttctcacctgttaatttttttttttaaatcaagcctctttttaattta

SEQ ID NO: 123429 - DNA, 580 bp, Arabidopsis thaliana columbia
  unsure (1)..(580): unsure at all n locations
nnnnnnnnnnnnnnnnnnnnnnnnnnnnnnnnnnnnnnnnnnnnnnnnnnnnnnnnnnnnnnnnnnnnnnnnnnnnnnnnnnnnnnnnnnnnnncctttttttttttttttttttccaaataatgcgaagcaaattatataatccaataccatagattaaaagatctctggttccaaaatccaacaaaggctgggttcaataacatgaaataaattggggagggaggactgatctgaaaaaaaaaacctaaaaaaaggggacctccgggcccgcccgggttcctttaattttttttttcaggagggttagaaataagctttacccttaaaacgaaagggtgggtttaagggaaatgaccttttccccaaaacctggaaagaaaccatggtggggcacattggttcaacgggaactttttcctgggttgatttcgccttcacgggttgaaggaacaagggaccttagtgtgggcagggtcacaatgggggaaaaaaaccttggacagaagggggggaaaacctttaccacctttcccaaaaaaaccggatggggcttggaaaaaaggtcccggggggagct

SEQ ID NO: 123430 - DNA, 358 bp, Arabidopsis thaliana columbia
ggccccaattcggagacgcacgacgttgcactcactgcctacggttatcacttctgtctgttggtaaaggctctaaaataaaatgatcggtgtcgctgtcgtggcacttatacagtattataccactaaaaaaagttacgacattatcgtaatcaagcagccgcaggatatagtaaatctccacctatcgacgacacgccgcacgcgagaagccctttctccatatcacggagatcagcaaacgacacctcgccttcatctctctcgcaaacacagctccaccaccgactcactcgacgcgccgttgacgccagccggagagagaccgagaggcagtacacgatgctggcgtactggg

SEQ ID NO: 123431 - DNA, 307 bp, Arabidopsis thaliana columbia
gctttgggcgcggggtgtatttcgtgttcgggagcgctgtgcgagggggtcgttttagtcgagagggttgtcagtcgtcaaaaaccaaattgtgagtcgaccagaacgcgggcagtgtggccagcgactcttattatcgccgagagcgcgtctgctccgccgcccacctcatctcaggcttcctctgttgatacgggatgtgggtgtaagccgcgagtccgcggccgttccgtgcttttcattaccagcgtggtgcgacactccatgagcgtggtgacggaaatacaagagggctgaagagggtatt

SEQ ID NO: 123432 - DNA, 579 bp, Arabidopsis thaliana columbia
ggggaggaacagcgggtggatagtgagagggagcgattttttgcatcggggttggtggcacaaacaaatgtgattcggtcggtgctattgtcagtaagattataagagcaagggttgtgtgtaaggagatgcattgctagttattgtattcgtggatgtatgttgttgagtccggtagataaaagtttttgaacagaagtgggaatatatatcgacatcagttagacttttttttatgcagatggaagagcagtcatgattggagttggaaactatcatcgacagagtagcagcgtcagatatagtagccatattagagttctggcgagggttgagtgtagcattatgatcgacgtcgattttcggttctcttagttaactgtcataggattatacaaggagtgtaactttgcctttgatgcgtggcacccggcgcgccgccggcatgtgttgggtgtttgtacggattctagactgcgtgcgtatggagtagcaactaggtatgcgttgcatgtgtttagtgttagagcagtgtagagagtttgatgattaagtacgagtgttttagacacgagagtg

SEQ ID NO: 123433 - DNA, 573 bp, Arabidopsis thaliana columbia
cgggtgcgcgcatacgcacaccagatatgtccggagccaactgcagccacgaaacctcctcccgaacagcaaagtcgccaactgtaggcgtgtcaaaccgcaggcgacgtgtcggctaccccgccggtgcgcacagaagaagaccggaggacgacgaactgtctttttgtcccgcggaggtgtggcgagccgttctggcgatcagaaccacagcagcctgtctagaccagcgcgacgcacacgcgcagaagaaaagaggcgtaacaccaaacacaatcgcgcggacgggagagtcgcggtatggcgggacggacgtcgtcaagaggtgttgggtggtgagatagattaccaggatgagggggagagagaggatattgaggtcgatagccaggcgcgtctgtatcctagcgccctgagttcgtgctcgacgccccccaaccacacaagaaaacgcgaatcaacgccagacgagccgccgcgaggccacagagcgaagcgcgcagaaactgttacgagctatgcatcacccacagcgagctagataggccccgcccggtcccgggcgcacgccga

SEQ ID NO: 123434 - DNA, 165 bp, Arabidopsis thaliana columbia
agaggcgagagaggggatatggattgggggctgtagatgggttagaagtggggaggtaggctgaaaaaagaaggagcgtggagatatacaatttatttgaaacaaaggactagaagaaaattgtttagtgtagttgtacgcctaaatgcgggagatgatatcaga

SEQ ID NO: 123435 - DNA, 387 bp, Arabidopsis thaliana columbia
gcacaagaaaggctattaaacaaccccaatttagagggggcacttccccctaccaaatacaacttcttttattaagggtagggggttaaataattctccccccgcgatactctcacactccctcttctcacatcttatataatcctttctttatttttctctttttctccgctccaccataatcatctaggtccaaaccaccaacaaacatatttcccactatttttcacatatttttattatttcgttggggggggcgacaacaccactatcctccaccgacccctaataaaactcccacaccccatcccagcccaatcatctatcgacctgcatatcacctgtaatccagcaaaattcttctatacataacaaattaatacactt

SEQ ID NO: 123436 - DNA, 346 bp, Arabidopsis thaliana columbia
aaaaaaaaaaacctctttttaaaaacccccccctcttaggacgagggaaataagaccgcggcatccaaccgctgaaagcagtttaacgcggggggtgggggcggcaaaaaaaacaccggcgattactcggcagttcaagatgatggtatatgactacgcggtctcctctgcggacgagccaccgtatccgagcggacgcgtctcacccaggtgcccgtttcaatcgctacagttgccgattcggaaagttattcttgagacaggggggcggcacagcctacaccgattagacaccgacaaaaaatatgtctagacgcatctattagtggttaatagattaggcagt

SEQ ID NO: 123437 - DNA, 310 bp, Arabidopsis thaliana columbia
  unsure (1)..(310): unsure at all n locations
tnnnnnnnnnnnnnnnnnnnnnnnnnnnnnnnnnnnnnnnnnnnnnnnnnnnnnnnnnnnnnnnnnnnnnnnnnnnnnnnnnnnnnnnnnccttnnttttttnttcttttttttcttttttttnccccccaaacatgaattattccataagtaaaaaaaggtggcgtcaaaacgatataaaatttggtttagggcacatgcctccctaagtcttgggggaaaaaaatttcatcaacttctcaatttattgcggcccttaaaacccgatttaaaatccaaaaaagggaggaaagaagcattgctttaggcc

SEQ ID NO: 123438 - DNA, 470 bp, Arabidopsis thaliana columbia
aaaaaaaaaaacaagcctatttgtgaaaacccccccccttagagggagaaagaagggagataagagaggaaaaaagaaggtttcgaggggggggggggggacggcattgaagaggtcacagtaaatgaaggggaccgagaccgatggcccaatgacgccacagccaagcacaagggccgtccacacaaggtggcttgcgatcgatcctgcgttcgacgccagccagagcagcacaagatagcgtttttacacccagcggggggaccacgcgcccagcgaggaacacacacacgataacaccaaacagcgaagacaaattcaatggttacccactcaatatcatatgttcctctatactacatgcgcgcgcacacctccttattgacgacatattcagtgaccaccaccccgccaacaacatgaagtcgagtaagcgcggatcacatacccaatatgcttgatggggtacg

SEQ ID NO: 123439 - DNA, 549 bp, Arabidopsis thaliana columbia
  unsure (1)..(549): unsure at all n locations
ggggtgnggggggggaccgccccacgacgggggagatatggtgtactttccgggggccgggggccgtaaccaactcccccccccctcccgccccctcgtcaccccccgagacggcgtggcgcggcgcacgggggtgcctaggcgtgggagcgcccaccccccccggagagtgcgaacgcaggacagcttttttcgccggtggggggggacgccaccgcccccctcgccaaaaaaaccccccccccgcccccccgcctcaccgcacgccaggacaacgccccccccaccgcgccccgccccggcgcccgcgccggccgggggggcgggagcgacgctggggcgggaagcaacaaaagagagagaccggactggggcgcctgactagcccattgagggtggtgagcgcgacgccgcgcggcgcccgctggcgcccgctgctcgacgccccacccctccccccgtggaggcgttgcaagccacagcctcccgcccgcccgcacgccgccccggcgccgcccccgccggcgcggccccccccccctccggccc

SEQ ID NO: 123440 - DNA, 562 bp, Arabidopsis thaliana columbia
cccggggggttgggggggggggaccggagacaggagaagatagaagtcagacacaccttttaacgagggggggggaccgcttctcttatatacacaacccacaagaacagcagataaaaactcacgaactccattatatgttactgccgaacttgtaaaattttcctagcgtcttacccatcagacgtatgtggtttcataactggctacggcgaaaagaaacttttttatccggggggggaggggaagacacaggctatatcgactgaccttaaaaattatcaccctagacggtgataaaatagaagagtggcagcaagtaggcgtcattcaggaagcgagataagagcaccgaacgtgagcgagggaattacttcgtcgtagaatggcgattgttaatatgtattaaataaacaaacgaaaagaaagaaagaagaagaatgaaagagatacgataattgcgatagacgacagccaaggtcaacaaagtagaataacaaaatctaagcacagacatacatatgaggatgttatatgtaatattcatatactgttctctgat

SEQ ID NO: 123441 - DNA, 441 bp, Arabidopsis thaliana columbia
agccccgaggggggtggtgaggggacttttttaggggggaggggccgcaaaagtttaatcaatatgatctatagtaacacagttgaagatcgcgaggaatttaaagaggagagctgtagtacacaggttagagcataggtttaaatacatattgcgagtgtagggacgatgacacttttttaaaaacggggggagacaaaatacgaaaagcaaagcacaaagtatgtaacccaaaaagtgaagggtcatgtttgttgcggtcgcgaggggcgcgagtaaaagatgatgcacgtaacgagacacaccgctgaataaccagtaatcggatagtagggaatgaggcaggggagcgggtatgactgggaggaggtcgtcacgcgctgctaggccgtggatcggtcgcactaaaacaatcacactcagataaaaactaaatcaaaa

SEQ ID NO: 123442 - DNA, 547 bp, Arabidopsis thaliana columbia
  unsure (1)..(547): unsure at all n locations
ggggggggggacccacagggagatgtgangttttgttgggcttttcgttgaggggggagggcggggtaaaaacaatcttcctcgtcccttaggaaggaattgtatagatgtgcgtcgatgtttgttttcaccttttctaagatgtccgaacgcctcctgacaaatattaaacctacagattaagtaacacgcaatcagccaccctctcttctaaagggatgttgggcacacgcccccacataccgctcgcccaaaaccagcccccccacttacgaaatgaagcggaacgcgtcttgagaagaaatgctgtatgcctaaacataaaaataaaattcgaattgctacaaaagtcgaagatgtgggtgccatataataccccacaatatatctgaccagctcgatatatccctatatctatgttcccaccccccacagcactttcgctctacttgattgccctcatcccacaccccgcctacaattattatttattctcctcacctgaccacaccggtgagagacgatgctccatcctgaatcccttcgt

SEQ ID NO: 123443 - DNA, 464 bp, Arabidopsis thaliana columbia
ccccgggttggggggggaaccggcgcagttgggattgctagccaattttaaccagggggggggctattaactcacatcctgccgcatcgttacgggcgcagacatttgaagagatagagacaggaataagtgaatttcgcagacggaaatgtatgacaaatgccagctacatacaataaccaaaagggttttttttctgtgggggggggcccagtcacgtatagaaagcgataaaaacgcctatacatatactaaaaggaagccaaaaaatttgtaagtttcggtggtaaacaagaaactttatacttcccttatgtaaattaatcaatatacgacaggggaataaattctaccataaataacaagactcaagacgacccaccaccatagctatcccacaatatccataatcacgcttcctccgcaacgatagcaacccctacacccgcattccagcctatatg

SEQ ID NO: 123444 - DNA, 609 bp, Arabidopsis thaliana columbia
  unsure (1)..(609): unsure at all n locations
acccccgggttgngagggggggaaccgagcctgaagaggtgtgtgtagtagctatttttgcttccaggggtggcgtacctaaccattgcgtatttacatcaactctcaaaaaaatattgtgatcacacacgttaaatcataagaatactacaacccgcgcaaccacgcacgcccgcccggcaaacgccacccgaacagacaaaccttttttctatcttgggggggggaacgacaacagacacaatttcccctctacacacctctcggattatcctcacctccgcgcacactccccaccccacatcgcccctccaaaatatcctcatacagtaacacgccacccaaatgtgtgttgctttattttcctacaaaattagtcggaagaacaccaggggcacttttagaatagatcctcctcagtataaacacatgtatgttcagctaccatcttcgctcagcctttaatcatttattcccattattccattatccatcacacacacattagacttcaccaacactctcgcccactctctgaacgtccatataaaccggtcggcaccaatctgcactaatcgaccttgacactcatcaaaacttgatgcttac

SEQ ID NO: 123445 - DNA, 535 bp, Arabidopsis thaliana columbia
cgcccgccctttttttttttttttatttttgaacgcaattaaaaatatatttaagacctcattacttatccccaatttttaataaccttgtatcattgacttgaaataacaatggctttttagtacatttttatcaaatggggaggggtttcttactaagaggggtgggagaaaaaaaaaccccttcctctccggtgtgcacgggctctcgaaaatgaagtgcaatattggaaatcaggcggcgcaaagaatattagaccgcagctaatggagacgggcaattgtacgagaacagcgcagagagaacaaagaacccagaacgtgcacatgaccacccccccacgcactgacgcaaggcgacctacaaggctacggtagcagctccagtctactaaggctcgattcacatgtcgagtagagctacctaaaagtacccctcacaaggcctggttattagcattgctctcaatcgtaagacaccacatatgatagcagaaagagcataagatagaaaacagcgaaacagaaaaaaaaa

SEQ ID NO: 123446 - DNA, 198 bp, Arabidopsis thaliana columbia
ggggggaaccaggggggcggggtagggtgagcttgtgatccttctttaacggaggggggcgagggggttctttatattatataaaaacatcacagtccgcctgctataaaaacacgattgaaccaacgttagtagctacgcgacagcctagcaacaatactcttctgctgctatgtgaaataatacatacgctcccta

SEQ ID NO: 123447 - DNA, 492 bp, Arabidopsis thaliana columbia
cgactaattgaggcgacactatagattagcttgacgtcgcatgcacgcgtacgtaagcttggatcctctagagcggccgcgctttgttttttttttttcaaaaaacattaattcccatatataaaacacattcaccacttaaacatacaacaacatgaacaaaattattcgtatagggaataatcaagtttctaagacattatataaagactatatatatatatatatatggagggattaaccagttacatatcattcacgcaggggccaatggtccaacattgttggccacaggtgtctccatagctttcatggcttcaaaccttggttccttggcctgaaacttgacagcagaatagagtttcatgtaatcttcaaacacaaatctcggataggtctctttcttctccttctgtggttcttttccaatcaggtccggcgccggaaaaaaacaaagtcgctctccggattatagaatgatgcgatcgacat

SEQ ID NO: 123448 - DNA, 485 bp, Arabidopsis thaliana columbia
  unsure (1)..(485): unsure at all n locations
nnnnnnnnnnnnnnnnnnnnnnnnnnnnnnnnnnnnnnnnnnnnnnnnnnnnnnnnnnnnnnnnnnnnnnnnnggccaggcgtccggaagactctcccggaaagatagagaagttgtcggaggagctactggatctgctgtgcgagaatctcgggttagagaagggttatttaaaaaaggtgttttacgggtcgaaaagaccgacttttggaaccaaagtcaggggggatccacctttgtcctaatcccggacctaatcaagggtgctccgagcccacaccgacgccggggggatcatccttctcttccaagacgacaaagtcaggggacttcaactttttaagacggggatggggtcaatgttccctccggtagcattcaatcgtcgtgtatctgggcgatcaacttgaggggatacccatggggaatgcaagagtgtggaacatagagggcttcttcaacagaccggaaaaggaaaatggcgt

SEQ ID NO: 123449 - DNA, 535 bp, Arabidopsis thaliana columbia
  unsure (1)..(535): unsure at all n locations
tttagcgaccttagaagagcttgacgtcgcatgcacgcgtacgtaagcttggatcctctagagcgggcgggcctgggtggnnatttaattttttttttttttttttttttttgcggaaattcaaccctttagcattacacgaatgatcatgggagggttacattggctttctaattgggttctcttctcaaaccgaaaacctatcttgacctgaagtgcgggggacaaaaccaaaaaggaaaggggaaggctttggggcttggtgcactttatttcaagatatgaaacaatggtgggaatagccttgtttccaaatcaagtttcaaacaaaaccccctaaaaaagaatgggcccatcttaaatctcttaaaagaatgacttgggcggataaacaacaggttgaagggggattccaaactccttttaaaataagggggctggtcccctggctccaaataattaataccaagggactttcctttggctccaaaaatctttccccatccaaaagggaacgctgttaatgctaactcta

SEQ ID NO: 123450 - DNA, 488 bp, Arabidopsis thaliana columbia
tctctcatccccacattataccctacgagaagaggaaattttaatctctaatatatcgttcttaattatgtcacgcccgcatcccccgcctctcttcgtatttctggtatttaaatcatatagataacgcaatattaataacctcgtgggcgcatcatctcatataaaaaatatttataattcatcgttatactaatcatgatatctactttctcccttcatagcatccaattataacctctccccggctccactataatctcctatttatcccctactcccccctccctcgagtacttcattttacaatataacacaccatctaccctacaccaacatatctccctaccactccctctcacctaaggggggggggaatatactctccctctcaccatccaccacatcctctcaaacacacacattttactcacatatataactagtcttacatattacacaacccacaccccattatctaactcctc

SEQ ID NO: 123451 - DNA, 659 bp, Arabidopsis thaliana columbia
  unsure (1)..(659): unsure at all n locations
ccatcacgcccccccgcccccacccccacactataaatcattctctctccgcgaccactctctaattgtcccccgcncccaccaccccccactctctccccccctccatcctctctcctatttcccccgcgcgggttttaattntctaaaatacaatcccccccctccccaccccttcattcctctctccatccccccacctctctcatccacccattccttccttccctccctccatctctccctccttctccccttccctccccccttactcccttcttcctcccctcaccccaccnctccccccactctttctcccgtggtttttttctcccccttcctgctcccccccccaaaaaaaaaaaacctctcaactccttcctcctccctccctctcttttctcacctctctctcctcctttttccacccattcttctctcccttcctctcccctctctttccctctctctcctccctttcctcatccgctttccaccctctctctcttctctctcttttctcctctccctaccttctctctccctccttcttctctcccatcctcccttttctcaacacctcctccctaccacatctcttcaacctcaccttaccttctactcccatctccttcatctactctccataactctcttca

SEQ ID NO: 123452 - DNA, 542 bp, Arabidopsis thaliana columbia
tctatttcctttcccccttctttttcccccctctatatattatttttttttttatattaccgccaattcgcactctcgggtacttttctcaggcttccttttccactcggggttaacgcccccaaaaaacaccttttctcctcccccctcatcccccctaccttcctcttttctatgcgtgcacgccttctctctttctttaatacctcctctccctgcccttcttgtcaccccactttttctttcttcgcccccctgtcctctccttcctcgtgtgggtgtggctattcttcctcccccggccttctcaaaaaaacaaaattcctttccttcttctttattcctttctttccctctctctccccttccttccgcttctctctctctcctcttctttatttctattctcgtttactctttgcttattccttcctcaccctttctccttctgtgggcgtccttcctctccttttccttcacactcctcctttgtcttctcctttccacttctccactttttatctcccccctctcgctccacc

SEQ ID NO: 123453 - DNA, 476 bp, Arabidopsis thaliana columbia
gtggggatcggatcaggggaatgaagggagaggggtttggtggggatgtattagtagaggatttgtggagttgaacgccgccccaagaatatatgaggtagtgagtgggtggtgtgttgcaagtggggtgtgtttctgtgagacatacgaagggtgggtagtgttgtatgatgtagggagtatcttagaaatacgaatacgatgagttggttgtgatgttgtggatggagtgaattgtgtgcttacattaccaagtacggatatgattgaaacgtgtgttacggtggagcacggattgtataaatgttatagaatgaggggggttatgatgaatgtatgaggcgatcgcacgagcctacaaaaacacatcgattaaaattaggatgatttgtaatgggtgggtaagagtgaatcgcgggaagagctataggtcacgttaaaagacgaggcggaggaataataaatataatttaact

SEQ ID NO: 123454 - DNA, 144 bp, Arabidopsis thaliana columbia
  unsure (1)..(144): unsure at all n locations
gtgggggcgcggcccaccccgcacacagtatttctacatacccntatactccgtcgggcggggtgtcacctctcgcccacctattcacctgtagccgctcgcgtccttcctcgcaccgcgcgtcgcagccgattacatcggtca

SEQ ID NO: 123455 - DNA, 721 bp, Arabidopsis thaliana columbia
ctctctccttcttaactcatccccctcgtctgcttcccgtgctctgttgttttttccttcttgttcccgtttcgtttacctcctctcttcctctgccctttccttcccctccttcggctctttttcttcctttttcgcctttttctccctggggggtagtcctttcccaaaaatccttttctcccttttccgtcctctttctcccttccttcctcccgccctcccccttctcgccgttcttttctgttctcctccttcttcttttcttccttctcgttcctctcttccctctctttcctctcttctcgcccccctctttcgccgtctgtcccaccccctttctttcttgggtgggggctccttcctactcccactcgggtgttgtccctcctatataataatttcctctcgtctccccttcgcctctctccctgttctctttctttcgcttctctcgctctccttcttcctctctcttgtctttcttttttcctcctccctcctcttctccgttccctcttcttcccttcttcactcttgtccttctctctctcctttccctttctgctgtgctatctcctccccccccgcttctctcctcccttccatctctcttcctctctttcttcttgtcctctctcctctccttcccccctctctcgtttccaccttcttgcccctgtcttccttctcctgctttctttttcttttcccttctctt

SEQ ID NO: 123456 - DNA, 140 bp, Arabidopsis thaliana columbia
tcattgttgaggatatatatgcacgattacccatattgtctcaagagtgcacgtgttaattgtgtccagttcccgcttcacattaaccgtcatggttggagttctcatacatcataatcgtcacgccacattgacatgct

SEQ ID NO: 123457 - DNA, 158 bp, Arabidopsis thaliana columbia
ccggatgttccccatcatctatttacttccagggcggcgtgtttatgtgctccgatccaccgcccatcgggcgcgtcgtcgcacgcctcccgcgtgctccttgtattagttatgcttactattggggtcgtcgtcgcccgtcaaatgccgtcgtcgct

SEQ ID NO: 123458 - DNA, 591 bp, Arabidopsis thaliana columbia
  unsure (1)..(591): unsure at all n locations
ggtgttcttccttctgcttgtcggggccgggcgtgggtttttttttttttctgtttctcccttctccttttccgggggcttcttgggggtgtgctctttctatcggggggtgggcgcccaaaccttctttctttncgttgggtctctctgtctctcgtcctgcttttcccccttcgcgggggcgcgccctcctcctttttccctgtctccccgtcgggtcgttctttttttcttttttccttctcttcctctcctgggccctcttttcgggggcgtgtgggttccttctccgggggcggttttccaaaatactcctctctctctcgttttctcccttcttctctcccctccctcccttttctccctttctcctccctcttctcttttttgcccccctcctctttcctccctgtttgtttcttctctttcttccccttttgcgggggggtcgctctctcttgccccttttcggtttccctctgactcctccctcttcctttttcgtcttcttctctctgcttgtggcgctctcttgtttttctcgttttttctgtctctccgtttcctttcttcgtccgtctccttcctccc

SEQ ID NO: 123459 - DNA, 354 bp, Arabidopsis thaliana columbia
cgctttcccgttctcgggcgctcaacttcccttcttttctcccagggggtgctctctctaaaaatttcgctatctccccttagcccgcttcttcgccctccttcttccctcgccgccgtcgtctctccctcttccttacgtccgtcttatttgctcatctatttcttctcctctgctccttccctttttctgttctgtcgtcgcgtgttgcgttctctttcgggggggggtctttcctcccttctggtctccttcgtctgaaaaacaagcgttacctggctccctgctgactgtgtggctgttctcttcctctctccttgtctctttctatattctcgcactcctgtgctatct

SEQ ID NO: 123460 - DNA, 739 bp, Arabidopsis thaliana columbia
  unsure (1)..(739): unsure at all n locations
tcttttccttcccccccccctctttccgcgcagttttgttttttttcttttttttcttcttttttcctcccctcccaccccccctcgctctattctgttgggggcccttcccctttctcggggtcccggccnttcaaactttctttctcttttctctcactccttttcctcctttccctctcccctttccttcccccttcctctcggcctctctcctccccccttttccttattcctgtctccccgccccctccctcctctctcttgtcccctcactttccctcttttctcccttctcgtgctttttcccctctctgcgtgggggttgtagcatcttctcttctcgggcgttctcttttataacaaaaacaactcccgctttcctctcttcttcttctttccctctctctgttgcctccccctctttcctcctctcttcttcctcttatctctccctccctcctcttctcttccttctcctctcccccaccttcctcactcccttctttcccttctttctctctcctctccccctccgcgcgggggccccccttcttctcctcttctcccttctcctttttttctttcctcactctttctccctcccttttttcctcttcgctcccttccttcttctcttcctctccttcctgtgtttctccttcctcccctcctcttctcctcctcccctcccctcctctccccctcgctctcctctccccctctttctcccccctct

SEQ ID NO: 123461 - DNA, 348 bp, Arabidopsis thaliana columbia
tatcttcgcgatcccgcttttctgattacggacccggggccgacgagcgcacgggcactggcccgaagagactctgcattttttttacagggggggataggtgatcagaaaaaaatcagcccgtattcccccacaacagaactaccggccctacctcacagcgctccgccgctgtgaacgcgcgcgtgctctaagcagtaccgcaaacgtaataagcgcggaacgtccttcgtcacgcgccctctctacagaatctccctattccctcctcggaatgatcggtcctgtaccgtactctcgggtggggtgggtgcacattcaccacctaaccgggcgcggctaacgaca

SEQ ID NO: 123462 - DNA, 541 bp, Arabidopsis thaliana columbia
tcccccgccgcgcgcgcagacggcgagagtatacgtctgggtcttgtttcgtgtctttcgtgtgcgacccccgaccgcctcggtctttcccttttctcctttcccatttcccccgcggggttggtgcccccgtaaaatctcctctcgttccctcccgcctcccattgtctcgtcttccctgcccttcccctgtgtttgccccgcccttggctcttctttctccccccgccccgcccctcttgtccctcttcttcgttcggccctcccgtcccgcctcttccgatcggtgttggggggggctctccccctcctctcgcccctttcgcgctaaaactctctcttttcctcttctttttctttcctgcttcctgtggttcgctctgtcgtgccctcattatatcgttgttcgccctctgctctccttgcttgtatcttccgttatgctcctccttttctctggtccgtctgtctttcgtgtgcttcggttttcgcgtctcccctggcacggcattgcttttcggagtctctagatgctactctc

SEQ ID NO: 123463 - DNA, 411 bp, Arabidopsis thaliana columbia
acccctctctcccgcgttatccttcctcttttgttgtgtccttttctctcctgcgtcctccctgtcctccccggcttcgtgtgctggtctgtttgcccccggggtccgttcccaaatccggttctcgccgggtctttggtgccctggctttctccgttcttctgcttcttttttcgcggggtgctctctctgccggtttctctgtctcctcgcgcctcgcgtgctcgtgtccgtcttctctcccttcttccctctttcactctcctgggggggggtgcccaccccctacctacgctcgtccgtccttaaaaaagtggtgtgcctcccccctcctccacatctcctggtcgccgcgtgtggttgacgtgtcgttccgtcgctttctgttgtccctgctccgtgctcgtcgct

SEQ ID NO: 123464 - DNA, 685 bp, Arabidopsis thaliana columbia
ggagggggtgacgactggtatatgattgattagagagggacgcgggcgcgacgcacgtgaccagggtaggcgagagtggaatgttaaatgggtagcacgctaatcctcagaccaataatgtcacgaaccgcagcactgaatcacacaacgtagtatacgggtcacgagcggcgactactagtcatggccatgcgacgagtgtatagtaataactcgcgtcacttacgaaatttacaagttagtgtcgattagccgcgcgtgatcgcgggtgtgcgttcaaggcggtttttgagttgtgttgcgtacggtcgagtatgtcgcgcgtattcgatcgaggttctcgacgctgctggaggttgcgcgtgagccgcgcacatgtgtctgagatgtacgagagatagaaggcggcggcaaatagaaacaaggacgggactaacatcaataatggcaggcgcacgtttcatccgtgtaggcgatgagggctcggcgctagtatgagtaggattcgtcgtcgctactgcggtcggggggcgcctgtccgcgtacactttcccgcgatacgattcaacgaataactaggtgttgcatgagatatagcgagtaaattatattgcgtgtaccgtgttcgagcgaattgaatgatccttatcgttacacttccaatagatcgtgatttgaacgcagt

SEQ ID NO: 123465 - DNA, 753 bp, Arabidopsis thaliana columbia
  unsure (1)..(753): unsure at all n locations
tccctccccccccctcctttcccgcggggtttgtgtgattctcatctcttttttttttcttttttcttctcccagacccctctcctcctttcgctctctctctccgcttggtccccctctttcctctacttgggggttttcctcctcttctaaatccccccttctctctttctcctcctcctccctcttctcccttcctctccctctttccctcccgtcccttcctcctctcttcttttcttctcctcctcccccccctcctcccttttctccttttctcccttttttctcttcttcctccccntcccgcggcctctcctcttttctccggcgcttgtattgggggcncncntcttccatctntggtcgcctcctcttaacaacaaaatatatatctccctctctctcctcctctttttcttttctctctctcgttttctccttcctccctttccctcttctttcctcttctctccccccctctctccctctttcttctctcccccccccccttttctctcccttctctttttcctttcttcttcccttcccctctcccacttctctcggtgccggtccctcccttcctccctccccccttctctctgttcttcttttctctcttcccccctcctttcttcttcccttttcttttctctcttcctctctctccttatctttcctcttctttttctttccttcttttatccccctctccctctccccttcctccctcctctccttccttcttct

SEQ ID NO: 123466 - DNA, 124 bp, Arabidopsis thaliana columbia
gtgtatgtgaatctttcgatccgaccccgactccatcttcacatcatgtacattgtcgatatactctcatgtccttattacgcatcatggtgggctacgtatcacacataaacacatattcacg

SEQ ID NO: 123467 - DNA, 380 bp, Arabidopsis thaliana columbia
gtcccgtttttctccccgcgtacttatcctctcctgtctccttttcctcgctctgcccctttgctactgttgcctttccgtttccgtcgtctccgcctcactcctttcctctcccttccccgcctctacttctaattttcccctgccgtgggggttgacgtactctctcaaaatactctcctctccctctgttctgtgctgttcttcttctcccttacgccctcgtctccgctttctctcttttccctctcctggttcgtctctgccccccttttctctccccgtctctctttgtgtgctacgctcgctttcttgactgttctctcgcttcatgtccttctctcttcctgccctccgctctcctctgttttctccggcgg

SEQ ID NO: 123468 - DNA, 488 bp, Arabidopsis thaliana columbia
ttcatttgcttctacggggtggttgcggggcctcgcgccaaatcactgcgtcgcgctctcgccgctggtgctctcttgtgtgtttccgcgtatcctgtcctactctctcgacgctcctcggcggggcccttccgtctcgctgttcgtgtccttgtttccgcccgggccccttgtctttatgtcgcgtgtttgtgcttcgaggatgccgcgtcccgcgctcctcgctccttccggcggggggggggcttctctttctctcacgcggcctgtggtctgtctacacaaagaatattctccctcactgttccttcggttcatttggcgcctcagtgtttgatgcggccccgcctctgctctctcttatctcgtccgttctgcgctcgccgcttccgtcgcctctgtcgtcgcccgcgcggggcatgggtcctctcgcgctgtagtattcttgtcgcgcgttctgcgtttctcgcgctatgttgggggggggg

SEQ ID NO: 123469 - DNA, 360 bp, Arabidopsis thaliana columbia
tggacgtgcgtctgctggtgggtcgggcgggtggatgagattaattttttagtttgttctcgccgttcgcagctgccccagcccacagtttatttgtgagtgtgataatactctcgggtgtgtggcggagttgcttctgtctcgatcgcgtatgtgctcggctggctggtgtcgcgtttgtggtcgtgtctggcgaagtgcgtgcggcagctacttgctgtcggtcagcgcggcgatatggataagactagtttcctcactcgccctcctcgagcactacatatgtcagtttaattcaacttcctccagtctataacatagacacgctcctcctggggtagtgtacgataagcgagtcga

SEQ ID NO: 123470 - DNA, 707 bp, Arabidopsis thaliana columbia
cctccccttctaccccaccccttcaccccattccactcaaataccacactacccaatatcacctttgcgtacccacacctccctacgcctcctactattttctcacccagcaatactttttaactccggggttaccctttttcaaaataactcctcacctcctcccttcttcttcacctcattcttctctaatactccccacaccttacccaccctcccatgtcttccacccctttctcccccctcttaaatacgtcttccgcgtctcagcttaattctacccccgcacctgccttcttcccattccttgggggggtgtcctattctctacctctatcgactttttttttaaaaaaaagaagcgcaatcttcatatcacatcgatccaatgaacctccttcgcttcctcgcttgtctcactttacttcactttattatcacgctctactatcacctctcccaccgaatattccattatttatatccatcttccgcttacttattcgacttctccccttcgacctacaccaccgtacttcgcctcctccttcttctcatccgctattcttctttattttccactgtcatctatctgcattatcctttatgttctcaaccctctagatatttatcactcttacctgacccattgtttaacctaattgtctgatgcaccacgtcatcatcgcctgctcgccctttactct

SEQ ID NO: 123471 - DNA, 158 bp, Arabidopsis thaliana columbia
ccaggttgacgtgtgggcgtggcgttttttccttcgttcgcgctagcgggcgcaggtatacgcctttcatatggcggtgattcggtcgttcgttagccttcctcgcgtgcgcgcgtctcaagaatcaacatcaccagggcggggggggcaccccccca

SEQ ID NO: 123472 - DNA, 526 bp, Arabidopsis thaliana columbia
catcccaaccaacccccccactcccctccccctcctccaatcatctccctaccccaaatcttcttctttttcccactcattcactcctctctcctctcccacatcttatccatccttttccttcacggggtagagcgtctctaaaacccaccttttctcattttattattattatatccgccttcttccatctttcataccactcacattcccacccctccccaacttcctgacacctatcattatatcacaacttccccctttctcctacttcttcattccccccaaccctctcctccctcctaccgggggggtgggctcacctctatcctatcccttctcttccaaaaaaaaactcctcccctctccctactatattctttctactccctcatctcttatccactctcacatccactctcttcctacctctcctcttctccctctactcttacatctcttttacttactccctattttatccccacactcatctcacttctctactctgtcaacatctacccct

SEQ ID NO: 123473 - DNA, 412 bp, Arabidopsis thaliana columbia
ttcatctacacctcttcacctacacattatctattcttactcacttcttactcttcttcatatctttctcctcattgggactttacatattccggggggtgtggccaacttaccaaggccgttcttaaaaaaaaaaaattctgcctacttgttcaatctagacacaacctgtctaaaagacactattatacaaacttgtccctgccacctttccctaaccccacttatccatctatacaaaccctcagctaccgtccatcctaacacatctattgcggggggcacttacatcccctcaccgtctatttttttaattaatcttctacaatgattacattaacagactaatcttcctcacctacttcccccttcattctctacctcctacctctacaataacactaattctcgc

SEQ ID NO: 123474 - DNA, 567 bp, Arabidopsis thaliana columbia
ggtgttgtgcacggtggtgcggttgggagcgcgttcgcgcgccgccgcgcggtcgccgtgttgtgttggctagggcgtgtcttcttgttatacctggggggggttcgctgcggccaaaaaaaggtcgtcctgccccgagtgtccggtgccgccccctgctcctccgcgccccctccggcgcgcggcgggccttccgtccgttctggtctctccctgcgtcccccgcgcgcgcctgtctctccgtgctcggtttgtggtgccgcgcccgccgctcctcggcccccctcgtggcggggggggggggaccctcccccgtggggcgcgcgtgcaaacaaaaaagcgcgtcgtcgccgttttagtcgggggtggggcccctcccgtgcgctggggtgttccgctttctcagcgcctggttgttctcctcgcccccgcggtgttcctggcccgcggagcgacctcttgtgcgcgaattgtctctcggggggcgggggggctggcgccctccccgcctcgcgggtacgcgctctctccttccccctccagccctcggggggtgtggccgcgcgg

SEQ ID NO: 123475 - DNA, 659 bp, Arabidopsis thaliana columbia
tgcgcatggagagtcggtttgtgggactagaggagaggagtgcctatttggttgtgttattggtgggaccgagcccggtgctgaattatgtcctttctgttttgttattagtgtgttgattagtactgcgccgtgttggctgttatgggacgtaattgttagtccgtgatggtgcggcaggcccttttgtacctcctgtcgtgcgcgttgatgcagttgtggtcgtggatttatcatgtgtctcccgcctccccgcttgccgtttacccgcgttattcgttgcgttccggcgtccatccttccccgttcgcggtgcgtttgtgtttatcctgcgccccccgcctcccgacctcttctctttttattgtatcgtttaagctgtcccgactgggggcctggcgcgagttaggccgcgttttgcgcgccgttgtcacttgtgtcgcgtacagaccgttatgtagcagcctgtgttcggccgatattagtctatgtcccgcatgtcctcagtcacgctcgcagcgagtttgcgcgtaatcgcgttatcgcttgtttttagtctcgtgttctctgttgcgcgttttcattaatgtagacttacctctttccaatcgtgtccttgatccgtccgtcgcggtgcctcctggcgccgtatgtgttga

SEQ ID NO: 123476 - DNA, 309 bp, Arabidopsis thaliana columbia
  unsure (1)..(309): unsure at all n locations
cccatcactctcctcccagaatttatctttaatccaattttccgttcgcctctttactattcctcttttcatcttaatctattttccctcattctctctattccaatctccgggggtgggccccccccccgcggcgccgtcaaaaaataatacccctgtacatntctctccatcaactcattctcccaacctatttacctatcattattttgctctcaccctacacccattctattttctatctccctcatcaccatccttctcctccccaccctctactttaacatgtcattctctccattacacacc

SEQ ID NO: 123477 - DNA, 126 bp, Arabidopsis thaliana columbia
taaagggggtgaggcgctagaaaactatcccatctcgtccttcacggtacatactccacagcgtagtactcatataccgttcggccatcacatacaaattactcctaacccctctcacatcggagc

SEQ ID NO: 123478 - DNA, 330 bp, Arabidopsis thaliana columbia
  unsure (1)..(330): unsure at all n locations
ttccccccctcgcggnngccgccccccgttgtggaagtgggccggggagtggggggctggcgggagtggactatacatgtgtgggggggcaggtcgagaaattgtcgtttgggggcacggtagggcgtgcgcaggtggtgcggggtattgtgggtggacggggcgttgtcggggccgtctcatgtatgatacttataagttgtccgcgatacgactagcgtggccgcggagcgttgccggaaccataatgggggggggggggccacaggccnctgtcggcgggggggcgacacaaaaaagcgcgtggcgtctgtcgttgcggctgggccc

SEQ ID NO: 123479 - DNA, 616 bp, Arabidopsis thaliana columbia
  unsure (1)..(616): unsure at all n locations
tttttctctgttggggggttggttctttctcatataatcctcctcctctcctccggtcgcctctgcttcgtgctcagtccttcgctgtgcggtgttcctgcttcgtggttctttcgttctcgtgtccctctcttcctcttctcgcggctcttcctcccttctactctgctctccgcctcccttttttccgctgcgccgtgtcactttctcttctcggggggggggtgtctcccctcccctcgccgcgctgtccgcgcaaaaataaaagcagctcctttgtcctctgttctcgccgccgtccccttgtttcgctggtcttgtgcttgtgtgtttgggttggttcgcncttcttgtctggttctcgtgttttcgtctgctttcttctttctagttcttttcttcgatcttctggtttcatgtttcctcccgtctttgtgggggggtgcatttctgcctgttctcgtccatgcttatgctccttttccctgtatgtccgctgcctctgcccccgcctgtctattgctctcctcgttgctgcgcgccccgcccgcgctccctccttgttcgtttccccgtcgctcttctccttctttcatgctcccctcttccctctttc

SEQ ID NO: 123480 - DNA, 294 bp, Arabidopsis thaliana columbia
ccccacccaccttcaaggcccacgcgaacctgattgaggtttcccgccgctcggcgggcgccggcgctcacgtctcgccctcacctcccactcctccccatccgggtccccgcctccctcgcgagcgattctctcgcttctcccacaggggggcacaatgtcacctccaataaaatccaacgcgacactccctaagcctccacgccccccacgacatgaccagcgccacctcgcccactcccgctcatccctcgcgcggggtggacctcgtggcacggatccgttgtctcttct

SEQ ID NO: 123481 - DNA, 332 bp, Arabidopsis thaliana columbia
cctcccatacctccgccacatttaagttcccgccatcgctccccaaacctcccggtcgcggcgtcgttgaccacatgtttgacacgctctcaccttttataggtaaggatagatttattcggggcatccctcgcctacctcgtatatttctttggcatagatgcgccattacccccgtcccttaccctatatacctcccatccccgaagattaatttgggggggggaacgtcgtaccttcaagatcatgcacttagggaatagccgttcttcacaatatatctataataccctggcacatctgttttacattccgctctccgaccctacctg

SEQ ID NO: 123482 - DNA, 528 bp, Arabidopsis thaliana columbia
ctatcaatttattccttcgcaggacttcgctcgcaccgatcaacgaataattagattgtaattaccataaatataatcatatagagcgcgtgacccccggtacgatttcggtctatgctagagcaccgatccacccaaatacaacgtagaccatattattagcgtcctcttcttataccacgcataccatttatgcttggagcgtgactccttgagttgcagcaaggcgcgctgatcgcactcacactttctgcggcctcccgatgcgtcaaagctagtagactccatcgcttatcatatctactaaattactggtcctcacggaactcatatctactctcgttgcctccctgtattacctattctgtcgcattgctgtaattatcgtgatctatactacgaaatcactcgaccacggaggactggcggcgagtagatattgagatctgtgagattttatgtgagaagtatagtacgccgcccctatgtaatgctagtacgtttccactacgacaacgcacccccctt

SEQ ID NO: 123483 - DNA, 373 bp, Arabidopsis thaliana columbia
ttttcctcattcctttgttctcgcgtttagtgcgtccggtccgtggctcccggtctgctttattatcttgtctttgggtgttacgtgtctataaatcgttttggtcttttggtttcttcgcgattttatgtccccgcgtgcgcgttgtagtcgtgttgtttttcggtgtgtagtgtgggttgcccgccatcggcctccctctggcttgtttgtcgccttgtgtcgttatccccattctcactcggcttcttgtcgtatctccgtttggtgtttcgggggggggtgatctttttatctctgttctgcttgttctgttaaaaaaaaaaggtagtgagcgctgtgcctactttatcgctctgttgtgctcttgtct

SEQ ID NO: 123484 - DNA, 340 bp, Arabidopsis thaliana columbia
  unsure (1)..(340): unsure at all n locations
ccccgacttcgttgttgcgtgcgtctcggtgtttggtcttctctttcggccccccgctcgnccgttttttcccccctgtctttttcttgctctcgtggcgcgccttcgtctggcgagcttccctttttcttctggggggggtgtggcgtctgttaaaacctctcctccccctctctccctcttcgttttcgttctcttccttcgtctcccgtcgctcgcggggttcccctcctggcgttctcgcgattctttgctgtcggctcgcgtgcccgtttgtctctcctcgtctctatggcctgtgttcgtctgcgggctcttcttttttcgcgggggggggggg

SEQ ID NO: 123485 - DNA, 601 bp, Arabidopsis thaliana columbia
gtggggcgggtcgccgcttcgtacttcccactcccgcgttcaacgacatcagtggggtcctcctccgtcgaggtcggtcccttccccttctggggggtagcccctccccaacaacactctcccctcctctccacctctccgcgctgtctgggctgtgtctcgccgcccatctccgggggctcgttgtgtgtctgcgcgccgatcttcctccccttccgtctcccctctcctgtcgcccccctcccttttccccctccctttcaaccgtcgtttttctccgggggggtgtttcttcccgttcgccggccctcccttcttaaaaagcccccgccctccccttctccgctccgcgcctgtttgtgagcggccgacccctgtgcgctggtctgtgcgccttgcccgcctcctttctcggctttcccttgctctcgccgttgtgcctccctctcctgtccccgccccgcggggcttggccgtccgcccgccgtccctggccctctgtctgggagtgggtggcccggctcttcgcttatgacttgcctcggttcgttgttctctctccgtcgcctcctttattgtgtactcacctccctcggcccgc

SEQ ID NO: 123486 - DNA, 431 bp, Arabidopsis thaliana columbia
tctcactcccttctcctatttcttcatacctttttcttattccttctcaccactaccgccctttattcggcccccccttaaaaatcacattccctgcctccactcaaccccaactataacctcatacataggaaaaatcttccccacacaaaatatcgcgccttccttcccatcccacattatccctccctttctttcaccgggggacttcccattgcttaaaaaaaacccccattttaccctcttctctctaatactcccccacccccacattccaacaaacactcctctcatctatatttcattcctactccctcccacaatctcacggggggggaatctatttcctttcttcttcacaaaaactcacattaaataatatatattctatttctttcacctatcccctccaaaaaaatctattcctttac

SEQ ID NO: 123487 - DNA, 365 bp, Arabidopsis thaliana columbia
gtcaccgttgtttatataactatcgcgctagcacttctctatcgcacgcgtacacattatgacgtatatgtgttctttacaccgcacgtaaattatagtgtataaagggttgatagcctatacgtagcacacgctcgcgcgccattctggacgcgcggtgctacacctccctaatcatcgctctaccttaacgctcggcagtcctgaatagggaggcacgttgttaatggggtggtgtaataccgcagcatgtcttgtatataatttctcctcggtgttctgtgccgtatatacatgttcctatctgcttaaatatttcccttcattctatcacctccgtcctatgaattgttctatttcttctt

SEQ ID NO: 123488 - DNA, 664 bp, Arabidopsis thaliana columbia
  unsure (1)..(664): unsure at all n locations
ctattactccttttttggtataagttcttctccaacacctcaatatattttctccatcncatggcgggctccggcgtccgatccaccgaagtatatatttcttcaacccgagggtgttaagtggtctcaaaaaacaaaatccctctttcctcccgtatacttcaaacagacccacgatctcatattctattactctttccgtggcggtgtggtcattctcgccgtcacatataatacgtattcttttcacctaactcgaactctttctctactttgtgctgtcaacccacccccgccaccctttcttccgggtggggggactccccctcgacggttgggcatttaaaaaaaaaaatatggacctactcactttttcgcgctcttactttccctatcatttcaccactccgccaatccctactattagagtaattagtcattctacatattgttgttagtattcgactcctctgtgatcttctcttgactaccgcccctcccctttaccggctcgtctcgcgacatccattcattttttcttactatgcagcgactacgagaccgacttacgcttatctgcgtactgcaccataattgttccacaacgatttccgcctatttctattaattctatgtcactttctcatccctcatcctctcttcc

SEQ ID NO: 123489 - DNA, 179 bp, Arabidopsis thaliana columbia
cgcgcccactgtatctatccctgcatcttcccccccctccggtgcttgcgccgtctagcgcggcgaccattcatcgcactcgcgcgagcatactcccttcctaaattgctccttcccacaatcacccgaccgctacctattcacttctcaccggcatatgacagcgccttatcatctta

SEQ ID NO: 123490 - DNA, 569 bp, Arabidopsis thaliana columbia
cgctccctgggggggttgtggcctgcccctcgcccgttgtcccctgcccttcctgtctgtttgtgggtctctctcgtcgggtcctttttgttctcccgggggcgggggctctcaaatttttgccttctctctcctttctttcgtctttcgttcccgcggcctccgtggggggggctttttcgttgttcgtctggggtctggggggcccttgccggcgcatcctttcctccccgtcctctggcggcgtcttttttggggggggggggccccctcctcctccgtgggtcttcttcaaaaaaatcatcctttcctcttcttgtccgcttcttgccgcgttttctttttctctggtgctttcgtccgctctctcgggctcatgtcggtgcgttccgctgtgtgcggggtgcgcgtgcctctttctcttgtggcgggtcgtgggccctgtcggccggggggggggagtgcctgtactgctgtcggttctctttttttgtttgtccggctgcgggctgttgccgcggtgtggttgcctgtctgtgtgtgctgtgccggcggctgcgtggtgttcg

SEQ ID NO: 123491 - DNA, 504 bp, Arabidopsis thaliana columbia
cacgacaatatacacacaactccccctcgcaatattaattatctatatcatcttgggtgttcacaacccaccccacctccacccataatgacacccctgctacctcctacccctcatacactccactactcaaccatccccgtaatttcacacatccggggggggggacacctactatcttcattactccacaaacaaaactttccccctgctctcccctatccccgttttcatacaacctcaacacatcccgtctctatcctatctcacattaaaaatttattatctctctattctatgtaatcatcttcatacaatatccgcaatattaacaattaacccaatgggggggggctaatctatatctcatcccccatttctcaacttcatattacaaccctcctcgtttaatccgtataaattaatcttccgtttataatttcaccctcacccccaatcacaaaaaattctagtacagtaactactaatctaccatccccccct

SEQ ID NO: 123492 - DNA, 148 bp, Arabidopsis thaliana columbia
tctccctgggggggtggctcccctataaaaaacactgctcccgctcactctcatccgtccgtgcttctctctacctgtcgttgatcacgacaatcgccgttctcctcgctgcactagtgtccctacggctccgtaggtgttgtgatgc

SEQ ID NO: 123493 - DNA, 277 bp, Arabidopsis thaliana columbia
  unsure (1)..(277): unsure at all n locations
gcggtgcgctcgacgtccctgttctactgtgtcctgccgttcccggttcttttttcgctcccgtgcagtctccgtcctgccccctgccccgctgtcgcgcgttccttgccgtccggtttcgcgcacttcgtcggcgccgcgctttctttctctctcagcggggggttctgctcctcttggccaaaatacgcgtcgtcggggtaggcggntgtcgtgcgttcgcgtctttcgcccccctcgcgcttgtgttgtggttggcgtttgctggtgggtgtga

SEQ ID NO: 123494 - DNA, 168 bp, Arabidopsis thaliana columbia
atacgcagagagttcgagaggaggttgcgcgatgctacagatgtggcggggggcgggaccaactgtgaaacaataattacgagcgtgcctgccacagagcccatctcgcaacgacgcgagtatgcgaccgtgcggacgcgcgcatgcgctcgttcagatatataattc

SEQ ID NO: 123495 - DNA, 499 bp, Arabidopsis thaliana columbia
  unsure (1)..(499): unsure at all n locations
ttcttctatctgcctatgttggcatttcatcccacccacccccctccaccattttccaacccacccaaacccactccctcaagcggtcccataccagccaaaataatcctcttttcactacaggtgggaaaaaatccctttaaaaataaacancctctntacacatcacacaaccatttacatctctacctcactatcccaaattccctatcaggtggtcttaactctttacatacatcataactacctgtcctgctaacactatttaaatcatcccaatctcttcccacaccccacacatacttttagggggtgggaaaccccccacactgccttaaaaaaaaaaaccctattctccttttctttctctctttttaatatcactctctactctctctccatataataacaaaataaataacattcccacctttataatctatctcacaccatcctctttctacacaacacttcgggggggtaccaacctcactcatcc

SEQ ID NO: 123496 - DNA, 513 bp, Arabidopsis thaliana columbia
tcttcccattcataatatatttactcttcacgcaccctcactcacccactaccaccatttctcccacatcccttattccttctccccccgccagcacttctttaataccggatcactccccaaaacaacctcccctcccatcaccgatacctattccccctcgatatattacatttatctagtggaatattatactcatatctcccccacacaacctattaggagtttccttcgacaaccccacacaacacatccatatctaaggcccatctttcttgggggggtggaccactcacttctctcgctcccacccaaaaaaacacaactactctccactctcacctctccttacaccactcacctccttcctcacacctccacacatcccaactcacacagcccgctcattattcaattaatagttgttctttataccacaatctctatctccttccccccaatctctccatctatagggtggggtggctcttccttctatgcactacccttttc

SEQ ID NO: 123497 - DNA, 756 bp, Arabidopsis thaliana columbia
ctcccccgccccctcacctttttctcttcctcttccctctttgcctcctctcccctttctccccgcctttctctctcccccatactcctccttctctctcctccgtcctctctcccactccagctgccactctttattttaccctcctggttatgccctctcccccacaacctccattctatcacacttctcctacctacctccattcccctccccacattatccccttcccttactcattattgtggtcacattcacctcgcccctctcccctccaccttctcctctctccatccggctctcactcaccccgtccccctcccccctctccttatctgctccccccgtccgctccattctctccccgggggtggggactcttccactcttcctcctcttcccctccctctaaaaaacaaactcttccttctccctccccattcttccccctttatcttttcttctcctctcctctctcttaccctctaatcctaaccccatctccttacattccctctcccctcctcctccccccctccccccctccttccactctttcaccctttcctccttcacattggggggggggggttcactctctcatcacacctcactaccttctttcccctcctctctaccccacctctctccctccccacctcccctcctcactctctttcttccttttctcctacattgtttactatccctctccccaaacaatcacaaccaccgcccctcctcctttttccatct

SEQ ID NO: 123498 - DNA, 598 bp, Arabidopsis thaliana columbia
cttgctcccccccgctagtcggccctctcgacccagccaggcctctccgtttgccctatatctccaccccccacacttctttattgcgacgtgcggcccctatgtgtcgtcccttgtttatcgcggggtctggctcggaactgcccagtctcgctagcgcctctcaagctccggtggatttttatatgttaatgtgttagcggccggccgcgccgctgtttagtttgggggtgcgcgtggtaggccggcttccctgttggccgtcccggactgtttcaccgcgggggggcatactaaccccgtcgtgcgccgcaaaaaaagattcttctgttcttgtgtgcgactcttgttccttagtctgtctccctgcactctccgttgctgtcggacctcaggtatgggctggtactggtgctctatgccccgctacgcacgggtgatgtttgcttggcgggtctcgcgcgggaggaaggcgcgcgagcagtcgttttcctcctacgctcgcgcagggtgggtgggtgttagtggtgtataaggccagtggcgccgggccccctccgcccagcggactcccccgtctccgcgtgctcgttcctcc

SEQ ID NO: 123499 - DNA, 441 bp, Arabidopsis thaliana columbia
  unsure (1)..(441): unsure at all n locations
ccgcttccccctttcctctctccacttcccccctgctccatgcgttctcctcccggcccgtgccgttctttgtcgttcgggggggccagcccctcttcaataagagngctgcgccatttatgttcctcttccgtcctcattgtgtgtcgctccancgttttaattctcctctcttcttttctgggggttgtggtccctccgcccgcccgccccatctccccgtgtttttttggggtatgtcccctctgtccccccgcctctgccccgcgcctatgccggcgttgcgcgctactcttttcctcccgggggggggctgtcctccctcgtcctctgcgctccctccacgaaaaaaaaattgcgctgccggcctctcccctctcttctccttctctattgtcgctgtagcgcgtggcccgcctagtcttctaggtctctcgttcc

SEQ ID NO: 123500 - DNA, 264 bp, Arabidopsis thaliana columbia
  unsure (1)..(264): unsure at all n locations
aggggggggtgacntctctcaacatcggctcttcttcaataaaagaaagaactcttatattacatctacttcttagctgaccagaacatactcggcccttcacggttacctgttaactgaggagggcgccctcgacctagattcattgtgaagacttactattcgatacaactttaccctgacatacacaaatagagatgatgagtagccgcggacgtagacctgtatctcgacttgacacgtaacggtgcccgcgcaaaacaa

SEQ ID NO: 123501 - DNA, 672 bp, Arabidopsis thaliana columbia
aacttcactgctcatatcctctttcgcttctcgcatttcatcttcttctctttctcccttctcttcatccctcttatctcctttccttttattcgttcctgccctctgttcgtttctttttaattcttccctgattacactcaccccaaaacgcccttctattatttcttttttctcctcctatttttcttctatttttattttgtgcccttcatccagcccccccttccttaataaatcctccttcccggtcctatccccgctcaataattccattccaacatcacttcacccattattcttatctctcttattctggggtggggggctccccctctctcccctcacctctcggtcttcacaataaaaacttcctccatacctctcatcctccaccgctcgtctttcctctcccactctcttcctacccctctgtttcttctcttttctttttattttctattcatttatctcctactacaccataactatgaccctccctctttctccttcttccactatttttttggggggaggtttctcttaccctgctcctcacttacctactattttcccttgttcctttttttaatctgtccctctcttttttctgtacaccggatcctttcccttccccccctgtctacatatctctcctcttctcctcccccc

SEQ ID NO: 123502 - DNA, 396 bp, Arabidopsis thaliana columbia
  unsure (1)..(396): unsure at all n locations
ctctctcctcgttcctatcttagtcttcatttactcgtgggaaacgcccaaaataattctcttccctctacccatcaccctcccccaatcccctcttcctcggctatttctcttccttttctcaaacaattatccttcctttctttcactactaacatattttccttccctttccctttttcggtgtggggcccncccgtggtcctctaaaaaaaatactctcttctttttcctccccctctcctctgctcccgcctacctcctccgcctaccccaatattctatccgctctttaaattatcatctcttctaccttttttactcctactcaccttccaccccttatcttcgttcggtgattctataaatcatccttcctctcctcctatcccctct

SEQ ID NO: 123503 - DNA, 243 bp, Arabidopsis thaliana columbia
ctcccccttctgcttctttgctttcgcttccgctgcggtccgtttcttaactcctgggctcgttcccccatttatctccgccccgcgcgtcccctatttttacggtgttctcccctcgtcggggtgtgcctttttatcgagttgggggtttgcggttctctttacaatctctccgcgcgtcgttcggtgggctatttgtttttgcttccggcggcgtgttattctttgttgatttgtggtttg

SEQ ID NO: 123504 - DNA, 670 bp, Arabidopsis thaliana columbia
  unsure (1)..(670): unsure at all n locations
ttttatctctcttcggtgacttttccgcttctcctctccatttcgcctatttcgctctgcctaatttttcgcgttccttaggctcctctcccccgctggcttgtcgttatttagtgtggggggtttcttgcttccaaaaacccacctcctcttgtcttttcctctatgtgttcttctcggccgcngtatttttttatttcgttggtttattttcctctgctcggccccaccccgtcatttatcttttgtgcctctccccgtttccctctcgtctcttccctcttggttccgtgtcccccctttttgaggggggggtttctctcacctctcgcctcccctttgcaaaaaaaaccgttttctttctcctctttttgtcgtttctattgtttcctgtttgccgccgctctttgttctcttcattttgtggacgaggtcccctactgttccttcttgtattttctctctctttcttcatgctcccctcctccgttctttcgggtgtgttctttctgtgccacgttcgacctacgcgccatctgcctcccgcctgccctccttacctgtttgttgttttattatgtttntctacttagttgttcctttcgcgcgttccgtgccacaagtctctagcttttcccattcgccgcgttctctgccccgctcctccccc

SEQ ID NO: 123505 - DNA, 589 bp, Arabidopsis thaliana columbia
tgtcctacctgcgcggtgtgtcgttctcgcctttcttgtctgttgtttctccctcttctcgtcgcttcttcttgtcttattgcgtgttccccggcccgcctccgcgttctttatttgggggttgctctcgcctaaacatcccgtcagtgtcgctcctgcttgcttcctcccggtgtgtattcgcttttgtggttttgttgggtctccgcccccgcggttccctggtcgttccggcctgtcccctcctacgtctcttccagtgtcctggcgcctcgggggggggggcccctcccttcctcggttgcttgcaaaaaagcgctccggtgtctgctggcgcgctcctgcgtcgccgtgttgccgcgtctctcgtctggctcgctgcgccgcgtgttcccttcttctcgtcttcgcgttcccgtcccccggccggtcctccgcgctctcttggcatcgccttctcgggttcgctcttgcggttcccggcccgcttcccttctgctgcccgtccggccggtcttgtgtgtgggtgttcgggtgtccagtccgcggacgccgtggttgccctgtcccgcttctccttcctcccccc

SEQ ID NO: 123506 - DNA, 647 bp, Arabidopsis thaliana columbia
  unsure (1)..(647): unsure at all n locations
cctgtctccttttttgcccctctctgtccccgggtttcttttttttgttgtggcgcgtgtgtcggggtgctctttccggctctcctttagttttccctggcgggtgttctccttcccgtcttcctctctttttttcccccggggggtttgcgtctcccaaaatctcctcgcctnctctcttttccctcctcgtccggtcttccgcttcttctcttcaccgtccctttggccgcggcctgtccgccctgtctcttgccgtcgcgctctcatttctttttctctctcccgtgctgtctctctgctctgtctctctcggcgccctttttttcggggggggtggggctcctccccgtcgcggcgcctctaaaaaaatcgccccgctttctcctcctcgccccctgttctctttgcgcttcctctcctctccgggtggtctgtcccgtcgccgtttttccgcgcctctgcttctctctccctttcctgccgctctctcctcggtctgggtggtgtttgtctgtcggtttcgctcccgtgtcgttcggcacgcccccgccgcccccgtgtgcgtgccgctttctccggccccggccgtccctccctttttctgtctttcctcctcttgtgcttccctggtcccatcccgcttt

SEQ ID NO: 123507 - DNA, 326 bp, Arabidopsis thaliana columbia
cctctccccttccttctttcccttgcgctgctcttgctgttgtccgtgctgggcgtctgttctgtcgctgtctgtcgcttcctctgttcgttgtgttctcgtcgttgttcgttgcttttgtgtcttctcttgtttgctgtttcctgggtgtgggggggtggtgtcgcgctctcgctgctctgtgtgttgtctcgtgctggtctcgtgctcgtcgtgctttcggtggtgcgccggcgggcatggcgcggtggttgtgtgcgtcgtgcgtggtttgcggcgtggtgccggtgtctcgcctgctgctgctctcgcggtgctcctctgtg

SEQ ID NO: 123508 - DNA, 284 bp, Arabidopsis thaliana columbia
  unsure (1)..(284): unsure at all n locations
ccgcctcttaaaaccaccgtcccttctttactccttcgctatctcttcttacaccgcatcctctttatattttttcttttttcggtatttgttatctcacgctccgcccccccncccctgtcttatgtgtgtcctcatgcgctcgcgcaatcccccacacctgcgcttctccctgtctttcgacttctaccgtgtgaggggggacatcctcatctcacatcccttctctctttaaaaaaaaaaatgtcctacacgctctctctatgccttctctcatttcccct

SEQ ID NO: 123509 - DNA, 482 bp, Arabidopsis thaliana columbia
ttacttctatctacatccattatcttcttcttcccccccttaatttaatctatatagtctattactattaataccacctccaaacgcgtctttctcgcttttatacatttacaagtatatccaacctctctcactataatattctactccccccatcaatgggggtggtctcctccccactcatctccccctatttataaaaaaaacctctttcttctctcacctctatcccatactatcatctttatcccctcaaaattaccttcttctcctacatgtacatataacataattaactaaataccattccatcacacacttcctattatcaggggggtaccactccctcaaactttatatttccatacttccctcttactcttttccaatcatataaatatttataaactaaactttctctatatacaatacaaccacacaatataatctcatctaccaccatactcacctctccccacccc

SEQ ID NO: 123510 - DNA, 482 bp, Arabidopsis thaliana columbia
  unsure (1)..(482): unsure at all n locations
aacccccataactatctctccccacatccctcacctaacgttcctccccacgcctccacactcagactcaaactcgtatcttctctcacacatcgggcgattcaattccttttacaaaatatatcccaccctctactcccttcctcttcattctcaccctcttcttcgtatatccaacaatcgcggcattcttccctccccttcccgtaataagctcctcggcagaactcccacccttagcctcctctcnctctgctatttctccctccctctatacttccgggggggggcccctccctacaccactcctttaaaaaaaaaaaatcctccctctcctctttnctctctcgtctccctcctcacacctacaccgatacacacccatttaatacccatactcttactcacctctttcttatgctgttcttttctctctctctccgtctcctctcgtaatcctatccttcatnctactcgggggg

SEQ ID NO: 123511 - DNA, 486 bp, Arabidopsis thaliana columbia
  unsure (1)..(486): unsure at all n locations
atcccactccttcatatttaaattattatccctagttcttccaatctcaccctccccccctctattatcttaattctctctccctcttctctccccttcccctctctttcctctccccctctacttttttctccggtggggtatacactcatcccccccctctctctatttaaaatatactcttctctctttctcactctcattcactccctctccactttctcccttaccctcttcccttctttccctccttctattcctatcctactttttcccttccccctattactctctcactcccctcctttctctcttcttatgggggtgtttattaccatttcctcatctacccttctatctctanctccctctgcttcacctccctatactactcttttttttaaatctattttttttccttactcttatatccttcccttattaaataattcccctctcccccctattttctctccccccccctcc

SEQ ID NO: 123512 - DNA, 188 bp, Arabidopsis thaliana columbia
  unsure (1)..(188): unsure at all n locations
tgctcgaacgctgtatcatgtgatctagtattttattagttaagctatcttcgatatccctcgtcggtcggtgattgcgagtaaggttcggtgtattccctcggggtcgngatataagattgaaactttatagaagaaggtagcgcggcgagttggcgtggcgttgttacgtcgcatgctgtgcggtt

SEQ ID NO: 123513 - DNA, 519 bp, Arabidopsis thaliana columbia
  unsure (1)..(519): unsure at all n locations
ccccnnctctggcgcgcctccgcgcccctgntccngtctcgtcggnttacgccccaggccgtcgcgcgtctccgtatcgactgcctcgttggtgtcactttggcctgctgtatgtctggtgctctactatactcctatcggctgctggttatatgggtcttgttcctcttcttttgctgcggactctcaggcgcgtcagtggggcgccctgttcctctggttgatttcgattttccctttncctggcctacgcgctcgtcccttgttaactcgtgctcctctggtttcccgtgcgcgttctccgcccgtccgctagtctcgtctcgcattcctgcgccggccgtccggncttgttatgagtcggtantcttcattgcaggtgtctgtgtttcgcgcgcgctcgttggctgactgttaggcgggcgttgcgtgacagcgagtggtgttgtggccgcgcgccgcgtcctgtgggctattgtccttttgtctaatctgtacctatctctcctgcgtcgttat

SEQ ID NO: 123514 - DNA, 387 bp, Arabidopsis thaliana columbia
accctttttcctctcatctttcctaattcatctctttacactacaatcccacccctgctactcttcttactctcctttatattatgttcctccgcgtgtctctatatcatttatcctacgcactctaagattatccctaccacataatatatacttcacaggggggagtaaccatcctctcttctatcttttctcatacaaaaaaaaattctcatctttctactcctttttttactaactccctatttacttcttcttcttcctctctcctccctactctcccataatacaactctcacttcttttcaattttaagctccattcctctttttcttttctctttcatatcatttctcagcgggggggtcctctctttcatattcttta

SEQ ID NO: 123515 - DNA, 582 bp, Arabidopsis thaliana columbia
tcctcataccccccacttctcctctaaacctttccatcattcctaccatatcatttctccttctcacaatcccttattccattcacccccctccacgtccacccaatacttttagtttatcccccacacaaaactcacctcttcctcacaatttattaaacccacatatttaacaatataacatgtgtaaaaaaatcaccccccaccaatgattattacgcgtctccccacagcacccctatctcacctacaatcttcactacccaccttaactcctcctcggggggtggctacctatactcctacacacacttcacaccatataatacaaaaaatacctcatacctaccatcaccctcccctactctcacatatcttctctcaatttacttatcctccttcctcataccattctttctatctcaatcctacatccttcttgcaaccacaacacaccatcaccccaccacctaccccttcattctctccggggggggagaatctatactacttttacctataccaccccatctctactatcactactacccactgcttacctacctctttaattctatcata

SEQ ID NO: 123516 - DNA, 116 bp, Arabidopsis thaliana columbia
gccgctcccttcgattgcgtcgccgcgcccgcattcggcgcatgcactgctgcggaagacatagtccgaacgcccgtacctcagtcgcatgccgtccctcgggagtgtcgtacgcg

SEQ ID NO: 123517 - DNA, 384 bp, Arabidopsis thaliana columbia
  unsure (1)..(384): unsure at all n locations
cccgcggcgcccccgcccccccgccggttcgcaggnngggggggctggtgtggccggcccttacttggntttcgcccccctcccccctcgcgaggcttccctcctttccacccgggggggggggcgggcctataaaatccatcttcccccgcttcggttccccgcccaaagaaaatgatttcttttgtctttaaggggcgcgatttttgcgccccccggcggcgcaccagcgcacccacgccttgtgcccggcccggctcttttttcccgttcgggggggggggcccccctcctcggggggtgttttgataaaaaaaatccacaacaggttgtccgccgtgtaggcgcccccgcaggggagcgacgcctggcccccccgccccc

SEQ ID NO: 123518 - DNA, 336 bp, Arabidopsis thaliana columbia
  unsure (1)..(336): unsure at all n locations
ccttttcaaaataacacaaacttttaacagnacctcccactcccttttttcatccctaatttctctccccaaccacaactaattttccttgggggagggaccaatctttgcaacatcaaaaaaaaaatatctttccaacctctctttttccactcccaaaaaactctctatccccccccaccattctcctcttttaccactccccctcttcaaatcctccccaaatttctccctttttaataaaaaaacaactccccacaccccctttctcatttctttaaaactaaatatcgtctttcctcacaataaattccaccccccaccttttttttttca

SEQ ID NO: 123519 - DNA, 372 bp, Arabidopsis thaliana columbia
cgttacttgggttaccaaccccaacaaaaaggggaaaatttctcttaaacaaggggaccccctcctctttctgagggggtgaaaacaaaatcgcgggggtcccccccaaaataaaacaacccacccccctttgggtgtcttattttaatccttctaaaaccctccccgcctccggaacccctccccttctcaaggaagcccaaaaccaacctttttgtcccccttttataaaaatgcgcccccccctaaacccttcctaaaggggcccccccccccaaggcccaaaaacccccaagggggtgcccccacaaacacaaccccctttttcagaaaaaaaaccccaaaacccggccgcgcgcaacatacccccaa

SEQ ID NO: 123520 - DNA, 351 bp, Arabidopsis thaliana columbia
cccagaaaacaacctaagaaatacaccccattttcataagggtggaggggggccctaaaaaaataaatttactcttcatatcaatacttcacatttattataattttaactacagctcactaatatgtaatgatgttaaatacattgtctttttggtttatatgtaaatagatctctacaactatattagcaaatactatgaatagcacaggagcacaaattttttttttgggtgggttgtggcagcaaaagcggggggcacatcatataaaaaaaacatattacatattattatttattcttctttcttcagtaacgcgactctcacccactcacccctcttctatttat

SEQ ID NO: 123521 - DNA, 495 bp, Arabidopsis thaliana columbia
  unsure (1)..(495): unsure at all n locations
cttgactccctgcaccctactaacttggatcctctaaacaggcgggggtgggttttttttttaattttaacccataaaaaagcgaacccttttctctagcattcaacgtttcacaatgacccaaaaacccgannaccgggcaatgggacaatgggtgggaaccgaaaataccaaaagggactgggttttaaacaataaagggggaggggttttttccaaaggggggaaccttgtagaaaaaacaacaagggggggaggggggaacccaaagcgtaaacaattccaccggaagctgggatctttaaatgaaatccaaaaagggaggaattggtgtttgggagcccgataaaactggtttaaagaattgggttttttgtttcggaaaattgcgttttctttcttttgtgggggtgttgggaaaaataacctctcctgttagttcccccaaaacatccttgtggaaaaacccacaggtggggtgtattctccccggaa

SEQ ID NO: 123522 - DNA, 563 bp, Arabidopsis thaliana columbia
  unsure (1)..(563): unsure at all n locations
ggtggggggggggggaaaagaaatttcctattttacaaccccccccccactttttggggaaaagctacccccgnccctccccgtaacccctcccccaatttacccccggttttccctaccggggtgcgagctgccctttaaaaaaaaaaaaaaaacccttnaaacacaaattcaaaaactcttttctccttccccccttaacttcaacaaacctcccaaaacttttttacccccttaaacccccaaaaaaaaagcccatctttccccttcatctttaagcccctttaaacacccatttcacacattttcttccgggtgtggaataaatataaacccgggttccccaaaaaacacacaaccccttttattttccaacccggtggggtttccttttccctccccccctcccccttaaaaaaatcatttcccttccaaaaaacaaaatatttttttcccctttttttcttttacccaacatttttgcccccgtaaaagtgttttcttctttcttttaaactttaaaaaaaagaccccctttatctcctttgttttaagaaaaaccc

SEQ ID NO: 123523 - DNA, 482 bp, Arabidopsis thaliana columbia
ctaatttaggcaacactatagaattactatgacgtcgcatgcacgcgtacgtaagcttggatcctctatagcggccgcgctttttttttttttttaagtaaagactgctatgtcacgaagaagcaaatcaattttatttctttatcgtcttcataaggctatatttacataaacaagagtgcataaaaagaaaacgcaacaaagaagcaagagttaacgaaactagaagcggagtcaacgagaattagccagcccccagatagcttcacttcctcttctagggatactattgatcttagaacaagcatcaactttgaaactagctccacaaagaacacccttactatcaatcctggggattgccctaatcatataaggcggatgggcaaaactcttaacccctgtctcactatgaaaatacatcccggatttccaaaaacccaaacccccctcgggacctaaccccaaagtattttttcttt

SEQ ID NO: 123524 - DNA, 531 bp, Arabidopsis thaliana columbia
  unsure (1)..(531): unsure at all n locations
agctacaatacgactcactttagggaaagctgctacgcctgcaggtaccggtcccgattcccgggttaccccgggggcggtgtntnagaacaaccntcaaaaccaaatctcacaatccaaaaaccctatantcctaacaacaaaccaagatgggaatccaagctccacgctggacctaaagggtttcaatcttctagaacctctgaaaaacccgggcgggcaaaccctgacgggggggagcatcccccgatgcctcaanaattaaaaaaaaggatgatggggangattttnttttcttttagaacacccactggcttggaagtggcatcttaaaagtcctcaaatttttaaggataaaaacgtctgggacgtccctttttggggttccatactttaccaccctccgagacctttggtttctccggctttttggattgcgtaccgaagctttttcccaaaccctggacccggccaagactacttttttttttgacctaaagaagcaaagggaaattgggtaaataagtgaaa

SEQ ID NO: 123525 - DNA, 526 bp, Arabidopsis thaliana columbia
  unsure (1)..(526): unsure at all n locations
ccctccccacaaataaacacatttattccatataatcccccaactaaactcttcaattaacatcctttcactacttttctcttcttctattccttctgattcctctttcgacttttcccccnncacacacacacacttcnactcactatcccatacacacttcaacatcttaccatcatcttcacaatcacccccttctcttcttttaaaaaaggtagatgaggacacaacacaaccagcagcaccattttcaccacttcaacaaatatattactcccctccgcatctaaattatcactcccctttcttttaccctcctacctctctctcttatctattgataatatatcatactattctataactcactatactaccactctacccacacttaccatacgttcacacctccacttcaccaacaaatactaccactatcaaccgattcaattaaaatctcattctccccacccacccctctctgttcgatactcatctcatatacacactcaccatatcatacctt

SEQ ID NO: 123526 - DNA, 485 bp, Arabidopsis thaliana columbia
  unsure (1)..(485): unsure at all n locations
acggagagcagcacacagcggccggagagagagcaacagagaagaagagagaggcctgaaaaaaaaacaaaaccccgaaacttagagagagaggcacggaacgcacgggggagcgagggaagaccgaggggcggtttaacgccacggggggaggaggccgccccaaaccaacaaagcataacacaggcccaaaaccaacaccacgaagagcaaggcgggcgagcgaccagagcgcagcccgccaccgagcacggccccgggacgnccgaaaacggaggcgcgcacagcggagcgcggggagagaggcggccgcgggacgcgaccgcttttagacacagagggaggggaaacaaaacacgccagcacacagcccgcgaacccacgcacaacacaaggtcgcacgagctcgagacgaaataagaaaaaccagagccacgcaacaggaagcaccacgcagtgagcatacacggagagaagacgagtga

SEQ ID NO: 123527 - DNA, 380 bp, Arabidopsis thaliana columbia
gcgaactttttttttgggggggtgggggcaccacaccactcggccactcccccctaggaaaaaatatttgctttagtagtctttttcgtcgtcgtgttttgctttccgtcgacgccggtatctgtcctgcttcctttgctgcccgccctccccatccctctcttgcgacatctctgctacaccccctctctccacccaccttacactcctcaccgcattcggtacatgcagtagaatttttattccttgtgttgtgccggtctctctatttataacatcttcgtatgttacgaaatgatcgatggcagactgcttctgtttacctgtcatctaccgctcatgttcttacttctgctgtcgcatatttgtatagtcaatgt

SEQ ID NO: 123528 - DNA, 236 bp, Arabidopsis thaliana columbia
tctgcacaccacccactgacgacgaccaatacccatttttttttgggggggtgacaacactaccccggacccctacgaaaaaagatagtgattagtattgattacatgtgtgcaccgcccacgtaccacaccatcacgatgatgccacctgccacacccgcactaaccactaactcttatcgcatactgaacaaaacttgtatcgagcccatgaccacactcctatacctctattc

SEQ ID NO: 123529 - DNA, 500 bp, Arabidopsis thaliana columbia
cccccgcaaaaacgaaggtgaggaaaaatttttacggggggggggggcaagaaaaaacactcactcccaccccgcagacagataaccatcatcatcaggagattacaggaataattgtgatacaaacctaacaacgcagacaaccgagcaggcacagaacctgcacaaaacacaaaccttttttttggggggggaaccaacccacgggcccatataaaagaaagtgcaatgaaaaaacgatccgcaaccgcttgaagtatacagaaaccgtgggaccgcatgacaaaaaagacgcgcgttataaacgtacaacgcaatagtagtgactatgagaaacagaacaagacatagccgttttacaagaaaaaaccaaaaactatataacaaaccataagaaacccaacacaaatacattagtccacagaaaattgattcaaggtatcatacggatgtcaatttaagatatagaaagtggaaaacgcacgatgagcgcacccccg

SEQ ID NO: 123530 - DNA, 401 bp, Arabidopsis thaliana columbia
  unsure (1)..(401): unsure at all n locations
tttttacaccaaaaccctcctttccccccataaaacccctttctcacaacaacctctcctttctctttaatccaaaaatttaaatactcttttacccctaaaaactccaataacctacttcaacattctttcaccaaaaaaggggggtcgcccccnaaaaaaagcccttccaaaaaaataaaaacccccccccttagattcatcattgctcccccccttcccccttaccaccaattttaaatttcttccgacaactccccattacctggtgcctattaaaattccaacttcccccacgaccccccaaaaaacccccctccttttttaaattcccccttcccccccaccaccaccctattatatatttcttttaaaccccttccttttctatccatatcttt

SEQ ID NO: 123531 - DNA, 577 bp, Arabidopsis thaliana columbia
  unsure (1)..(577): unsure at all n locations
gggcgccggcgggggggggggggggattcgggggctaggcgcgccattcnngggggacggcccccccggggccgcggcggatctactcctttccccctggggtggggggggggagaaaaaaaacaaaatccttttttttccnggttgtttcccctagcggccacggcccctcaaaaaagctgagtggatgtttgttccccgccagtgtttcgcgactcccaaattttttttttttttttacaacaccaaaaccttttttttcggggggtggggccacacttgggggcggctccaaactgagtgaactcccccgcccctcccccccccagagctctcccttctgtgggggcgccccctgccctccttctcgtgtgtgtgggaaaagaatgttgcacagtgcggccctgcccgcgggcgtttttctagaggggtggggggggcgcacccaccgcggaggaagaacgggtcgcttcccccttcttctgcgtgctcggcgcagcgctccctccgtcgcgtctgctgtgtcgcgtcgccgcgtcggtggggcctagcgctcatggcctgcggccgggcctct

SEQ ID NO: 123532 - DNA, 513 bp, Arabidopsis thaliana columbia
cggtgcgcgcacgcatgctcccaaccccggcgacactctttttttaatacccccccgcgctttttccggagaggacgcagaaccagtggacaaccgcgccagtcttggatctgttttttgtgcggggggggggggcgcgtaaaactaaacttctgcttggacccccgcccctactcgcttgtcggcgaccctccctctattcgtcagagatctgtttccgctttcccgcgcccagcgcaccccgccgaccgagtccgttggcggaacagcgtgcctccctccactgttctcgttttttgggggggggggcactaccgccaccgcgccctcgccaacgcgcactttttttgcgcttatgctgttccactgacgggcgtacgttctccgcactccttgctgcagaacaaatgtcgctgtggatcacgtgatcgtacatccccaccatttactgtcccgttgttcttcctcccctcacttttttcgcgatggccttccggcagatcttagcccaag

SEQ ID NO: 123533 - DNA, 645 bp, Arabidopsis thaliana columbia
  unsure (1)..(645): unsure at all n locations
gcaactatttctagctaacaaccacgacgaggaacaaaaaagaagggggctcattatatataaaaaacaccaaatttttgatgggaggggacacgaggaccgggnctagaaagtagggcgtagcaaacatttcttcatgtgaggggggggggggaccaatgaaaaaaacagcagaggccccgacacagtccgtataatattaccgcactctatgtgactcgacctatactatatataccctacccacatccaaacatagaagaaaagagaaagctatatcaccctgccacaactgtggtttacaccaaaagaagaaattttttaaaatataatgggtgtgccatattataatatctgagcgttgcgacagcgaagtcctatgctagtttcactattggtgcaacctgtacgcacgccgaccaccactgaaccgaagacttgtttgattgtttctatgctcatgtgtataattgtaacgagagcgctcatttacttatacagtctatatttcgggtcaattgagacgcaggccacagcaccgacaaccccacccgcctttcacgtttgagaatggttctctgtctctaaacccagctctacagaccataagacgacaacgacaaacataatagaaatacataaacg

SEQ ID NO: 123534 - DNA, 311 bp, Arabidopsis thaliana columbia
ctgcaggtgccgggccggaataattcccgggtccacgagggacggggcggggagcaccctttttttttttttttttttttttagataacttcaatataatagaacttattaaaaggagtggctaacgcaaagtaagcagagaaaataatgattttgccatgattaataacaagccaactcaaaaacaaatgtgattaaggggggtggggttcatctctttggttcacagcataataaattcaataggggggcccctttgaccaaaatggcccttcttaacctctttggactcaccctcaccgggggttttt

SEQ ID NO: 123535 - DNA, 324 bp, Arabidopsis thaliana columbia
  unsure (1)..(324): unsure at all n locations
cttgacggaacattacgccgcgcacacgcacggttctttttcaaataaggccgcatcgtttaacgccacagagcacagtcgccagatcggcgcgtacctacgaagaccaatttttccaccggggggagggggtcccaatcaacaaatttatatctccttcttcatttccaaccaccttncattgatctggagtcatatggcccttgtattgttccacacaaaatatgtatatacacacagatcattatatctataatacatttatgacgaccagcagtcagtttatgtttctagacccatcatccatacatgccattatttttt

SEQ ID NO: 123536 - DNA, 395 bp, Arabidopsis thaliana columbia
  unsure (1)..(395): unsure at all n locations
agcttccttctacagaggcgcacaatcagtccctcactcgctgtgcgccgtgcgtctatcttttcttttcctgcgcgggcggtgcggaccgtctaaaaacgatnatatgcgggcctccgctccggccttgcaggatcagcagtgcganccgtgactcgcaactctctagatatcgattccgccactcgtgggtactcgagtcgncacagaacgcggactagcgccgagtcactctatctctattttgcgctcacgatgctcgctctacgacgctcttttttaatcgtggggggggcaactcggtacgggggaggcctgttctagtaaaaaattatctacccgcaggctccgaccacgattgggaccgagaccaatatgacgcactgccccgttcc

SEQ ID NO: 123537 - DNA, 398 bp, Arabidopsis thaliana columbia
ttttaacacccccccccatttaaaacacaaacaccccccattaaccctctcaacttatttatcttttttaccttggggggtgggtctttaaaacaatcctaacccccctccccctcccctctttctcccatcctactctcctctccacatcttattcttctctactccatcccctagctattatcctccacttctactcttcatacacccccagaataatttctcttctattacacatataaaccctacattttttattcggggtggtgacacaccctcttccgtcacacgctctcacttctaaaaaatttattttcttcctattctcttctcctccctcctctcccattacttatacactctaactctacgctcattttcctctctcacttctccta

SEQ ID NO: 123538 - DNA, 464 bp, Arabidopsis thaliana columbia
aaaagacaaaaaacagagaagacaccaaaattttttggggactacccccacacagtaaggagaaaaaacaaaaccacagacaaggcgagaaactaagaaaatattttcaccggggggggggccatacaaaaataagaagataggacctcgtccgcggatgagatcagtcacagcgcgtacacacaataggagattagaacgaaacatcttcgaaaataaatcaccaacagacaataatataatgacgacagaaagaaaattttttggggggggggtcaacaaagcgactcagcggccggaaaaacagaattttattcttattcagaacgataataaaaagtaaggcaaaaaaagataagagagaaaagaatcatgaagagagcagggaaccattcatgaacaaaacaacaataaggaaaataaagtgggagattcaagagaaaagagagtcaaaaaagaataaa

SEQ ID NO: 123539 - DNA, 355 bp, Arabidopsis thaliana columbia
acgtttttcacccggggggggggggggcctcaaacaaaaaatatgacgagcgcgaaagcaccgcggcggcctcatagagacttcaataccttcgaccttgtcgtcgtgtacgcaattgtgtactgttttatatgtagcgcactgctctctctcgacgctcctgatacaccaccggacgagttcatatgcccgcggccgcagtttttttttgggggggtgacaccccaacgtcgggtggccgaccctcataataagccctcatacttttatcgtacccggacttcgctattcggctattgcggtcctttcgtagactcgacagcggcgattcctctgcccgccctacccacttcac

SEQ ID NO: 123540 - DNA, 699 bp, Arabidopsis thaliana columbia
  unsure (1)..(699): unsure at all n locations
acccacaaccacaaaccccacaaaccacaacaaaaaaaagaagaagaaggaaaggcctccgataaaaaaacaacccgcaagctaaaggggagaggaaaaaggaaagcggagaaaacaaacgcgaacacaactctctacaaaaaaggaggagagcccgtaacccaaaacaagaaggacgcccaaagaaaggccccaaccacaacacagcaaaccgccacacccccaaacaagcacgagaacgagccgaccagcacacccaccggcaggcacagcaaagaaagagcacaaacaaaacacaaacacacaaaagaacccttctcgaaaacaaaggggggggcaaacaaaccaacaacgaaaagaaaaacacacacgagacaaacaacaagcggacacgaaggcaacaagaagaaagagacccgggagagagaacaccgcgcagaggcaccgcaccccgcgcacgcccaaccgccacacacgagaggcaaccaccgcccaggaacacaacnaacaaacagaaagaagcaggaaacagcggaagacagcgaagaaagcaggagaaagaccaggagacagaccacaaacaaagcacaaaaacagcaccaacaagagacgaaaaaacaaccaaagacagacacagcgcaggacgaagacaacgaaaaagcacacacggagacccacccagccaccgcacagccaccg

SEQ ID NO: 123541 - DNA, 578 bp, Arabidopsis thaliana columbia
  unsure (1)..(578): unsure at all n locations
aaagaaaacgagataaatgcgagaaaaaaaaaaaaagagacgtgcctcataagataancaccccgggtttgnaggaggagagccacgcgcagaagaggagagaaaggagaagaagattttaagaaagggggtgggggttgacgaacataaaacaatatagtgtcatataaataagaagaaaagcacactagaaaaagatgaatgaacgcgaacggatattttagcnctagagaggggaggagacagaggagagggggagaaagacactgatgtaacgtttctttttttaggagggggggaatgttagggaaccaagagttaatatatatatatgttcagaggtaggtgagaggaataaagagaaaatattgagtatgtagagagtggaagccgcgtaatagcatcatatgaagggagacgaaagaggaaggatgaaatatgtaatactagaaatagtcgttaatgaataataaaaagagagatanacagatagaccaggacaagagtgtaaatctaaggagagtaaaagataaaagatgtcgaaggagagtagaagaagcggggagaagccaacagcg

SEQ ID NO: 123542 - DNA, 617 bp, Arabidopsis thaliana columbia
cgtgcggggcgcgcgccgctctttttgataggcccccggcgtctcgcgcgcgcgcacccgtctgcggtccctcccctccgtagctctgttcttttcgcccgggggcgggggcctgaaaatcaaaatccccgtgcgctccgccccccgccttgttaggcgcactccccccgcgcccgccctccttttggttctgtttctccgccgcggcagcaggtttcttatgccgtcgcgccctcctcgcgtgcgttgacgtcgtgcacgcccaggctttttttttgggggggggcggcccgccgctctctctttcccaagaaaaaattctttgctcgccgtttcccacttccctctcccaccacacgcccgcccctcgctcccgtctccccgcctctctctctctcccgctctccccccctggccccacggttggcaggccgtcttctggatcgccttgtttccccgttttcggccctccgcctgttgtctctcaccgcatcccaccgctcgctcttccgcgtcctcctctgcctttctccgcactctctctcgtctggtttttggagtcatcgctggccacgctcgttcccgcgcgccctccatctccctcttccccggcccca

SEQ ID NO: 123543 - DNA, 366 bp, Arabidopsis thaliana columbia
aaaaaacgaaccacatctttgatggaggaagagaaaaaggaaaagttttttatatagagagggggggagacaaacaaaaagaaaaggaaaaatgtataaagatgataaaacccaaattagtttagataagtatactaaaccgtgttggtctaaaaaatcaatacacaactattacatagacaataataagggagaatataagataataatagaagaaaaaaatatatagaatttatggtttagttgtagtatacaatatgaaatatgaacaaataattaaatgtaataaattgaataaattaatatacgataactaaataatgacacaataaaaaggaattgtaagagtataagagagaaagaatc

SEQ ID NO: 123544 - DNA, 358 bp, Arabidopsis thaliana columbia
aacaaagccccaaaaggaaaacgtctttttgtccggggggggggggccggggaaaaaaaatactaccacctcccaaccggcgccaaaaatagcaatcaaccgttcgaagggcacgcgcggcgaggaaggagctgtgagagagacatggacacctggcaacatgagtacgcgcccacaaacgtcctacagtcagctatccgcgctgagccgcgatcacttcttttttttgtggggggtgagtgggaacaacagacggcggggcgccgctgcacaaaaaaaacgtcgcgcaggattgttgtcggctggcgataactatgcccactgaacgctaagtagcaacgcagagaaccgagcgcga

SEQ ID NO: 123545 - DNA, 545 bp, Arabidopsis thaliana columbia
  unsure (1)..(545): unsure at all n locations
ggcgggggggggggggnnnnncgggnntttttgttcgngcgcgggggggaaaggcggtctgttgaattaatcatttccaccttttatgatctatgcatatttttttagtatgctgcgcgatttcatattattaaagttgacattttgagacgataaacancgaacgtaggataaacaactagcaccaaaagagagatacatcgcatacaacccaaaccagcaacaataatttttttttaacacgcggggtggggcccaaaatcaaatcgtatcctatcttttctaatttcctctctaactataacggctcgtgatatccacatattctattaagaaaacgtcacacaatatatttattgattatttatttattatattaatatactattttttttgaatactataaataaattgtcatagtaaggatgaggaactaaggcgcattgaggtagtgagtaccgtctccctccccagactgcgaaacacatctaataacagaaaaatggacaggagaggacgaagacaaggacgagtacggtaaagag

SEQ ID NO: 123546 - DNA, 486 bp, Arabidopsis thaliana columbia
accccccccgaaaggcaggaacgagcaattttttactgggggggggggcgcaaagaaaaaaacatacatcatcggaggaggatcgatgtggcttagagccccggtcaggagggaaactcaccctcgccccacgcgcagacccactacgcatcaccgactgaagtcgaaagcagcaatcgccatctttttttggggggggggccgaccgccgctggcccgcggcacaaagatcctctgtagatgcgttgagcacccgtcggagcgcgttgaccgtacgcctgaacacggccggataagctgttgaaatcggtgaggacagctatcctgacctctctcgcacgttcgacgcccatcctccagcacagcgagccattgtgctcgcggggtaggaaagttaacggtttattgaccgtagcgcagtgtgcgagtgcgatagacacggggcataatattgtacggagagcagcccggcgaatggcggcaggt

SEQ ID NO: 123547 - DNA, 573 bp, Arabidopsis thaliana columbia
  unsure (1)..(573): unsure at all n locations
ctagatgatctgaagcgatgagggggcggcagggggcgcattattgctataaattacacccgccagacgtttagcgggatattatatgtgtgatgaagangattgtcgactagcagctagaaggtacttttatgtgtgggggtgcgggtcgtcattagatagaaatcatggagacgagcgttctgaatgaggacaaaacggtctccgagcgtgcgatggtggactgggatccgtatagtttaattggagctggtgaagaggagaggtgtcggtgggtcggcggtgacgcggtcgctacttacatctgacgccgggccgcggaccgtttttttgggggggggggacaactggacctggatgctcccaggggtccgaaatcctcattgtgtgaatttattacgaaggggagatgtgtgcagtgtaggcggtgtagaatggtgtcgtgagctgccgcgagcacggattggtgtcgcgccggttcctacctcaatagacttagactacttgcggcggctctgagtactagtggtagctctcatcatgattagtgtatcggactgtcgggagatccta

SEQ ID NO: 123548 - DNA, 545 bp, Arabidopsis thaliana columbia
  unsure (1)..(545): unsure at all n locations
aaaataactaaagaaagaatattttaaaataagggggtaacgcgcttagctaattttattgtcccgagtattcacaccatgcgcgagtcagagaacgactccgtagtgactcacagcaacaacgaccaacagcnaaacaattaacaaaaacacacaacgcaaacaagacgagagacaacagaataacgacatcagaaacaccacaaatatatttttcaaaaccatagaatgggggagagcaaataagatagggaagcggagatcgtagacacagcacgggatgcgccgctcacatgccgcacaaaccaaataggacttacaaaccatacaataagattatcaaaaacaccacgaacatacaactttctatgggcaacgcacggcgcagacaattaatcccgtagaagctatacttcaatgacgtgttttgacaaactaaggtaacagatgatgtagcatatggtaagtagaacagagacgggccgaggagggtgaaggaaaagtagcgacgacaatacatgacacgacgcagcaagctcagtaaa

SEQ ID NO: 123549 - DNA, 513 bp, Arabidopsis thaliana columbia
aactctagaattactatgacgtcccatgcacgcgtacgtaagctcggaattcggctcgaggaccggtgtacaattttctgagggtgagatccacagattgattgaatcaccttactattttatataattcaggttgggggtcctcagacttgtaactaggacaagcttctcatgaatcatgaactttttaaaacatggagccttctgattacaatgagggggggtgcgaaaaaagaacggccatattttccaaaccccaccccagggtttcttcagggacgaaagttcggaattctattggtaccaactttttggttacctaaagccccatggggacaatgggtttatcccccggtttccaaaatcctttatcttaagagaggcgtgttttggaacaagaagggggttttttccaccatccctttttgggggggggccaattgggatgttaaggggaaatgccccccccccaggatttccctttgcaatggggaagccaggagaggaaacttt

SEQ ID NO: 123550 - DNA, 532 bp, Arabidopsis thaliana columbia
ttttttttttttttttttcccaaagaaccaattaaatttacctctttccacaaacaataagattccattttcgcaaaaaaaaatattcaaatttgtgtgaaaccaaaacaataacctcttcacaatacccacactttgttgaatttgttctttgcctcttaaagttttaattctcctaataccggggggggagcaaaattttcccccttgggcgagttaccacaaaaaaaaaagggtttttcaaaaaaccccttaaagccgaagacccccccctcaaaccttccccccccaaaaaaaaaactctaacctttggcggtttgaccagaacactttctccaaaaacactcccctttaagaaccacaaagttcccccctcttctctttttttccccccccgaaggctgaaactcttctttttaaaaatgtttctccaatacaagagcggcccccccccccccccccttgacgccccctttttctctttttgcactttaaaacacccccccccccactttcttttccccctgtttca

SEQ ID NO: 123551 - DNA, 612 bp, Arabidopsis thaliana columbia
acaaaccaagaaacccaccgcccaccacagggaaaaaaaaaagaacctattaaaaaaacacacccccagagtttaaaggggaaacaccaccacacagaacaaaagaaaacgaaaaaaaacaactcttcaccccgcgggggaaagccccccaaaacaccaaacaaagcaacaacccacacaaaaaacctaaacaaaacagcaacacatccccgcacaagcaacgcccacaccccaaaacctgcaccaccagacacaaacacgaacaagccacaaaacacaacccaccacaccaacaaacacccttttatcaagcaaggggggagatgggacgaaacagcacaagccccaaaacaactaaccccccccaacacccccacacaaccccacacccccacaaaaccaaacgcaaaaacaacagacacacgcacaacacacgagacaccccagcaacaccaaagaaaatcaaaacaccaaagaaaaacccaaacgtacaagaaaacaaaaccaaacagaacgacacacgacagagacggcacacgcacgccgacaacgccgagcgagaagccgcagcagaccaacacacacagacacaccaaaaaaacaaagaaagaa

SEQ ID NO: 123552 - DNA, 535 bp, Arabidopsis thaliana columbia
  unsure (1)..(535): unsure at all n locations
tatctcacttgtcgcgcgaacttttttcatcacgtacccctcacgtacgctgatgcggtattaaggccagatctcttgcagtcctattgactcactgtacttgtctccgaagcttttcccgcattatggaaacatagatgtattcatctgcttttcttcggggggggggtcacacacaaccctctcgtgtgcgtttacataaaacaactcttgattattttctcctcccttttcatacgagcgtcttgctcatccacacaccgattttagttgcgctattctgtagtccgcgttttgttctttatgtatcatggactctaacggataagtccctcacgcactgctctatccctatgttctccttcccccttctgtggcgcgtctcgagcgcgtgtgtacggtcttccttcatgtcctctttccctgtcccctcttccacctatctcgccgcgccttctccggagtctctaccttcacgtcccttatagactcgatatactcacgcntaaacatgtcgccttcttaccataccttc

SEQ ID NO: 123553 - DNA, 341 bp, Arabidopsis thaliana columbia
taatttaggcgcactcatagattactatgacgtcgcatgcacgcgtacgtaagctcggaattcggctcgagaaccggcgtggccctaattttgctttctcctctttgttcagaaaattttccctttactctcaaattccttttcgatttccctctcttaaacctgcgaaagctcacactggcgtctcgaaactatcgggtgggagctcttcgcagcttcgttaaccctgggcttagctttgattcacctgggcgaagcaaactccgaaggagatgctctctacgctctttcccggagtttgacagatccagaccatgtcctccagagctgggatccaactc

SEQ ID NO: 123554 - DNA, 472 bp, Arabidopsis thaliana columbia
  unsure (1)..(472): unsure at all n locations
nnnnnnnnnnnnnnnnnnnnnnnnnnnnnnnnnnnnnnnnnnnnnnnnnnnnnnnnnnnnnnnnnnnnnnnnnnnnnnnnnnnnnnnacccttnnnttttttttttttttttttttttatttttttttttttttttnntnaaacagggagggaaaatcgcatttaaaaattttacatacagacctcggagttcttaattggggaccagatgattttaccgaacccattggtagttgtttttggttttcctgcctttatatacttattacattatggaggggatatttgaaaaaggggggaagtggttttacaggggccccccccattttttattttcaggttttccccttttttcaggggcaattaggggcctaactttgaagaccaaatatttccggcccctccattgtggggtggttttaaaatttttttaagggaatgggaacaaaggggccttttttgggattttccc

SEQ ID NO: 123555 - DNA, 531 bp, Arabidopsis thaliana columbia
acaaaaaaaaaaaaaaaggcctcaaaaaaaaacaaccccacaatttaaaggagggaaaaaaaaccgagaaaaaaccccagggccccccactttccccccacgaggggcaaaccgcaacccaaaaaacccgggcgacccacaaccccaacaaaaccaaaccacctaccccaacgggaccgcaccacagaccacgagaacccacaacgcccaaaacacccgcacaccaaacaaaacgaaaacacaagaccagacccgacacaaaagaacttccaaaaacagaggggggggcgaccccaaaggcacgaaaaagtaaacacggacacaagacacacacagccaagtcaacaagaccaaagcgaaggcaaagcagcgcaacaccacacaacccgccgcccacacaagaacacaaccccagccacaaaaaaaaacacacaacacgcacgccacgcgcaacgaaccaaggacacccggaccggcaccagcagaacggaaagcccccacaaccaccaagacgcacccaccgccaaacac

SEQ ID NO: 123556 - DNA, 455 bp, Arabidopsis thaliana columbia
ggagcgtaaaaaaataaggcgaacaccgccacaaatgtttacttgcgtccatcaacggccacatgtaatatgttaacctccaatctagtgctcgtgttccccactaaacagaaagcccataggcggaagaatagttttttagagggtgtaccgacaaacagatatcactcaaaaaaaataattaattaagtacctacacttacatggtacggccccgtaaaatttaggattacttctctagcccacaagacttttctatttgcacgtagcattcagtattgcgttcgtctgcgcgagcataaagtatatattatgaaatttccactgacatcctgtagacagttgtaaccagctctaactcatatgcttcacacaaccagaagatgttagcccaaacatctacccaaaaatttacgtctagtaaaagatgttaataacctagacgtgcacagcgt

SEQ ID NO: 123557 - DNA, 326 bp, Arabidopsis thaliana columbia
aagagaaaccacaccacccgaacggcacccaaggaagaatattttacatccgggggggggggcgggaacataattctcccacccaccaaccctacgccccaccacccattccacccaagttaaactatagatcctaaacagtttcatctctaaatgaacccctaatccctattccacgtatcaaccatattacactagacagcgcagtctgttttttcacgggggggcgaacacagtaccacgacgcatatagaaatatttccccactcgaatacgacacacacggaccaacgccccaccacgcggccacaccaaccaagtacagc

SEQ ID NO: 123558 - DNA, 399 bp, Arabidopsis thaliana columbia
gtcttaataaatcctttcttctcttgtctagtggggggggggcaaggttggtattattatggccaggcaccgatcgctcgtctttaggagagtttgacgggttttaggtgattggtcggaaattttttttctatgggtgggggagctgagttatagagagggaaaaaaaaaaggcctccgggtgggtttggcagggttacgtaatgtgtcgagggtgcgaaggtaggagggataggggcgacagggtgaggcgggttgtgggggcagtagggcggcgtgagcgtagaagtaggatgggaaggactcatgcagtagtacccagggatgatgggtgtagggggagagagcgtataaaagagtctgtggacaagggacgagaagggtaaaaaaaagagaaag

SEQ ID NO: 123559 - DNA, 375 bp, Arabidopsis thaliana columbia
  unsure (1)..(375): unsure at all n locations
gggcggcgaggatcgaaaatcatgtctaatttttctagggggtggggaggggtgaaaaaaataaattccgtaaaccgtcccccttaactgcgtcaatatggtccgttcattcagcgcgcaaactaaagtagagatagaaagagtgaaaaagagaaatgagtgagactataaaacagacaataagcgattataatagatattataattggtaaccgaaattttttttgagggggtgtggaaaaaatcacaaacgggaagatctaatataaaataatgagattacatttaaatgccgttttatacaaaaagtcacaattaacgagtgtngagtaactggatgcagccaagcacctaataatgagataagagtaaagg

SEQ ID NO: 123560 - DNA, 472 bp, Arabidopsis thaliana columbia
acccccgccgagatggagggaggaaaacccagcccacgacaggcgggaagagaaataaaaagttttttaaacgggggagggggggtctaaaatacaataattaaagggtacgtggaggattagcaacgcatagatgaatgtgcggacccataataaacgcgataagagtgatataaggcggtatagaagggctaagaataacactgttaaaaggagagcgatgaaaacgtatagaggaatcaggacgaaacattttttttggtgggggggggacaagacaggcagcaaggacgacacgtgcctaagagaggatacgcataattatatatgtcatgaggcgtactgagggttcgtgcactcaggatacagaaactcgttatggtgtagacttatgtagacaaaagcggagtggatataggaggtatcgcgtcaaagaatatggtatgagttgattatcaatgttttcggatgt

SEQ ID NO: 123561 - DNA, 554 bp, Arabidopsis thaliana columbia
  unsure (1)..(554): unsure at all n locations
ggggggaaaagggggacgactgcactgaaccccaccccggnctgggggggggaaaccggggggnngggtgnggagggagaggacccttttttncccggggggaaaaccctcccctaaacaaattttttccacccctatttcctcattccttcctctttaccccccttaatttactcacccgctatctcaccaccggaacccacgctaagcgtcaacacccccaccaaactccctcccccaatttcacacaccccaacctttttctttcccacagggggggggacaccttctccaacccttcttgcctacatataaaacccccgcccctctctccgcattccccttccactccccacttcctatcctgtattccatacaaaccttcattttatatatatttctttcaatattatgtatttaaatatatttattataattaaacgaatactttcgtctaacatcctcctctcaaccgttcctatctacatctcacccccacacatccctcccgacaaccacatacaaacgccaagtagcggcataaaccatccccc

SEQ ID NO: 123562 - DNA, 580 bp, Arabidopsis thaliana columbia
gggaaccggggccgcgggggcgtgtacagggtccatctgattttttctggggggggggggcggtacacagaaatccaccacccttcggtcccggtggcgtgcatcgggcgggatagcccatggacggtgaaggggattagatttactgttcttagaaggtcagaacagagtggagcagcaggagctgagtgaattcacaatagggatggcaacggcgacacactttttctggggggggggggacacacccacccagggcgccaccctccaaaaagatgggatgtggtatattgaagcttgtgcgtgcgccgcgtctgcgagtctgcccacccatccggcgcgactcgtatacgccccggacaagagtgagtaagctgcgtagcgggggtgcaaagaggtgtaacgttcgatctgcagcagcgcaggtccagggtgtggccgcgcggggtcagaggttggctcttctagggacaaatgtctgcggagcgcggcgcggtgcgcgggagcggagtcggctacgggtacgggacggcggagaggaagcatgggagctttgggcaacgagagcaccggtattggg

SEQ ID NO: 123563 - DNA, 402 bp, Arabidopsis thaliana columbia
  unsure (1)..(402): unsure at all n locations
tttccccatcttcctgggttctccggattgcgatcttggaactanatattgaatttanggggccaatcaaatcncanctgcttagggggggatattacggcggagaaaaaaatgggggttatggggggggcggggttttccccggctgggggaacctaaaaaaattctggccttctttgagggcaagggctaagcatccccttaaacctacaagaaaatgctccctgaaatcttcccttcagatcaggaaactaagcctaataataaaaaatccgcaagctgggtaagtatccctctaagaatcttttacaaatccaaagattacagagtccctttagcaaaaattttacaaaaattccaaatggaaaattggttaaagaaaggcgcttaacccttataaaa

SEQ ID NO: 123564 - DNA, 463 bp, Arabidopsis thaliana columbia
ttacttgacgtcccatgcacgcgtacgtaagcttggatcctctatagcggccggccttggttttttttttttaccaacaaacctcatgatttcattttacattaatagcaaggggtttgatgatcttttcccaaatgtcacattgaaaaaaagaaacattaagttttttggaaaagaaatttgtatctacaaaatcaaaaacatcatgggcgggttctcacaaaccaggagcaccgaagaggagttttcccctgccccggcctcaaagtaaaacatcaacattggcaaccattgccgaccctcggagggcttaatctcttccaatttaaccctttccaacttattaaaagcccggctcataaacccccggcgtggtttttccccgggaaaccccaccgatccaaaaacttcccccccggggtatcccttaaccgcgcgtttacttccgaaaattctcgggggg

SEQ ID NO: 123565 - DNA, 476 bp, Arabidopsis thaliana columbia
  unsure (1)..(476): unsure at all n locations
cccaaaaaaaaaccccaccncanccccccgcaacagacagccaacgcgcccgcccccgccccccacccgccccgcaacacccccaacggcccctccctcggcccccataactcccacaaccacacccacacccacaaccacccccacccccaccacactctttttttttaaagggggggtgggaaaaacaccgacgctcacgacacctctataaaaaaaacacacctccatcttcactaatactcatttcganacactacagacaatacaatagtagaatcaatataccccccccccccccccccacaacgatcgtaaccaccacaccctacacctctcctatacccactctatcactactacctacttctgccacacccatcaagacctcctatcccaccagacacctcaaacactagttactttacacacttccgtcctacttccctcatcaccattacctccacacttctccc

SEQ ID NO: 123566 - DNA, 545 bp, Arabidopsis thaliana columbia
  unsure (1)..(545): unsure at all n locations
cccccgggttttgggggggggaacacgagcccaagggaagagaaaanaaaaaaaaatttttttacnaggaagagaaaagccccccaaaaaaaaatttcctctcttttcccaccgtcttacatttttctattattctatatatttccttctttcatccaacccacctaaacccgctaacccatttaaatacagacacctgaaaaacacaaaacacaacaaacaagccacctttttttttttcaagaaagtaggcaaacaaaaaaaaacacagacctcacaacaaaaaacaacccccactactttcactcttttatcgccttctctcacacacccaagtagcaaaactacatcctataacctaccaacacataacaaataaatactaatacaacacccattaaaaaccaacacacatttactaaaaaaattattaatcaataacaccttctattatcatatacatcactaaattattatacactctaatataaaaaactctctctatacaatccttaacacataaattctaatcaacactatactaa

SEQ ID NO: 123567 - DNA, 340 bp, Arabidopsis thaliana columbia
gagattaagccaacgcgattcttcagggagaacgcgccatttttttggggtgtgggcgaccacgacggcgccgcccactacaaagaaaagtcattattgttttccattggctgtttatgatgcgagtgtgactcgtgtaacactactatacttatgatttgcgctcaggtggaggcccgatcactatatgatttccgcattcgctgcctctgcctatcgtgagtttcgcgttttatgtctagtctgggcacatgaacgagtaaagttggtgcatgaggccactgatggctcatgataacctcttgtgcttgttttgattcggttctattatttgcatgta

SEQ ID NO: 123568 - DNA, 592 bp, Arabidopsis thaliana columbia
cccccccccaaacacaccagccacaaacttccaccccctctttcccccccggggggcaagggggcacccaaaaacaaaaaaaatcctttccctcctcccacacctcctccacgatttctccctaatccataaccttcaccaaacaaacatttattttatctctttttacaccacccacaaaaacaaagcccgccccacttccagccaaacatatccacacccctattaaaacaaaatttttttttgggtggtggggccaatctccccggaggctcccctcaacaaccaccaaaattctcaaaaatactctccctcctcgctccgcgcgcccactctccacaaaacacaaaatctccacttatacccaaaataaccctaaacaacaagtctccgactcattatacatcctcacttaaaactctccaacaatccacctctcaaacataatatccctcctctatatatcaccaacatctcccacataaacataccccaatcatatttctcacaattttctcctaacaaatcactcccactcctattaaatcaaccacctcactcccaataccttactatttcactacacacacac

SEQ ID NO: 123569 - DNA, 470 bp, Arabidopsis thaliana columbia
  unsure (1)..(470): unsure at all n locations
cccattccggggaagaaccccccccccccgcgccccgtgaacaatttacagtttttcccccggggtagagggcggcaaataaaacacatctttcctcaaaaaagcgagaccaacccacacacattttttttcttttaacataaaataaaaacactaaactctctatcccgcgttcccaccaaaaatatacacctatttttaattcctcccccaaacccaattttttttggtgtggggaccncccccccacggcttctcttaaaaaaaaaaattaacaataggtcacattcccttctatcctcccaaaaatacaaaaacaacgacgtcccaccttctatacatttctataccacatctctacatcaccactctcgcacaataaaacacccactccccgaaccatctcttttttgtcccaaatcccgcaacaaaacatgactttacatactttattactttctctcttatat

SEQ ID NO: 123570 - DNA, 415 bp, Arabidopsis thaliana columbia
cgttactgtttgcgaccgttatgcatcggatcagtataaagataaacatatacatgcgaaagggacctggagttactgacaaaaaagagtgatttgggaggggtcggcggtaacgtcgtacacatgaataatatattttttaaggggaaccactgcctagcggagcgtaatatgaagatgtgtacacagcttctttacagacaactatgcatatttgtgtcttctctgaattacggtgcctctaatctattcattcgtcacatactcttcaatactctattggtgccgccggatacacacgctcgcttttcttacgtcaataaaactgtataccgttactaatttctcaacatacgtggagtattgaaagcggacagcacaactttcgcccatcacacgcacccttcttcacggt

SEQ ID NO: 123571 - DNA, 539 bp, Arabidopsis thaliana columbia
cccccccccccccatttcaagacaaacaacacatcaccacaaacaaactcatccataaaccgaaatttttcacacagggggacaaagcgtcataaaaaacaacaacacaatatttacatcactaaatctcctccaccccccaataacccacccacatcaaatcccacacacacatcaccaaacaatcacaacaccacaaacccacatactaacatcaaaccaatataaaaacactctctcacacccaccacatttccaaggggggggacacccacacaacaccaccacccacaaaaaaacactcactatacaaaacttcacatccaccccaccttcaagcagaccatacacgcacaaaccattattaaaacccaaacaacaaccacccacctcatctaaacaactatacctccacaccacacccccattccaccccctcccacccccacactccaccctcccccctccataactcttcctcacttccctcttatactaacactacactattctctctcttcatcaactacaccccaccc

SEQ ID NO: 123572 - DNA, 346 bp, Arabidopsis thaliana columbia
acatactcccccatcatatgtctaatgatcggcataatcgcgtacccgcgcggacgcaagcttcaccacgtctgtcgtacccaagtccgctctccgttcgagtatagcccatagaggagtccttcattaaggataaagataaggccagaagacccatgagagagactttctatgattttctctttccaaggtcgaaaggcgtcgcatggagtgctcctatatacgaccgttagtctgtatgttaccttggtcgcatcgtccttccatgaggtatgagactatcctttctgtctgctaggtcagtcagcagtcatataggtagggtgggctagtgtccgctcgtctt

SEQ ID NO: 123573 - DNA, 421 bp, Arabidopsis thaliana columbia
  unsure (1)..(421): unsure at all n locations
cccccgccccccggcaagaancaccgggtatattttcaccccccgctggggccggccacccgggagggaagataaaaaaagtttcgaagtcggagacgacaaactgttacggcagacaaccatcctattctatagtctacggcaacgaaagacgtgtcagactgaagatatggagttagtcacagaggtggttagaccctgcaacatcttaacaactttttggtagaaacaggcaaatatgctcctattctcaaacagaaccactacgcaacaccacgcgaactaccctacaatcctagagacgcacggcgaagggctctcaagagagaccaacgaatgagagtgactaggtgaaataaaacacgcggaacgcttaacactaaaacgacgagaggactatcagcactacgcagttaccgtc

SEQ ID NO: 123574 - DNA, 111 bp, Arabidopsis thaliana columbia
aaaaggtgtatgcacttcacgatcataacccgacccaagcgggattatttttgtataccccacccccactctttagggcgacacaacacagccacgagtaaagagcggacc

SEQ ID NO: 123575 - DNA, 508 bp, Arabidopsis thaliana columbia
  unsure (1)..(508): unsure at all n locations
atgatatnnnnnnnnnnnnnnnnnnnnnnnnnnnnnnnnnnnnnnnnnnnnnnnnnnnnnnnnnnnnnnnnnnnnnnnnnnccacgcgtccgcggacgcgtccgcccacgcgtccgcggacgcgtgggtttttccagatcttaaggttttccacattttatcatctgggtcctctccttaatgatttgaagacactcaattcctatttgatcggggactagaatttggattctgtttcacacaaaaggggatttccctgtctctttcccgtttgattttcaataagatgaatccggaggagcaaaagatggaatctgcatcggatctgggcaagctcttcattggcgggatttcatgggacacagatgaagaacgactgcaagagtattttggcaagtatggagatttggttgaagctgtgatcatgagagaccgtactcccggacgtgcccgtggctttgggtttatcgtttttgcagatccttctgttgccaagagagtcatcatg

SEQ ID NO: 123576 - DNA, 485 bp, Arabidopsis thaliana columbia
  unsure (1)..(485): unsure at all n locations
cactcacttatggaaagctggtacgcctgcaggtaccggtccggaattcccgggtcgacccacgcgtgcggttctctttttcgtcaatatggaaggcgtgaccgccangtctttcttccttcttttcatcgccaccgccatgggccgcaagtccaccgtctcctttcgtgacggggtgttaccaaacggagactttcggcttggacccaaaccctcttacatggggggggcagaaattcttaacaaacttgcaataccaaactgggaagtcacaggattctgccaataccttaaatcaggacttaaacaaggagacttgtcttttcttggtccccgccggaaattcccttgaaaaattgggaaccaaacctttatcaaacaaaaacttaaggggggaaaggaaaggatccccacccccttttaggggtgtaaaactgggcccaaaacaaggatctaaatattttggaccccttactcccggggga

SEQ ID NO: 123577 - DNA, 363 bp, Arabidopsis thaliana columbia
ggggagcgccaagaaagttttttttttttccaccacccgcgcggattagagggcaaggaggcgagggagcgcggcgggcgacaggacacggcgacgtaacgagacttgcaacacgaggcggagggggctcacgtcgactcccacccaccacacaccgccgtcggcgagcaacaaggcggcacaaagcactcgcgcccgtctagacgaaagacccccaccagggcgtacgtgggtagaaagaagagatgaagcggacaggcaccgcaagaccggggtgtgagcgacatattcgcaatatcaaggcagggagtgcgcggagggggggggagagaggaacgcacggcggggcccaccgcgacaggt

SEQ ID NO: 123578 - DNA, 514 bp, Arabidopsis thaliana columbia
  unsure (1)..(514): unsure at all n locations
nnnnnnnnnnnnnnnnnnnnnnnnnnnnnnnnnnnnnnnnnnnnnnnnnnnnnnnnnnnnnnnnnnnnnnnnnnnctttttttttttttttttttttttttttttttttcaaaaacccttactctatcaggcgcctccttaattaaacaattaaagttcaggttttgagtttataaaaaatgatccaattacatatatgggtgcaccaaaattttcctttccgagtgaaaaaaatccaacctggcctacaccagcgttaaatttttttgaaataaaaaactccatttttggttgaagcacaacgaggcctacctttgatccatattaaagctgttgaaaggtcctaattcaacattaactagaagaagctcctaagtccactgaagagcgcgacagccttaaggtcaccacttctgatatctgtcaccctcctcctcaaaatgtattgagcacggnacagtctcctgcgctcactaagggacaagcctacagctaacttgttaagaaacgcttt

SEQ ID NO: 123579 - DNA, 317 bp, Arabidopsis thaliana columbia
ggggaatgggcgaatccgcggcttttcagcggggggaaggggcacgaaacgcggtcgacgagggcaaccaggaggcgcgtaggaaagcgcgggagcgacgcactagaggacatgggctgtccgggagtgaggggccgacacgttagacgaggagcggagacgggcgcgtgggcagcggcgcgaccacacgagaacaaagtttttttacgggggggcatccgtaacgagtgagcccaaggcaatatcaaagatgagcaagaactaaacgaagaacggagagggcgagagaacggagtaaggaggacacgaaacgcgag

SEQ ID NO: 123580 - DNA, 374 bp, Arabidopsis thaliana columbia
  unsure (1)..(374): unsure at all n locations
gggcaggcgggttttttttttttcactcccccccctttttagggaagaaacanagggacggcaagggcaagatgagcggcggctgattttccccggggggggggggcgccgaaacaaacccaagacgggcatcaactaacggagcacgaaaaaggaccgcggccgcgagcgatcattgggactcggctgaggctaacgcaaaccacgaagcagcgaggcgcccaaacagccgagattccgagcggagaccggtggacgcacggcgacttttttctcggggtggggccacgccgaccgctgcgacgggccggcccaatggacggtcgcccacgaacagtattcatgtccggggcccgccactcccgacggacaca

SEQ ID NO: 123581 - DNA, 544 bp, Arabidopsis thaliana columbia
aacaccggggggaagggggcgcgcgcaagggacggaggaacggacccgacgtaacggccgaaccgcggagacggggagcaaccgccacggagcgcacgacaagacgcggaacacaaacaacgggacccagcgcgaaggcagagaagagaaaacgcgacgtagagacggccgccggagagagaagcaaagagaaagggacgagaagcccgaaacaaaagaagagtttatcgcaggggggggcacacccaagccgaaagccgacggcagcaaccacgacaagccccagcaccccggcggccccgggcagcggacacgcggagggagcaccagggcgcgggggagaacgccgggagacgaaaaagcggcccggagcggccaagacgaggcgaccggacgacacccccacgccaagccggccgcgagaccgacgacaccgacggacccgccggcggaggaacggaagcacaccgccggcgatgcaggcacggccacgcgcgcacccaccggcgacgccacggcgcggccaaccaaggaagcggagcgg

SEQ ID NO: 123582 - DNA, 540 bp, Arabidopsis thaliana columbia
cgacaaaaactggaaaaacccaaagagaacaagacactttttttttacccaccccccccattttagccaacaacagacacccgggagaaaacaaaacaagaaaacacaatttttgaacaccgggggaggcggtagcacccacaacacccccagattaccaacaaaagacaaatataatcatcccacccaccattgtactcccacacagatgctcacacaaaacaaacacgaccagaatcaaataagcggaacagtaactacaatcaaaaactctaaaacaaaacaaaattttttaccggggtggaaaaaaacgcagccaccaccaccacaacaccaaccacaccccctaacctccggaaacacactcatacacccccctaccaatatcacaaaacagaataaaaaatctcacagccaacacacattagccacccccaattcgatattaagacactgagacaacatgacaaccacctcccctacccaacacaccccactatgcgccgatcctcaaacagtaccaactcccacacgccaccc

SEQ ID NO: 123583 - DNA, 520 bp, Arabidopsis thaliana columbia
  unsure (1)..(520): unsure at all n locations
nnnnnnnnnnnnnnnnnnnnnnnnnnnnnnnnnnnnnnnnnnnnnnnnnnnnnnnnnnnnnnnnnnnnnnnnnnctttttttttttttttaatcacaaagactaaggttatgacaaggagactttggttcaaggatctttctttctccctatcaatacaacaagtactggcatggacataaacagaaacttgctcttatactataacatggagagccaaataaaaaactggaattctgtgcgcgattctttaaccattgtacaaactctaaatcccacaaaactcccgttgcaattgtttatggagcacttgagggaatccgccttcttgctgggacaatggggagaacattgtaacttttttgagcaatacgtgcttttaagaagtttccaggacttagtaacaacaggcttatcataagctggttttgctcttacgagctattatttggtggaagcagcttccataaaagcaagaaaattggatgggagggagacactggaatcataagaaaacctgc

SEQ ID NO: 123584 - DNA, 245 bp, Arabidopsis thaliana columbia
  unsure (1)..(245): unsure at all n locations
agatactccnnnnnnnnnnnnnnnnnnnnnnnnnnnnnnnnnnnnnnnnnnnnnnnnnnnnnnnnnnnnnnnnnnnnnnccacgcgtccggagaaatgaggttgctggtggaaggcctgaaaagcactctgcatgacagcggtatatatggagggagagctgaatccaactccttctcttgtgaaatgtgaacagaacacagatcttattgatggcagcgcttgtgcacttactctgtgatagca

SEQ ID NO: 123585 - DNA, 544 bp, Arabidopsis thaliana columbia
  unsure (1)..(544): unsure at all n locations
aaacggacaaaggaaaaaagaaaacgggaatcttatttattaacccccccccccagggctagagaaaagagagcagacagacacggccggaacggaagagacaacgcgaaggaagtccagaagccccagcaaaaaagtccgcaacagcggagcggaccgaacaggataacgaacgcagggaggcggggggaagggagggcacagcgcaagaggcggagacacacagcgagacacggacggacggaccagatcccgaaacagaaggggttcaaggaagagagcgagagcgagaaggagacgaacacacacggggcgcggagntgccataccaaggtagaaaaacacgcagcacaagtacggcagcagacacgccgcaagccccaggacacaaacacacaatacacgccgacaacccgccgaaacgacagacccgccgaagcggaaacgaaaacgcgagaaaaagcgacacgaaagacgagagaagagacagcgaagagaagacagaagagcaagacaggaaaanaagaaagagacggaacggaga

SEQ ID NO: 123586 - DNA, 512 bp, Arabidopsis thaliana columbia
  unsure (1)..(512): unsure at all n locations
cgattnnnnnnnnnnnnnnnnnnnnnnnnnnnnnnnnnnnnnnnnnnnnnnnnnnnnnnnnnnnnnnnnnnnnnnnnnnnnnnctttggttttttttttttttttttttttttttttttttttttttttttttttttttttaaaagctttaccacgagcttggatcatggatctaactaaaaggtttctccaaaaattttacttgaaaaaaacttaacctttaaatttctggttaactggttttttttggggctttcacattacatagttaagggtttttcaaaaaaaaaccttaacaacttcccagtccacaggatccacggtttttttttacagagaagggatccaacaggggaccaatcaacatatggtttcaagcccccatggcctttactttttaattataacctaaaagatgggttcctttttatgctcttcgtttttatcttcgcccattttccatggggggaaaaaacaacccattcacccattgtgggggatcttgccatcct

SEQ ID NO: 123587 - DNA, 514 bp, Arabidopsis thaliana columbia
  unsure (1)..(514): unsure at all n locations
nnnnnnnnnnnnnnnnnnnnnnnnnnnnnnnnnnnnnnnnnnnnnnnnnnnnnnnnnnnnnnnnnnnnnnnnnnnnnnnnnnnccacgcgtccgataagattgaaataccaccagcttttgtttgcgctgagggaaaagtctttgatgtctcacaatgggctatttgtcagggaatggcgtgtagaccaaatacacataggccaagtttccatgtgaacatggtcggtttagaaaaggcgacacagagaggcaagtcnagcagggtccccggggatcttgatgtggagatgatggaccaggatgaggaaaaatttgagttatgggtttaacaaactttagcttcccggtctattctgggaaacatcaaaacccagaaaaagctggaggccctttaagttacccaaaaacaatcccgaaaacattgtcttgccccaaaaaaaaattcacccgggtgggagatcaacacaaaggggggaggggtggtttttcaacaaggaaaatgggcgaaaaaaa

SEQ ID NO: 123588 - DNA, 582 bp, Arabidopsis thaliana columbia
  unsure (1)..(582): unsure at all n locations
agaacgggaaagggaaaagaagnngggggggatataaatgaaccacccccccccggtttnnnnggggaacccacgcagacgggaaagaaggaaccgcagagaggttcaacgccgggaaaaagaccaaaaagaagaaaaacgaaacacacgaagagggccggaaaacgcgcgaggagagcagggaacacggagaccgcgaaaggcacagcgccgacggaaaagggagcgggggggaaggaagggaaagagcaggagacaaagagaccgaaaaaaaggtttttcagaggggggggcaagcaggaagagaggaaacggaggcagaaggcgcaacaaacgcggaacaaggcgcccggaagacgaaaaaagcgagaccgggagacggcgcacgcgggaaagcaggcccagcaaaacggaagaggaagaaaagaagcggaaacgagaggaggaggaggagaaccgcgaaaaggcgccagggcgcgagacggcgagaagcaaacagggagagagaaacaagagcgagaagcggagaggaaaacgagggggcaggaaacaccgaaacgaccgcaagcaggggagggggag

SEQ ID NO: 123589 - DNA, 417 bp, Arabidopsis thaliana columbia
  unsure (1)..(417): unsure at all n locations
gcacnnnnnnnnnnnnnnnnnnnnnnnnnnnnnnnnnnnnnnnnnnnnnnnnnnnnnnnnnnnnnnnnnnnnnnnccacgcggccgggtctttttttcgtcaatatggaagggggaccgccgggtctttctttcttctttttatagccacccgcatgggcggaagtccaccgttctttcgtgagggggtggtaccaaaccgagactttgagcttggaccaaaaccctttttacatggggggggaccgaaatttctaaacaaacttgcaataccaaaccggggaagggcccaggaattttgtcgaataccctttaaatcagggacataaacagggggacctgcttctttgttttcccccgggaattccctgaaaacttgggaacaaaacatctatcaaaaaaaaaatttaagggggga

SEQ ID NO: 123590 - DNA, 526 bp, Arabidopsis thaliana columbia
actcattttgggaagctcggcgcctgcggtacccggcccgaatattccggttggcccccgcgtgcgaacttgattcttaaggaggaaaacaatttatttttttgtggggggggcccacgctaaaggagaaaaaccccccctccttattgcggttttcttttgtgtggggaatgaaaagtttaaaaaaattgggctgggcgggtggtgtttccttttttttttaggggggggtgggaaaccgtgttttctaaaaaaaatcctttatgttttggaaaaccctttgaaaatggggggggagaaaaaaaatctggggggccctttgttttttttgggggggggccttctcccggagaagaaaatattataaacttgggggtatgggcccctccccagtcttttccccgggtgctttttgtggggaaggcgcctcacacaatttttttccccccccttttttgtgtgctaaaaaaacatcttatgtgggaaggagccccgccccctggggcttgcctcttctctatggggg

SEQ ID NO: 123591 - DNA, 544 bp, Arabidopsis thaliana columbia
gcccccccgccagggaccccgggcccgcaaaaaaacagggttaaaaccacacgcacaaaggcgaaccaaaagaaaaaaacttttttttttttttctaattatataaagaaaagaaaaaaaaaaaaaagctgaaaataacggcaaccaaaaaaacaaaataatataaaaaaaaaaaaaaaaaaaaacaaaaacaatcaggagaaaacaatttttttatgggggtggggggaacaaacaaactaagatcataccaaaaaaaaaaaaacacccacaaaacaacaacacaataacaaaccaccacacacaaaaacaccgaaagaaacaaaaataaaagtgaaaaaagaaagaagaaagaaactacataataacgaaagataatgaggagctggaaaaaatatatgacaggaggaaaaaaacaagatgtagttgagcgagcaaaaaatagaagagtaacacagaaaaaggattaatgaagaagacactaaaaaaaaaaaagaaagaaagtatggatgaaggtggacgacacgaacaaagctgagaacaa

SEQ ID NO: 123592 - DNA, 508 bp, Arabidopsis thaliana columbia
  unsure (1)..(508): unsure at all n locations
atgatactctcnnnnnnnnnnnnnnnnnnnnnnnnnnnnnnnnnnnnnnnnnnnnnnnnnnnnnnnnnnnnnnnnnnnnnnnccacgcgtccgaaccgtggaccgtggttgtttaacagggatgaacttggaggttccatctctggttggattcaagtgttttgagctaatcttcttctgggtttacttctctaccatactttctaccgatttgaagatttgtcttctgtacctttgatgatgagtgtcagttttgcagcaatgactcagtttttcgccttctaatcattaaactactttcccacaatgagatacttagtgtttttgtaggttctttcacactttgtacaagggtatatgtttttggcgctctcacaaattggggggataaatacaaatggattggttattattgaaacaaaagtgatcttggtgggagggtgacctttgagggggggttaaaaaaataaaaacctttgggtttgaaaaaaggtccttattttgggtt

SEQ ID NO: 123593 - DNA, 534 bp, Arabidopsis thaliana columbia
aggacgacctatagaagatcttgacgtcgcatgcacgcgtacgtaagcttggatcctctagagcggccgcccttgggttttttttttttttttttttttttttggggggcaaaagaaacatcgttttaaaacgcaaattttataaaaccatttgggaagttacccttatgtttttcaaaatgaatgaacttaaacaaacaaggatccttttgctgtaacatacctttttttgaaggagagatcaataatttgttttacaacatgaaaagaattttatagaaacaacatttattgttccgtttcgtgagacctgcgtgccaagaaaacaaatatctttttacatccttaacgagaacagaatttcttgaaaactcaccatgagacattctccacaccggagaagtttgttccctaaaaaaactccctaacctttaaaggaatcgagggtaacatttttaacttttctagtacgagaccattcttttttgtgatttaggtacctggggtcgtggtattcccgcaatgcatccaaac

SEQ ID NO: 123594 - DNA, 551 bp, Arabidopsis thaliana columbia
agaccaggaagagaaggggacggggtcaataatttaccccccccccccgttttaagaaggaaacagaaaaggagggaacatacgtagaggacgcgttttaacgtccggaattagaccgatgtgctatgacgatcatatagcccagaccggccggaaaccggccaccggtccttggagacaccgggcccacgaggcggttcgaagatattatgtattgaattgctctttttgctcatcgcacgatccaaccaaatggtactgtgtttttctagtggggcacacttgcgcagatcagccgtgaccctgaaacacgcactccccccagacaccgaacaggctagcacgtacggcgagttcgtaccagacgtcgcgcgcggcgctatgaggacgccgatcttattgaacgatctggggcgtagagctatttctttcggtcttcgatcgcacattcaagggaaacataactctctcacttttagaccataccgcacagataccaacgacatccgtgcagacggataaacacgactattctccatccacctcgcact

SEQ ID NO: 123595 - DNA, 332 bp, Arabidopsis thaliana columbia
gtccaagaaaacgtttttttttcttacaccaccaccaaccttaagcaacccaaccaaaaacacctgagaacgatataccccccacaccccgtggtttaaattcgcgggggggagcacaaatcataaacaatacgagagattagtggacgcactccgcatacctaactccgtccaaaacaaaatgcagtaaacgcttgattcatagtgcgccgctcaaatcatcggctacaccaagcgaccacaacccgacacagagtcaggagagtgcacaatcacgaaaggattcttttcaggggagtttatagagaacagaagacctagctgccccccac

SEQ ID NO: 123596 - DNA, 519 bp, Arabidopsis thaliana columbia
  unsure (1)..(519): unsure at all n locations
nnnnnnnnnnnnnnnnnnnnnnnnnnnnnnnnnnnnnnnnnnnnnnnnnnnnnnnnnnnnnnnnnnnnnnnnnnnnnnnnnnnccacgcgtgcgaccaatcgtgaagaaaaactaaactctgatccaaggagatgttgtttctttttgtgggtgaagactgtctggctgggagagtctggaagacatcagcctgtgttcacctgagtggtgggtaagccacttaagtgggaccaggctttccattaatggggaccgatatgaacctgtcatctattaaccaaaaaaggaaggtgctgggttaaccatgtctctgttatgcggttggagaggtatatatctacaatgatcatcgcctgtgattaatcgggggtttggaattatggcaatttttaccaagaatggtacttcttcagtgcggttaaataagaagtgcgcggattggtgctaggatgaatcgagccactaacaaagggtactggaaagcaactggaaaagaccagggggtgcccccggatatt

SEQ ID NO: 123597 - DNA, 378 bp, Arabidopsis thaliana columbia
gcgaaacaggcccaaaaacgggaaaaaggaaaagagagggggaggtatataatgaacaccccccccccttgtgggggagaccggcaacgaggagagaagaaggagaaagaaaacgagttacccacgggggaaaaggccccaccggaagcaacgagcggaaacgcgagaaccccgggaaaaaggagaacgcggagagagagcaaaagaggacaaccaaaagagagagaacaagaagagagagagcagccgcaaggaaccgcagggacgggggagaaacaacggcaaaaaatttttacaggggggacaagacccaaaaacccacagaaaaaaaaaaaaacagaaaacaacaaaaaaaaaagaacgaagagaagagaaaac

SEQ ID NO: 123598 - DNA, 471 bp, Arabidopsis thaliana columbia
cgggaaaaccccaaggacgaaggaaaagaagcgagcccccacgcgcgttatacccagcggggggagggcgccatagacgaagaaacgaacgaacgacggccggacagcgccaggaaaagcgcgagagcggagcacccgcgcagccacgaggcgagacgcgcgacgggcggagaagaaacaagagacaggcgagagccaaggagccccaccgggacccccccgccaaccacagcagaacgaagcagattttttcagaggggggagcgacaacaacacaacaaacgaggagaactaggaggaagacgagaccacacgagtcgacgcggcggcgcaaggcagagccgaaacgcgacaccggcgcgcacacgagaacgcacgacaagcgcgccaacaacggccgacccgaagcgagccgacagcgagggagcgacgcgaccgacggacgggaccggcacgaacaccacccggcac

SEQ ID NO: 123599 - DNA, 512 bp, Arabidopsis thaliana columbia
  unsure (1)..(512): unsure at all n locations
tctcctacgactcactatatggaaagctggtacgcctgcagcgaccggtccgggattcccgggtcgacccacgcgtccgggaaattgagaaaaaaacctacaaacaaataccgggcgtttttttttctttttatgggggggcgaatctctggctgttggggcctcccccccatcggggactgggcccaatactggttgggcggctacctcgcttggtcccgggttttttatttgggggggccggaaaangaacccccccacctattacataatagagggaaggggttgggggaaaccctctccccctcctaatgcgatggggggaggggaaatatcttccagccgtgggcccctcgggatttaacacgggtgttccaaaggggaaaaacccggggacccaagaagggggcctttcttcccggggggtaaaaaaaaacaaccccggaatgggggctctggaataaaacccaccacctaaaccaaggggtgcctggggaaggcacccgggaaaa

SEQ ID NO: 123600 - DNA, 518 bp, Arabidopsis thaliana columbia
  unsure (1)..(518): unsure at all n locations
cgatttatannnnnnnnnnnnnnnnnnnnnnnnnnnnnnnnnnnnnnnnnnnnnnnnnnnnnnnnnnnnnnnnnnnnnnnnnnnnctttttttttttttttttttttaaaaaaaatactactggatggattttgatttagcaaaatagattgtttgaatattgattgataaatcctcttagcctacgcagagtatcataactactaataacgcaagcgatagttacagaaactataagaacttaatagaagagagttttaaaagtaaacagcaactggaagttgaggtgttcttatcatctgtttcttcaataagtttcttcttgctcgtactcagcttcttcctcttcatattctccttcttcatcagccgttgcatcttgatactgctgatactcagagacaagatcgttcatgttgctttcagcttcagggaactccatctcatccataccttcacctgtgtaccaatgcaagaaagcctttctcctgaacatagcagtgaattgctcactgaca

SEQ ID NO: 123601 - DNA, 481 bp, Arabidopsis thaliana columbia
tcgccacacaaacaaaggcgcgcgcggatctattttaccccccccgtttgggcaggccacacaacacggaacaagtccggaaagattcaaccccggacgactcatgaggtgataagcgacacaagggccgcccacaggcaccgcgccacgacgacagcactcgagaggatgcgaaaagatggaatcgggggaaggcgcagggcactcggtgccggggacgggtttttgaaaaaggaagcgaagaaagcgccaggccgaccacgcacccacgccaccccccagaacagactgactaccgcgctcgcggaggacccaccaccaacgatgacgaatgccacaccaggcaccgcgatagggggagcgaagcagagacaaaatgaacctcggcgtggacccgtgcggtgttacacccacgggcccagaaaggcacacgatactatgtcggtaagtatgcaggcttgacggatcaaggcttcgcgcg

SEQ ID NO: 123602 - DNA, 473 bp, Arabidopsis thaliana columbia
tcaactatatgagtaagaaggaggagtttctttttttttcttccactcccccactcttctaccaagcgcaaagaacccacccgcgcagccagtgacactggtatctgatagatttttgtgtccgagcggggccggggcgcgctaccatttctacacataacgtggctcgcgcctaatggtctgcctatcgaagactggcatcaaacacgccatacaccgtcgtatatgcgctacatgacatgactataaatctctctttccctacattacgtagctaatatctctgcccacaaccgctccgcgtaaacagtaggggcagaacaagaacgcaaccgatccctctttcacataggggtagagggcgcggcaggatataacggtccgacagagtaccacatggacatatcttcccacgctctctcattttagtacgacataccgtcaaatcataaattggtcgcgcacttattcct

SEQ ID NO: 123603 - DNA, 525 bp, Arabidopsis thaliana columbia
  unsure (1)..(525): unsure at all n locations
gattctctcnnnnnnnnnnnnnnnnnnnnnnnnnnnnnnnnnnnnnnnnnnnnnnnnnnnnnnnnnnnnnnnnnnnnnnccacgcgtccgtgcggcgcgagagactacanaagggtacggctgctanaagaccacagaagggtacggctgcgagaagaccacagaagggtacggctgcgaaaagactacacaagggtaccggctgcgagaagaccacagaaggggaaaggcttcttaatcattgggggggggagtcccaattaaatcaaaagatgttaaaagttgcaggagcgtcacagtatttggcgatcacccgggctggtatccaaaacatcaagctttcccagaaggcatggggtgttccatgggaatcttgcaccgttttcaacgtttcttcggggaactatactttcaaaggtcaagccctgagcgcagaaaaacttccttttgtttcttcccgtgtttttacgattggtcctcccgttaatgaccataaccccctgtttttgtttcctagggtgattc

SEQ ID NO: 123604 - DNA, 372 bp, Arabidopsis thaliana columbia
  unsure (1)..(372): unsure at all n locations
tccccccccccacggctttccngaaggggccggaccacgcggcctggaatggagcttttatagagccgtttccacgcgcggggtggtccttccaatcaaattaggagaaccgctgttgccatagcgacgcggacaccgcgcatctgttacttccgggagatgctccccaatagcagtactgctacatacgtactcataatttgtcttgttgaccgccctactatcattgtgccaacaacacgaaacaatttttccgtgcgtgggcgcgaatcagtctaaatttcttactttactcatgttgctttgctaccagcaatcaaatcaactgcgctactcgtatattatgtacacccattccttacttcctttagc

SEQ ID NO: 123605 - DNA, 605 bp, Arabidopsis thaliana columbia
gtactattcctccccatatcactaactctgcagacaatgacttttttttttctcactccccccccccttctcgccggagcagccccccccacacacgaaccctgcgcctacatctaccatttccacccccaggggcgaggacccctcaaaacaaacaaacacaccggacccccgacacccccgataaatacccatcacccccaaccaccagcaccgccaaccgtcggccgcatccactcgcaccaccaccctcacccatataaccactcgcaccatcaataacaaaaacaaccaacctcacactttttttttcggggggtgtcccacccttactataacttactgcacttaaaatatcgtcaaatacactgatatgcaagacgtaacggaacctcatcttatccataacaccgcaaatataaacataacataataggtcaaccacaactatacacatccaatatgcgttacaacattaccaggcactactcccgactcacaacaaactccgtacaaaccactcacttctatcctacctaaaactaaaactctaagtcctacaaatactatcccttcacccccatcccataaataaacatcttacc

SEQ ID NO: 123606 - DNA, 540 bp, Arabidopsis thaliana columbia
agagctatgacgtcgcatgcacgcgtacgttagcttggatcctctagagcgggcgccctttttgtagtgtgattgttttgtgtttgtgaacgaggagtaccagggtgggcgaggagaaccttttctacctgaccaaacgttaggaggttacagctttttttcatctacagggccaagatttgaaaagaggctatgggcacatttgtcctttaattctccccatattatttaacgggggaggtacagtgcccctgtgggtagtcaccactggacgtttttgagaaaaaccagcccgtctcaaaacccggtagcgctttaaatcaacgcgggagaagaataatcatattcttgttattttctccttaacggaaaatagaatttcttcttgtgaacacttcgcaaatagggtgggtccctccccgagaaagcccgcgagttatgtggagagaatgcgctccaagattttaagagaatgaaggggggacaattttcgaaaacgacaaaaaataacaagagggtattgcgctcgcttatatctaa

SEQ ID NO: 123607 - DNA, 533 bp, Arabidopsis thaliana columbia
  unsure (1)..(533): unsure at all n locations
cccacgggcccccccccccccccccnnnnnggaggatttcctgctacctcccactcactttaggggaagctcgnncgcctgcaggtaccggtcccgaattcccgggttgacccacgcgttcgttgggttaaaccaccttatataaaaagaaacgggcccaccttctgtcgttttagttacctcgagatctggggttctttttttcttggcttctgagcttttggcgggggggggtttttctggggaaaccccaaccactatcaaaattttttttggtggcggttttaaggggggagttatgagtgggaaaaagattaagcaacgtaccacggttgaagggggtgaaggattccaaaaaagcgggttttaaagtcggggaagacccaagaatggcgaccttatttggcttgatgatttattttcgggggaggaaaaaataaacctgttttttttaggggtttttaatatttgttcgctgaaaggggggggagggggcaggggaaccatctaaaaaaaggccgccctttaggggc

SEQ ID NO: 123608 - DNA, 522 bp, Arabidopsis thaliana columbia
cccacacagggagagggagagaggacggaaaactatttttttacacccccccccgcgttagaaaagcgaccgcacaccggggacgaccgtgggaaacccagcacggtttgaccgcgaagggaagagccacgaaacagaaacgagaacggacgacacagagagcacccaaaacacagacagagaaaacgccggaagccagccagcacgacgaaacagaaaaacacaccagcggtcgcctcacaccgacgccccagaaaccaaaaaagacaaacaccagcaaatgtttttctgggagggagcgagagggcagcgagaacaaaggaggatgcaaatagagcagaagcacgcgcggaggaccgccaaggcaggcgccacgggagcgcggacgcgcgcacgcacgcacggcccgcgccgacaacagcggccaccacagcgcacgcaaggcggacgaagacaaacacagagaggcagccgccccggacggcgaagaaagcaccccgacagaaggacacgagggagaag

SEQ ID NO: 123609 - DNA, 471 bp, Arabidopsis thaliana columbia
  unsure (1)..(471): unsure at all n locations
ccacgggggcaaaggcccggccgaaaacacaaaacacgctccgagaacnaagcacaagaccgccaccgacccgagagacaaacaaaccaccaacccaactaacaaccgagcccccccacccccatacccccacacttaacgcaaccccaccaaccccccgcaccacacacccacaccagcacatttttccaagggagggcacaaacccgcagtcgcacgcccaaaaaaaaaccccctctcacaccaccatcactccaacaaccccaacaaaccaaccccccaaaaccaaacccgcatgctatccaatctaacaccaacaccaagacagccaaaccacaccacgccccctcaggctcccccccaaacccctaaaaacaaccaaaggaaaaacccccaccacaaccatcacgacgaacctacaagacacctatgccccgctctctccccccccccccaccacacccaccccac

SEQ ID NO: 123610 - DNA, 465 bp, Arabidopsis thaliana columbia
  unsure (1)..(465): unsure at all n locations
agctctatacgactcactttatgggaagctggtacgcctgcaggtaccggtccggaattcccgggtcgacccacgcgtgcggccacgcgttcgcccacgcgtnctggcaagatntctctctctctctctctatgaaaannaatatatatatctataagggcttcgggggcgaccaggtgggacgaaaactgaaaaacaaacgggctgaaaggatccttcacattttactaaggagagggccgctttaaacgcgggccacaacaaaaaaaactccccgaacccttatatttctaaaggctcagaaggggacaacacaaaagcgccagggggcgttaaaaataaggaagggaaaccgggaggccctttaaggggggacacctgcctgccaaaaaaaaaaaaaggcgagggccaatgggatcccaaaagtacacccgcaaagccgggggggaaacagacctgggaaaa

SEQ ID NO: 123611 - DNA, 507 bp, Arabidopsis thaliana columbia
  unsure (1)..(507): unsure at all n locations
nnnnnnnnnnnnnnnnnnnnnnnnnnnnnnnnnnnnnnnnnnnnnnnnnnnnnnnnnnnnnnnnnnnnnnnnnnctttgtttttttttttttttttttttttttttttttttttttttttttttttttttttttttttttttttttttncccccccaaaacaaattaatttttttatgagttttcttttttcggggggaaaaaaaaaataaaattatttacccgggggttaaacccttttggggggccgtttttaaaaaataaagcttcctaacattgtacaaagagtgccgtgttttttcctttaagaaaagccgaaacatgggggggttttcccttgggggttttttttaaaccattctttttggaaactcggaagttttacaaagggcccgctggaaaactcaaattgccccaaacttggatttttgaggggggggggacccaacccggggaaggaggaagttcccccttttttaaaaaattgggcccaataaaaattaaaggg

SEQ ID NO: 123612 - DNA, 215 bp, Arabidopsis thaliana columbia
  unsure (1)..(215): unsure at all n locations
cactcacttatggaaagctggtacgcctgcaggtaccggtccggaattcccgggatttcnccggggaagatgcagcanaggaacccaccgcgggtaaacccagtggtaccgatggatcccatttctcataccgcatggtcgttgactctccttacacgaaggtcactaaagaaaaagctccgctccctcctttgatcttttttcacgctgcgatt

SEQ ID NO: 123613 - DNA, 387 bp, Arabidopsis thaliana columbia
  unsure (1)..(387): unsure at all n locations
ttttttttttcccctcgccccccccttttctnggcccgacaccaccccgcacaccacgtcatactccacaaaacatctccccacctttttccaccccggggggaaagtgtcccccaaaaaaacaaaacataaactctctatcacccccatattcctctccagttatacctccatatccactctgtcattctcctaacaccctcccgcaccactggttcatctatacataattccatctcattatatattttctttcctacttacccctatcattaacaatctctcaataactataacatcacatacatttcttatcgaggggggtacacctcccattactataaacactcctacccactcaaaaacacatcattcattatcctccta

SEQ ID NO: 123614 - DNA, 505 bp, Arabidopsis thaliana columbia
ggtccactatagaagatcttgacgtcgcctgcacgcgtacgtaagcttggatcctctagagcggccgcccttggggtttgtttttttttttttttttttttttttttttaggggggttttttttttttttaaattaattctttgaacttataaaatttaggatttaattaagggtttaaagacatccatgtaataaaaacccaaatttttttaaacaagagtatttctattgtgggggaaaactgccccaagtaaattattaaaaaaacaccccctcaaaataaaactccataaatggttagggaccaacaacgcttccaaaggcaaggctttttcactctccacatgttccttcattcatcaccttaacaaaagatagttctttaatttatttttaaatttttaaaggggaacccaaaaggccgggaaaggtggtttagggatggcggagccccattttccccaaccagggaggggggaggatttgattgttgggctttcccaa

SEQ ID NO: 123615 - DNA, 463 bp, Arabidopsis thaliana columbia
  unsure (1)..(463): unsure at all n locations
ggagccgtccctcagtccggcccgaattccgttcnaccagggtggggcgcgtacaaaagtttaccttttcttttttagggtttgtctttgtaagagggaacaaacataccacaaacttggattggaaattaaactgtcaatacttaaactcctattttttaggggggggggatnatctcactggttattccctaaaaaaaatccgcggttctcttgttacccaaatggttccggtaaagattttggaacccccctcaaaacattcaggagccccaattccttccgccaattttttgtttggggcgcccttaatttttgcttcagaaaagggggtaaaacttttacaacagggggcccctcctaagggggtttttcccccttatactgggaaccctttgttaagggggggtggggaagggaaaagaaaggttcctttttcctttttacccctttcaacacccct

SEQ ID NO: 123616 - DNA, 522 bp, Arabidopsis thaliana columbia
  unsure (1)..(522): unsure at all n locations
taggagcacctatagaagagtttgacgtcgcatgcacgcgtacgtaagcttggatcctctagagcgggcgcccctnggggtggggttttttattttttttttttttttttagaaagggggggattttttttttttacatatcactcaaaaaaaaaaaataacccccaacgtttaaatttagaaaagaatattttttattcccgagactacatgaaatccttcactttaagaaaaggggggggggttggttctgtacctgtacaaaaatttattttttttggccaagacatttggaacgggaaaaaaaattttaccccccctgggtggttttgaaactgggcccgaatgggcctttattgggtcccaatttcttcaccttttgggactattaccgggggaagcctcttttttttgggggggacaaaccttttccttggaagaaaatttcccatacccaaaaccggtgttgggccaaaaccaaagggcctttaagtttaagggggggggggatttcgaaggggt

SEQ ID NO: 123617 - DNA, 559 bp, Arabidopsis thaliana columbia
tttttttcacattcatttcccacctttattttcaacacctcccgcccttttttcttttttcttccttactcccactttcttctcaccccaaaccactctccccaacacaactcctccttctccctcctccataccttttttaacatcttgggtggttaattcttcccccaaaataacaactctccctcccattcttcttctttcactactctttctttactttctttcttatcttcaccctttctttctatcttcacattaccctctttccttcccttactttcttccacctcttcctttctcacactcctctctcttactcatacaactcatatccccttccaactactattactccacacttttattcccggggtggtccccaacacaccaccttctaccacacctctctctctactaactatatcttacattcctctcttttacattatccctatctcttcttttctattacctttctttaattctactctctctactatttctctcatcttttatctctctttccttctctctcttcctcttttcccttctctta

SEQ ID NO: 123618 - DNA, 461 bp, Arabidopsis thaliana columbia
ttttttttttttttaggggggaaaactgatattcaatttcttataaagagtgaacctctcccccgggaaaaaatgaattaccattttttctccctttggatttaccgggggaatgtgcccttttttctaccccaaaaggggtgggggtccatccgttttttgaatgaatccaaaaaactcccgaatttttttactcgggaaaagcttttttcctttgggggaaaaataaccccccattaattaacccccccctttttctctaaagggtcccttgggaaaaaaagaaaccctcccaaaacctcccattaaaatttcttttaaaaaccacttaaccccgaaaaaagggtgtttaattatccgccccaaactctactggggttcctcccttaggcttaaaccccaacctcccgagctttttcataaaaccacacggggaaaatccccctatgtgttgccccccc

SEQ ID NO: 123619 - DNA, 456 bp, Arabidopsis thaliana columbia
  unsure (1)..(456): unsure at all n locations
tctccctctctcccctaccgcccccccccaccccgcccacgaaatatctttttgagccccctccccttttacgcgggcacgcccccccccttcccccccgccccccccccccctttttcccccgggggtaggggtcttcaaaacaaaacccccccccgccccgcggttttcctttttctctgcctcttacctccactccacactcctcgtgttctctcgctctttccccgcctttcatcgctcctaactgcgcctcctcacccccctcccttcacccccccgccccccccgccnccctttttctcgggtggtgtttcgccccccnaacccacgcccttcccctataaaaatatattcgtcctcacccttctctctctcccctccctccctcatcttctctcccccttcctcccttccctctcctctttactctcctttttctacttttccttctat

SEQ ID NO: 123620 - DNA, 515 bp, Arabidopsis thaliana columbia
  unsure (1)..(515): unsure at all n locations
tttctttcctcgctgctgtcgtcttttccccttcgttggcccccggcttttttttttttcttttccccccttttttccgcgccgaggcccccccctcgcgggcgccgcgccctcctcnccttttttttcnggggggtttgggtccgacaaaactcaccccccgcgcccgctgtcttcccccttctcccactcgtcgctcgccctcccttgtcgcccctccctctgcggcctcctcctcgccctctttctccccccctctttctccttctcctgcgtttcagcccatttcccgtagcgcgtgatccgcttttttttggggggggggcgccacccctcccgccgctgtctctataaaaaatattcctttctttctccttcctcccgttctctctttcctcctctctctcgtccgtctcccctgccggctcgtccctcccgcgtccgctgcgtgcgtttgcgtgctctctctgtctcgtctctcttctccttctttcccttccccctggcgcttcctc

SEQ ID NO: 123621 - DNA, 615 bp, Arabidopsis thaliana columbia
  unsure (1)..(615): unsure at all n locations
ccccggcgcggcggccgcccgagcgcgcccccaccacattttccacgcgggggggtatggggtgcnccacaaccaaaactcnctccccccacaccgcgctcgcgtattgcggtcgtcgccgcgctctccccgccccccgcggcgccgccgctcgcgcgcgccgcccggccgccgctccagcgccggcgcggccccggccgccggccgccgcgtgcgcggggcgagctcgcgccggccgaaccttcttttttggggtgtgggcgcccgcccacaacccgcccgccccggcctaaaaaacacaagccgcgtcccgccgtcgcgccatccccgcggcccggtggccgccgcgccgccgcgccgtctcgccggctgccacccgcggcccccgtgggcgcccgcgcgtcgcccgccctctcgccgtaccgcgcgcccacgcgatcgcccgcccgcgctcgctctccggcggcgcgcctcgccgcgcgcgggcgtgcggggcggggctgcgcgcgcggcgcgcggtacccccggctggcgtcggcgctgctctcacgccccccgccccgcccccgctcggcgcgagcgcggtccactgccgtctgctgcccgcctccgcga

SEQ ID NO: 123622 - DNA, 656 bp, Arabidopsis thaliana columbia
aaccttcgggccaacgcccccttttaaccgcttctccgaccccttttttcttttccccacccctacctttcccctacctctatcccaacacacgacatgccccaacctcccccccccaccccccttttacctttctagtgggttacgtctccccaaaaaaaaatacttgaactcactctttctgttaattttttctaattaccccccacctatcctttcttcacccctacttctatatatcaccccgcctcataccacaaccccccttctctcccacccccccgcccctctcacctcctttcacgctcaaccaccctctacttcacggggggggatctaacttccctcctccactctcccaccgcaaaatacataaaacgtcacctctcaataccccaccccacccccccacactcgcccactcttccctctcctacccccacctcccacccatcgccctcttccctcctcacaccaccctttccaatcttactctcgcctctctccacccacgtagacgtttttcgtccagcccacacccatggtcgcctctttccacatacatcatcaatccatacaaactctcgccctcccacctcctccctccccttcctcacgcaacaattcacattctcacctacacactctcctaaccc

SEQ ID NO: 123623 - DNA, 512 bp, Arabidopsis thaliana columbia
ccggagtgcgaatggtggacggggaggttttttctgtagcggcggattcaagtgaccggcgcacgcaccgcacgcagccccccccaatttgcccggggggttcgtctcaaaacaaccccgcctgtcgggagggtcatatgagtctttaaatgttgagcaatatggtcactgtagtcattacctacgggtgtgacttagtgtttatctgcgacacttatggggcagagagtatcgaggaccgatcttatagggggtggcacgaacggtcgctttctaacataaaaggcaacggcgcgtaaatcttgtgtgagtagcggtgaagtgcgacaatactatgaccccactcgtccccgctatatacgcttaacaatggcaacatggtcgcccagccatatgacgagatattgacagccgccaaagaactgacgtaagtccggcctaacccgacccgcgaacggtgagcgctccgccacgctacgacacgcagtctacatgtgtgggagagcgtagag

SEQ ID NO: 123624 - DNA, 553 bp, Arabidopsis thaliana columbia
  unsure (1)..(553): unsure at all n locations
ccccttccggcccgaaacccccccccccccgccccgccgcgcccccccgccccccctttcnccccgaagtgggagggcccccaaaacaaaaaacaccccaacccctccatacagaaaagtcccgacgaccgcaacgcgacgcaccacgagaacacacagcaaccacccctcccaccagagtcagcgcagcgcaacgcaccacccaagaaccagccacgcgcgccacacacgacgacccacttttttgggggttggtggggcccnccctgtgcgggggccgcccaaaaaaaaaaaccccccccactaccacccgcccggcccgcaagcccacgccccacccacaccaatcacggaccatgaccccagccccaccacggcaccaagggacaggacgacccgaagcgactggagcgcgcaacccgcggagagcgagacccaacccggcgtagacgcgggcgtcaccacaaacgcgcgacacgcacacgcagcagaagcgggacccgcaagcggcanactcgacggccccccctcgaccaccacgctcgccagggcc

SEQ ID NO: 123625 - DNA, 435 bp, Arabidopsis thaliana columbia
acacctttttttttttatccaccacacactttccaccccaccccacccccacccccccaccctctcccttcccagcccgcacttttcccctcttggggtaacttctcccccaaaaaaacccctcactccccattgtataccgacatctcaccctctccttcccatcctcctccacttctcacctttctcctattctccctctccctacccccctatcccttcctctctcaccactaaacttaacactatacctaccttctccaacctcccgcatctttttttttcgcgtggttgccacacccatcattcttctctttcttactctacacaaaaaaatattacattcttcccgatactcttctcttactatctatcacttaccatcccattcaccaactcctctatcacttcctctctacacattatcaacctctc

SEQ ID NO: 123626 - DNA, 416 bp, Arabidopsis thaliana columbia
  unsure (1)..(416): unsure at all n locations
ccccccccctccggagcgcgggacccaccccccccccgggcgcggcccccccccaacccgcttttcncacggggggggggaggggcgccaaacaacaaacaaccaccacgncgcgcagcgctggcacgctcccgcgcgcgcggcgcgccgctgccgccacggccgcgcccgccgcggacgcgcgcggcgcggcgaccaagcgcgcgaggggccccccggcacacgggcgccacagaatcggagcgcgcagggcggcctcttttagggtgggtgggccccacccccaccaccgcgccgcccccacaaaaaaaaaccgcgcccgccgcgggcgcaggccggcaccgcgaggcacccacgcccgccgaccgagcgcggcaagcgtcgcccacgaggcaggcgggcccgatgcgagccgc

SEQ ID NO: 123627 - DNA, 753 bp, Arabidopsis thaliana columbia
tttttgttttgtatcacttatctcccattattctcctttcctcctgttctcctaccttttttctatcttattccacctctccttcattttcttcgttccctttcccctcttcctccacttcttttgcatcccctctcctcccctctaccttctttttcttcggcttgggggtttttatttttcccaaaacacatcaccctccccctctccttcttctcttcatctaccccttctccactcttccccctccctccccctctctcctatcttactctttctccctcctatctcttttcacactctcgctcttgctcatatgtgtccatttctatacatattctctctccttcccattctcacccttctccctcactcttcttctggggtgttcgtcctctccccccttattattctctgcgatctctattatatctcttattctccgttttattttcctctcttactctctctcttcttctttttctctctattttcttctttctactcctttcttattcttcttctctttccacctcatctcttttccctttctaattcacctcttattgcatcctcccactctatctctctctatctcttctttcgtgcccgttctccttcttttatcatccagcgttccaagcccattttcatttttcctttcatctctccacaatttccatcctcttcttctacctacttcttcattcttcccatttccactatcgctaacagccccaccctcctgtccac

SEQ ID NO: 123628 - DNA, 322 bp, Arabidopsis thaliana columbia
  unsure (1)..(322): unsure at all n locations
ggaaaccccaaggggacccgatcttttttagagggttttcaagggctttttaattaaaccaacgcgcgaaaagggttttgaaaacaaaagtggtgggcgagaattctcccacagaaaaaaaattttttaaaaaaaaaacctcccctttttgtggcaaaaaaaaaaaaaaaaaaaaaaaatcttttttttttgaaagaaaggggcgcccgcctttatcccccccaaagaaattttttttttgtggggagaaaaaacaaaaaaataanantttttttttttttttttgtgggggagagggaaggagattttttttttttttttt

SEQ ID NO: 123629 - DNA, 533 bp, Arabidopsis thaliana columbia
gattaggtgacactatagaagaactatgacgtcgcatgcacgcgtacggaagcttggaatcttttaagcgggccggcccttttttttttttttcccaaatcaatggcctttaaattaaccttagcctttcgggggaaatttggaaccttagggagtcttaaatccgattccactttcgaccaatttaaaatcctttcaagaataagcctggtcctaatcttctccttcactccaataagctaaatatggaatctcataaagattaccttctctatgtgggaatggtatttcgttatccgcaatttcactcatttggccaccaaatggagtgagtatgatctttgcaagccgagcctcgggcgcctcgaatcgtctccaaagatactgaatcgcggttttaggtatcggttcttcgatgaaatcatcttttcccttgaaagatcttgacgttcgtttccgtttcgcaagaatttccattgattctccttttataaaccagagaacagactcaatccaactcatttctctacaat

SEQ ID NO: 123630 - DNA, 498 bp, Arabidopsis thaliana columbia
gacgtggcttgcccgcgtccgtaggctgggttcctttagagcggccgccctttttttttttttttttttttttttttttttttttttttttttttttttttttttttttttttttttttttttgttttgaaaaccatttccccttttttttacctaaggttttggaacttttccccttggacaaaatttaggggtcccaaaataactggaaaccccggaagggggaccaaaaaaaattttttaattccggttaaactttggggggggggggaaccccttttttaacggaaaaggtggccgaaaaaaattggggggttttcttaagggcttccttttttttttttaaccaaccggccgttttttaaagttcaagaacggttggttgttctatgggggttctttaaaaggggtttccaaaaaaaaacaaacaggggtcggaaacttgttttttcttagaacccggaaatccttttttgggttcccctttaatttttttcc

SEQ ID NO: 123631 - DNA, 539 bp, Arabidopsis thaliana columbia
gcacgcgtacgtaagctgggatcctctagagcggccgccctttgggacggctactcactaaaaaactacacacccacgcaaaaaagaaaactcagcacaaacaactacaccaccgaacgaacatcccaaaccggagtttctcaaaaaaaaaaaaatccaaaagcccccgaaaaacaaaaacaaaacaggagggggggaaacgcaaaaatttttttctcgcgggggaaagcgaacaaaaccacagcttccaaccccaagaggaaaaacacgacgacagcacacggccgcgacacgaaaaggcaccccatctacaaaaacgacaaaggaaaaacaacgctcaacaagcgcaagacccaaaccccagcaacctaaacgggaacaacacacagaccccacccgaagcgccgcaggccgcaccacaaagggacgcgccaacagccaaaaaagcactgacccgaaaaaacacagcacagcgcggcaaaaccgcaccaacacgcaacaccacacagaccggcaaaccacacaagggcccaacaagg

SEQ ID NO: 123632 - DNA, 430 bp, Arabidopsis thaliana columbia
  unsure (1)..(430): unsure at all n locations
gagagccaagcacgcctgcaggaaccgggcccgaacacccgggccgtcccacgcggccggcactcagctcacaacgagagaacaggccaaaggaaagaatgagagatcccaccgatgcataacccgaaaacagcaccgtccccaaacctcggccacccgccacagagagccatgagaacctcagccggaaaagccgccccccaccctctcctgataagcggggggaaacncgggcacggaaccccgaatccccgctaccaaggccccaccagaggcggaatccaccgggaccgccagaaagaacatccagaccaaaaacccaccgaagcacgagccgccatgccggacccaacgcaccgaaacccccgaagggacccacccccccggaccaaagccctccggcaaaccccgcgcacagagcgggaaaccg

SEQ ID NO: 123633 - DNA, 272 bp, Arabidopsis thaliana columbia
ggggagccggcaagaggaagaaaaagagcgcacagcacacgggaccaagggaaccagaggaaacaaaccccagcaccgcacgacaaacgcaaccgcgcaaaggggcaccacaacaccccctctaaggggggggacacaagcaccgaaaccaagagacagaaacaaccgcgccaccagggcaggccagcaactacgagcagaaccgcgcgacccccaagagccacgagcaccaggaaagagcaccgcacgcacgagaacaccaagcaacaaac

SEQ ID NO: 123634 - DNA, 584 bp, Arabidopsis thaliana columbia
ctctaccacggactttggaagaaccaaaggacgcgaaagcatgcgacaggatccatatggagagacacaaccactttttctgcttgttcaagcccgactctcccagtgcctacccaacactgggagggctacacgctccgatcacactatcccactttcagccttcccacccgcttcacactgcctaacttcattttctctcggcgcactttactcaagaatttataaattcttccgtaccccacattttcctgatatgcacccttatttatgtttctttcacgtctgtgaacgattattgtgcgtttcgaacacacattctcttccagaatttacatcaatgaccaagcgcaagatgcggatggttcgcgagaggcacactgtgtcaagcgaaactgaccgcgtctgatgccgctgacgacagtttattatgccgatcatttgtgttccgccatattgtcggagccgtcagcgatttcatacttcagccctcttacaacacaaacactcgtgcattacccatactatcgagctgcaacacgaccattcttataacaccgcgcaattgtcaaagacaccatacg

SEQ ID NO: 123635 - DNA, 492 bp, Arabidopsis thaliana columbia
tccttataaaggggccgacctttttttttttttttggacttggaaaaaccataacctaacttataataccatatgtcactggttatatgctcccttccttatccaggtatatgggggaaaagtcctgaacagcttggggtattagaaagtggtgccaggtggaattatgtgttttttaactccgaagtttttggttcctgtctctgggggattcaacatttgggcttgcccaaccttatgcccgaagaaatgaaatttgaggcccattccaaaactggtagtagtccgtgaaccaggaaaggagactcccagaccccaatgacagactttaggggacaatgctgtttccaacatgaaagccaccgtacctgggagtttacaaggggccctttgcatttactgaaccaatggcccgcttttacgtggtagtatcttggaccataaaggggaaaaccggatataagagaacttcccccgacggggaaaaaatcc

SEQ ID NO: 123636 - DNA, 594 bp, Arabidopsis thaliana columbia
agaaatcggggccggggaggagccgaggggggtttcatttttgtgtaattataaagaattatgacgtggcttgcccgcttccgtaggctgggatcttttagagcggccgccctttttttttttttttaccccgtttttttttgcctcgaaagggaatggaaggtatgtttttttgttcctcatgaccataccatgttggctcaaaaaaggacccccttggtttgtaagacatcggccaaggcacatttggttaaaaattaccggtcgcggaacataaaattgtctgttccggcattatgcattccgagagtccttaggggatttattaagctgtgcccgttttgttttacgcgaatgaactgtttcattttctagctcatgcccagccttattattgtcagaggggatggatatactcattaaacacttgccgttaggtgtgtgggatatgtttacgctccatacatgttgaggcacgggcttttgggtgaacatttgttcacttagccggtaacaacattatacctgtagagtgggtccctaggaacctttttcattgggaaatagcggcgaaaatttatgggtaaaacaaat

SEQ ID NO: 123637 - DNA, 361 bp, Arabidopsis thaliana columbia
acgccgtgcggtagaaagaaagatccagaggattattatctaagctaaaaatgacaaaggccaatctcttcgccaaaaacagaccttaccggatcgagatcggtcctcgccttgtgatcttagttttcttcctacgtttacgtatgtttgcatcgatcaaagacccataccctatctggcttatctcagtcatcttcgagaactggctcgctctctcttggatactcgatcaagtcccagaatgggtcccgataaccgaaaacctaactgaccgttctttatagatttgaccggatgggaaatgacaacttgctccgttgattgctgtaaaccgtgatcgttacgaactccatatcaaagc

SEQ ID NO: 123638 - DNA, 432 bp, Arabidopsis thaliana columbia
  unsure (1)..(432): unsure at all n locations
tgaannnnnnnnnnnnnnnnnnnnnnnnnnnnnnnnnnnnnnnnnnnnnnnnnnnnnnnnnnnnnnnnnnnnnnnnnnctttnnttttttttttttttttttttttttttnttttttttnttttttttttntttttnnaaaggggaccaaaggagcttttgaccttttttctcccgaaatcttccaaagacacggatgtgacgaccttcgggccctgacaaaaaagagaagccgttaaattggtgcgtttactgccggtaacaaagttgaaaaagggggaatttccgggaaacatagcgggtggagggcgatgttttcaataatttccagaccatttcttgcacccccttttctttttcattttatctaggttattctggcttttttccttttttcccaatttctttaaaagcttcttttggtttaatgtcc

SEQ ID NO: 123639 - DNA, 567 bp, Arabidopsis thaliana columbia
tgacggcccgctgcacgcgagcgggagcttgtatactgtacagcggccgtccttttttttgtgatgtggggatttaaatgcattagaaaccctcacaagacttacccaaccaggaatgaaagatatattaaagagtctcatcatgacatttgtagctccgggttactttttcttaatggtagaaacatggtggccaaacataggccaaaacgatctgggcaggacaacggaattctcgtgtgttgggctcatgcgattccatgagtatgactgaatttactaacgatgatccaagagtcaagtcatgcgggggctccaaagctgtcgaaagctcggattaatcaccaactgcacctggaaactgagtgcacgagcccttaggggatcaaccagaaccctaggagcatggctgaccccccaaacgtgtctggcaacatatgcgctaggggctcaggctaggacttcaatgcccggtaggttgccgtataaggtgctaaatgcgggtgcatcgaccggactcccggtgagggggacgatgaaggccactttacgcggtcacacattttc

SEQ ID NO: 123640 - DNA, 458 bp, Arabidopsis thaliana columbia
gacgtcgcatgcacgcgtacgtaagcttggatcctctagagcggccgcccttttttttttttttttttttggttaaaaaaaataatatatattcaaaacacttttaatgcgcccagactgtacccacaatatagtaaagcttcttttgaaagatgggttggttgagcccagcttcttaaccatctctcttgtggaagaaacacttgagaatcctaaattggtggatcattccttccaaactttttccggggggtaaaaaacaaaaaccaattaaatggttgctaaacgagaaggccttggcataaacacaacacccccgacggtctgcgtacccgggtttaaaccacagccactccgtcttcccaacccagccccaactcttttgctctttttctgacaaaagcctgatgaagaaactcccccccgtgacacggcactggggattgccaccttagccc

SEQ ID NO: 123641 - DNA, 483 bp, Arabidopsis thaliana columbia
ccatgcacgcgtacgtaagcttggatcctctagagcggccgccctatttattcggttgtttgaagcgtcgatccacgtgcctaacttggtccggaggccacacgaaaaaaccccgatacgtttgttggctccccctccctggggcttaacaacgagtcaagaaactgcgagggatctttcttcaacgtttatagatttacttcgcaaagatgcttctctgatttgggcgccctaattcccgttgattccctccgctatcaacttttcctccacatgctatgctattgatttcgcaagtatccacaaacccacaaaacgaccgatatacatgtaacatccgtatcgattattaatacactgttaatcgtttaggtcactgcgtggttccaatgcttgtttcctatctgcacttgcatcgctattccaacgacacaccgcactctatcctacatacgctaatcaacatcaccccaacacaagaga

SEQ ID NO: 123642 - DNA, 511 bp, Arabidopsis thaliana columbia
gccaagcaggcagagcaaacaacaccaggaggcggcgtcgcacgcaacggcgggccttatagccgcggccccccccccccgcaaccgccgtcgaccacccctcagagaggcaaccgcctttttaaggggggccggaaggacgaaaccccccgacccaacacgaggacccacccccggcaaagcgagacccccagctcgcgcgtaccgacaagaacccagtatccaacacacacgcagagagcgcaaaggcgaccccgcgcaaccaaatgaacaaccgcccccacggcgaccccaggggatccaggacaagccccgccggccccacgaagccacctcgaccacaaggcaaacacccgcgccccagcccacaggtagacacagaggggcacaaacgacacccacctcacacgagctgaccccagacctatcagccacccagggcacacgggatggacccaacgcaggccccgacaacccaccccgggccgttccccgccacggagaaaccgcc

SEQ ID NO: 123643 - DNA, 494 bp, Arabidopsis thaliana columbia
  unsure (1)..(494): unsure at all n locations
gaggggggaaacacaaaacnanaaacaaacaaaaggaaacgagaaagaaaggaattttacaagggggagagcagagcgaagccgaagcaaaagaaaggcaagcagaaaaggggagaagagcagcaagaccaaagcgaacgaaacccgggagcgaggacgcgaggcaccaaacaaaacaccagacgacacatgaaacacaagaacagagacacaaaaacgaggagagatgattgcgaccacagcacaagttttttttaagcgagggtcgtacgattgagtaagttcgcgtcagtggcgtattcggatgcgttatcncagcggggtggaagggggaggaagcgagtagcggactatggcgcagattggagagcgggaggagtagaggagcacagtcagggcacaacgcagtgatcggccagaggaaacaatgatggaagcagatatggaatttgccggcggtttcggtccgagctcacgaccttatacgctacggc

SEQ ID NO: 123644 - DNA, 424 bp, Arabidopsis thaliana columbia
gaaagctggtacgcctgcaggtaccggtccggaattcacgggtcgacccacgcgtccgagcatagtcgagaggaaatgaatcgacagatacaaggcgctattggcgagaatattgaacacttacttgtatcagatacatcctgacacagctcagtagagactgtgaagatcatctatgagaagctatatactatctacacacttgtgttgtattgatcatctagtatgatacaagctgctgcttctctaaagcgtaacgtgctatgatggtgatggggtcactgcatgctacacactgtaggatcaacgtgtatcgctcgctgatcccagaatgatgagtcattactgccatgttgatcattgtgcagtaactgagctgagatcgatgcatagctgatctcaaactagcatgtgaagtatacgg

SEQ ID NO: 123645 - DNA, 482 bp, Arabidopsis thaliana columbia
tgacgtcgcatgcacgcgtacgtaagcttggatcctctagagcggccgcccttttttttttttttttatgcttgtaagacacaaacactcgccatactatgatttttgcctcggagtgaataaggtatgcaacacaacccttttcgtgtataagtttttgttggcttcaaacacttgacaccatgtagatctaaacacggaaacgcctgttttggtttaaaagacgcctttaacaagcgtcaaaaacaacaggttggctctattaagttggcacaagcaactcaagatcacagtctttaaaatggtgtctgcggccgatttgaaatattcaacggaaccttcaccaaatagtatcccctgcctttgttaactattgttccccaaatagtcccctttcccgaatgtttggacaggaactatactaatttgttccacaaaagcaaaaaatgccttcaagttattttttttttttcccagctgga

SEQ ID NO: 123646 - DNA, 223 bp, Arabidopsis thaliana columbia
ctgcaggtacctggccggaatacccgggtcgcccacgcgtccgcgacgagaggaccaaacacatacagagacagagcataatggcgatacaactgtcaagacctgcacacaccgtcctatagagatccatctcagcgcaccgacgccgctgccatggcatgcacctccacacatgacattgcttgtctctgtcaggtgcacataccagacttctacaccagac

SEQ ID NO: 123647 - DNA, 565 bp, Arabidopsis thaliana columbia
tacccctcaccccacccccgccaaaacccccccccccgtttccacaaatgattggccattttagaagaagttatgacgccgcatgcacgcgtacgtaagctgggatcctttaaagcggccgccctttttttctcttttttctccttttctctcctcccttcaaaaaggaacactgatttctatcttgcttacgttgaagggttcatttcgctaacatttccaccgccaacacaaaaaacaatttctcactcccccggaattttttactgtaaccaccaccctatcttattcatcttacaaaactttccatcttcgatattaacccgatgcaccatttccatcttctgatccttaacccgaccccccccggacgatcattacgaaccggattcaaccctaaacaccttttttgttagaaggcaaaacaagtactgggtcatttcccacttcacatccgttaacccctttcttttcctgaaaaaaccctcttcccccgacctcttacccattgatttacccccccaccaaaatctccctccttcaccgctacgtccccaccaatcaa

SEQ ID NO: 123648 - DNA, 220 bp, Arabidopsis thaliana columbia
cgattgattaggtgaactatagagagctatgacgcgatgcacgcgtacgtagcttggatcctctagagcggccgccctttttttttttttttcaaaagctcattctatgaatcacaaactcacatgctttgatcgcgtttcatacatttcttgaccaacacgatgcgtcaccaaaacgaaatctctttgtacttttgactactatactaacttcctttct

SEQ ID NO: 123649 - DNA, 529 bp, Arabidopsis thaliana columbia
  unsure (1)..(529): unsure at all n locations
tgatactgnnnnnnnnnnnnnnnnnnnnnnnnnnnnnnnnnnnnnnnnnnnnnnnnnnnnnnnnnnnnnnnnnnnnnnnnnccacgcgtccgccacgcgtgcgctcctgaagattccgaggtatcgtcgctcaattgattgctgaaggggataagctatagaagttttcttctagagcacaactactgctgccttcagcggctaatccgttaggatagacatcgaattcagatatttctgggagttttgcgagattactctggtacgtacacatgagatctggggcgatgatatagattcaactggattaggattcagagctgcgacatctgatcatcctccggggctaaagcttttgtgaatagaaagagatctgttgcagagcagcgatctattacgctaatgaaccagctatagtattgtgcgagacatcagaagacctcaatgctgttaactttacgtgactctccggtaattatccagatctccggttatctgagagctgagtctggcaaaccgattcgagtct

SEQ ID NO: 123650 - DNA, 527 bp, Arabidopsis thaliana columbia
  unsure (1)..(527): unsure at all n locations
gacgnggcatgcacgcgtacgtaagcttggatcctctagagcgggccgctcttttttttttttttttttatggagttggccctaatccccttcttaaactaatatatgaggaattttggaaaatactggaaactttttgttttacaatttgccattccctatttaacccccgacccagatagatgttttatgcctccttttaaagtttcctaatccttttttagaaaaaggaaaaaatcacatttcaccttatgttcctttccttttggttttcccaaggggttggttttttgtaaacagggcccattcggaaaattttttaattccggtggcggtttggttgataattgacccaattaaacacccggcattcgttgcttactctttgtaaaggcaatattttgcccccctcttagttacaggtacgccccgggcagaagtttcatttttttttgtgggtccctttccgcggggatcggtgcttggaacttggcctccctaaggggtcccaaattgtgggccttgtt

SEQ ID NO: 123651 - DNA, 547 bp, Arabidopsis thaliana columbia
tcacgactcacgttagggaaagctggtacgcctgcaggtacctgtccggacttcccgggtcgacccacgcgtgcgtacggctggagaagaccacagaaggcgaacgcgagatctttattagagagacgccttgctaaaagggtctctgtatttactaattaaagtcttcaatcttgattctgtaaattacggatatttctgagagacaagcaaagatgagttttttttctgcgggtctgcaactaccatctaagatgaacccagtctactcagacaaactgagcactaacttactctgtagcaccactcaaccatctaccatgagaacacatctatagtacgtgtccaacacggttcgactccaccttccggatcctccaaatttcactggtctcttgaccacataatactactacccgcttccaccgctttcattatttacctactcctctccatgtcataccgtttacttaccaattcctctcccccatccattttattcctcgttactgtcacaccatcaaatttccctttagagtatctcttt

SEQ ID NO: 123652 - DNA, 519 bp, Arabidopsis thaliana columbia
ctgaagctgggtacccctaaagagggccggcctttttttttttttttcccaaaacaagggctccaaaaaaacacacaaagccccttcccgggggcacatccatagacaccaacggggaggacaaaaaatccggattcacccccttcccaacccaaacacaaatctcttctcagagcaaaaccccgggccttaaatcttctttcgtccatcccaatctttaaaaatgggaacccaacaaagaataccccttcccaatgggggaaatgggcattcaccagaatcgcgcaatccacactcactgccgcccccatccggcgatgacgacgaccatttatatcccaacctccggaccgccgagactcgacgacaaaagagactgaaactccccggtattaaggagccgcgctatttctgctggacacacaccttctcctcatggaaacgatatcttgacacacgccccaccggtcggggataagatcgcacccgaaacccgccctaacgaacaaaagaaaacac

SEQ ID NO: 123653 - DNA, 689 bp, Arabidopsis thaliana columbia
ggagagcagccacgcctgcaggtaccgggccggaatacccgggtctacccacgcgtccgagaacctggagatgatgagatcatcgcttactctgatcatatatctacatgtggatgaacctatctctttcacattcgcctccgacttcagctcaaaggaccaaccatgaaaactggctcacctgtctatatcacccacacacaccaatattttgtcagggagggatacactccatcagacgacccctgccgagtctctgcatctccgaactccttccctacccagaccccacgaagcctgtgaccctccagacaccctaaaccaccactcactccatcactccgcggcgaacgctaccagatcgcgcaagctacaatcacaacaccgcctgcctcaccggtctaccgcaggaaacacatggacacgagccacagatatccgacgggcaaccaaccgcaacaagagccagcccgcccgcccaccctggggcccacgaacaggcgaatccagccctccacaccccagaatcggtcccctaggccccaccccccaacccccgccgagcaacgcagggagccagagccggcgcagggaccacctccacttcaccgccgcctgcaccgcgcgtggcaccgtgaaactacccacagcgccgggaccgccactcgttaaaaaacccccactacacc

SEQ ID NO: 123654 - DNA, 440 bp, Arabidopsis thaliana columbia
ccgccttccttagcctggattcttttaaaggggccgccctttttttttttttttttcattctttatatataggataccactttattaaattccattccataccttatttttggaccgaccatatttaaaataaatggtagtctttctactcccttaaaagaacctggtcaacgaccatttgaaaatttagttccgacgaaccataaataggcttggtcgtttcctaagccaagcgctgccatttttgggcctttggcctcattttctttccttggcccccgcccatgagttttttaacaaactcctaaacctcctcctttctaaaatgttcaccgatctccatccccactttccatttatcaaaacaatatttacaattggtgttgctgttcccgcaaagaacggccaacaccccttgggaactccaccgggagagactt

SEQ ID NO: 123655 - DNA, 494 bp, Arabidopsis thaliana columbia
  unsure (1)..(494): unsure at all n locations
ggaagctggacgcctgcaggaccggccggaataccgggtcgaccaccgtcgcggcgcggtgtcgccacgcgtacgccactctgtcagccacagcgtcgatgtttgtttttggatacaagaaaagaaaatggngtgtcatgctgntacangcggacaanaaccacacgtagtttgataccttatccggctcaaggctatatcaattcgatgctcacagtggctaactcctctatgcagatgctgcatgtaccttcgtacactactacaccataccagattatctagcacgggtccaactccttgatggcttcttctttcgtctagccatcctgacgttaccgagaacaagactatgagagactaccttggagcacataaactgtaatctcaagagcttcgcgacaccacaagtgactccgaagtgatctccacggcaaactatctgtctgaagagtgttcagtgcctttgccactcgtggcttgctgcacctcaa

SEQ ID NO: 123656 - DNA, 471 bp, Arabidopsis thaliana columbia
ctggcccccttccttaacctggaatcctttaaaccggccgccctttttttttttttttttttttttttttttccggaaattggtttttgtcatccttggcactaaagttgggggggcattttacaacatttttttaatatttttacatgccaaatcaaactaaaatgccaaatggtaacaaggttgcaagcttacccacatgaaattaagaaggggttcccttagccagtgaaaaccctcgtggataactagttaccaaaaatttacttgactactttaacagttcacatttcctaaacacacaaaatcaccaaacttgactttccttcctttcttgatgggtatcagcatttcttcgataacaccttgctttttctgcatcttcttataccgaactccttaggtttttaccccaaatttctcctgaacacccgcaaatcgattttccgttttagaacgctcctttttgta

SEQ ID NO: 123657 - DNA, 487 bp, Arabidopsis thaliana columbia
  unsure (1)..(487): unsure at all n locations
actttggaagctggaccctgaggaccggccggattccgggcgcccacgcgtcgccaccgtcggaccttattcgagcgcttaaggactgatttgttatatctgccaagagagtacaattctgaatggaggtatttgcttaaaaaatgaatctacaaacagaattgctgtgcaggtacttacgattccaggatttgtataggatgccagccatcgctgctactttctctctgaaggaggtggatctgagctgatctactatgattgtgctagacctcgagtgctggttctctgagggtgctaagtctcacctgtgaatcttctcattgactgtgtctgcagctaagacactcgatgctcatgaactgtgtctctgacacgatgctatttgtcaaagtcttgcctgttntagatcggcacttctactcatagagatcagcttgtgctacccagataacgtggcagagttgcaacagtcttagattcagct

SEQ ID NO: 123658 - DNA, 464 bp, Arabidopsis thaliana columbia
gtccgtaagctggaatcctcaaaagcggccgcccttttttttttttttccaattatcctcaacactttttctctttgaactatctccaggcctgctagatctgccaacacttttttacggctctttctccttccgtacaccgcccttttttcttctacgttcaaagtaacgctggacatcatcatcactctcttcattgcccacctctcttgacctttccttttcccggttcctcctactacccctttttttctaacgctctctcctatccttatttccactttcccgttcccgcctttttttttctttaacattctccttttcccggtcttaccgttcccggtctctccatctatttatccttataccttgctctgactttatccttcctctcttcccttgcttatacctttaccaacattagccctacctctctcaggatctaaagccctctttcattgtta

SEQ ID NO: 123659 - DNA, 477 bp, Arabidopsis thaliana columbia
acaagagccgcccgttcatttggccttacagacttgacgtccatggcccgcgtcgtaagctggaccttagagcggcgcctttttctctccaccgccacttacacccacgaattcgggtatcgaccgcgtgccccccactttaaccaccgttgctactatgaccaacgccatccttcccccacttttcaccctaaagttccgacctggcccgtatcttgggaaccttaaccagcccatccttccccactgaccagacgcctcgcacacatttttactagagccggaacttcttccgtctccccttggcccaaatcccaaccatagtaaatcttggcgggacaacacaaccccactttttgtatcgcagtctttacccccaatttatcacccaaccagctaccctccttcccttgtccatcctacccccctcaacatcgctagaccctcttgttaaccgatcgacgccacacaacccgc

SEQ ID NO: 123660 - DNA, 236 bp, Arabidopsis thaliana columbia
  unsure (1)..(236): unsure at all n locations
gcctgcggaccggccggaaacccgggctgaccacgcgccggagcgaacaaaaacaaaaggcnacncaacggcgacaaggccacgccggtccgaggtcagaggacacgacactcgtcgcacagcatcaggcaaccctacaaagaacacgtacgaagaaaaattcgaacgctcaaagacgacttggagcgggagaanggccggaggacnncaccggagcacagacgcgccancgagga

SEQ ID NO: 123661 - DNA, 416 bp, Arabidopsis thaliana columbia
  unsure (1)..(416): unsure at all n locations
ctactatagggaaagctggtacgcctgcaggtaccggtccggaattcccgggtcgacccacgcgtccgactgagcaacacaaaatctggtgaaccaacggtgactgctgactaagaagaccggcaataggccgagtatcactacgaatgtcctcagaaataaccacgaactactgcacngagctcagagatgttatctcctgcggaggtacagactatgtgctaccaccagcaattctcgaacagtgtgngtctgatgcatgacgtaatgttaccctatgagagagagccgaacncttatgcatcatgcgacantggacgatgaggtcatagagagagaaatgagngaagttctctgtggctcctccaccattgattaccgaatcagatgtgactaaagaatgtgatagctcaatg

SEQ ID NO: 123662 - DNA, 505 bp, Arabidopsis thaliana columbia
acttgggaagctggtccctgaggtaccggtccggaattccgggtcgcccacgcgtcgacaatcattcaaagcaatgcagtctagggttatttgatcaggcagcgatcggcacaatatcgcactagactctgctacgtaggattggtctggcagttgaacgctcgaatgatcggatcagcagtccactgctctaattaattgtcgaatcttggaagttaagaaaggtgtactcctacggccttgtatgggaaggtgggtggagtatcactgtgatcagtatggcgaaagctgtgagtagtcttcagctgaggctgagctccttgtcttcccaagacggattaattgaatatcacctctgtctattgggaggattggatgacagcatacatttaaacattctctcacatgcttaatgtctcttacgaaccgctgatggtaccgggagacttatggaagtgtcgacttactgatgcttgaagagattgagagctgtctcgttaccatc

SEQ ID NO: 123663 - DNA, 515 bp, Arabidopsis thaliana columbia
agctgggagctcctgaagaggcgcccccctttttttttgtctttgagaagcgcggcggaaatcatcacaatcactagggctctgttacaaagcacaaatgcggtggaaagattacatcacgccgaaggagcggtcctaataacttcactgggaacagattcaaggctcactttttttgatgaccatggagttctttttattaggggcggcgtcacaaccatcgatcgacccatgcgcttgtgcggaaccttcagaacgaaaagcaaccccgtgatattcaatcgtagggaaagcctgggaccgtttggtagttcggcatgaaaccggggcaacgagcaaatcattcatcgaccaacgccccaaagagacatgccggagtccgaaacgtatgggccctcgatgtaggcaagggcgccctcccatttgacccctctccgcgggaaaaaaccatgtgagggaggccttatgccgtgtgggacggcagcgctacccggagggagggcgaaacgattccc

SEQ ID NO: 123664 - DNA, 487 bp, Arabidopsis thaliana columbia
gggccctacaaaaaactttgccggccaggcccccgtccttaaccttgggtcctttaaaccgcgcggccttttttttttttttttaaataaaccattgtgtaccaccacttggggcactatcgttctcttccaaaaacgctcatgggaaaaccctcccgtcgcagagaaaccccggtggtgccatcaccccatcttattgctggaacgcatcaggttaaacgcacccctccatagctcttggctgacgcggagttaactccgttctatccctctaatataactccctttccccgctgggcatccaatagagggcaacccaagatggcccgaaccagtaagagcgcctgtgtctcgcacaagagatcatgccgtatataacccactaagctagccaatccgcgcgatttggccccctatgcgcgagcctaccttatgtgggacggtgcctctgcaaattgccccaccacttcgaatcacaacactgtgc

SEQ ID NO: 123665 - DNA, 674 bp, Arabidopsis thaliana columbia
  unsure (1)..(674): unsure at all n locations
acgactcaccttanggaaagctgcgacgcctgcaggtaccggtccggaataacgggttgacccatgcgttcgcttcaacaaagatttgtctacgctcggaatcttgaaaccgagctgtgatgatgtgtgttagaactccatgggtctcggctatgatgaatccgaagatcactataaacaggatgtgtttgtcctacaaagacaccaccgaagatcgacacttattttttctgggggagacacacgctatggatgaacattcacaaggtcgccatctaggagtggtcctcgcctgctaaccaaacatcccgaaactacattaaccgcgacactaaactgggcaatcacctcctaaatcttctccgtggactattataccccgacgatatgtctcgcttactagttcaaaaacttcctatggctattttgttgtgtgatagacacttctccaatttccctttagacctctcaacattgttgtcacttgggtgccattcacaagaacctacatcatctgtttggccattatccattcccctaatcaaagttacggtgtaagttaacattcaccttgccattgatccactcaatcgatcctttggagtccaatcttataggcattttccggccaataactccccatctttcctcctctgtccattgacccgcttctc

SEQ ID NO: 123666 - DNA, 398 bp, Arabidopsis thaliana columbia
tcgactcagttagggagagctggtacgcctgcaggtaccggtccggaattacggggtcgacccacgcggtcggtaaaatcatatgaagaagttatcggagaaaaatggcggagaacctcgtcgtgaccgaagatgattgatatagtatcgacctttgctactttctgaaagacgtcgattctaaggactattggatacgcaagagcaggacggcgtacgcgcgggatcttttttgtatgggggggctcagagagccttcaatggaggagcgtgttacgggctcttctgaactgctttggagctttcctcttctacttcattgtgcagcacgtcaatgtaccatgggaactggggcttcatgcccacttttatggaagatcgtacgccatggaagggta

SEQ ID NO: 123667 - DNA, 527 bp, Arabidopsis thaliana columbia
  unsure (1)..(527): unsure at all n locations
cccgcggaccggnccgaaacccggcgaccggcggcggaccccaaaaaaacggccccggaaggggggacaaaagccaccgagacccaaggaagcgacgaggccaggccgcaaagaaaccccgagaacaaacccaagccaccccccgaaccaccacagaccacncgtgaaaaggggcggacccaaaacccacagaacgaggaaagccaccccccacgggcgggggggagcggaccacacaacaaagcaccaacaaagcccccgagccggagggagaaagcggcaccacacacacgcgccccgagagccaccccaaccccacccaagggccaaaacccacaagcgcgaaaagaacgaagcacagccgcccccaagcacagaggcgccgcgcccagcccaccaggagcacaacggcggccacccagcacaccccccccgaaggacgacaacagaccacccgaccacccagaagcacggcgaggagaaggaaacgccaagacaccacccacacagcccgcggcggcacagcg

SEQ ID NO: 123668 - DNA, 415 bp, Arabidopsis thaliana columbia
gtctcacattcgtccaaacggctacgtttccgtatcgttgtcggttctgctttaccctcagtctgaagtgccggccgcacgatctgcgtgtactacgcacacgttattcgctttctcgcttttccaacttgcgggcttctcacatctagctcttacccgggctatgcgcgatgaactagtaggcgaaagcgttcctatgatcaggtagataggtgtatcatcgcgtcgcttatccattattgcttttccgcgatcgtcttttttatctgttcgtttcgcttccgttagcggtatctagtacatttcgcagtggtggcgagttggttgactttgcacaccggtattttagttagatcgagatggaggttgcgcgatggtgtcgtaccctgatttccttcggtgtccataagcggag

SEQ ID NO: 123669 - DNA, 500 bp, Arabidopsis thaliana columbia
  unsure (1)..(500): unsure at all n locations
attgannnnnnnnnnnnnnnnnnnnnnnnnnnnnnnnnnnnnnnnnnnnnnnnnnnnnnnnnnnnnnnnnnnnnnnnnctttttttttttttttaagacgtaaacgttatggttcaatatattataagtggaactgagttcttaatagcatgataacagataggcagctctttattagtataggtgcttgccaggagctgtggtggccgagaccactatggcaacacagaaggtgatggcatttacactgagnacaagacagacacgaatcgacgtagataagactaaggcgaagcgagattgagttttacatttggtttagtcttcccaccattgatgaacaacacacctctgcctctagagtttgaagcatgttgatgcagtctgacttgggtntgaacagcggaggaaaagctcattcacgtagcatatgactcctgttnccagtaaaccagtaaggaccttcattccactgggttggngttcatctaaaggactac

SEQ ID NO: 123670 - DNA, 218 bp, Arabidopsis thaliana columbia
  unsure (1)..(218): unsure at all n locations
atgatactccagctctatacactcactataggggagctggtacgcctgcaggtaccggtccggaattcccggtcgacccaccgtcgcggacgcggggtcgcccacgcgtccgcccacgcgtccgccacgcgtcgctttttgtttttggcatacaagaaaagaaaatggcgtctcatgctgttacaagcngacaaaacacacgtagtttgatacctttc

SEQ ID NO: 123671 - DNA, 479 bp, Arabidopsis thaliana columbia
  unsure (1)..(479): unsure at all n locations
cgccttccttaggcttnattcttttagaggggccgcccttttttttttttttcttttttttgggggttgggttggaaaaggggaaatatattatatatctatgcgtttaactctgaatatgttggataccaaactggtattcttggataaacaatttattgaactgtattaaacttttaaaaaaaaaaaaaaaantaaaaaaaaaaaaaaaaaaaaaggggggannnnctaaattattattttttaaataaantggttttttaaattttaaaacttttttctaaaaaaaagagnnnnnnggggnnggggggggggtggttttctttttttttttttttctgtgcgaccctccccctaaagaaaaaaagaatgcccaaatgggggttggttttttgaagccctgggcttcccccccccttaaaaaaaattaagataaattgataaaagaattgggagcgggctttgcgctttcttttttt

SEQ ID NO: 123672 - DNA, 456 bp, Arabidopsis thaliana columbia
  unsure (1)..(456): unsure at all n locations
gccaagccccccgtaccgaaggctggaaccttaaaaaggggccgccctttttttttttttctttaaaaacaacaagaaccggcacaacaggaacttcttaatggcacaacaccgctactcaagaacggacctctactcaaccaacgacctatcgcaacaggctctagcgagccccaccgcgacagaaaggaacgttccaccggcctacatctttgtttcgcacgaaagcgcaccaacatcaataccgttaagaacatgcaattgtcaccgccccaattaccaagaagcgggccccataacccgcccagaacacatgtcccggtggtttgcgcccagaacccaatcgtctgagttgccgacacgaatagtttcagaaaccgataccccgcgattcgcccccgccccctctnatcgaccttccaacctgaggacagcagcccgtagcacaagcaacag

SEQ ID NO: 123673 - DNA, 345 bp, Arabidopsis thaliana columbia
aagctggcacgcctgcaggtaccggtccggaattaccgggtcgacccacgctgtccgagatacatctaatcacagacacactcgataagtctaaactcatcacccatggcttcgcaagtcagacctctccttcaggaccactcaaagatacctaggagcatcctgttcaacgaccctctgtggccctagcgacgacaataatattttaatggagtggcaccattaccaggcgctcctgacactctctcagaaggaggcactctcaaacgcgaatatgacattctcgcgaaaccatccacaaaatcccagccaccgtgaagactacctacggattatgacgacctc

SEQ ID NO: 123674 - DNA, 441 bp, Arabidopsis thaliana columbia
gacggcgcaggcacgcgtacgtaagcttggatcctctagagcggccgccctttctttttttatcctaatttttttcttcttgccacgccgaagggtccaaaatgagccaaggaatcaccctcctctttagtcactccaaaattgaatacctatgactttttgcattgacaagcaggagaggtacactacgctattgtctgtacacatcacgtaacgcgcttttcgaatcgtgaggggttattttatttatttagatatgttgaccctgatcaaattatatacggagctggactttcttcggttcttcagtgcattgatccaaaagggtaaacgatgtgtgttgctctatacattcccgccttcgaaggtacttaattcgactgtcctttcttcttgctacgcgcgaaacactgccttttcttggctgcccaacgaaatgtg

SEQ ID NO: 123675 - DNA, 310 bp, Arabidopsis thaliana columbia
  unsure (1)..(310): unsure at all n locations
actacacactctagggagagctgcgccgcctgcaggtaccgggacgcgataccacgggtcgaccctacgcgtccggtgacagcnntgaattccccagatcattaagaggctatcgaaaatgggcgatgatggtgacacatgaacctacctttctatagagctaagacttcagaacttgttccagatagcgctcgacccgatgagatcaggaagcccaaaagcctgttatagcaggtgggaaaattgttgagcttcatggaacagaagtccaaagactaccctagctggacccaatgaatgggggccctac

SEQ ID NO: 123676 - DNA, 504 bp, Arabidopsis thaliana columbia
ctttgacgtcccatgcacccgtccgtaagctggaatcctttaaagcggccgccctttttttttttttttaaaagagagacattgggaacaaatcaggggcggacaatcacgacagagattatatccattatggctcgccttgttccccaccgggaactagcttactgcacctgttgcaacaaatcaccatggccaaagatctgctatggccatcaataattgcctttacactttcccacatatgttctcgattgcttaaaacaataccattggagcccaaaaaaaatataactaccattcaacttcgattcttggtgtaaccttagtaccgaaatgcccagtattctggaaataaaattttcattctgttatttaccatcaagtaaacttcccgccccaaagttgggaaaactgacccgcactaacctcagaactggccatccttcgagaacaaataacacaaatctgatacatgtaccaatagacaatttggtaaatcgatga

SEQ ID NO: 123677 - DNA, 494 bp, Arabidopsis thaliana columbia
  unsure (1)..(494): unsure at all n locations
gaagctggacgcctgcagaccggccggattccgggcgacacgcgtcgtgtaaacagagaattttgctgggctcgtgactctgagagaaaacttttcttgtgacctcgctagcatcaatggtagatctgcactgactcatgtgatataccagcgactgatgtttatttgacagacgtatgctggacatgctatttgcaaactgcagcggaggatgactgaatctttgctacactctgtatcctctcgacgccgttccatggcaggtactaggagagacaaagttccttgttgcagaagngatggcattcccagaactcttgtgctctgtcccacctttacgagttgtgagatgtggaatttaagtttgtgagagctgatatgcaatcagctccctttgatgaatagcgccaaaccaactttgccactaatctggggtgaaaatctatacatcaggggtaaacaagggaggtgccatgtcgagaggataacaccac

SEQ ID NO: 123678 - DNA, 619 bp, Arabidopsis thaliana columbia
caccatgtggcgcggcacacaatataaatgggtaaataggtgccacggggagcgcggaatcccggagtggtcgatttcctttcgcatcacattgcccaacccttgatttaactggataggaccacccatgagaatcacacaccaacaacgaattttttttttaggggggagactacccacccccccatcccccattatattgattaaaccgcccttgctagctaacgactgcatgatctttatttcatttaacccactcgggaggacgggacgactggtagatgagacaggtgtacatgcccgcggtgtcctttacagcacgtcctgccgccctataaactagcacggacacagggctgcagtgtgaggatgcgcttgtgcccctgatcctagtcgacacgtcaccctccccaaggggggtcacgtgtttggaccacatcccaccccaccccatggtttgtccgccgttccgcgcaaccaacctggtgggagggactggtccctgtcaattcacatgcacaccacccacttgacatgttgtttacattgttattgtcaatggtccaatgaccacattaccctggtgcccccatctgaattggccacccctagccgctca

SEQ ID NO: 123679 - DNA, 136 bp, Arabidopsis thaliana columbia
  unsure (1)..(136): unsure at all n locations
ctgcaggaccggccggaaaccagggcgaccacgcgccgacacctgacgggcacacagaacgaatgacggcaagcagagatcgacagaaaatgcggggagacaccgacacacanaaaactgccgaaacacacagcag

SEQ ID NO: 123680 - DNA, 479 bp, Arabidopsis thaliana columbia
  unsure (1)..(479): unsure at all n locations
cacgcgtccgtaagcctgggatcctttaaagcggccgccctttttttttttttttttggaaggtacctgatcgaccgaaatcaataatccggtaagggggggttcattattaagtatatacacggttattgtcctttagtttttgagaccaaaaatagagaagctaagctattaaatccaaaagatgaatggtttttattgaatccagtagaagaactcttgcctgagccaattatagcctcaaagttcaccatcaaactcaaagagtcaccgaactaaggtgtttgtatttagaaaagattcaccaatattctcctccacctacaaacgacgacaagctcgagtcatcctcaatctccaaatatgcctcttcatcttcgncttcttcttgttcgtcttcgctttcaccttcactttcaccttcagcttcaccttcacctttaactggccaggagaggtaagtttcaagctcactttga

SEQ ID NO: 123681 - DNA, 397 bp, Arabidopsis thaliana columbia
  unsure (1)..(397): unsure at all n locations
gaaagctggtacgcctgcaggtaccggtccggtatatccgggtcgacccacgcgtcctgcaaaactgtagagatgcacagagatgctacataagttgagtagaacgattgttcgtgatgaatgctatggaaattctggacactgcctgttcttgatggatgctgaggatgttagtgatgtgtttaccgatgataccggcacagatactgtgctaggtatagatcnttaacacattggcaatcaacggtgcattgtctgtatatgattcatcattccaacgtatgcataatctccactttcttacagattccgagaataggcggcggtggagtggtgaaggcatattgcctctacctcagggtctcaattatgtgccctacaactgagactactacac

SEQ ID NO: 123682 - DNA, 483 bp, Arabidopsis thaliana columbia
gtggctggcccccttccgtaagctggaatcctttaaagcggccgccctttttttttttttttacataggagtcaccgaattatgcaaaagtgaatgggtataaaatgatggttggaataataggggttggtattaatatatatatacttagcttaaaataaagaagggttaatttattgaatgaagttgaggagtagtggatctgcgccaaatgagctcaagctcacgagcgaactccttctgcctcccaacaacaatggtgatgtggtctttgtcggggacgacgtggatccttgcacgtggcactttcctcttgacgccgtagctgcactccacggggatcagctcgtccctaccgccgtggaagactgcgacctcacagtccacgttgtcacggacatggtccaaataagcctctactttgctccccgatccgaaaatgatgttgtgtagtgtgtgccatgacgcgttatgtgtgtgaca

SEQ ID NO: 123683 - DNA, 469 bp, Arabidopsis thaliana columbia
  unsure (1)..(469): unsure at all n locations
aaaacccccgacaacacaacaagagaaagaagcgcaaacacctcngtgtggccagaaaaaaacctacaagggcaaaagcccccgaccaaaacccaggaaccccaaaaagggccgccccaagggaacgacgcagcaggagccagacacccaccggaaaacagggcgaacaagccacaccacacccaaccgccggaacccaggcaaggcaacacagacacaccccgaccaagcaagagccaaaaaggcggcccaaccaacagacagaaaacaccacacacccaccccaacaaacgagggggccccaaaccgaacgacccgaccccaacaacaaaaaacagcacccccgggacaaagggccacgaaccagacaggcaaaacgccccagccccaacacgaacagggggaacgaagangagcgaccgaggcaccggaaaagagagcacaacagaacacaaaaacacacgccgaa

SEQ ID NO: 123684 - DNA, 416 bp, Arabidopsis thaliana columbia
gcaggcacgccgcggaccggccggaataccgggccgacccacgcgccgatcagcgtcaagggaacacgcgacaccaggcacaggaccgggcgacacgaagaccaaacccagagacgcacgggaccagcacgcgcacccagacctcgggagtcacgcaagacgggcggacgccgccttttaccggggagggaacccccaagcgaccgacagaggaccaggagcagcaccaaccccagcaggaaaaaaccggcccgcgccaacccccacacaccgcgaacaagaaccaccgagaaacccacacaggcgggaccagccacaggacccgaacgaccccccaccaccaaccccagaccagcaacacccggaagcgcgccctccaaaaggcccgaccacacacgggcgccagagccaggccc

SEQ ID NO: 123685 - DNA, 565 bp, Arabidopsis thaliana columbia
  unsure (1)..(565): unsure at all n locations
tgannnnnnnnnnnnnnnnnnnnnnnnnnnnnnnnnnnnnnnnnnnnnnnnnnnnnnnnnnnnnnnnnnnnnnnnnntttttttttttttttttttgtaaaaaagacaggaggcataaacttagaagcaccagaaagctggattacaagttacgatccgggttaaaggacaaaccaaattaaattaaaaagacttaaaaaaaaaaaggcaacaccaaaatataaaaacatttaactaaagcaaacaaaaagatccatttgattgatcccaaagaatcgtacaaactaacaaaaancctagaaagaagggaaaacatttaaattaaacaacaccacccaaaagtagaatttaaaagaaaaatctctttacatttaatctctcaaattaatcatantgaatcactgattagaagagtnagttgttgggtgttgggtggtttcttaagcattgttcttggttgttatgcatccaaactttgaagacttgtctcttcactccgatctcgccgcagaatctcttaagctcttcttcgtcttgcttgttcatcctccaccctagcttctcc

SEQ ID NO: 123686 - DNA, 380 bp, Arabidopsis thaliana columbia
  unsure (1)..(380): unsure at all n locations
agaaggacctttcgaacgaggccaagccccgccgagcagcaggccgggacacacagaagcaagaaggccgggacccgaaagaggccggagagagcccgggcacccaccaccgcggaagcacgccaaaaaggaacccgaagcaaacagcacaacaccagagaacaaggagaggcaaaccctgcacggagagcacagcgagccaaccacaacacgaacaggcagcgcccgccacgggaggaaagagaacgacggacgcgcgacccgcagtttccgacgcgaggcggcggccagagcaggcaagagcccggaaccggaagggaaccacagccgggggcgnacagcacaagggaacagagcgaagaagaccgaggccgaagaaa

SEQ ID NO: 123687 - DNA, 401 bp, Arabidopsis thaliana columbia
agaaaagaaccttttcagacaccacggcaacacccccggcgaggccagggaacccctcccggaaagggacgacccgctctttcaccagcatcacacacgcacaaagcccgacggaggcccaacaagcagagaagacaagaagcaccagaggcgcgcaacccacagaagcacgctataactaccgaagtggagcaggccaaacagaacaatgcgagaaggagacgcggcctcccctgcacgaggggaaggaaagcgacacgccccacgcgattcttcttcaccgggcgcgggaacacaggacgagatcgggtgcggtaccggaatcacagcccagatccaccgagcggggcgaaccaaggggacggcaaccaagaaccaacacaaaagacgaagaagacgag

SEQ ID NO: 123688 - DNA, 400 bp, Arabidopsis thaliana columbia
cgcgggaccggacggaaaacaagggcgaccaggggcggggccagcgggcacaacaagagacgacgacacggggaaccagcagagcgggacccaccaagacagcgccaagcacaggacgaccaacaacacccgaccgcaggcagaaggagggcggcaacgccacgggagagcgacgcccacacaacagacggtcttttctggggggggcggcaggacacaccaagaccagcggggcggggccgaccacacgcccacaacacgccagcccgaggacgggccgggagcccgccagcccaacaagagggaccccgacggcgccggagccacacaagaggaccgggaacagggcaccgggagccagagcaccacccagacccacacgcgccaagaccaacgcaga

SEQ ID NO: 123689 - DNA, 645 bp, Arabidopsis thaliana columbia
caagagtaaaaacccgctatcatttttgggggactttagaaggaatttggacgggcgcatagcaccgcctaacctaaagctttgggattccctttaaagaggggccgggcctctttttttttttttatttctcgagaaggagaactggcctcgacaaaatcacaaacctagcacggaaggccgacgtccatcatttaaggctctgcctccttcttagagcccgggcgtcctaacaccccgaaccccaccgactcgagctatataaagcctaacatgaataatggctccaattatagacaccacctaaaaagaaacgttggggcgggagcacattaaactcgcctatcatggaccatcgctccggacctaaaaatgggttgttctcgagcagaacggtgaatcggacttcactagaaccaatttctacactaggtgccccggcatacggcactaaaaaaaaaacaattgtaacatctcattcgttcatgcccccctaatgagccgagtcggaccccaatgtcataaatgctcctctagccccagaatgctaaatcgtctaagacccgcaaagcctccgacacgaacggccgatacaaaccgcagtggagccaccaataaaaacaatagcgactctcgccacccttc

SEQ ID NO: 123690 - DNA, 456 bp, Arabidopsis thaliana columbia
acgactcactatatggaaagctggtacgcctgcaggtaccggtccggaattcccgggtcgacccacgcgttcgcggacgctgtgggcggagttagagagagagagaaagatatagagagaacacagagaggcgagagcgacgtatggttggtgtttcgtacggattttcttggtcaatcttagattcttcgtcgagagattgcttttaaggaatcattattgtgagaaagagaagacggatgctccatctgaaggaggtgaatgttctgggtctcgtgaagattgtcattcttagggggaggacgtgtttacagcgaggtgttttaaagcagggaggaggacaccacaaaggtggaaggtgttatactccgtaactctaacaagaaagggcgatggtgtttatgtatttggtcgtccaccatatcggtatcatgagttttgttgacccaagagttc

SEQ ID NO: 123691 - DNA, 422 bp, Arabidopsis thaliana columbia
  unsure (1)..(422): unsure at all n locations
nnnnnnnnnnnnnnnnnnnnnnnnnnnnnnnnnnnnnnnnnnnnnnnnnnnnnnnnnnnnnnnnnnnnnctttttttttttttttagtcgaaattgcaatggccactctagaaaccgacggtcaatgattcatctaagggcatcgacgatcataaaccgcttggtgattctgaatttctcatgcggaagctaaaatgacattaacactcagattcatagcctgaaacacattgcaagagagaaacagagacattagctcacttgactgtggtcgctactgctcgtctgtcgggtcatgattaaactacgtacatgagacattgcttcaccgacgaccagagtcccggacaatagaaccagaaggtgtccatgtcctattaccagcgatgatccgaagccactgcgggatcatcgtagttcta

SEQ ID NO: 123692 - DNA, 455 bp, Arabidopsis thaliana columbia
ctcacagttaggagaagctggtacgcctgcaggtaccggtccggaattcccgggtcgacccacgcgtccgtggacgcgtgagatggcccatgggggtctggcatgagagaagataaatataacgcctaggatctggcgcggcaaatacataagactgggccgaacatattgaaccgctcgtacttgtgccttaaacgcggagttgggtgcgatatttgttctacgatctttggagcccgatcgtgatgctcatccttggatggcaacaagctcactagaagctgagactctactccttgtaggcctcgaagctgctcggcagtgctctggctatgctttctaagacactagactagatgaggccaacattttagtaagacacagaaaccgtgaatgcactttcggtgcttttaatggtggttacatcactattgtctgtgtatgctttactagat

SEQ ID NO: 123693 - DNA, 241 bp, Arabidopsis thaliana columbia
ccccaagagcgggcggccctcccggctgtcgccccagcacacgcgcccggggcaggcacaacgggggccgggaaaacacatcgaaggcggcgtcacgccagggacaccggccgaaacccaaaccacgggcccaaccacaacaaccagcgaaaaagaccccccggcccgcggaagaggagaaagaacaaagcactactttttttcaggagggggggacggcaaaactaggacccgatcgaga

SEQ ID NO: 123694 - DNA, 345 bp, Arabidopsis thaliana columbia
ggagaagacgccgcaggacggaccgaaacccggcgaccacccgcgagcaaaccaccaggagccgacaaccgcgagagaaaaggaaaaggacagagcaacccacgaaccagcaccaaaaagaaagcaggaaggcgaaacgaccagaaaagactcaggggggacgggccacaaccaacaaggaggcgaaaacaaaaaaacagaccaccaaacggacggacccaaggaaagaagaaacgaaccaggggagagaacacaccaccacccaaaaaacacgccgcgcgaccaaagaaagcaaaccaaacgccacacccacaaacgcgaggcaccacaaacacgacccgccgc

SEQ ID NO: 123695 - DNA, 482 bp, Arabidopsis thaliana columbia
gtgacactatagaagagctatgacgtcgcatgcacgcgtacgtaagcttggattctcttaagcgggccggccctttttttttttttttttttttttttttttttttttttttttttggaaaaaaaaaaaaaaaccaaatgggttattacttaatgggcttaaaaaagggtttccaccccagcaaaaaggtcattgtccttaatttacccttaattttcccaatccattcttttcaacgtttaatattccttgaagggaccaaccggaaaaaaattaaagcccctccatttttttgataaccttttttttgcccaaaggtgctggaaccactgttcttgaaccactggaacttttccttcgggctttttttttttttttcaaatcgttcacagttcaaatgatacccatcgttttgtatattggttttggaaatggcctgtgtttaacaatgcgcttaacctcaaaaagatccttgtcccggt

SEQ ID NO: 123696 - DNA, 326 bp, Arabidopsis thaliana columbia
aaaggaattttgcaaggagcacccaggccccacgataggctaggcatcttgtccatttggtctgtgatgcgtcgttatggttgctccaggggcaagaaacgtcagagcgggggctcaggagccgagactttcaccgccaggtaacgggatcgcccatattccaccacgcggtgacgccatgggctagccttcagttcgagatcaaatcgaagaagcgcgcctacatacgaatatatttttcgccgcatccaactcttttcctctggtcgcgccggttaaagcacggttcacttcggtccgtaccggaatattctgatgtggcgcta

SEQ ID NO: 123697 - DNA, 535 bp, Arabidopsis thaliana columbia
  unsure (1)..(535): unsure at all n locations
tcactcactttggaagctggccctgaggtccggccggatcgggcgccaccgtcgccacaaaataaggtcttttgcttaatagtatttattattttatttattatttttatagatgaaatctctgctgtcttttaccttcttgttcatcaatcttaagttcgtcttgtctagtttctgaggagtgattntgttgtggtgtggtagagaatgatcngaacagcagtgaacgtagagaggtaatatgaagtgggagaacattggagaaaagacgttgctaagtnnagttgtagaactctgaactggagaacctgtgtctcagattcttgataagagaagtctcagcatanatgctgacagattagagagagatagctctatgaagttgtaaacatccaatgttgttcatatatgagggatggcagtagacgaaatattatatcttgagtatgtacaggggagactcttgatagattgtaatgatggcggatgaagagataggccngnatatttcacagctatcatgctggactctgca

SEQ ID NO: 123698 - DNA, 457 bp, Arabidopsis thaliana columbia
ttgacgggcgcagcccgcgtacgtaagctaggatcctatagagcgggccgccctctcgtgggcggtctacccccgcaagacaccgaccctaacaaaggggcaggttcgctttgggttagcctacactcataacccaacataacatgccaaaggcactccttccacccgtacgacctggcagccctcagcaacagacgccacaatcgcccacgtacttttttcttcgcggtatacttgtcccaaccaaacatccgtggattcacttagtctaaacagggtccatcttaaagaccacctcacaatacgtaaatgccgtgccaacacaaccccctatattaagtccaaaagtaacaaagattcggcctccttattgatgcccaagcacccgacccgaaagtccaacctcagcccaaaactaaccacaggtttaccgatttctccccttgcacaaacccac

SEQ ID NO: 123699 - DNA, 610 bp, Arabidopsis thaliana columbia
  unsure (1)..(610): unsure at all n locations
gacgggcggcaaggccacgccgtnaccgtaaggcatggggaacccctactagaaggcggcccggcccctactgcgtagacgagccacaacgcgcccgaacggcccgccacggcccaatcgagagcgcgaacgctacagggggggacggggaggacacccccagaaagccaagctgaccccacgacaaccctgaaacaatgcacccgcagaaccacgccaaagagcccacgaggaggaaagagggcccaacaaccacgcgcagaaaaattatagcggggggggagaaacaaacacacacaaccggggccgggcaaacaccgaaaccagcaatgagcccccgcagaccggacgccacagaggccacgacgagacaagaagaacaagaagcaaccccagacaaagggaagagaaaagggaaaaacaagcacaccaacggcgaggcaacacccgcaatccccagcacgatccaccgagaaaaaccaacccgcagacccgcgcgcccaccggaggcgcacacaacagaagaaacaagcggcggggaaaaaaagcgcacgtacgcccaccaaaccgcacaagaacgccgaagaagacccgcacgggcacgaccaaa

SEQ ID NO: 123700 - DNA, 204 bp, Arabidopsis thaliana columbia
  unsure (1)..(204): unsure at all n locations
aagcaaccacgcctgcaggaaccggnccggaatacccgggttcgacccacggcgtccagacccacgccgtaccggagaacagcgggaccgacgcacccccagcgagcagactacgagagaccggcccccggccacagagaaggccgagcaaagacctcggactcgcgcgggaaaacgaacaagaagcgacagccgagaacatcg

SEQ ID NO: 123701 - DNA, 520 bp, Arabidopsis thaliana columbia
  unsure (1)..(520): unsure at all n locations
nnnnnnnnnnnnnnnnnnnnnnnnnnnnnnnnnnnnnnnnnnnnnnnnnnnnnnnnnnnnnnnnnnnnnnnnctttttttttttttttgtgatgtgtggattaaatctttgaaaccacacaaacttctcaacaagaattaatatattcaattattcatcatacattgagcttgattacttttcttatgtttgaaactggtgtcgacattgccaaagatctggtggtttttgattctgcgtttggctctccattcatgaaataacaaaataacaaaaagaaacataatcaatcattggggctcaagctttgaagctggaaaattcccactgtactgaaacgattcactgccataaggatcaccagatcctttgattgcgtcctcatacgttcttgaactcgttgctgaatctgagttaggatttaatcccgcaagctgcattatgttctcaatctctttcacaacctcacccattgatggcctattaactccttcctcctccacacatctcagagccaagt

SEQ ID NO: 123702 - DNA, 494 bp, Arabidopsis thaliana columbia
aaggccccaggcccccttccgtaggctgggttcctttaaagcggccgcccttttttttttttttttggaggcctggacccacggcccaatatgcctcgagggccacacaaaaaattcttggttcatgtattcgtgccccagtcggggttaaacactactgctaaggtggcatgtttcatttaattcttaggaatacatgggaatttttttttaagcgaagatattaattttagatattccttgctagtccattggatacgaggatgagtgtggtggctaatgatggtacccaagagcaaaactcctgaggtgaagctaaagtccgtcttgaagatcaccgtatacctatgccggctctatttttgcgaccaagttcttcactcaaaatccttccattagtgaccatatctaatagccttttacaattgctccttgattgactgctcttaccaaaagcatgaatatggactttgtgctttttgaactttgccaag

SEQ ID NO: 123703 - DNA, 240 bp, Arabidopsis thaliana columbia
  unsure (1)..(240): unsure at all n locations
gaagcagcgccgcctgcaggacccggccggaaacccgggtcgaccacgcgtccgcgttcnacagagacgcaacgaacacaggccggcaagccagaatacagacacaccagcagcagcaacacagcaccaagcggcgacacgccaagacacacggagcggcgacgccgacccactcaaacaagacgatgctcaagagcggggcggcgcaacagaagactgatcgagtcagagacaccacgg

SEQ ID NO: 123704 - DNA, 257 bp, Arabidopsis thaliana columbia
ggaagctggcccgcaggtaccggccgaattccggcgtccaccgtcgttctcaactaagacaggctcatcttatatatttactatctctttgctatcttgacctcgtctccttactttcaaagacttcttaatgcgttgtgcactcaggtatcaaggaggacagcacgtgatgagagaccagctatggatcgtctctaacatatcagaaagattcagatggagcatggcacgttgcgacgaatttattaccgtttcac

SEQ ID NO: 123705 - DNA, 348 bp, Arabidopsis thaliana columbia
  unsure (1)..(348): unsure at all n locations
atagnnagactttgacggcgcatgcacgcgtacgtaagcttggatcctctagagcggcctgcccttttttttttttttttagaagatacaaccacggnctactatgttgagctgtacagatccttgcgagttaccaccagtgtccataccttcttaagtcaggattgacagatttgtctcggttggcttgtatcagacaaaaggataagtctgacctgtccctaatttttttttagagtaagggagctactccattaacagcctcattttaaatgtatacttacgatgttgacaaggggtagaaaaaccttattactttaataaattattttggtgggtttcgtttta

SEQ ID NO: 123706 - DNA, 590 bp, Arabidopsis thaliana columbia
  unsure (1)..(590): unsure at all n locations
acgactcacatctagggagagctggcacgcctgcaggtaccggtcacggaatacccgggtcgtcccacgcgtccgcgtttttgctgcccaagagcacaaaggaactagcgtcctctttaaagtcctctcggctttcgctatcagagacatcagcctgaccaagatcgagtcccggtctcaccataatcgaccgcttaaggttgttggtgacaggagctatgttttttttgaagaagctncgactacantgttataagtggtatttagaggtcatcgacgagctgaacccagcgtgcacagaaaagccgnttttgcttgggttaaaagatgaccgcgcgtttcttagggaggccgggaattacccccaatggtttaaaacccaaggcccttgggcttcccataaaaagggggaaccccacagcctaaaaaaaaacaccccctaattttttaaactttccccgcgccttcgggttccggggaaatacggtgaaccccttaaaaaaaacccaaaaatgtaggcgcaatttttagcggggcgtatggcaaaaaaaccaattaacttggtgggggcccctttgcccattccctta

SEQ ID NO: 123707 - DNA, 364 bp, Arabidopsis thaliana columbia
cgatacacacgtatagctagcagcattcaatcgataatttgaacgctggcaatatggtgtgaatactcgcaggtcacaactcgatatgcagagacctgcaactcaactcactcacaagacgaatgcttacaacaggatcttcacttgaggttactttagcactaaacttgcctgatgcggccaacctctgccccgtgacgtaagcacaagggctcgtatcatcaacccagctcttcactttaaagaatagatgtctaatcataagacaaaacaacggtttatgcaaccggtcactcccatatgccgcggagacccttacgaccaaccaacctgggggggctacggacgaatgaacttcccggga

SEQ ID NO: 123708 - DNA, 531 bp, Arabidopsis thaliana columbia
  unsure (1)..(531): unsure at all n locations
cgnnnnnnnnnnnnnnnnnnnnnnnnnnnnnnnnnnnnnnnnnnnnnnnnnnnnnnnnnnnnnnnnnnnnnnnnnnnnnnnncttttttttttttttttttttttttaagccaaaaacaagcctaattctctttattttccacgggttcaagcagaaggaaacgaaacctctacatttcgagttgctatatacctaagattcttaaaacaactaaaaacagagcaaaaaaacagagtcttggctaagaaaacaactaaaaacagagcaaaaaaacagagtcttggctctctttttttggatctacaagctcatgttcatggagaagaagctatggtcatggtgatcttgaacattaagctgtttcagccacgaatcagctgcactgcgaagataaactatacgtccttggtcaccacattcttgattcctccacaaatctccttgcaatttgtaactaactaaaccaaaaggagccaaaggtatactcttggtcaccggtccttcatcaaaacacaatgtttcttctttca

SEQ ID NO: 123709 - DNA, 416 bp, Arabidopsis thaliana columbia
  unsure (1)..(416): unsure at all n locations
ggtgcactattgaagagctatgacgtcgcatgcacgcgtacgtaagcttggatcctttagagcgggcgccctttntttttttttttttttttttttttttttttttttttttttttttttttttttnnaaagagggcccctggaaattttttttttacattaacctttcttggtttttcacggtggtaccggaaggtggccaaaaaaaagggcattcccaagcccaccttaaggggggccttttcttttcttttctttttcccttcaaacccttgtttttaccaaccccttcctacatttttttgagcctccgctatttttttactttgtgacccacacaatgtttttaaaaggggaaaaatgtggaaacgggggttaacttgggttcatttttaaaacctttaaagcttccttaa

SEQ ID NO: 123710 - DNA, 452 bp, Arabidopsis thaliana columbia
  unsure (1)..(452): unsure at all n locations
tcaaatagggaggctggcccctgcggcccggccggattcccggtcgacccacctcgaacgtaaaattctttcccctgagacttaaacaggaaagttccgaactgtgacgaattcaaggggtttcaacaatagccaccttttgaaaaagagatgtcttttctatgagtgggagtattctccattcatggcaattgataaaggagcggntcttcaagaggctaaagtctttaatgaccctcagggtgatcctatacaatgctcccatgttattacgaatcttctttatttgcttatccaaggggagcccttcaccacggttgaaccatcggaagttttcttttcatttacaaagctttttcaatcaaaagacacgggcctgatgagaatggtctacttaatcattaaagaggtatctccatcctctcatgaggttattatcgtcacaagctctc

SEQ ID NO: 123711 - DNA, 178 bp, Arabidopsis thaliana columbia
gtacacttatagacgagctatgacgtcgcatgcccgcgtacgtaagcttggatcctctagagcggccgccctttctgttcggaaattttgtttatctatgagtgattttgacatggcatttacagtgcatccaaaaccgctggaatccaaatgcagagccgttttaccgcatactaac

SEQ ID NO: 123712 - DNA, 675 bp, Arabidopsis thaliana columbia
  unsure (1)..(675): unsure at all n locations
tacaagagctttgacgacgcatgcacgcctaccgaagctgggatccactagagcggccgtcctacgcgtcctggttaaacccgacccgatcacaacgacacaaagcgaaaacatgaccacacaagacgaaccgacacaacacggcatacccaccacaagaaacaccagcgacagaagacgaaagaaccctccaccacccccgcaaacaaccacgcaccctcattcaagagggggaacacaaacccncccaaggacaacggccgacccctcacggcacacacaaaacaccaaccgcgacaaaacccaaccagaccacaagcacgaaaataaatcacacccaacaaggccagccaaacccaccccccacaatcaagaccacgcccaaaggaaacccccaacaccaaatacccacacacaacgaaaccggccaaccccacaccaccccccaaaagaaacacgaaaaagcaacccccaaccaccctaaaatcgcacaccccacaaacacgacgcagcctaagcacacacaatcacaccgcgccccacgaccacccccacgaacgaaaacaccaccaaccgaaaccagccacccccggaacaccccacaaagcacaaagacacccccaccaccccaccacaacaacacccaccgaagaaagagccccaccacaccaacca

SEQ ID NO: 123713 - DNA, 535 bp, Arabidopsis thaliana columbia
  unsure (1)..(535): unsure at all n locations
cgccggcaggtaccgggcacggaatacccgggtcgacccacgcgtccgagaccgggcccagggagaacagggacagccacagaggagctgcaagaaagaggaccaggcagaccaccgcgcgggaatcgcgaaaaaacgaggcggcacgagccgatcacgacagcaacaagcgcaggccccccccaccccagacggcacaccaggatctttttttcttataagggcggagagaagacagggacacaaaagacgggccaaaagacagcgcagcaggaggcaaccaaacaagcccggaacggggcagcacaagcagacacgctagcacacaacaacggggagacccgagcccgaacacacgcaccgcacgccagccccagagaaacgcgcacgaacanacgcacgggacaagagcacccaacgaagacggacaacccgcaaccgggcggcgaccaagcgggacagccaagaggaaaacaccgaacgaagaccacgaggcgagaggaaccgcaaaagaaacgccagacacagcaaacac

SEQ ID NO: 123714 - DNA, 148 bp, Arabidopsis thaliana columbia
acgagcaggcacgcgtgcaggagcctgggacccaatagagcggacgtccacgcgggcgcggtcgcacgaaacaaccctcacccactagaagaacgaactgcacgagggaaggccgaccaccacctagcacgcgcagacacggggcgac

SEQ ID NO: 123715 - DNA, 193 bp, Arabidopsis thaliana columbia
ctaccacgcctgcaggtaccggtccggaatacccgggttgacccacgcgtgcgctgtcatgtgaataaaccctcaatgatacgatgagagaactggacgagagaaaaaatgaatcactataatgtaccgagcgaacttcgggtggcggacagaagcatttataattgcatcgacaaagcagtgcgtatacttt

SEQ ID NO: 123716 - DNA, 671 bp, Arabidopsis thaliana columbia
  unsure (1)..(671): unsure at all n locations
nnnnnnnnnnnnnnnnnnnnnnnnnnnnnnnnnnnnnnnnnnnnnnnnnnnnnnnnnnnnnnnnnnnnnnnnnctttttttttttttttttgtgaaaataattaaaattagcaagcaaaacctaacaagtttgtttattacatgagcaaaacctctgttctagaaaaagcttcaagatacatcaacactacaaagtacaaacaaagttttcaaagagaaaaaaaaaatatcctctctctctctctctcactctctctcactctctcttatgtggaattaatcaaactaatggttaagtggtctaaatggtgacctgtcttcagttacaacatcttcttcatgcttcattgccaatcttggagaaccaatagtttcaccattattgttctctttaccaaatccatcacaacattgtgtaactctctccaaagttttcatcagcttcgtgtctccatcatacagcttcaacattccatcctccatttcgctgataaaactcaaaagatttcgtttttctgttgacaaactcgcgacttccttaactaactctgtcttctctgcttctgaagttcttagcttttcctgcatttggtgtggttacttctttcaactctgtctgcttagtttccaattcggctcttgactttgttgcttcttgtctgaacaagaaa

SEQ ID NO: 123717 - DNA, 343 bp, Arabidopsis thaliana columbia
  unsure (1)..(343): unsure at all n locations
aaattatgacgtcgcatgcacgcgtacgtaagcttggatcctctagagcggtcgccctttttgttttttttttaaaaaaacctgaggtttccaaggccgcttagctttacaacactctacatatgtctggctgtagataacaatcctatcactaaactatccacagcgtcacaaaaggggacgctngccttctataagcaaggagagcgccccccgacacacacgggcagatttttttcttgggaggggccggactcttcacatcaattttccatccccctcctgttggccgcatgtttatagttgcttggcgcttgtccaattatacgtaaccaaccaaccc

SEQ ID NO: 123718 - DNA, 337 bp, Arabidopsis thaliana columbia
ccccgcaggaaccgggcccgaaaaaccgggttttcccacgcgtgcggaaggggaaaaaacaacgcgaacaaaacgggagaatccttctaccgctagccaaacggccttataaaaaggttttacttgaacggacccccggttaaagggaccaagcgggtattataagaaaccctaaaagtgaggcaaccccgggcgtttttttttttcgggggggtggggcgacaaacggcaaactctcgtgataccgagatttgggaaccaccttttacgcttccctccgggtgggccccgtaaaatttcccggcaaccccacacactcctaattcggtatcctgcg

SEQ ID NO: 123719 - DNA, 375 bp, Arabidopsis thaliana columbia
agcactaaacaagaactatgacgaagcatgcacgccgtgcagtaagcctaggactccactagtagctgggtcgtccctattctgtgatttgtgttctattattaccgacactaagttagggcagccgcatcccttcatcatggaccgcatctgcctctatctgatcactctcgggagtgctgattcacatccactctactctcgactatgagtgccatcatagcggcaacaccgcgcaaacctggtcatatatttttagggggggggaacgcacaccttcgcacgtactccgcactacctgcacacttctatccttacttaaatttccacattttagctcctccccacagacttgtgttatccatgaagtgaatt

SEQ ID NO: 123720 - DNA, 556 bp, Arabidopsis thaliana columbia
ttgggggcctgggggaaaaaaaaaaatctttagacaaaaacgaaactaagggagaacacgccccctgcggcccggccggttacccgttcgcccagctgtcggcggtaataaaccagtgaaaacccggaagatctacccctgagaggaacataatcaccccagacgcaagaaaaccaccctgaaccacagacaaagcaacacctacagcaccacgagaaagccaaccacggtttttttttagaggggggtaacaacaaaccggacccaacgtacccagcaacgccattctctaacacactcgtacctctcgcactacaacatccactcccacagaaaatactgacaacccgctctcgcaacaatcgtcacaatcaaaataatataggtaacatgattcctctccacaaagtctttttaaaacagagtttaaatcacgggtacaacccaacctatcccacgacatgcttacacagtcgcgacaacgtaagtgacagaagacacaaagtccacacagcaaacagcgcacaaaacagggctgtaaccgtcacaaacaaag

SEQ ID NO: 123721 - DNA, 558 bp, Arabidopsis thaliana columbia
ctgcaggaaccggaccggaattcccggttcgacccacgcgtccgggggatcttatgggcatatgatgaggaaagattcaagcctagatcattttcactctggtacaggaaaagcacacgagcacaaatctagctgaggccacaaggtcgaatcctgaagagacgagcggctttaaaacatgtctaaaattggcaaaacaacaagcattttttttttaaagggagggcaaaccaccccggaccctttgtagggcaatcagcgcgagcacaatttgtgggtctgggagtggggccctacgagagggacactactacataaaaaaataagagagatcgggggccttccactcagacggacaagcctatgatagactgagctctaaactagccgagagggtgatcgtggtccatctagcccgcggcgtcataggaaaaataagggctgggctcctgctgcgtcggagaggaaaacatctctggatttccatagcgaaaagagtatattccgggagatttatcaagaacccgtcatacgacgccgtagcggtatcggcgcgaa

SEQ ID NO: 123722 - DNA, 461 bp, Arabidopsis thaliana columbia
  unsure (1)..(461): unsure at all n locations
ccgtcgtagctggatcattgagcggcgctcatatccgtgcgtttgtcgtgtgcctactgtccgaccggtgaaacaccgtgtgcttgcagttcaggtcttatgtgcaagactggtgactgacagtcatcactcttgcagtgtgctcacttgcagaagtcattgtctctcatcgctggatgctgcttgctcccccgccactagctgctcgcttgtcgtcttcactgaatctcttgtctcttgaacctccactgaccttggcgatgttcgcatgctgcgcaaggacagatatgcacctagatggctatgctgtctacaccatactttcagtctagacaactgcactcacctttgcaaagactaagcgatattggaccagctacacataagactagctgactgtcttaggttgnctatnacgctatagatacttactcacatctgacacaccagtgcaacactac

SEQ ID NO: 123723 - DNA, 418 bp, Arabidopsis thaliana columbia
  unsure (1)..(418): unsure at all n locations
gaccgggccggaattaccggtgtcgcccacgccgccgagcaacggaaagagagaacaaagaccacaacgaggacgcgcggagcagaggaaggaacagcacccagggcacgcacagcacaccgcccagccaaccgcccgngnagagaaaccacagaacggcacagacagcgacagcgaaacaccgaagccccacagcacattttttttttagcggggggggggacgaggaccgccgagcggccaccaagaaccaaacaacgaggagaaagaaccggccagcccaaacgacgcaagcgacgcggagcaggggacgccaaaagacaaagcgcaaaggcacccacacgaccaggccccccaagacccagacaacacccccccacacagagcgggcacggagaacgacaacaccccatacaaa

SEQ ID NO: 123724 - DNA, 535 bp, Arabidopsis thaliana columbia
cagctctatacgactcacttagggaaagctggtacgcctgcaggtaccggtccggaattcccgggagacaccacgcgggctccaacgttcttatctactttcaacccttccttacttagggtttgatcgaaatctattctacattcgctgtgcatcttcagcgcggacgacttcattgatattccattgaagctgctaggttacatatccggatctgtgtatgctagctgagtctaggaatggcaagagagaaatccatgattcggaccccatgatttcaatgaggtgcttgaggaggctgattcgaagaatacctgccaagatcgcgatcatagtagtgagcgccagaagcgtgtatgatcccagagaatcgccagatagaaggatttgctggaacaaactatgattcacccgggaatcggaagatccttacgatgtatatgatgatgaatagaggcaaaagcctatggacaaggagacggagcgaagactgtcgctatatgttctgtgcacctagactgtcgttatagacaga

SEQ ID NO: 123725 - DNA, 658 bp, Arabidopsis thaliana columbia
  unsure (1)..(658): unsure at all n locations
nnnnnnnnnnnnnnnnnnnnnnnnnnnnnnnnnnnnnnnnnnnnnnnnnnnnnnnnnnnnnnnnncttttttttttttttttaaaaaaacctgtggtttccaagtttcttacttaacaacactttaatatgttggctntgttcacaatctatcagagactatcagagtatacaaaagggaggctgctttaatttcatgagagtcgctttgaaaatgggcgacttttactttggatcttgactntttcatcgatgtccttgtccttgtggtggcggctgctgctgctgttgctgttgcggatcgtatccaccaacccacgcatgctgtggtccgtaaggaggaggataatatccaaacactgctgggtagggttgatttataggatagttgggttgataaggatcacaggatacccaattcttaggatttcactaacagccacttacgcacttcaccagcattccaacaggaccttaacatatagcctccgttctgagttagcaagtctagtcacaagcatcacaagttccttacccatggaataaaattttgtttcattatttgtcattgtctcccttttcggagcccctttttacatatcaacacccttcatgcacctgtcactgacgttatcagtttatttttcaaaaaacatgta

SEQ ID NO: 123726 - DNA, 381 bp, Arabidopsis thaliana columbia
gggaacccgccccctgccggcccggcccgaatcccgggttcacccacgctccggaggttaaaaccccttgcgcaaaggagaattcttcacaggtgccaaacgcttatataatcagattcactcacacaattacaacaagaaaacaacgtccttttaaaaacctcaatcctctcttcaccggttttttttccacggggtgcatcacaaaaagcaaacactcaacaccaattacacccatcttcccgaacccacgataatccactcaaatttcccccctagtccccttaatcacgcatccgtccaaatacccatatcctactatgttttccgaacaaatcagtaaccctcctcttatttaagacaatggccgatcaaacccta

SEQ ID NO: 123727 - DNA, 652 bp, Arabidopsis thaliana columbia
  unsure (1)..(652): unsure at all n locations
nnnnnnnnnnnnnnnnnnnnnnnnnnnnnnnnnnnnnnnnnnnnnnnnnnnnnnnnnnnnnnnnncttttttttttttttttaaaaaaanctgtggtttccaagtttcttacttaacaacactttaatatgttggctttgttcacaatctatcagagactatcagagtatacaaaagggaggctgctttaatttcatgagagtcgcttgaaaaatgggcgacttttattttgaagcttgactttttcatcgatgtccttgtccttgtggaggcggctgctgctgctgttgctgttgcgaacagagccaccacccacgcatcctgtggtccttaggaggaggatattaccaacaaccccttgttgggcttgattattgtatcactgggccgtaaggattcacaggatacccagtcttaggatttccctaacacccccctaggcattatccgcaggatttccaacaggaccaattacttaagccctcgtttttgattagcgaactctgacagaacctacccagttccggccatggaacgaactaatgttcaaatttctgtggttcgcaaattccgtcacccatttcttaaaatattgacggttagaacgtcaattacactttgtgttaaatttttgaaaaacactgatttttgt

SEQ ID NO: 123728 - DNA, 360 bp, Arabidopsis thaliana columbia
agctgccacgcctgcaggtaccggtcccgaattcccgggtcgacccacgcgtccgggaaggttttgatctccctgaaccaatcggagattctttctaccgttggtccgaacgttcttataataagtttttaggtggaccgatcctccgtttaagagaacctaggcgtcatctttagaacccctaatttggtgttcctcccggctgtttttttctttcggaggggtcggccgccaaagggtcatgtcggggattcctgagcttggcccacctttttcatattccctctgttggccacttcaaaatcttccccaggaaggcgaaacctccgaatttgggattcttccgtacataattggaac

SEQ ID NO: 123729 - DNA, 348 bp, Arabidopsis thaliana columbia
  unsure (1)..(348): unsure at all n locations
ccgcatccacaaagagcccgtactcccgtctgcttttcttttcacanccacactagatcctactcacccaaccctctatctaaccacaggcttcgctacttagtccataacctaccccatagtggatcctcggcggtacaatccctcggcctccgagaacggacacttcgcccctttttttctgggggggcccccaaccccccaccccggtccaccactcccttcaccaggctcgccaaccatccactcccaaacccccccccccccccccaagttgacagacacccttctgcgtcataccacctaccgcctcgtgttcgccctccttacttgtgagctaccgacaca

SEQ ID NO: 123730 - DNA, 541 bp, Arabidopsis thaliana columbia
  unsure (1)..(541): unsure at all n locations
cnnnnnnnnnnnnnnnnnnnnnnnnnnnnnnnnnnnnnnnnnnnnnnnnnnnnnnnnnnnnnnnnnnnnnnccacgcgttcgcggacgccggggcggccaagcgtgcggccacgcgttcggccaagcgttcggtttttggttttggccttccagaaaagaaaatgggggcttatgcttgtaccagccgaccaaaacccaccctaggttggattccttttccgggttaagggcaacttaattccgaggttaaagggggttaacctcctttatgccaaaggcttccatgttaccttcgtcaacactacctacaaccatacccgtttaatccggccacgtggtcccaactcccttgatgggcttccttcttttcggttcgagtccatccctgacggtctaccggaggaaaacaaggacgtcatgcaggatgtccctaccctttgtgagtccaccatgaaaaactgtctagctcctttcaaggagcttctccggcggatcaacaccacaaaggatgttccttcggtaagctgtattgtattccac

SEQ ID NO: 123731 - DNA, 535 bp, Arabidopsis thaliana columbia
agctctatacgactcactttagggaaagctgggacgccttggcaggaccgggcccgaatttccgggtcgacccaagcgttccgttcttccttagggggtccaacccattttccatttttaacccttaaaattaattttcaaagccagccggcctcaattatgggcaaccttattcttttccaggcaataactggtcctactccggtctttaaccgaataactctccaccttctgaatttcggaggctacctaatcgttctcgttcacaagctccggtaaaaatgcgagctttgagtccgaagactttgccctgtacggcgacgctaagctcgtcgacggcggatcttcgattcagctgactgactcagtgagtcacggtggtgggcgagtcatctataagaaacccattgagtccatgaacaatataaaattcgagtatttcaccggattctctactttcttctctttctcgatttctcctagtcgtggtgggagactcggatttgtagtgtttcctgttaatgaaacgtttgat

SEQ ID NO: 123732 - DNA, 647 bp, Arabidopsis thaliana columbia
  unsure (1)..(647): unsure at all n locations
nnnnnnnnnnnnnnnnnnnnnnnnnnnnnnnnnnnnnnnnnnnnnnnnnnnnnnnnnnnnnnnnnnnnnnctttttttttttttttccattatcctcgacactctttctctttggactatcttcatgcctgctagatctgcaacactcttttcacgctctttctccttccgttcacacgcctctgttcttctacgttacaagtcaggctagacatcatcatcactctcttcattgcccacctctctagacctttccctttaccggatcctcctactacccctttctttctcacgctctctactatgcctctctccatattaccgttcccgactttctctttctttaactctctccttctgccgctcttcccgatcccgttctctactctctctatccttctacctttctcttactttatccttcctctcttacctctctctatccctttacctatctttgcctctatctctctcatgttctcgatgccctctctccttctcattcactctgcgtttatccctctcatcctcttcttcaacgtcatcttcagatcactactcttccttctctaagaccgtctctacaccaacatccattgtctgtttctgattgttcttccggatggccttcttcatatcagattctc

SEQ ID NO: 123733 - DNA, 322 bp, Arabidopsis thaliana columbia
  unsure (1)..(322): unsure at all n locations
gattgtnnnnnnnnnnnnnnnnnnnnnnnnnnnnnnnnnnnnnnnnnnnnnnnnnnnnnnnnnnnnnnnnnnnnnnnnnncttnntttttttttataatttttttttattttgcacagtgaaattcgggttattgattggctggctactcagttttaaaagagtgatgtgatctatgaagcaaatgtgcaaccttcaaccaacgagttaaaacataaagtttggaagctgtcttgatatcttgataaaccttcaaccaaccaaccttcaaccaatgacagatgtcttgataaacatatttagctaaagctgatctaccattg

SEQ ID NO: 123734 - DNA, 513 bp, Arabidopsis thaliana columbia
gggaagctggccccctgcggacccggtccggaattcccggttcgacccacccgtccgggcagggttcgggaaaaaagaaagatcccaagggtgggtaataaacggaaaaaagtccaaaagtgccaagaccttcgagcaaaaaaagaaattaccgcatcgggatcattattggcctggagaaaaaaatgggattctcccgtttttttgggtggagggcaaccgaaagacgatatccctgtgtggcttaaacccaccctcagcaagtatcagattcgctgctctttgtgggaccgtggaaaaaacccaaaagggctatgggttaaccacaataccggggttaagcgggatatttataaaaaagggacgggaagcgggaatacaacaaaattccagccgggcgacgtggtttgtgttataatgcaaatcgatgaatgggtctagcttggtaaaaagaaggaggatatatatgagagtatattggtaagagcgcacccggggaccgagaggccaatc

SEQ ID NO: 123735 - DNA, 226 bp, Arabidopsis thaliana columbia
  unsure (1)..(226): unsure at all n locations
acgtggcatgcacgcgtacgtaagcttggatccactagagcggtcgccctcgcgttcgttttaatagggtgagtgcttattccancaagaacaaggcgcccagttctcatggaactctttgtacccagccctaaactcctccttgaacaaaccgtccccacaagaatcccaatgagatgcttttttactggtaactcacgatgatactttntgactccattcctgc

SEQ ID NO: 123736 - DNA, 418 bp, Arabidopsis thaliana columbia
gggagctggcacgccttgcaggtaccgggccggtattaccgggttcgacccacgcgttcggcgttgaatatcgctctgttccggctatccatggccatgctcgaaccatacttcttggtactgtaacctggtgttcttctccactttcacactgtttcgtttggccagacgcttttcgtgtttggagaatggcattgcggaatgttttttaagggggtttatctcaaagcgaagttggccgaaggcttccttgtttaagtggaaaaggcagacaaggcgacagaagggggcccggctggaacaatgggcctggagattgcgactaaggatagggaaatccataaatgttttgggattttattacccccgtggggttgtgtaaggggagaaagttcggaaaaaccggacttccggagat

SEQ ID NO: 123737 - DNA, 408 bp, Arabidopsis thaliana columbia
  unsure (1)..(408): unsure at all n locations
aaacaaaancanggaaagcacaccgagggcccgccccaccgaacaaaagaacacgaacaccaccccccacaggagacaaccagaccagaacccgaaacccacacagacaacaacccccccaggacgcgaaacagacgcaggccccgcgactctttttaaaagggaagtaggggcaacccccccanccaaaccccccccaccaagcaacgcaccccccacacacaacggcgccggcacccaccggacgacaaccaccgccacgcgcccacgaaccccacaccccacccgccccacaccaaccacaccacccacccaacccacccaccacgcaacacacccccaacaaggcgcggcacggcccggccacgccaacacccgcaacgagcccagagcgcgcacgccagagac

SEQ ID NO: 123738 - DNA, 535 bp, Arabidopsis thaliana columbia
  unsure (1)..(535): unsure at all n locations
gagctatgacgccatgccgcgtcgtagctggatctctagacggcgccttttttttttttcaaaatgaatgaattgtcgattattgcaagaaaagaaaggtgagtggtaggttttgggtcaccaatagcggatttntcagacatcattatactagtgtctccgttgtctctctcgcacatggttcgtaccaactgtgccacaaactctntaaagttcatatcagatgatccaccgtccgccacggcggcctcggcctccgccttccacctccgagcgttttctctcagctccaccagccttttccccaactgtggcctcaagcagcttctctgctacaacctccctcgaaacaatcatctcctcagcggctccgcggcctagtctcactcctgtcttgaaaacatcagccaagtacaccgcatcagtcacttgatctccccattgcggaaaacaaacaacggggactccggcagttaaagcctccattgtcgagttccatccgcagtgacttaagaaacaagcaatcgcaggatga

SEQ ID NO: 123739 - DNA, 600 bp, Arabidopsis thaliana columbia
  unsure (1)..(600): unsure at all n locations
nnnnnnnnnnnnnnnnnnnnnnnnnnnnnnnnnnnnnnnnnnnnnnnnnnnnnnnnnnnnnnnnnnnnnnnnctttgttttttttttttgtttttttctttttttttttgaagaaaaaaagtcatatttcttttaaagcaatagagtaaaagttagagccttaacatacaagaattgatagtgacacatatatgacttgatgcacatagatattctcaagaatacctaacacttatgtgatgaatccttgagagttatttcttacaaatcatgtagttgctgctcttcctttagagtccttgagatggttatcttgggtgtgtttctactagaacccgaaaacttatccatgtagagtccgaggtacgatataagtggggtcggacctggctttgtccaccacaagctttagagaccgcgactcaacaacattgagaaaccgtaaaagccttttgttaccaaccgtngtgccgctgacaactctctcccactcaccgtttacagtcttccgtgtctcgagatggaaagatgcgatcctttgaccatatggattgggtctagatcgtcacacattgagctaccaaattttaaccctaagat

SEQ ID NO: 123740 - DNA, 577 bp, Arabidopsis thaliana columbia
gaagcatggaacccactaaaggggctgccctcctgtttgggttctcaatcacatttactaccaaaaaaaagagacagcctaataactctgtcgggttgaatccccctggcaaaccaaccaccacctaacaccacacccaagggacggccaatcctattggaaccccccggagcagagccaggcaccttttttctggcgtgggatacaaagaaccacaggggatgagaaatgccctagcgccaggctccaaggaacccaccaaccgcagaataccgggaaacaggccacggacggaaaagcagggggcgcgcgagcaacaagaccagggccctcgaacgcagcccgcacgcccgggccaagagcacaaccggacaacgcaaaacggggcgcgagcaagaacgaccaaccctgaggaggccgcacaaaacaaccggacgcgacctccaaaactatcccacacggaccaaccggaaagacacacgcaggcccaaacaccacaggcctggcgccgggcggctaaaccaccccccacaatgggaaaacaacgggccgaccccacatcctcacccgccagaaa

SEQ ID NO: 123741 - DNA, 475 bp, Arabidopsis thaliana columbia
ccgcagggaccgggcccgaatacccgggtcgacccacgcgtccgagagaaaggcccaggggggacagtgaccggcacctggagctacccgagagaatcaaggagcacacgaagcggcacaacccaaacccggtgcagcgccgaggggaaggggaaaaccacctaagagaccccaaagcccaccagaacgcttttctggggggggcaagcgcaaagcgccaaaaggggaccccaaaacggcagaaccagccaagaaccgggagggccaagaagaacgcggcagagacgcgccaaaaaccccaacccccgcacaaagaaacaacagaagaaccaacacaggccgcgaccaacacagcgggaaagaaaagaagagcccccccaaccgaagacgcggcaaagcagccggggggccccaaaacgcgacccaaccgagcaccaaaaagagagaagacccgcccccggcgcgccggcccagg

SEQ ID NO: 123742 - DNA, 656 bp, Arabidopsis thaliana columbia
ctatagaagagcttgacgtcgcatgcacgcgtacgtaagctcggatcctctagagcggccgccctctttagttggttgtccatgaagaaacgacaccctctcatctcaggaccgaaactatgcgtgctgggacgagcaacactctaacagcgcactggctgcattcgaccaccgccgagggaaaaaacgggagtcaggacacgctcgacaagtgaacacttttttatatggggggcaaaaagggaccagaacatttgtccgaacgaccatgcaacaatacgaagagcagcctctagccaaaccactaaccatcaaccagtccgcgtgctagcagtcgatcgactcccgcctattcacgccatgacgggtcccgcaaactcgaacggttccccaaaccccatggccaggatggacaaccctgaaccacttacccaaccggaggagaaagaaggcctatacccccccagggaccgaaccgcgggggcggccaactactgcgagaactgggcccaaagcgaaaggacagctggtcgagagcaaaacaacggctccgcaaaaagccttgtcccaagagaagagccgtccagagtaaaatgcgttggcctcccaaaacaaaaaccctcgcaagagcaggccgcccgccgcggtcgaacaca

SEQ ID NO: 123743 - DNA, 515 bp, Arabidopsis thaliana columbia
  unsure (1)..(515): unsure at all n locations
ccccgcggaaccgggcccgaaacccgggtgaccccccgggcgcggggacaaaaaccaaccacgtaacaaaaggacaagacaaaaaatccccctcgagaggctccgcccccacaacgggcgacacgccaggggagaagcccacagaggacgccacacgggcccacagcccgggacttttttttttgcggggggggggcgnaggcagaaggccaaggggacaaagcccaagacaggagcgcccaacagtaaggaccgagggcgccccggggaaggcaagaaaccggagaaaaaccccgccgagcagagcgcaccggcagcagaggacgcccccagaagggacagagagcacccccagaagccgcccaagcagaggagctacgcgcggcccacacccacgacacaaacccggagacagccggaagaacaccaccgctagcccactggggaacgaaaggagagcgcgaaagcccaaaagagcaagggagacggaaccgaaaaacccgcccggaggaccg

SEQ ID NO: 123744 - DNA, 657 bp, Arabidopsis thaliana columbia
acttagaaaattatgacgaggcatgcacgcctacgtaagcttggatcctctagagcggccgccttttttttttttttgataaagctacactagcttcgacaccaagacaattacaggaattcacaaatcttgtctttcattacacagtgttttttgatacacataaagctcataaggcacacatatttctatttctacattcattagttgaaaggtttacaacgtggcccatgttgttgctgcatggatccagcaagtgagttggcaagttttcaatggtccttttcccggataagccgacttgtgtacaacaaattctacaaaaggccacaatgcaagccgccgcttcttgagctcattactttcaattcccacaccttttgggagccctttgagtttccagaagggtcaaagcccctccccggtaccttcttatcttaagggtttttttccatacttttatggggttaaacaaaggacatgcgtaagagttaaaggcccaaaatggggacaaaataccccacggaactgggtttcacagtaaggggcttaaccccttagaacgcttgccattctagaccttaacccttttccattgcttaggctttggaactaaatcccacacaggaggtttacccatctcctggggttagtttc

SEQ ID NO: 123745 - DNA, 323 bp, Arabidopsis thaliana columbia
ggggaagctagggcccgcctgcgaggtacccggtccgcgaatatcccgggttccacccacgccgtccggtcgagcacatatttctccctttgggggccaacacaaccgacagataggagagaaacgatggcgtacgaactcccttatggacctggggaataaacagccagggcacccctgcgcttgtctttctgggttacaagaagataaataccaccccaccctctttttttctcacccggaacacacgggaaacaagttgctcctcatcgaaaatgagaccgctccactcggaagcagccgtaagagcaacccacccagcc

SEQ ID NO: 123746 - DNA, 610 bp, Arabidopsis thaliana columbia
  unsure (1)..(610): unsure at all n locations
actatagagagctatgacgtcgcacgccctcgtacgtaagcttggatcctctagagcggtcgccctttgttttttttttttatgcatgtcagacaactagttatgtccgtacctaagntgtgtgtattagaactgtataaagctctacaaaacacactctgatgtataatatatgtaggtatctagcaatagtcagcatgtagctcaaaactcgcgagagagagatatattatagagagcccatanaagaactcatacaacaaacatcttaacgttattaacgtcccaccaacaacttagaacacactcctttacatgggatctccaccacacagaaatatgcaaatgaaacgcccacgatttattatccaccaactctgtggaaaactgcttacaaaagcgcccttcacgatttgaaggacggggtccaagcctaccttgtccaccaatgcaagaagaacttggccctggtgatttgttttggagctggagatgccatagagacaaccccagcggtggagggtacccggcacctatatgtgactgggaaattcttgccctcctcgacccccaatggagagtgtaaaatcacctgcttggaccacatcca

SEQ ID NO: 123747 - DNA, 500 bp, Arabidopsis thaliana columbia
gcctgcaggtaccggtccggaattcccggtgtcgacccacgcgtccgacgacgagaggaaaaaaaaaactcactagagacaaatttaatatggcgatgattaccgcgcaacacgcgccacgcgactccctgtactactaaaatatcaacgcgccgtcggccgctgcctcggtgtatcacctccacacatcccttttttttttttctgggggcacaagaccgacttcctacaccagacctggtccttctttaacctccactccttcttctggttaatgctaaagcaggccgataatctgaactccaaggaccataatgtcatgaactgtgctcggtccggatcgacttagaccatgacctttgtttgtcgctcgttgcaacaagtaaatgacgcatacgcgcgctgcactctacgaggaatgacggcccgggtgagatcttgaggcacacaccccgacggaaatatggggcgctggtggcgatcactattaccaacgataa

SEQ ID NO: 123748 - DNA, 557 bp, Arabidopsis thaliana columbia
  unsure (1)..(557): unsure at all n locations
gtagcttggatcctctagagcggctcgcgcttgcttttttttctttttttttttttttttttttttaaaaagtaaaaactgatattatattgcttaaggtgaagtgtttatttgataacattttacaagcaaccagaaaacaatttctagtcaccggaatcttttactggaaacaacaaccataatttatatatgtgacaaaaccttttcatcttgtgatattaaaccagaagcaacatttccatctttgattttaaacccgatgcacccggaagatcattcgaaccggtataaaccttaaacacattcttgcgtgaaggcanaccagctactgggtatgtgtcaatccacatacttagtcctgttcttatatgaataccatcatacccaacctcgttcattgattgcctaacaatatctctcttactggtgttcgacccaaagttaaaagagagcctcatgtaaaccggttggctatgactcacattgatgacaaaccgtatacggaaagaagctaaaggtcttcgtaaacctctgagattcggagatgattccag

SEQ ID NO: 123749 - DNA, 492 bp, Arabidopsis thaliana columbia
ggggagctggacgcctgcaggcccggcccgaaattcccggttcgacccacgcgtccggtggttcttgctgggcattgggtgctgttgaatcactatcagatagattctgtctccaattgggcatgaacatttctttatcaataaatgatctcctagcttggggaggattcctattgtggagatggatgggacggccgctatttttttgctgcggggcaaaacagccgaatagccgggtcggcccacaatactgagacccaaacgttgataataccggaggcgttcgcccacgatactaaaccaggctctcctactcccttatgtaggccacgatccacactcgccggcagtggaggttaggggaccagtccaatgcgaaaggtgtgttggaacagtatgtacagacgtgcacgcatgcatcaagctctgggtggtagggactctaataactgctatccaagcataccttgctatggccctaacaataggaga

SEQ ID NO: 123750 - DNA, 478 bp, Arabidopsis thaliana columbia
agggaagagctgtgccccttgcaggacccggtccggatttcccgggtcgacccacgcgtccgattgagcaacaaaaattgggaaaccaacgtgactttaacgaaaaaaccggcaatggccgagttcactccaatgccgaaaaaataacaggattcttaaacgagccggaattatttcccccgggttacaactgtgttacacaccgcattttcaaacatggggcctatgctgactaaggtgtgttttggggaaaccaaaccctcggcttttggaacatggacaatgggtcataaaaaaaaaaaaaaaaagttttttttgcttcctcaaccattgattaccggttaagctgtgactaaaaaatgtgaaagctcaaggtccttgggaaggccaaaaaaatatagaggagtaagggcccgaccatggggaaaatgggcgggcggaattctaaacccaccaaggcgacacgtgttggtttggg

SEQ ID NO: 123751 - DNA, 237 bp, Arabidopsis thaliana columbia
  unsure (1)..(237): unsure at all n locations
nnnnnnnnnnnnnnnnnnnnnnnnnnnnnnnnnnnnnnnnnnnnnnnnnnnnnnnnnnnnnnnnnnnnnnnnctttctttttgtctttttttttctctctgttcctgcgacgctttttctctccgttccaatcctctccggcaaagaaactcgggggactaaaacggaaagctttgactaaaatggggggtttccaggcccccaaaagggattctctcccgtttcaggatattgcaa

SEQ ID NO: 123752 - DNA, 408 bp, Arabidopsis thaliana columbia
ttttaaaacccgcgcagcagaagcggggacctttttcccacaccgccccgggagaacccgggactgttcacatcaggaataatagcggagaagcccaagacgggcaaaacggcgcccaaaaacaattttctatgggatgtgggccaaccccaaacccagaaccacgcgaaccatacccaagattcggtggggccgggcgctggacgcgcgcgcccccgacgaggggtgacgcccgtgggcggacagagcgcgcgacaccaagcggcataccgttcagggtaagttaaaaaaaacacgttgataaaatcgactccagcgacttggccaccatgaagacgataatgccgagcacagagagacaccccacaaagagaaaagagacgaaagcacggagagacactacggcgc

SEQ ID NO: 123753 - DNA, 235 bp, Arabidopsis thaliana columbia
tgcacttaagatcttgcgtgcatgcacgcgtcgtagctggatcttagagcggcgcctcgcgtcgcttgaaagaaaaagagattgtcaatgactgggtgagtgcaaattgcacgctctgagctggagccggaatattgactctccaacattgaacgtaccaaggtgtagagattctgtaacatattacccatacatcaggctaagatgtacatttatgctgtagagccggtagtat

SEQ ID NO: 123754 - DNA, 511 bp, Arabidopsis thaliana columbia
gcaggaacgcctgcaggaccgggccggaattccgttcgacccacgcgtccgggaaataaattgagacctagactcagcgagattccagcaagtgtatggatctttcactttttcactaaccaaccaaaggacaataaagaattattcatctgagctaacctggattatatgctggcggaaaccgactttttttttgaaggggggggaaagcaagcttggcattcccccgataagatagattcctgaatgaattttttcattacttatgagtatggtgattgtgatctttgaatgtttggatatttagtggtaaactgtgcataaatgaataattaggaaagtattgaagagtcggggattgacttagagatatctgggcttatattctggactgagagaatagctcgtgataatggaatatgtaattagtgtgatggattggagatggtactatatatgagatctattactgtttattgggaattgtgatgttacctggtgacttgtcatc

SEQ ID NO: 123755 - DNA, 415 bp, Arabidopsis thaliana columbia
  unsure (1)..(415): unsure at all n locations
gcccgcaggaaccggcccggaaaacccgggtctacccacgcggccgcggacgcaagggcgaaaacaaggagcccgcacacccggaaaaaaccacgggagggggggcgcaagcgggacaccaacagcaacaagagcncgcgaaggagcacaaccaccagccaccaaagagccagcaagccacagcgagcattttttcacagggggagagcaagaagagaacccaaccaaagccaagacaaggaaagcagccagcaccgcaggacaagagaaccaaccaaccgagagcgaggggaaacgcggaggggcaaggaaagaagaaagacgaggccgaagcccagggccgaccacgccccgggcccaggacggaaacaaccaagagccccgcgggagggcggccccgccacgcaacacggcc

SEQ ID NO: 123756 - DNA, 556 bp, Arabidopsis thaliana columbia
  unsure (1)..(556): unsure at all n locations
ttggatcctctagagcggccccgccttttttttttttttcaaagagagacatttgaacaaaacatgggcaganaatcaagaaagagaattaatcagaatgctcgacttgttaccaccgtgaacttgtatactgcaactgttgaacaaatcaccatgtgcaaagatttgctattgccattcagattttctttagtctttcccacatttcttcttcatgcttanacaatacatttgagcacgaagaanatataactaccattcaacttggatacaggcagcaacagttgtaccgacatgccccgtattctgcacttaaagtttcactacgttagtttacaatagtgaagaacttctgcaacaaagtagggaaaatcaacccatataacttcgaactgtcaatctctggatctcagnaacaaatcatacattccaaaggacattggtaaccagctcacctcattttcagctaagaaaaaccaaaggttagaaccctcctggttctaccataacggaacggatcaagaacacataaatacattctacccataaacaactg

SEQ ID NO: 123757 - DNA, 654 bp, Arabidopsis thaliana columbia
  unsure (1)..(654): unsure at all n locations
gattgatctagnnnnnnnnnnnnnnnnnnnnnnnnnnnnnnnnnnnnnnnnnnnnnnnnnnnnnnnnnnnnnnnnnnnnnnnctttttgtttgtgtttttttagagaggacgtcctcagggaaattcgggctattgattggctggctactcagttttaaaagagggatgtgatctatgaagcaaatgtgcatccttaaaccaacgagttaaaacataaagtttggaagctgccttgatattttgataaaggttanaccaaccaacctttgaccaatgacagatgtctggataaacatattaagctaaacctggatctacatttgtatcctcttgcccaaattccacccactctcaaacttttggttggaatcaaaatccaattttttggtaagaccctttttggggtgataaatccagctaggcccctcccattgtttattgttgaaccgccaaaagattttttgtttctttgtaggaatttcccccccaaattcgtttcatcctccctttcaaggaattgtccccggacatacttgctaacctgggtcatggtccgtttacacgaacctctttttttaaggaccttcttcgtaagccccggcttatgaagtggtgaggcgactcctccatttgccttcctaaaacaagggtcc

SEQ ID NO: 123758 - DNA, 517 bp, Arabidopsis thaliana columbia
tacgacgtcactttaggggaagctggtgcgcctgcaggtaccggtccggaattcccgggtctgacccacgcgtccggagagaatcaaaaatcaaaatgtcttctcctactgcgactaagtgcgacgtctttctgagtttcagaggactcgacactcttcgcagcttgatcagttttctctactaaagaactcgttggaagaaaaattcgaactttccaagacttctaggagcgggggaatggccggaggattttttcctgaggtcatacccgccctcttggaggcgaaattcgccgccgttgtggtctctctgaactacactgcggcgccttggtgggtcgtcgaggttgtgaagagaatgggggctctaaacacaggggcgatcaccggggtggctcttttctacttgcgggggagctcgctctttttggggggcggctcgccggagtcgccgctcggggtttcaagaacgcggggcgggagggcatcctgttaacgccgtctctggtaggcgagc

SEQ ID NO: 123759 - DNA, 532 bp, Arabidopsis thaliana columbia
  unsure (1)..(532): unsure at all n locations
agctctcatacgactcactttagggaagcctgttcccctgccnggcccggcccggatttccgggtccgcccaacccttccggccagttgtttggccccaccaaaccggttttaccggttaacctgctaatctggctgaaaaaggttgggtggctcagtttaaaaacttgaaaatggctggaacatcactgccaatctgaaggctggcaaggcaaaaatgttgacccaaggcactctaccggaagatgaccaaagtctcaaggatgctcttgcagcatacagaccagctgcagaagcagcggttcggattcaaggtgcgtttagggaaaaagcgctaaaggcagcacggtcaaccgtgattcagtttgctaccaaagaagaagaggccaagagcttaatcgcggcgatgaagattcagaatgcgttccggaaatatgatccacgtaggaagatagaagccgcttaccggattcaatgcaggttccaaacttggaaaatacgaagagagtatctgaacatgcggcgccaagcaa

SEQ ID NO: 123760 - DNA, 646 bp, Arabidopsis thaliana columbia
  unsure (1)..(646): unsure at all n locations
nnnnnnnnnnnnnnnnnnnnnnnnnnnnnnnnnnnnnnnnnnnnnnnnnnnnnnnnnnnnnnnnnnnnnnnnnctttgtttttttttatttttttttttatttttataacttcttcttcttcttcattttcaatgatgaatcagcgtgcttgatttaatcttgcttttatgttgggttctgtttcaataagaagttagaatgagttgacccaaaagaagaaataaaaggagagagagagaaggagaatgttaacgatatatccaaacgacatgcacaatataagcggagatataatctggagcaaaaggaaaaagaaatggggttagataaatgtagctgatgttcagttgttttagaaagttatcttgttttgtccagcacacaataacaaaaaaaattgaacgaacgaaagaagaaaaaataattttttgaaacgtatacgttttagaatgtgtgtcaagattaatataacaaattgctcgatatttttgttattttaatcgaaactacttaaaagataattagcggctaattcttcatttcgatcacaagcaagaaatgcttcaatgacacgattacgatcgaatccatatcttgtaatctggttattgcttggagatcttggtgagaaagagttatagaaac

SEQ ID NO: 123761 - DNA, 514 bp, Arabidopsis thaliana columbia
tgatctccagctctatacgactcactttaggaaagctggtacgcctgcaggtaccggtccggaattcccgggtcgacccacgcgtccggagaattcaacttgccggtggatattattgatcggagagtgacgaagatgaagatgatttcgccgtcgaacattgctggtgatattggtcgtacgcttaaggagcatgagtatataggtatggtgagaagagaagttcttgatgcttatctgagagagagagctgagaagagtggagccactgtgattaacggtctcttccttaagatggatcattccgagaattgggacttgccgtacactttgcattacactgagtaccatggtgaaactggagctccagggaccaagaaaacaatggaaggtgatgctgtcattggagctgatggaactcactctaagggtgctaaatctattgaggctggtgagtaccactacccaattgcatttcaagagaagattaagattcctgatgagaaaatgactt

SEQ ID NO: 123762 - DNA, 526 bp, Arabidopsis thaliana columbia
gcctgcaggaccgggcccggattcccgggttgaccccgcgttcggagagtcaaactgaccgtggatattcctggtccgcgagtgaccaacacgcaaatcaattcgccccccaacacagcaggtgagattgcgacgcaccctcaaggggcatgcaaactttaaggctagggcgagaaacaacaagcacaattttttttttgggcgtggggcccccacaagaggagccccacgggaaaaacacgccctcttctataacaggggcccaccccacaatggagagcccgccgcgcaccctcgatctaatcacgcgccacatagggcaaaagggcggcccccggggcgaaaaaaacacatggggctcgcaccctccacacgagctcaggaggaccaagcctccaggaggtcaacgttcaagggggcgtgggagacgccacacccctcgcggcgctcaaagggcagcgcgacataagactccgcttacgaaacaaacccccccactacgggtgcgccgctagcacaatgcgct

SEQ ID NO: 123763 - DNA, 324 bp, Arabidopsis thaliana columbia
gtataggtgccttaacttagcatgcctcgactgatcttacgcgctcgtcgacctcgtgtttgatgcttaaggggggtgcaactgttgctttcgatgtacgttgaaaaccatgtcagaagttgccacccaacagaaaagttactaagtgcctcttcattacaaactgttactatggaaaaaaagaaaaactggctgttagtcggaggtgagcaattgtactatggtacaatttgtggactctgtttcatgtaccctgggtggttgtttaatcaatgtaaatggcccggtttgatttctgagtactttaagatggcaactttttgt

SEQ ID NO: 123764 - DNA, 551 bp, Arabidopsis thaliana columbia
  unsure (1)..(551): unsure at all n locations
aggtgcactatagagagcttgacgtgcatgccgcgtacgtagcttggatctatgagcggccgcctttttttttgtttcatgtagcatatctttgtcaaacccaactgacgtagtcctgtacaattcacatagaaaattaaacatcagtagataacaagatgatgattagaagctgcncatagcatatagcatgagcangatatatataagtggagaaacagttgggtctctgctagctacttccattagaagaagagttcttatagattgtgaagaggttacgagtcgctcagcaccgagcactttttgagaagtacccgagaaccgactgagtgacgcggacggaatctacnctgcatagacatgacgaccatntctcattgctcgagctaactagactactcnntgagcttctgtccatatcgaaggtgtgtcctagcatgtcttgctagggcatatccttaaggaacaatagctcgcgctatgtagtcatgcgatctttcggtctcagtgtcctcgcgtttaagagcctagcatgaactatgaatcag

SEQ ID NO: 123765 - DNA, 405 bp, Arabidopsis thaliana columbia
ccatgccgcgtacgaagcctgcaccatagagcggctgccagggcggttttttaaaacacttccccaaaaaaagcaaaactataaccacgagaagtaagctaaaacaaatgaaggaaatgttactcgagccataaaattccaaaaacccactctaagggggggcccgagaggaaaccaaagacaagaggccagctccccttaggggcttgaaatgcaattcgcaggggcaacagacccgaaaccacccaggaaaacagagcaccaacaaatgggcgggccaaatagaaaacacaacgctaaacacgcacccaaacaatgaaaaccggaaaacccttaaaaacaaagggcggccccaaaaaaagcacttcccacagcagttaacaaatctccggcactccaagagga

SEQ ID NO: 123766 - DNA, 481 bp, Arabidopsis thaliana columbia
  unsure (1)..(481): unsure at all n locations
gcccgcaggaaccggcccggaattaccgggtcgacccacgcgtccggaaaaggagagagacgacaaaacnccgtggaggaacgaattggagaagaagaacaacgcccaggaagaaaacgaacgccaccaaacggcgacaagacccaagaacagcacaaacaccgcaccgcggcccggcagcggaaacctttttttttcccgggggtggcaaccancagcacgtgcggagaccacacccacgcgcaagcggaagacccccatgctggaaacaagtcccagtcccactagggagcgcaagcaccaaaaaccgcgttgaaggatgcagggccccacctgctgggatggacgaaccaggcccccagagcacccacggcaaaccgcactcccacaaacaaggaaccgccggcgcagaggggcccgagcactcagagcgcggggcgcgggatgagatggacagaccgcccgagcccccctcgaggct

SEQ ID NO: 123767 - DNA, 527 bp, Arabidopsis thaliana columbia
gtatttttgcgaatgagattttcatctcttaggcccgacttggaccaaacccccaaacccgggacctgaacacggtaactccattctgcacggccgaacaaggaagcagtttttcctttggggtggagcaacaagcaggaccaaagctcattagccatagaacagagcattcgcgaggcaagtataaacctgcttccgatgaaggttgggatagacgaccgttctcacgtcccagaatcatttaaatactgaacgccaaatctgtacttagctaagcaacaacatggaacaaaatgttaagctagattaggtactcacaccaccgaaaactgcgtaagtatatattctaatgctaacaaacatagatttagcaaaccaagcaactgttcgaaatgagaccatcgccacaaataattaggcgcatcaaaccatcatgactccacgatctctttgagttactccagacaaacacacaaaaggggtgctcagatccagagcaggactgcaaaaagcgacacccatacaaa

SEQ ID NO: 123768 - DNA, 461 bp, Arabidopsis thaliana columbia
  unsure (1)..(461): unsure at all n locations
ctttctttttttttttttacaccgaaattttaatcatgaaggaccaaaaattatcttcaaggtttcnaacaccgattanaattgtctagggatcaaagagatggaacaaaagagaccggtgtctacgactcttgacgattcctcagtgcatcgatagatcctanactcaacttctttggctcatattcacggacgcgtgggcggcgcgtcagagacgcgtgggtgacccgggattcagaccggtcctgaggcgaccagcntccctatgnggtagatannnnnnnnnnnnnnnnnnnnnnnnnnnnnnnnnnnnnnnnnnnnnnnnnnnnnnnnnnnnnnnnnnnnnnnnnnnnnnnnnnnnnnnnnnnnnnnnnnnnnnnnnnnnnnnnnnnnnnnnnnnnnnnnnnnnnnnnnnnnnnnnnnnnnnnnnnnnnnnnnnnnnnnnnnnnnnnnnnnnnnnn

SEQ ID NO: 123769 - DNA, 419 bp, Arabidopsis thaliana columbia
  unsure (1)..(419): unsure at all n locations
ccccctggggaaccgagcccgaatcccctttcgaacccgccgacgcgccagaaaggaaccacacacgcagtgcccgaaccaaattggccggaaaaccccaaaaaacggccaacaccaacgtctactaacaaagaaaacaccccccccgatccccatccacttcgctagaacccacaaccgaccacctttttttttttaggggggggggaccacaaccacaccaccaaacaccaagacacaggcaccccctgaccacacccccccgaaacacaaccaagacaaaccaatacaccgacccgaagccgcaacacccaccaagcgacgaaagaaccccacgcacaccggcaccaaagccaagcgaaaccacccgnaccacaagacacacccgagcaccaataagccgccccccacgaaaaaca

SEQ ID NO: 123770 - DNA, 540 bp, Arabidopsis thaliana columbia
gatactccaggtctaattccactcacattttggggaagcttgtgcccctgccaggaccgggcccgaatttccgggtcgacaccacagccttccgcgaccccttggccgagtttggaaaaaaaaaaaaggttttggggggaccccaaaagggcaaaaccaacttagggttgtggttccgaccggattttttcggccaatctaagttcttccggcaaaagatggcttttaaggattcatcatggtaagaaaaagagaaccggttgctccttctgaaggaggtgaaggttctgggcctcgtgaacctggtccagcctaaggtgggggacgtggttcacagcaagggggtttccaccagggaggaggacaccaccaaggtggaaggggttatactcctcaacctcaacaggaaggtcgtggtggtcgtgaatatgggcaaccaccacaacagcaccaccagtttggaggaccacacaagtcccacggaagaggaaaaggaggacctcctcatcaaggaggtcaaggagggtatggcggtgtccg

SEQ ID NO: 123771 - DNA, 489 bp, Arabidopsis thaliana columbia
gaaaaaaaaaaataaattctctgattgaactgaagggaacttaagagaaaacacccagccccgcaaaaaccggaccggaaacacagtttctacccagggggaagggaccacaaacaaaacgcgagaaagcccaggggagcatcagaacgcacaccgcaaggcgagaccacccccaacaaagaggagaacagaaggagaccccaccgggacgaaaaacaccacagcaaggccgaccgagacgcgactttttttttttgggaggggggagaacccccaacgctagggaacacccactgataaaagcctcgcctgcgagccacaaggcgcacaccaccccggcaagcatcaacgagaacccgagcaacagcaccgccccatcaaccgcaaggccggcactgaaccgagtggcagcagaaccacccgcgccactacgactggagcgagaagcgaattgggacaagaccggcctcggaacccagccccaccaca

SEQ ID NO: 123772 - DNA, 549 bp, Arabidopsis thaliana columbia
  unsure (1)..(549): unsure at all n locations
nnnnnnnnnnnnnnnnnnnnnnnnnnnnnnnnnnnnnnnnnnnnnnnnnnnnnnnnnnnnnnnnnnncgccctttnttttttgttgttttttttttttttctttgttccgaacccaacctttgtgttgagcttttttgggaccgaacaaaaagggttcaaccccccccctttccaaccgagttggggcttgcaaccaccggcaggaaggaaaagggaaattgcctaaaaggaaatatattggtggtttttgaaacaaaggcaatgtttggtggggtgggaaaacaaaaaactagggcttcaacataaggaatgggccggatttgggttttttttttggggggaaaacgacctaactttttttacatgaggggggcaggggcgcttttttttccttaagttggtcaagaaccgctaaattggtttcaaagtcttccccacccggcgggttggtttattttttgttctttggcgggaaaaccttttttgggggggaaccctccctncaaaccaaaggtttggggatggattttcttctccctttaggcttg

SEQ ID NO: 123773 - DNA, 548 bp, Arabidopsis thaliana columbia
  unsure (1)..(548): unsure at all n locations
tgattctccaggnnnnnnnnnnnnnnnnnnnnnnnnnnnnnnnnnnnnnnnnnnnnnnnnnnnnnnnnnnnnnnnnnnnnccacgcgtgcgggggcgaataacgaaaaccatggattcgaaaccaaccttgatggggagcttaattgggaagaaagatacacctttaaaggcttcgggttacgaccgagcttcggcggcgattcttgggatgggcggaaactgtgaattccacaaagggatatttattggcggtggtgaccgccaccgccttattggaaggcggtagaacttaaccaactttgccgacaaattcgcgactgtgtcctgtgggtctctctgtagaattgngaacctgtgttttggcgcggtgttgctttatatcctttactcttggatactatgaaactttctcttgaatctctaagtaaagttatcaaattggcaagaccttcggggagatggcactctgtgccagaggtagactcaaagtgaatggctttgacacacacgctggaggctcaggtttatggcaccaaatattttagag

SEQ ID NO: 123774 - DNA, 538 bp, Arabidopsis thaliana columbia
  unsure (1)..(538): unsure at all n locations
nnnnnnnnnnnnnnnnnnnnnnnnnnnnnnnnnnnnnnnnnnnnnnnnnnnnnnnnnnnnnnnnnnnnnnaccttttttttttttttttctcactaaagacgattacatattattatcctgtctgtcacacaccatatacataaatggattgatattcggaggtcactcgtactcttattaaagagaggatagagcaatttacatttttacttatagcaccccatgcatttagtatgaccaagctactgcatacatcaatccacattaggaaacgcctaagcatattcacccgattctgctggattagacgccggaccctggatggctagacgcctgacccagtggcctaatactagcactgatggtaggtacctacctgcacgtttcttggagagccacgaatggatggtgaaagctgtggctacaaggaaccagatgctgcgaaacatgcagctagcactgtagtggctatagtagctggcacgagaacaggactgaaaatgatcaaacgtgcagcgcttatgatacatgcgagca

SEQ ID NO: 123775 - DNA, 534 bp, Arabidopsis thaliana columbia
tctatacgactctataagggaagagctggtccgcctgcaggtaccggtccggaattccggggtcgacccacgcgtccggggacgcgtggggaccaaatcccagccgtattacttgatcataccacagatgttgagagattattcatggcggtcttgtccgccgggggtgctctatttatttggacattgaggcgtgtttaccctgcggagggtcagcgggctctatgtatcattagcacaacactttttgttattttgagccccgttacggagccagcgactatatccactacattgctagatctagggtgcacagcctatggtgactttggggccacgggtgtgaccatgcttttgaggatctacaagacacgtccaggtagggacctctcaaaaattccaagattgacgccaccggttacggcgactaaccaaccaggttccggcgacttatccaccataatgggggaaatgctactaggcgcctcctaattagggatgatgtttaaaggaagtcgatcacactaaattact

SEQ ID NO: 123776 - DNA, 599 bp, Arabidopsis thaliana columbia
  unsure (1)..(599): unsure at all n locations
gattgattatnnnnnnnnnnnnnnnnnnnnnnnnnnnnnnnnnnnnnnnnnnnnnnnnnnnnnnnnnnnnnnnnnnnnnnnctttttttttttttttaaaaacgagtatttataatggatcaattatattatccgagatatatggatcttttattatttcatcgttacagagcctgattttcatcatagccaaatcacctanacatacctccatacagtgactgcttgctctagtagacctctgctttcttgccaggtgcacctcaacgtctcctctgctgagcctgtaggcaagaatacactngtcatctgaggctcagtatgagctaagcacatgagcacttcagtacagggtctcattgatcgatctcgggcaagtagcactcagaatatagtaatcatagagcagcgagcaccatattctcacaggcattcattctatctatcttgctcaaacatacagctcccagagaagccacgagaggcttctttgggtntgactaagatggagctcancaggctntgagacaaaaagacatataatgagttactcatatgtgacacaggaaatcattcatctgatctctctatatatttga

SEQ ID NO: 123777 - DNA, 425 bp, Arabidopsis thaliana columbia
gaccttaaagctgcgtcatgccctctactggatcttaacggcgctttttttttatcaattgtgtgaaacttagtacacttctctacacaggccatttttttacggaattgataatctctctgtatatggattctagtctatgagtttcaaactacgccaccagctttcatgatgcatcaaggacaaacactgcctggatactagtgtcaacaggatgcttggagaactatcacttgtgatgaccacgctcaaatacaatggattggtactgagcacaacgtagtactgacaccctactcatttagagcaacctgcaagctgatgcaagtctgactcagcctgtacaactcaacacgcacttgagtgcattgatggaactagctgtcaattatatgatctcttgcgacctgcacggatcgacgtct

SEQ ID NO: 123778 - DNA, 429 bp, Arabidopsis thaliana columbia
  unsure (1)..(429): unsure at all n locations
agcgggcccctgcaggccgggccgaattccgggtcgcccacgcgttcgagcaaatcggaaagttccgcgatggcgtattacgacttttttcacaaccaacactttccttaaggccgggataccggcttggccttcttcatacgccggaatggttacccaagcttatccaccggtaccaatccaaagccttttttccttggagagggacatctaatgggaatcaccggcaccccctccgaaaagaaacttattgaggaggagaaacctgagcctctttttcccggccccattggcttcgcgataaaggaggaatggacatatccaaggaaagtntcttttatacaagggccgaaccttaatccccgaggcgtcctggcactttgaacctaatggccaaaaagctctttagacggatgggaattgaaaacc

SEQ ID NO: 123779 - DNA, 483 bp, Arabidopsis thaliana columbia
cgccacgccgcgtcgtagctcgatctctaagcggctgctcttttttgttcaagaagacatcgacaaaccggcagacataagaagaactgatccaggccgctgttccaccggactgaactgactgtgacaacacatgcaaaattgcatgcatttatggggaactacccatgctctcagcgaacaaaattggcagagaaaatactacctcactggaacagcagacagtgaccactcccccctctcgataaattcactccgtggtcaaaaggacaacccgcacaaagaggaaacacccaacacctcaaccgcaacgtggagcaaaaaccagcctacattcaaaggacatggtcacctcgcccctctgtcagcagaaaacaccaaagggcagaaccgcctggttcccccaatacggaacggccggagaaaccagaaagtccatccagccccaagacaactggggcgcatccataaacagactgccga

SEQ ID NO: 123780 - DNA, 519 bp, Arabidopsis thaliana columbia
gcctgcagggacccggcccgaattcccgggttgacccacgcgtccggggtaaaccctaaaaatttctgcatgggcctcccgggacccccgaagagaaaaaacttcttcttgtgaaacgcgggttaacattccaaagggtgagatacctgcacctggactacatgttgaatatgaccagcgtcctgatgtttttttttgaacgggggggatcccaacccccatgcccttctggaagaaactgcgcgaccagggagaaaccggaaatctcgggtacacacttgagttcctctttaggagagcgcttcctatcatagcgggcgccaccagcggagaacaacaccctgatctcctgggctggaagaaggaaggacagctcctccacgagcaaaatgggtggctgctagtttcaaccatgccgcccagaggagaccagccggtccctccgccaaataggggggtaaaagaacatactcctgactcaacagataccagctgccctgatggcttagaacggcccac

SEQ ID NO: 123781 - DNA, 464 bp, Arabidopsis thaliana columbia
  unsure (1)..(464): unsure at all n locations
tgacgtcgcatgcccccgtacgtaagcttggatcctctagagcggccgaccttttttttttttttttttaaggtcggaacgtggcagcgtattttcatttatgacaaagtcatacactctccccccactgaacaatgtcaggaagggaaaacccngacatntgtgttggaatangctaaagtctcatctcngtctcngtgataccatgaagggtctatcaatatcaacgttgtagcaacctgtaatttacttctaatatctgataattctttctggattcctaaagacgatcaagtcttagctgagcttcttctcgatacggcttgggcacactattcacanagttaactagattactcgtcgcatctgaaagatctttttgcatagcgtcttcgagctagtgagccacncatcagccactttattcaccttaccaattatagcctgtcttcgatatgggaagt

SEQ ID NO: 123782 - DNA, 530 bp, Arabidopsis thaliana columbia
  unsure (1)..(530): unsure at all n locations
gtacgtaagcttggatcctctagagcggtcgaccttttttttttttttttaaatataagctatagtaagggaaactaatatgtcgagtgaaccaatagaccttcaatgcagttatagtgtccttcgatgcagcacaatacaaacaacgaccatgccttaagtaggaaactaggaaatcaaaaaacacgttgatctaatgagaaacgatgatgtacatgtgacgacaatgcagcacacacagtatatgagggaacactaacagaatgaggatangctatatcacaaaaatcgttgttacacaaggctagtatagcaactgatcgtgatcctgacttcaacgcttacttgattccaagctctntattatacagcactcggtgtatccttggaactcatatttgagacggctagattgaactctctttggttttgagcagcacctgacctctctngcactttactatagcccactaaccagcagctcagcagtacgtactgctgatttgacagtgacccgtgtcgttaacttt

SEQ ID NO: 123783 - DNA, 450 bp, Arabidopsis thaliana columbia
  unsure (1)..(450): unsure at all n locations
tcgactcactttangggaaagctggtacgcctgcaggtaccggtccggaattcccgggtcgacccacgcgtccgaagagcttcttctacaacaatgcagacgacgagaagtgttcaagtaaatcatgtctcagatctagccacagagagagagattcacgagtttttctccttctcaggcgacatagaacacattgaaatccaaaaagaatttggacagtctcgaatcgcatttggtacatttactgatcccaaagccctcgaaattgccttgttattatcgggtgccacgaatggggaccagattggtacaataacacgagctgaaaactatgttcagaggcctgagacacaggaagtaagaatggtggacaacgcgatgcctgctggtcttcaagagagtacttcgcagactcaaaccaacattgattgggatagtagagcatacctt

SEQ ID NO: 123784 - DNA, 486 bp, Arabidopsis thaliana columbia
  unsure (1)..(486): unsure at all n locations
ggtgnnnnnnnnnnnnnnnnnnnnnnnnnnnnnnnnnnnnnnnnnnnnnnnnnnnnnnnnnnnnnnnnnncttttttttttttttatctttcttattgattttaatatttatttatttttttttacttttttctgaaaaagacttatcttcttccaaaaaaaccgctgtggggggaaaaaataaaagctctcaaaataacagggattggggggttttccaaaaaaatttctttttgcgagtttctttggggggctcaaaacaaatcttttcaggataaattagccctgccaaccgcttcatttttgcacaagaaatagaaattttgatcagggaatatcttcaccccgtaaacggggcttttgtttacacaaaaagccctgtcagctatcattatccttttccaccaagagcacctatttgtaattacaatcgtttagtctacataaacacctttttttttatgggaaccttttgtccttattcta

SEQ ID NO: 123785 - DNA, 580 bp, Arabidopsis thaliana columbia
  unsure (1)..(580): unsure at all n locations
gannnnnnnnnnnnnnnnnnnnnnnnnnnnnnnnnnnnnnnnnnnnnnnnnnnnnnnnnnnngcgacccttgcgttcnttcactctttcgtttttttattcatctttttttcccatattttntaaaaaataacccaaccaggttattttcttttttaaaaagggtttattaaaacccaaaaaccttttaaaaaaattttaacggggttttttggtgccaccactttttttaaccagacccccaaccaaaaaccgggaaaggggaagccagaaccttaaccgtttttttaaaacttccattcttaaaccttttttttaatacttggaaaccttaaacggaaaggttttaagttgccctttacccgagtttactttacccttggaaaccccaaggggttgttcaaaattaagttttgattttaacaaaaaacctttttggaccttttttaaatttttctttttttcttcccaaatttttaaaaggcttttgttgaaccgcctttccaaggaaaaaggacaccacccaaggttctttggccttaaactggttaatcgggttaaggttcttggtggccttttcc

SEQ ID NO: 123786 - DNA, 506 bp, Arabidopsis thaliana columbia
ctatagaagagcttggacgtcgcatgcacgcgtacgtaagcttggatcctctagagcggccgacctacgcgttcgtccactctgttcgccactgcgttcggtttagaaaaaagatgaaaacattatctattatttatctaacacatattaaccaactgcgaaataacaaacgtgctaaatatctagtggtcaaaactattttttttaaactaataaatttctcattaattttgagaactttataatgtaaaacaaagaaaaattctctagaacatcaaagattttgaaacagaagacgcacgtgtatgattaattatggtaattccaagatgaaaatagcattgtaagagatcaggcaacgcctgacttgatatcctcgacaagctttatacaattgtttagtaagcttctcggagggatgagcaaagtcatagaagacatatttatctggggtggagcatggtactattgccagaagcatacaacaacatacattcttctgatgg

SEQ ID NO: 123787 - DNA, 422 bp, Arabidopsis thaliana columbia
cttgacgccatgccctctactgatcttagagcgcgccttctgtcttttttggagatgattgtggatgcttatatcgaggctttggtgggaatacatctagtgacaagctttggttataccacagaaacaacacattatcttaactgttgccataatgatcacattgcgagctcacatgttgggatttgccaactgcaacaaccggacatctttactttcctcggggtgcacttctgattttgagaccatattaagatgtagtcatctgcctgatgagtttttagttgctgtggattcgtgatctcttgtaactgctcatctttagcattcgatctgcccactctcatgtcggagaatctcacatgtgtgtacgctacttgatcagtctaatcacagactcatgttgaaatctacctcatata

SEQ ID NO: 123788 - DNA, 681 bp, Arabidopsis thaliana columbia
  unsure (1)..(681): unsure at all n locations
nnnnnnnnnnnnnnnnnnnnnnnnnnnnnnnnnnnnnnnnnnnnnnnnnnnnnnnnnnnnnnnnnnnnnnncttttttttttttttttcatagaaatggatttttgaaaatcatggagatgggttttgtttgatatcatatcaagatccaaaacatggtatgagacgatatagcagctaaaaaccaattaaagaaagataaaccaacagacatctgaaacctatcgcaagagagagcgggttgctgcctgcaaaactcagtgtctttagtgaataaaacagtaactcctgcagaggaacacgcggctgcaagagcgagaagtgcagtgacccaatcaccaacagtgaaaaggctcaataagatagggcttcgtaaatcactttttctccttatcgcatatacatcaagacacgcaagtccaaagctccatatcaattgaagacccatagatgcgactaagaagcagaaagcagtgtaattggaaaagtcgtaagaagaaaccattacaccaatggaagcagcagcagttgcacattgccctagtctcagtatcaacccactcattggttcaggactcccantcatcttcttcattgatcagaacccagaaacaaacacagtaaacagaccanaaccaagactttctatcctggttctcaccaaaatccccgggagaaaaaa

SEQ ID NO: 123789 - DNA, 516 bp, Arabidopsis thaliana columbia
atacgactcactttagggaaggctggtacgcctgcgggacccggcccgaattcccgggtccgcccaagccttccgaaaaaccaaaaaaatttgtgggaaaatcctggtttttaattccttttggttaaaaaaggtggcctttttaatggtgggtttcctgggggcaagcttctaattaccccatttccgtccaattaatgatcttaggccaccttttgaaattggggttggtgaaattttcctgaataaaattatgggttaagggttttaatgaccattttcctgtaaagtaccgatttttttctcccggggattttggggaggaacaggatacaaagcctgggtttggtcctgttaatggcgttggtttttgggttctgatcaaggaagacgatgatggggagtcctggaccaatgagtgggttgatactgacactagggcaatgtgcaactgctgctgcttccattggtgttatggtttcttctaacaacttttccattacactgctttctgct

SEQ ID NO: 123790 - DNA, 563 bp, Arabidopsis thaliana columbia
ggtgacactatagaagagctatgacgacgcatgcacccgtccgtcagctgggatcctctagagcggccgcccttttttttttttttcttgagtcaagactgttacgaatatacatcttagcagtcactaaacaagagtcataaagcatctcatactcatagagtatgattgatgaaatctgccaacacacgataagccttagaaagcatacatgatattcttcattaatgcagggcataaagatacatagacggagaacaactcagcagttgacatgacacgcttcacattctctctcacagctgggagtgggctgactgcaacattgacattaggcccggctgtccttactactcagcattcgacgttcacgtgccctgctcccactagccatccagccactggctgatgttcgtggctcccatgataatccagccctgaaagctgattgaggtgcataatactgcagggggaccagtctgaaacttgagcttgtgcattgttgcatactgagaacactatgttatctgctcgaagattgaagtccatctgcacaaccactt

SEQ ID NO: 123791 - DNA, 523 bp, Arabidopsis thaliana columbia
tcattacaataaactaagggaaggttgtgccccttccaggaactggacacgaattacacagggtcgaaccatagccttcggtctatccttcgggaagggggaagaaggttcacaataggtttaacgggccttgttccttttcttggaaggcaagttaaaatttttcttggcggaaaatgaaacaattataattaaaattgttttgaaaatggtataaagatgttttttttaccaagggaattaccttgtgtttttttgatggtgaaaaaaaaactttgaaattattaaaaaattctttaaagcttggggaaagacaattcaaaacttttattcttccgcaaagaagaagccttccttttttcttaaatgggttggccggggcatattggaagcctttttaaaaaagatggacttagtggggcggttattaatggccttaaaaagtttctggaaggaggaaccattccaaattttttaaccataaaaacggttggcaacatatttataaaaaaatatagaattt

SEQ ID NO: 123792 - DNA, 462 bp, Arabidopsis thaliana columbia
  unsure (1)..(462): unsure at all n locations
cgccaggacccggcccgaaatcccggggcctcccaagccgtccggaaccgcggacatgacaaacaacccgggaaacgtacacactttgaggttggctggaaaagagggcccggccctggctggaggaccaccatggncctcaaaaccgcagagcaaccacctctcaccggctctcgaagcagggaaacttctcccttgaggcggggcaacccccgggggccccgaagatagcgacaggaacgcggcgcaacaccaggngccgcccccccgagccccaaggcacgagacaagctggcgcacccaggaccgccagaaaccgggaaaggacccacgggaggggccgcaacagcaacccaaaccccggaaccctggaactcggagggaacacacccgccaccgtactccgagaaccgcacatcgggaaacgggggagagccggcccacctcgcccccttctcccac

SEQ ID NO: 123793 - DNA, 487 bp, Arabidopsis thaliana columbia
  unsure (1)..(487): unsure at all n locations
agcnagggaccacaagagcggcctgcccggggggaaaaaccccnnaacccnangcgcccaaacacgcaggagcgagaggcaccaacacagcaccgcgcagacggagcacaggccacccaacacccgaacggaaacagcgcacaccagccaaaaagaaagagaaacagggcgcacaagaaaacacctccaaaagagatggagagacacccggggaggacgcaaaaaaggaaccccccgcaagggggggggcggggcagccaccccaccgcaggggagaaacaggcacacccaaaccngccggggccagcgcgccagcacaaagaagccgcgggcccccggaggaccgccgcgccaaaaccacaaggccggacccgcccccaagaccggaagcacgggacacaacaaacagagaccagggcgcgacacccggccaaacaccgggaaccccgagcaccgcggcaccagagcaaagccgagcaaaacacgg

SEQ ID NO: 123794 - DNA, 487 bp, Arabidopsis thaliana columbia
  unsure (1)..(487): unsure at all n locations
ccccccgccaggacccggnccggaatacccgggtctacccacgcgcccgaaagccccaatggggaagaaacgagccacgaacagggagagtccgcgaaggaacaaggcgccgggagaagcaaacctgacggacctaggtctagagaagaagccctggagggacatatggctatcggcaggcgcccataagaagcctcctccgaggaaggaagccccagcnagcaacaaaagacgctcgcgaaccgcaaccgacggaggggagaccccaccncaaagccgggcacccgcccaacgcnccggggaaaaggcaagagcccaaagagaagcccaccggcgccgccagaagccgcccaaccgaaccgaaaccaagggccnaccagcccccccaaaagcaggccaacccaagacccgcccccgaaggccaaagaacggaccaaaacccccggaaaccacccacaaacccccccgcaacgcccccgccaagaaa

SEQ ID NO: 123795 - DNA, 546 bp, Arabidopsis thaliana columbia
  unsure (1)..(546): unsure at all n locations
nnnnnnnnnnnnnnnnnnnnnnnnnnnnnnnnnnnnnnnnnnnnnnnnnnnnnnnnnnnnnnnnnnnnnnnctttttttttttttttaaaatgaattcatgtaacattagtcaatagccacacggagatcttacttcataaacaaaatggacaggctcacttcaaggaatacatttagcccccacctctttagtcaagggggcttaagatttcatatatacagcaaacttttttctagtctttattgcgctgcaatatttaaattatcttgaacgtatatatgcatacaccataccaaagatattgctgagaccatctaccactcgactgattcgacgatcgttgaagttaaatcactacggaccttatggattaaatgccgaaacacatccaccatgtggttctgtttacagggctgattgatctagatagtagcacccatattgactatttactcagcggctactgcgataaccccactggcgcggctcttaacgttaccgttcgaatgatgagcatggctgtaactgtgaacgccaccacctt

SEQ ID NO: 123796 - DNA, 475 bp, Arabidopsis thaliana columbia
  unsure (1)..(475): unsure at all n locations
ctcacttagggaaagctggtacgcctgcaggtcccggtccggatttcccgggtcgacccacgcgtccgctgtggacctattgtgattacatgtactcattatcgcttacggttattggtggaagccatggaagctcatgcagcagggcgtttcagagcattacaaaatcatctgcntcaggattgacttgaagattcaggacacaaaccaacgctggctggtcagtattcgcctgtatctaagcactcacccatgacataatcatccactacagagatccggatgaaggcacccaagagttactgaagctatctagctacttacttacatctgattgatgaacaatctaactggatctactcgctggtgctatgcatgaccaggcgtgtcgacatgctgctttggattgaatgaagcagtatcgtgaggccttgccaatcctagtaacagtcgaggcacatgacccanaaacact

SEQ ID NO: 123797 - DNA, 504 bp, Arabidopsis thaliana columbia
  unsure (1)..(504): unsure at all n locations
ctatacgactcactattagggaagctggtacgcctgcaggtaccggtccgggaattccggggtcgaccacgcgtnncgccacgctgtacgggcttcagtatgcagaatcttagtctccattgcatatctttcgacatcgtgacacagaccatagtctcatttatgttatatacgatttaggtaaactttcatttgatctagagatcgctagcatcgatggacgatgacttgcaattgcacgaggagaattcatctcatgggtaaagagacaccggttcggggaaaggagccctatattgagaaattgacaatggcagttgtgtacgcgcctccgaagagtacgcgtggcaggggctggggttgctctgactttttgcgcttaccgatctctaaaagctgcggacgatattgctggacatgctgcancgatgtcgagaaagcagcgaaagcattgcanagatgggataagtggatgacgactctgaatcttctgctaaggatgag

SEQ ID NO: 123798 - DNA, 554 bp, Arabidopsis thaliana columbia
cacgcgtacgtaagcttgggatcctctagagcggccggccttggggggttttttttgtttaaccctctaatggtagaggtctttgggggatgaacggcaacaatagcctgtagggttggcattggaaaaaccccaagattggattgtttatatcgcctggagagaggtaacgacgcggatccccaccacccggcacccacagggtttctctttgggggtggggggaagaccccaggaaaaggaggcgcgggaaaaaaaaaaggacaaaaagggaccgccacccgcgcccccgcaaggaagtgggtttagccacgcgaggtgggggtttatgccttatcttgtcaaccgcggaagaaggggggggggctcaggtgacaatgtcaggagtgaaaaatacgagtcgtgcccccacgtatgtggggccacagggaagcggcgcgcgttttctggaagctctgagtacaaacggggggtcaccttacacaggagtcatccgcgccattaattccatcgtatgagtaaactaagacttgtgaattagctaccgcgtgggg

SEQ ID NO: 123799 - DNA, 494 bp, Arabidopsis thaliana columbia
gggaggcaacccccccgcggcccggccggaatcccgggtcgcccaggcgccccccacgaaggggacccagagggcgacaccgggaagcgcgcaccgcaaagaccaaggcaccaacaccaggccgaacaacgcggaggcaccagaaacgggaaaagccgacagagagcacccaccgacaacaggaaccacgcgtttttttcaagaggggaaagcgaaacgcccaggccgccacggggcccgccggagaacgccagaacccccgagcgggcaaaagcggaacaagacgacgccaagcacgaaacaccgggaccccaagggaccaacgtcacccccaaggaagcgccaaaccagagaggccagcggaccccacccccccacggcaaagaggccacgcgtgcaaaagaaaaaacacaccggccgacaaacacgcgcacgcacaaacaccacagggaccacaaccgaccgcagcggaacaaaacggggggggcgcccca

SEQ ID NO: 123800 - DNA, 492 bp, Arabidopsis thaliana columbia
  unsure (1)..(492): unsure at all n locations
cagagcggtttgcccggggggggtatttccgggagaaagccnaaacccaccagaaccggccaggacggaagcaccccaggaccaacggaacgaaagcacaagggcaggaggccggcccacacaccaccaaggggggggcgaaggaaaaacaggccnccaaaggaacctttttttggggggggggaaagggcacggaccaggggagaagggaaacccaacccggcggagggggggaggccagccaaaagggcccggcnccccggaggccaaggaggaccccacccgcgggcgcccgaggacccccaacagcccgaagccccgggcgggggggagcaaaccccacgcaagggcggcaagacgcgcccgggcggaaccaaggggaagggaaaccgcgacggggcgggaggggccacccggacggcgacacaaagccggggggccggccacaggaagggaaagggcacccagagaagcacagggggccgggggggg

SEQ ID NO: 123801 - DNA, 594 bp, Arabidopsis thaliana columbia
  unsure (1)..(594): unsure at all n locations
gggacgccgggcgaggggggagagggaaagaaagaaaaaaaaccttcnttgttgacacgacaacactttaggggaggccgagccgccngcaggaaccggcccggaaaacccgggtcgacccacgcggccggcgcaaacaggaaacgaagaagcccgcgccgagagggccacccccacccgaaaaggggggagcaaaacaccccggcgagagacgcaaaccggaaaccgccacaacggaacaccaaaaaccaaggcggccacagggaggccgcgcgaccccttttttggagagaacggacaaagagccagcaggggaggagccgggcggcccccgaaaaagcgcccacagggaggcacataccccgcgagaggggcggaagaaccacgaaggaccgagagggagcgagaggggagaaaccaatgacgccgcggccacggcgacgacgccacgcggcgcaaacaaacacccccgaggcggagcgagcagcaaagacggaacggacaagcaaggcaccgcgcacccacacagaaggcagcgcacaaggaacggagcaacgcgacccgaaagcgaccggccccgcaaagacaccgaaa

SEQ ID NO: 123802 - DNA, 520 bp, Arabidopsis thaliana columbia
  unsure (1)..(520): unsure at all n locations
gggcccccgaggggctccccgggggggcgagccccgngccggcgcccgccgcccccggcgcggggggggggctttcccgccgggccggggggcccgcgcccgcggcgaccgggcgggcgncgcccccgcggcggcggcccccggcgcgggcgggcgggggggggcgggcccccggccgccaaaaccctctagggggggggcaaagacacgcggccccgccccaacacaccggaagagaggaaggggggggggggagccggaagcacagaacggggcccgaaaggcgggcggcacccgaccacccgccggcgccacgcgcccgcgggggcgagcccgacgagcacgggagaccagcgcgcgccccgccaacccgaggcgaaacgggacggaagccgcagaacgcggggccgagagagcgccgcaggaacagccgaagcaggcgaagcacagaagagacgaccaacaagaaagcggagggaaagccgcgaccgggccggcggggggggggcgaggccgaaaa

SEQ ID NO: 123803 - DNA, 487 bp, Arabidopsis thaliana columbia
  unsure (1)..(487): unsure at all n locations
gcgccgaagcgggaccccaagcggctccnggggggagaaccccaaaagaaaacgcccgaggagggacaaaacccccgggggggggaccaccccaaaaaaccacgggaaagaagcaccggaaaaagaagagggaaaacacgcggcaaaaaaaaaaaaaaacaacaatttttanaaggaagaggggaggagcacccggaaaaaacccccaaaaacaaacacaaagggggaggagggggggacccgaaaaaaaaaaacgggggagcacccaaaagaaaaacaccggggggagaaacccgcccacaccccgcgccagaaacccacgaaagagcggcgacaacacggggacgagaccccgcacgcaggggggaccacgcgaccaaggacacaccaaagagccgggggaggagcggaggcacaaggaccaacggacaccaaaaagccgcgagaagggaggcagcggccaacgccacgggacgagaaagaaagg

SEQ ID NO: 123804 - DNA, 469 bp, Arabidopsis thaliana columbia
  unsure (1)..(469): unsure at all n locations
acccccccgcggcccggccggaaaccgggtctccccgcgccggaaccaaccgcccccgccggnaagaaaaaaaagggggagcacgaaaaaaaccaaaaccgcaacaaaagaagcgggccggaaagaaaagccccacgccagaagcccggggcgagcccgggggcgaccgggttttttttttgggggggcggcgcnaaccaaaggagaaccgccccaaaaaggcgcgaaaaccgcgcagcgaagcggaacggggagcggggaagaaggggagagagacagccggccgggcccacgggaggggcgggcgccacacagagggcaccaaccgcccgcggggccccgacggcaccacgcgcaccgggcaagggcggggccgcagcccgcacggggcagggcggcgacaacacgccggggacgaccgggaagaggacgcacccaaccccgcgccaaccacgcgaagggaggcggg

SEQ ID NO: 123805 - DNA, 584 bp, Arabidopsis thaliana columbia
  unsure (1)..(584): unsure at all n locations
gcgccgcaagcagggagccaccagagcaggcctcccacccggggaagaaaaacccacccaagaaagaccccgccacgcccaaaaaaggggaagaaagcaagccggncgcggcaaacgcagggagcggccgccccaggcagacccaaagcccaacaaaccacacaaggccggaaggcaacngggggcgggggagaaccgaacggaacaacacggagcaaacacagagatcttttattagggggggggagaacccaacacccccaaggacggagcccaccacgcaaaacacaaagagggagcggaaggcacgaacaacgccgcccaacgcgcgaaagccgcgaacaagagaaacaaccgaccaggacacgaaaggaacacgcccccgcgaaaagggaaaggaacccaaagaccccaagagcacacaggaccgaaaacccacgaggaacgagagcaagacacccccagaaaggccacagacgagagagaaggacggcacccagggaacaccacagacccaaaaaaacgccacagcaaaacaagacagcgaacacagcagacgcacggaaggaaaacggacaaaacaa

SEQ ID NO: 123806 - DNA, 410 bp, Arabidopsis thaliana columbia
  unsure (1)..(410): unsure at all n locations
gcccccccggcaggcccggcccggaaanccggggtttcccccggcgtccgaaagaaaccggggccaccnaggaaaacaaccccacgggggcgcagcgaacccaccaccaaaagggagcagagcacgcccccgaaggccggaccaagcgacgccgaagcaagcactaaggacgcgacaacggaggaacaccaggagaacggggccgcgtttttttttaggagcgtgaagcncgcangggcgggcgaagccaacgaacaaggcccgaggaaaggaaacccacaagagaatccccagaggagagaaaccccgagggaccgcaaaacccgggaaaaggaccggccgcaagaagagaaagaccccgcccgcgaggggaccggagaagcgggggaccccccagagggcacgacacg

SEQ ID NO: 123807 - DNA, 477 bp, Arabidopsis thaliana columbia
  unsure (1)..(477): unsure at all n locations
ccgccgcagacgggaccccagacggcttccccggggaagaacccaacaaaaaacccggccgagggggggccaatcacaggggggagagaggccaaaaacacaaagcccgccgacccgggggcccgggagagggaacacagacaaacaaagggcgccccaagacattttttctggggggggaaaagaacacaancagcaaaaacccggcaaccaaacgaaaagaggcccggggagggaacaacacaacagggaagcaggcgcccaaaaaaagacgcacccagacgggggccgggcccaaccccccccacgaccaaaggaaccccacccaaaccggaagcacaaccagggaaccccccccccgccaaaaaacgggcccgcgagaaaccccagaaacggggccccaagggggagggaaaaacacccgggaccggcggacccggggacggaggggcccaaacacaaaagaggccaagccac

SEQ ID NO: 123808 - DNA, 486 bp, Arabidopsis thaliana columbia
  unsure (1)..(486): unsure at all n locations
acccgcggggacccacgccgccgacggcccacaagagggccacagcccggagcaacgagccctaaaagaccgcaacggcccgagcgagaaaccccccacgcgcccagggcaaaacaccccgcgaccggagaaaagcaacacccgacaaacgagaacagcgcaaagccaggggacggagaccttctttttaagagggggggggaagacgccccgccncgacgaaaggccgcgggcgcgcggccgcccccaacggcaagcgcaaagccgcccgaaagaagcgcgcgaccgaagccacgacggcacccggacacccaccccaagggaaaaaaccgcccccgcaacaccgaagaaaccgccgccccaccagacccgaagcaggccccgaccccccgcccccgaacggacagaaacaaggaccgcagacggagcacaacgcaacggaaagcccgccgaccgaacacccaagagaagcgccccggcgaagaa

SEQ ID NO: 123809 - DNA, 476 bp, Arabidopsis thaliana columbia
  unsure (1)..(476): unsure at all n locations
cacgcgcgcgtacgcttggatgcaccagagcgggtggccgccctcttttttttctttttatgtgaaaggccgcgttggtgcgggactatttagaaacgccaagcaaacccatagggacaacagggacgaaacgaggtttggctaaaaagtggacaagcaatgaacataaaaaaagcaaagccgacgaaaccactttttttttgaggggggagacacaacggccangggcggaaaaaaagggaccaaaaacggcgcaggggcgacaggccagccctggccaagaggtgagacgagccggtctgtattggtgtatcccccacaggccagagggaggggacttggcggtatacaaatacacgtggacatattagaagctctggagaccaggtcgtcagagggagaaggaggcgggggagaagagcagttaaacgccggggggacaagcggtgccccgggtgtgaaaagatcgaaaccgg

SEQ ID NO: 123810 - DNA, 564 bp, Arabidopsis thaliana columbia
  unsure (1)..(564): unsure at all n locations
aaaaaaaaaggagaaaaaaaaaaaaaattttctttatgttactagacacanncttgggagagcagaaccgcccgcaggaaccgccccggaatacccggtcttccacgcggccgctctcctggnaagcccgaaaaagactcgcacgcgaacgcacacgacgcncatagaatctgctagacctggtacttattttacactctgtctagcgaaccctaagagcggaaggctctgttaacagacctacccgaaccgaacacctctttttcttcgaggggcgaaaaacgccacgcctccagaccccggtgcgccgccaaccaacaaccgcggcaacacaccccaaagaacacccgccaaccatcccgacagccacggcaaccccaccccccacgaaccaacgcagcgccacccgccgagacacccgacacccccccccttcaacaatacgacatcgcccctccccagggtcgcgcaaaaaaacaaccggacgtgtgaagacccgaacgcaaccaaaccggatgctatccgaagacatgcgcccgaacgccacatccgcagaacccccaa

SEQ ID NO: 123811 - DNA, 512 bp, Arabidopsis thaliana columbia
gaaccccaaaaaacggtttgccccggggagttatttcttttttcgcagcagggacaaaaccaacggggggaatttgggaagccctgggtatcgcccatgtaaggcctgtccacgcgcaggacctgttgtcaaattgttccgcggagcataaggtaaagaaagaggggggagcgagcaattttctcttttggagtgggggaccccccccccccaaacacaaccacgggggccccccggacacggggcggcgcgcggggggcccccaaccgccgggaaaacgggggccagcagggacagagagcaacggccaccggggaacaaccgcacggcaaggcccgcgggggcagaccaaaccccagaccgcccacgcaccaaaagcgagacggcggccccgcgacccgggagcagagaacaaaaacggcggccaggcacccacgcaggcaacgagacgaaagcacgagcaccaaacgcggggcggcgacaccaggaaaacgcaaagggaaagagggagc

SEQ ID NO: 123812 - DNA, 506 bp, Arabidopsis thaliana columbia
  unsure (1)..(506): unsure at all n locations
accccagaaagggctccccggggggggggggaccacaaaagaacccaccccgcaaagagggggaggccccacaccagaaagcgggcggaaccacaaaaaacgcgagacgaagaacaaacaggggaggacgaacgggggacaggcgggccgcaaagaaacgaccacagcaaaagcnntttaaagaaagaagagccgcaaaaaaccgccgaaaccnccccaaaaaaacaccacccaacacggggggggcggggggcacgcaccacaaaacaggcacaccaccaaaaagaagacacaacacacaaaagagagagcaggaccgcgaccacgagacgaaagcgcaggaaaaaagaagaaacgagagagacagaacggaaaaaaaagccaccaaccgacgggagaaacaggcccaacggagggcaccagagaggagccggagcaagaggagaaaagacggaggacacgaagacgaggaagaccccgcaggggcgacgggagacgccacccgc

SEQ ID NO: 123813 - DNA, 519 bp, Arabidopsis thaliana columbia
  unsure (1)..(519): unsure at all n locations
cgcgtacgtaagcttggatcctctagagcggccgtcctttttttttttttttttttttacacgaagagcccacatttagattaaataacttaaagccactaacaatataattaaagcattaaggcttgacccacaaaagaaggaggtggtcactaccatgatggattcatcatcaccctttctttgganaaacttaatagtatggttgaagcagcccgggtcgcaccaagcagaagacttcaccaccccaagcccctggcttttttaatttttccaacttacaagggttctggtttgcaaaatacattgcttgctggacctaccctttaaacccagccaaggggttgttcttgataaagatctgggtggcctttaggaacttcttgaaaaaagaagcccttgtcctttaacccattttattaaaaattggcctggttcccttctgccgagggccaactgatggcccccaaggaaacaaaaccctggttgcctagaaaggtacggtaagaatttgtggtc

SEQ ID NO: 123814 - DNA, 495 bp, Arabidopsis thaliana columbia
  unsure (1)..(495): unsure at all n locations
gcccccaaaggggcgtgcccccggggcaaaaaaccccnncaaccaaaaaaaacccaacggcaagggggaaaactgggccaggaaaaaccaaggaccccccggaaaaccgggacaaacccggaaaccaaaagaggggggaaaagaaagaaacgagaagagcccagcacaccaccaaacctnncttatcgcagggagacacacccaaagcaaccaggggaacagagacacgggccccaacgaaggggggcggacaaagaaggcgcannccccaagaaccaggaccaaggaagggaggacaccggggaaacaagaacgcgaccgggaagagacccaggcccacaggccccggcaaggagcgcaaaaccgaaggaaaaaccccgagacaagaaccacgccaaggacggaagaggagaacaagcagaggcaaggaacgcaaagggcacaaagagagagaaagagaaaaagacgcccacccacgcagagcgcacaagggcg

SEQ ID NO: 123815 - DNA, 465 bp, Arabidopsis thaliana columbia
  unsure (1)..(465): unsure at all n locations
nnnnnnnnnnnnnnnnnnnnnnnnnnnnnnnnnnnnnnnnnnnnnnnnnnnnnnnnnnnnnnnnnnnnnccacgcgtccgaatgagacaactatatgctctcttgacgtactatggtcagactcgtgcagctcatacgcactatgatgagattgtttcaacacacttagaagctgcattgcctctccagtctggcggaatgctagcaacgacgttacttacatcacaagattcgtgctaggagttaactgcgtgcacgtgtgacctacgattgctaagatcacatatgaaacgctctctaaccactctgaccttaccgactcctaatcgagatgagaagttgactacctcatacgcaacaagaggattgcttgaggtgaatgcgagtaggagcaccgatgaatgtacacacagcactgtaactaacacggatgctatgatagacaagacgtgacaatgagcaagc

SEQ ID NO: 123816 - DNA, 180 bp, Arabidopsis thaliana columbia
ctgggacgcctgcaggtaccgggtccggaattcccggggctgaccacgcgttccgacggatagcatcagcggggtatttggtgagagttctgatgggtgatctgtcgctcttggagtaacttgtgctgctggattaaatggttttgcatatacaaagatgaaaccatactcccactacta

SEQ ID NO: 123817 - DNA, 487 bp, Arabidopsis thaliana columbia
  unsure (1)..(487): unsure at all n locations
gtctatacgactcactattagggaagctggtacgcctgcaggtaccggtccggcattcccgggctttctcaattcctcaatccttactctcttccagggtaagatcttatatganatgatttgctaagaggacctatagtctcnggtgatcggngaattcgatatggaggagagtgaacanaggggagaatcagtcaagaaactgactaggcttgtgtttcagttgatagaattgngtctactntactctcatcatttgtgaagaaaggtaaagaagtatcaaataagagaaattctaagcagaataagcgaaaagcggaagaagaactctgttcgaaatcaagaaccaagaagtactctncgggatgggtccgttgtgaggaaatggangangagaaggggtagaaaacaganagaggggaaagtagagacagcnaaaggataatanggttgaggttgatgatcctttaagggtgcaaaggagaca

SEQ ID NO: 123818 - DNA, 156 bp, Arabidopsis thaliana columbia
acccgcgcgacgtcggcgaccaccacaaaagcggacgagagacccagaataggaacggacagtttaggacagaagaaaacgaccccaacccaaaaggaccgaggaaaccaaagacaaaagaaacagctacgaaggccgccaatacgaccaaacgga

SEQ ID NO: 123819 - DNA, 439 bp, Arabidopsis thaliana columbia
tcgccaagccccggggaccggaagaggagagagggcccacgaaggaacgggcggcgcgccccgaaaagcagtaaggagagggcaaaaacacacaagaaagaagcattgctccgcggggggggagaccaccaccaccgagaagggacaccaaaccagacccgcgcccgaggggggggagggggccaaagagagaccgagggggggggaaggaaaagaaccaaaaccgcggccacggagagacacccacccacaaccaagaccccaccgcgaggaacacacaccgcgcacgaagacggaacgggaagcagggaacagccaaaaagaaggccgggcgagaacgggccaggaggaagacgcgaaagcgaagaacaaaaaagagcgggacgaccagaggcgcgacacgccacggaggcaaggaaggcaagcggaaaagcaagag

SEQ ID NO: 123820 - DNA, 484 bp, Arabidopsis thaliana columbia
  unsure (1)..(484): unsure at all n locations
cgcaccgaaaaaccggtttcgccggggcgaaaaaccccccccccgacaggcaccaggcaccgaaaacgccagggcgcccccaaaccaagccgaaggaaaaaagcaacaaccagggcggccgaaaaaggaaaaaacaccaaccaccagagagcggagggaaccgagcggcgcaacaaaaatctctctttagcgggggcacccaacgaacaaagggacgaaaagccacacagaggaccaccacgcggggcaccccaaacccaaacaaagccaagaacgaggggggggggccgaccaaggagncaccccaccgcgccgcgagggcacgagaaaaacacgagacgggggggcacgcagaggcgccaacaggaagacgagccgaaaaaacagacacgaccgaagacggaagagcgaaacgcgaaggaacgcgaacgagaacgcaaaccaaaccgggcacgcacgaaaggaaaccgaggacgggacaaac

SEQ ID NO: 123821 - DNA, 487 bp, Arabidopsis thaliana columbia
ggcccggataccggggctgtccacggcgtccgttacccgcctggccgatcttttcattctccgaccacccatgagcaaaggcccaggatttttaaccgatatcggcaggaaagccaaggatctgttgacaaaagattccaattccgaccaaaagttaagaatctccactaccagtgccttcgttggggcctttacgccaacggccctgaagaaaggaggagttcatgcccgttgttgttgcccccccaatacaagtccaagatggctttggctggatgttaaaaaccgccccctggtgcctaggggtttggacaacagggccacctccccgagatgctcccatcaaccaaaggcattgccccctttcaaagccccccttttaattccgccaagctcgagggggcaacctttccaccaccccccaacagatccccgtgctgcaccttttagaccaaaccccctacttggcataagacctcctctggtt

SEQ ID NO: 123822 - DNA, 452 bp, Arabidopsis thaliana columbia
  unsure (1)..(452): unsure at all n locations
gccgccgaagcacggcacccccagagcgggctccccgggggggaaaacccncaaaaacaacccccgcccgaagagggggggaggtttgaccacacgaaggggagaccagcaccacagaaaacaaacgaggggcggggaacaaccagaagagacacgggcagccgagacaccgggcgaaccgcaaagaccaaagaaaaaaaacaaccttccaggaaagccggacccacaccaacaccgcccccgaggaaggaaagacacacccgacgcagcggggggcgggcgcgggggcaccggacagccgcaaccacgacacaccaaaccaggggacaccgacacacccgccaggggaaagcgacaccaacaccacagggaaacagacacggaaacaaagcagaccgagccaggacggcaaggacgggcccgaccggcacaaggacgccacacaccacaca

SEQ ID NO: 123823 - DNA, 508 bp, Arabidopsis thaliana columbia
  unsure (1)..(508): unsure at all n locations
ggatcccgggcgagagagaaaaaaaactcaaaagacaatctaaaggcgtgagacgcgcacaccgccacgcgcccccttcctccacaaaccaacgcgccggcgccggcggcacgggcactaaccgcacacagcccttcccgcgcccgatccccccacatcactgactaccggacgccaaaaccgggnccccccacggacctccccaccccccggccgggaccctccaaaagcggcccgaaggcggggacctgccaaggccgagagatcccaaggaccacggcggcggcaccgggaccgaaccgggcccaaggccccacgggcccccgctcggcgggcgcccgcagagaacgagggcaaacccgggggcccgccccgccacgaccccgcgcccaaacccgggggcgcaccggacaagcgccaagaacccacctcaaccccagaacgcgaacggaatggccaaccgagaccccacacccccacaaaacaggggcaccaggaccgccgaccc

SEQ ID NO: 123824 - DNA, 528 bp, Arabidopsis thaliana columbia
acggcgcatgccccccttccttagcctggatccttttgaaccggcggcccttttttttttttttttttttaccggttccaaaaaccccaataggttttttcttttaaccggaaaaattccaaccatggaaccaggggaggttttttcagggcaaaaatttaaagaaaaaccaaaatggggggggacctattctaaagggggcccaggtaagttattagtccacctccttctcactgttttcacctgtggaatcataggtgtgtctttggaccaggagagataatggccgattcttgaccttaacctctaggctctgcctctctttggctataggctgaaaatggattcaaccctaaatcactcctgatatgtccagggttgtatggcctgtgtgtttgggaaaagcaatatcgctgtgttaagtaattatcgccaaaagacatggactggcctaatacagtcctgatgcgaatcttaacatcgaggcaagcgtcattgaccatgttttttaactggggaatgataccc

SEQ ID NO: 123825 - DNA, 457 bp, Arabidopsis thaliana columbia
atgatacgctcagctctatacgactcactttatggaagctggtcgcctgcagtaccgtccggatcccggtcgaccagcgtcggattcacagcgatcatgtatgctctctttggtcagctattgatgatcatcttctctgccaggtgcagtcttgtgctctgacatatagtatggattttcatcaccgagtcatcattatcgagttggagggataaacagctactgagtgtcaaatcaatgatccaatactcgggtagcgctttgcggctttaaggaactcatgttccttgccacattaacgtaaagactctttattagacgttaaggtcaagacttgcttgctcatagtgatcctgagccccagtgcaagacaagctttggcctcctccgatcttgtgatggatgatagctctatcagtttgatttgatgaaatggctatcttaatctgttggagca

SEQ ID NO: 123826 - DNA, 381 bp, Arabidopsis thaliana columbia
ccggacacgcctgcgggacccggcccggaatcccggggcctcccacgcggtccgtgaagcccagaacccagaccaagaggttttcctccggccacaaaaaatggaccttcgccgaaaacacctggagatggagactttgccactcaccatcaaagagtcccactcactgggcttgcgctgcttgtgtttcagatctcggagaccttaccgaagacctccttggaggggaagtctgacccatggaacgtaaagccagatccagacaaagggatccaccgcccagcaagatgtcttgccggaagcactgaacaggagacttggctgattcacatccgaggggcccacttcattggcctgcgctgcgggaggatccaaacttcg

SEQ ID NO: 123827 - DNA, 436 bp, Arabidopsis thaliana columbia
aaggccgacaaaacagaaaggcgccaattttacagagacccgggcaccccacaggaggaacctgggcaagaggaaaaacgggccagctacggaggaaaagagaggcgagggaaacgaaggcgagaggccgcaaattttttttgaggggggaggcgaacgaccagggagggaaagagggcacacggcgccgccaggggggcccggcaacacccagaagggaagcaaagaaacagagcgagaggcccaccccacgaaagccaaaggacgggcacccgccaacaagcaaagaaaacacggaccgcccgcaacaagaaggacgcgcagaaaacagaaaaacaagaggcccaggacccgcggacacggaacaacacaacaagacagggaaacaggacacaggcaaacgaggggaagcaccaccagaagagaacaaaagcag

SEQ ID NO: 123828 - DNA, 538 bp, Arabidopsis thaliana columbia
  unsure (1)..(538): unsure at all n locations
ggccgggagcctcaagagcggcctgccccgggcggccagacccccaaaaaaagaaacagggggaaagagcgggggganacttcgcagcaacgcgggcggggacaccgcagacaaaccgggggagaacacaacctctaaacgcgacaaaaggaaancggggccgagcggggacccaaaccaaaaaaacacaagagggggccctanaagagaagatggagagccgagaaccaccccgccgacgggcgccccgccaccacaaccgacgaaacgcggggcgaagggcggaaaggggcccagaacagcccggcgggcccccaaaccaagaggggcgcgagcaaaaaccccggaggggagaccaaaaccaccacgcgggggggaaccccaacccccagccgaggcccccaaccgccggcccgcggggcgacaccgacagagggcgggcgcaaacaccgcccccacggaagggaagcggcagggggggcgcccaccccggggggggacacccaacagggggggccggcccgcagccagagggcca

SEQ ID NO: 123829 - DNA, 427 bp, Arabidopsis thaliana columbia
  unsure (1)..(427): unsure at all n locations
cccccaaacgaacagcaacacgaaaacaccacagatttaacacccgcaccgaagaagccacacagacacacccagcgaacgcacccacaaacaagcaagaaagacaaaaaccacaacacaganaaccccacgcaacgcacagagccgcgaccacacccccagcacacagaaagcagaaacaccgccccaaagaagcgacacacacgaaccgaaaccgaaacgaagcgtctttttttaccaagcgcggcaacccggcncacccaaccaacacaacacgacccaagccaccgcaaacaaagcaaacgcgccaccccgaccagcacacgcgcgccacccacagcaacgcaagcacaaaaacaaacggcggggaggacagaacaacgaaaagagaacgccaccaccgaacaccgcaacacacaacgcgacc

SEQ ID NO: 123830 - DNA, 474 bp, Arabidopsis thaliana columbia
acgcgtacgtaagcttggatcctctagagcggcctgtcctttttttttttttttttatattaacattgaatccatggattattcatcccttcatagctattccaacctgggtcatattcactttttacacaccacattgaattataataatactaggccttggacaaaatgtaggaatttgagacgggggtcgcgttaatggtatttgctggattcaacaaaacagggggggcctggtatgaaaccggaagccattggtggatcaagtaaatacagtgggattagaaggcttgagtccgggttgagccactggccgaagggggaaaagttcttgaccagctattgggttcgatctttttccaaaaaaggtgtttccttattatccaaaagcacgcctttaaaaaatattgttgaccccctatctgaggcttcccgaacactatgggttgaagcccgaacaacctggtaaaaaat

SEQ ID NO: 123831 - DNA, 480 bp, Arabidopsis thaliana columbia
  unsure (1)..(480): unsure at all n locations
ccggcgggacccggcccggaatcccgggttgacccacgcgtccgagaacgcggggggcacagaaagagagactggggcacaacggaaaaaccggcgaagagagagcggatgacagccagcggcgaccaggggtcccgaaacatcgctttccatctaaccaaacacggtcgcaagctggcaaggacggtaattgttgggcgcgtagggagcatagnacacgggattacagataccattgagggatccttccctgccgatgttatagcactcaacatggaaacggactttgaaggtgcttttcatgccggtgtccaaaaagcatgggaactattccgccatttcgaagcttttcttaactgctgatacctaccacggaaaggtgcaggacatcttccaggtctctcaagatgagttgcccccaatcacaaaaaataatttcaccgggtccgggggatctccttgaaggctgttagaccacaa

SEQ ID NO: 123832 - DNA, 492 bp, Arabidopsis thaliana columbia
aaggttggacccctggcaggcaccggcccggatttccgggttgaaccaagccttccgccaagccttccggttttaatgtaccatccataaccaccgttggaagtcgttggggtgtagtaatgtccagaacctcaggctactttgaccaggtggtgaagctggactccttgtacccaagtgaaggattacttcgaaggtgggaaagtggatacaggataacatcaatggctgcaacagttgatcaagcagctcttatattgagtatacctaaacgaaaaataaccgatgaaacccaagagactctccggacttctgccttcccaagtacccatgtcaaggagaaatgggcgaaaaatctgtacattgcatcaatatgctatggtcggacagtttgctgatgaaacatggagtatactgtttcaacctctctcactctctctctagggttttagggacgatctctctctagaagcctgacaacgtgtagccttc

SEQ ID NO: 123833 - DNA, 506 bp, Arabidopsis thaliana columbia
aacccgcccgcaggaaccggcccggaatacccggatttacccaggcggtccaaaacccaaaaaggagcgcccgcagaacacaggcgcgaaatagccagggaaacaccaccaaggccccaggaaaggagggacgacagcgaccgcccccccagagacggaagcacccccgcggagaacgggaaccgaaccgacggtttttttttttaggggggggcaaacaaaacagaacaacagccgccactcaaccgagggtacatcactggatacggaagtgctcccaccatcagcgaaagacacagcagaaacggatacggagcgtgatattgtattccccgttccacacaagacatatctcaacccgacccaaataggaaaatttatcgtcacgctcacgcaagacagaggatcgaaaaagaaaccagacgcgtacagaaaaaagaactgcagaactacaatcggtgcccaagaagcgccgcgcaaggcagcgaactcgcgacgtgatgaac

SEQ ID NO: 123834 - DNA, 512 bp, Arabidopsis thaliana columbia
  unsure (1)..(512): unsure at all n locations
cgcaccacgcgtacgtaagcttggatcctctagagcggcctgccctttgggttttttttttttttttttctttttttatttttgttcttgggttgactaaagagacaacaaccggtttcatttcattcggcaaggaaagtgttcttgcagggacttctggtgattacagaaaacacaagttaaagatggaaaggaagattcccctcntttggaggagaccctgcaattatacatataagcttcaatgcttgaacaaggtttttaaaagcaaaagttgaaaccaaaaaaggatgggtcatcacaattcaagaacttgtttatttctaaggaaaaattggggccattgaaagagtgatacctaggatcagatctccaaaaaaaacccatgtgaagaataaaagggaggggatccaataaattctttgaacaagcccagatgagggctccagctttagtgggaggaatgaaaaaaaccaacctttgtctttcagaatcagtgcccaatcggggtt

SEQ ID NO: 123835 - DNA, 516 bp, Arabidopsis thaliana columbia
  unsure (1)..(516): unsure at all n locations
acgggggccacccccccgggcggggggggggctgcggccgggggggcgggcgcggggcgcgaccaagcggaagggagccagacaggacacaaggcgggcggaaaaggacagcggggggacgcacaacgaacacaagggcgggcaaagagggnttttatggggaggcggagcggaaagagccggccgcgggaggggggcaaccaacggagagcaggaacgcgggggggggggaggaggaggcacagcggagaagcagcgggacgacgacgagaccgaccacgcgcgaggagaaggccgggcggcgcccaggcggggagagcgcggcagggcgacaggcggaaggccgcccgggggaccaaggaggacggcagaccggcggcggcgaggacgaaaagacggaggggggcacggggccgcgaggaggcggaggcagccgagaggaaagagagcggacccggcagcgacggaagcgcaaaccgccagggcgcggcaaagggcgggcgcgaggacagacgg

SEQ ID NO: 123836 - DNA, 542 bp, Arabidopsis thaliana columbia
  unsure (1)..(542): unsure at all n locations
ctatagaagagcattgacgtgcgcatagcacgcgtacgtaagcttggatcctctagagcggcctgcctttgtttttttattcgataatatccgttactcgtaggacaaattcgtagctttttatgtttgcttaaccgacaaaaaaatattttaacaacacaatcaaaacacaaacgtcataattaaaggatagtgccggtaagactgatcaaggataataaactctttaaagagtaagcactaaccagcaataattaaacattaaccgatgacctaattaatgttaattattgacaaagtgagtcaaatcatattctcttaagtgatcaatctatntggcacggtcttggataatatcgaaacccatctccgtcggatcagtagctngaagttcatagtgaatcccttccaacactctnctcagcccatctttcgacgttgcgtacaatatctttgcccttatctttgatgcctccggtgacccatgcatgaagaagatcttgctcttgcggcagttatcgacggtgacaaagtcgaaataa

SEQ ID NO: 123837 - DNA, 551 bp, Arabidopsis thaliana columbia
  unsure (1)..(551): unsure at all n locations
nnnnnnnnnnnnnnnnnnnnnnnnnnnnnnnnnnnnnnnnnnnnnnnnnnnnnnnnnnnnnnnnnnnnnnnctttntttttttttttttttttttttttttttttttttttttttttttttttttttttttttttttttttttttttttttttnccccaaacttcacccctttaaaaaggggtttttttttggatccaaaaagttttaaattgttttacaacataaatgtgaatttaacattttctaaatcatccacgtgcgatggttttttagggaaaaaagtccaaagttttttttttttggatccttcaccgggttttggggatccattattatccccattattataatgggaataattttgatttttttaattatcataatttggagcttaattttttttttaatctccatcctcgttcgaatccttatttactgggggttccacatttgcaaccggtactttttctttttttttaaaaaaaacaacatttgcatttgtttttttccttttagcttaaaaagtttccaccacattttttttaacagt

SEQ ID NO: 123838 - DNA, 541 bp, Arabidopsis thaliana columbia
  unsure (1)..(541): unsure at all n locations
nnnnnnnnnnnnnnnnnnnnnnnnnnnnnnnnnnnnnnnnnnnnnnnnnnnnnnnnnnnnnnnnnnnnnnnnncttttttttttttttttttttttttttttttttttttttttttttttttttaaaacggcaacaatactcgaatgtattcatttcaaaaacactacattgttttttattattatttaaagagtaaacaaaggaatccacaccatatgaaccaaattggtccttaagggaagatggagaatcagtagaaataatgattgttaacgaactgaaaagcggttgcaagccccccaccaaaaatggcatcgatcacaatagggtctttgcctttcttaccaaccgctgagagcactggtcctgtcgccgcgcctggtaacattgcgtttttccaatctctgctgccacggatacgttcgattccgtattctgttccaatgtacactccaccagcagctccccagtaaacaccttttttacacaactttttaagctcggacgcgtgggtcgacccgggaattccggaccggtacc

SEQ ID NO: 123839 - DNA, 553 bp, Arabidopsis thaliana columbia
  unsure (1)..(553): unsure at all n locations
ggtgacactatagnnagactttgacgtcgcatgcacgcgtacgtaagcttggatcctctagagcggccgcccttttttttttttttttttttttttttttttttttttttttttngaagaaaaaaacattttttattatttatttaacacaattcaaccaactgcaaaataacaaactgcaaaatataaatgggcaaaacattttttttaaactaataaattttccattaattttgagaacattttaatgtaaaacaaaaaaaaattctttagaacatcaaagattttgaaacagaaaaaggccgtatataattaattatgggaattccaagatgaaaatagcattgtaagaaatcaggcaagtcctgtcttgatatcctcgacaagctttttagcaattgttttgtaggctttctcggagggatgagcaaagtcttagaagacatatttatctgggttggagcatggtactattgccggaagcatacaacaacatccattcttctgatgggtaaatccgtatttcctatgattgttgataacatccataaaa

SEQ ID NO: 123840 - DNA, 538 bp, Arabidopsis thaliana columbia
  unsure (1)..(538): unsure at all n locations
nnnnnnnnnnnnnnnnnnnnnnnnnnnnnnnnnnnnnnnnnnnnnnnnnnnnnnnnnnnnnnnnnnnnnnnncttttttttttttttttcatgaataagacatctcatttcaaatctgaagaagaagcggttggatagcaaaatgtaaaagaggtgatcttatctaacaacagagagactatagcattttggtggctagaacgtgtgaacacttgacttattccattgaccgtctgagatcacttgatcttatagcccaaagctgcttcctaacagcttccatgtcaggccgctctttattagcaggagcagcacattgaagtgccaaactaaacatcttccttagtgtctgatcatctactcgttccgtcgcgataggatccactagttcaaaaactcgcgcttcattgtacttgtcgaatgcccatcggaccgtaatcctctcatcaggaagtcgcttggcctccactgcacgacngcctgtgagtatctccacacgcaaattcccgaacgagtaaacatctgctctagcagtgag

SEQ ID NO: 123841 - DNA, 499 bp, Arabidopsis thaliana columbia
  unsure (1)..(499): unsure at all n locations
acgactcactatttggaaagctggtacgcctgcaggtaccggtccggaattcccgggtcgacccacgcgtccgaccagtgaagctgaccttctgtctgatattgaccaccaggacctagtgaagcttacttggcatgtcgacataggagacgagcgactcatcatatctgagtatgtcagacatggtacactccgcagatcacattgacggtgctcgtggctataactcatnctcgatcaaatgtaggagattgtcatggacgtctgccatgacttaacctatctacattctgatgcagagagacggatactgcacagtgacatacaatggacgagctttctgctcgcagatcgcatgagagccaccgtatcatactacggctacgctagaggcaggcctactgactcgaaccagactcacatcttaactcaggtgaagagaaccgctggttatctcgatcctgaggacatgaaaactgatcatctcactgctaaaagc

SEQ ID NO: 123842 - DNA, 552 bp, Arabidopsis thaliana columbia
  unsure (1)..(552): unsure at all n locations
nnnnnnnnnnnnnnnnnnnnnnnnnnnnnnnnnnnnnnnnnnnnnnnnnnnnnnnnnnnnnnnnnnnnnnnncttttttttttttttttagcgattgcctgacgacatgttgagaggcttaaagctctgctgctcctagaatacacgcattggaccgttcggtttactaccaatagtacaacgactaaagtgcagagcttgcgaagtctcgtcgacgacaaacgtgcaagctatatttgaagacgtgatcgaatgacaccctacggttatgagaagaggctaacgtacactctattagaaaggaaagtccagtattgtacctatcactcaaacggatactgcccagatgcgttcgctaacataggagcctctctgaacatgtcttgagtctggagcacggagagacaattgggtatttgcgagaggatccgggcagcacatgggtcatcaggactgtgagcgtgcaatagatgcacctataatccgtgcactatcacactgaaagtgcctggttctgcacgcacagcctacacgagctccagggacaaggaa

SEQ ID NO: 123843 - DNA, 469 bp, Arabidopsis thaliana columbia
  unsure (1)..(469): unsure at all n locations
nnnnnnnnnnnnnnnnnnnnnnnnnnnnnnnnnnnnnnnnnnnnnnnnnnnnnnnnnnnnnnnnnnnnnnccacgcgtccgaacaagaatgtagatgcacaataacggctgcatatatgtgagtgaccgtgaagatgtgaacacaaatggctatgcaagctacatactactactggcatgattctgctgtccaactgttctatgagctaataactcacagcactgtctatgcgtagctatatagcatcatagctactacattttttcatacaggactctgcatgtgactatctactatcaaaggacgagcatatggtaataatggatcactacaatactttcatagtgtatcatgttctggagagatgctagtctaatgagtaccatctacacgcagagtctgattagtcgatgtactgtcttacagataatctacacgtggtgcacatgctaatgtacatgatggtat

SEQ ID NO: 123844 - DNA, 549 bp, Arabidopsis thaliana columbia
  unsure (1)..(549): unsure at all n locations
nnnnnnnnnnnnnnnnnnnnnnnnnnnnnnnnnnnnnnnnnnnnnnnnnnnnnnnnnnnnnnnnnnnnnnnncttttttttttttttttataattttataaaatttgaaagaaaaactataatcttctctttccattgtttctattgacaaataatctcaatcctgtttactttctcatgtatacagagactcctttttgttcatgtgttctctactacacttttatgttcatcaatgggatctccaagtctcttttgcagataaactgctcatcaacatcatccacatttcagagtctattcattcttctcaccattcacgaagctcctgctcctcaagattcaatcaagaaatcttcaaatgtagctagtgactgtaatcgctgccccagcgacgcaatggttctctggcactctgcaaactttgaagcagccactgctagttccttctcctgcttcagctcaaaacctttgatatggttaggcgcaggctctgtttcttgatgatgctcgagttcttgttttagttttgagatctcatcttgcagt

SEQ ID NO: 123845 - DNA, 515 bp, Arabidopsis thaliana columbia
  unsure (1)..(515): unsure at all n locations
acgccaacggaagcacgcgaccccagagcgggctgcccgccngcacgcacccagagagacacgaaccccggagagcaccacagccgcacgcaacccccacagagggagaaagacacacanacggacacagacncccaacaggaaagcaccccagaaacaaaggggccccagccacaaacaaaagaaccaggcgtttttttccgcgggggccccggaaccgaaggaacccaccccacagaaaagccaaccagaaaacagcccccgcacccaaacgacagagcaacgaggcgcaagaagaacaccagagccgacccgaacgcaccaagaaaaaccaaccacggagagcgaggcccccagcaaaaaaaggaacccgaagacagacaaagcggagcaaggccaccgccagagagcaaaccccaagagggccacgaccgggaaccagcaacaacgaaaccaaagcaaaacaggagggggagaacagccggaccaaagcccaaacccgcagcagaaaagca

SEQ ID NO: 123846 - DNA, 449 bp, Arabidopsis thaliana columbia
  unsure (1)..(449): unsure at all n locations
ccggccggaatcccgggttgacccacgcgtccagaaacgcacaccacacanagacttgaaacttccctcagacgcaagtaccagacacagctgtgtatctctctctatcatctagggcctcagcctatcaggacctatgaagctctgacaagaagcgagaagctccgagcagctgggaactgtttttttccccnggtgcacgcgaacagaaagggccgacccgctcctgataagcacaagctacaaaccataacgaggccctgcaatgcttatactggaaaaaggatcctcgagggagaaccggagatgcccattaaaagcccttgtcgcttccatctgctataccccatggcagcaggcaaaggttttgatacggaacgaaaagtcttggaaaatcccaagggggaaagaacccgagtcccgacgaccctggcaaatgtagcacctcg

SEQ ID NO: 123847 - DNA, 536 bp, Arabidopsis thaliana columbia
  unsure (1)..(536): unsure at all n locations
nnnnnnnnnnnnnnnnnnnnnnnnnnnnnnnnnnnnnnnnnnnnnnnnnnnnnnnnnnnnnnnnnnnnntctcccttttttttttttttttctttctgaccaattttttttttttttttctttttttgggaacttaagaatacaagaattcttgatctgatgttttcctactaagcgtctttgttttatgtaatatgttttagatttctgaatcatcttgattgatataataaactcagatctctatttcatgagatttctcaatgggattagataatgcaggtccttcccacagctccgcaagatcctttctccgccatgacatgaagatcaccggtcctaacgtagatggtaccagataaagtagagctggctgaggtgagtgggtcaagacacctgcagctagagccgccaccaagccaatggcatatccgggaagtgcataccaaatgtatttgtgtcccttggaagattttagatcaaaaatattcaccacatctctagtttttcgatggtcaaagcagaggaccaaagcc

SEQ ID NO: 123848 - DNA, 168 bp, Arabidopsis thaliana columbia
  unsure (1)..(168): unsure at all n locations
acgactcacatattaggagaaagctatgtacgccgtgcaggtacctggtcacgcgaattccaccgggtctgaccccactgcngtcctgtcctacagcagttcagaccacagcagtccagaaaatatcggaaagtatcgtcatcaactatgcataaaaataacaattac

SEQ ID NO: 123849 - DNA, 508 bp, Arabidopsis thaliana columbia
  unsure (1)..(508): unsure at all n locations
nnnnnnnnnnnnnnnnnnnnnnnnnnnnnnnnnnnnnnnnnnnnnnnnnnnnnnnnnnnnnnnnnnnnnnnnnctttgttttttttttttcttttttttattttttattttggtttgcttttatttaatccttactttgtttcggggccgccatttttttttttgaagaagaccatgggggccccccataacatatttttaaaaacctttaaagactttcccaggtttactaataaaaacatttgggaaaaaggttcagagtgacaaaaaaagcaaattttgttgctttaccaagaatttttttattgtttttctgcaacatctttttggggacaggtgcacagatgctttgttttttttaaccgcctttgaacataattacctggtggaaccctttgtttcccctaaagggttggtgaattggggctttcacaaaagtccattttgtggaattataatttccctcacaaagcttaggctaccttgtgaactatggggtagatcatca

SEQ ID NO: 123850 - DNA, 664 bp, Arabidopsis thaliana columbia
  unsure (1)..(664): unsure at all n locations
nnnnnnnnnnnnnnnnnnnnnnnnnnnnnnnnnnnnnnnnnnnnnnnnnnnnnnnnnnnnnnnnnnnnnnnnnnnnnnnnnnncctatcgcgtccgcccatcgcgtcccgcttcatcaacacagctatgtctctcgaccctgaatccaagatgatcaagccagaggaaggaaggatcgagaaatgggttctaaggagagcctttgacgacgaagaacgtccttatctaccaaaacacattctctacagacagaaagaacagttcagtgatggtgttggctacagttggatcgatggcctgaaagatcacgctgctcaaaatgtcaatgacaagatgatgtcgaacgcggggcatatcttccctcacaacactccaaacactaaagaagcttactactacagaatgatctttgaaaggttcttcccgcagaactctgcgagactaacggttcctggaggtgccaccgtggcttgatcgactgcaaaggcagtggagtgggatgcaagctggtccacaatatggatccatcaggaagagccgctatcggagttcacctttcggactacgatggcaagaacgtggcattgaccataccaccacttaaggcaattgacaacatgccgatgatgatgggtcaaggagttgagattcagtcataacttcg

SEQ ID NO: 123851 - DNA, 312 bp, Arabidopsis thaliana columbia
ggggagcggacgccgcaggaccggccggaaacagggcgccacgcggcgccaccgccgacaccgtcggccaagcggcacacggagtagcaagctcgcgtgcagagacaccgacttcgcacacaacgcacccgcacagggcgacacgagcagcccgagcacatcacgagacgcgccgcacaccactcccgccggacaaacaagacacgaccacacgacgcagaacacagaagagccgcggccaaggcgtggagaggcacacgacaacgacggtagctggatagcagaacatgactgacgccatgaagacaagcc

SEQ ID NO: 123852 - DNA, 360 bp, Arabidopsis thaliana columbia
  unsure (1)..(360): unsure at all n locations
agctagcacgcctgcaggagccgggacgctatagaggggtcgacccacgcgttcgggtacttgagctagctgggaacgcagcgagagataataagatgaacaggatgaaccctaagcatctatgtttagcgatgaggaacgatgaggaattgccgagacagtgatggagtactatagctcgcggcggagcctactttttttaacggtgttncnncctaagaaancaacagatccaagatccgaagcggagcaagctgcagctaccaaaccttctaagatggctcgattaagaagagaatcgatagcagatgcttggtatattcgagacgtagatgatagagatgaagtagaggaacaact

SEQ ID NO: 123853 - DNA, 514 bp, Arabidopsis thaliana columbia
taggtgacactattagaagactttgacgtcgcatgcacgcctacctaagcttggatcctttagagcgggccgcctttttttttttttttttttaagggaaacctattttattttttttaccccaatgccgaaaagaaaaacacctctttggttctggcaataaatcccttcctttaataaaaaaaaattaaaaccaataagaccaaaccattccataccgggttcctttttccaccacctggcccagccaaggttgaaacctaactttagaaacctaaggaaatggagtaatgtccgccttaatcaaacaaaaaggtggaaaccaacaccaaaaaaaagaaaaatggttttcgtccaccgagcccagaaaaaggtgggggcataatgggatcaactggaccaggaaccttatgagcagacctacccatggttctttcgttaatcatccctacttctttgcaaactctgcctactactccaaggaggtctctacccaccaagaatattctaaacg

SEQ ID NO: 123854 - DNA, 512 bp, Arabidopsis thaliana columbia
  unsure (1)..(512): unsure at all n locations
nnnnnnnnnnnnnnnnnnnnnnnnnnnnnnnnnnnnnnnnnnnnnnnnnnnnnnnnnnnnnnnnnnnnnnnnnnctttgtttttttttttttttttttttttttttttttgctgtttttactacaacttactaagcattagtagaaaaaaaaaaggtggagggatgcaattggccaattgagacatgttacaaaaaaaaaaagtaccatcgaattatgtggttaaaaatgacttttttgtaggaaaattgggcctctaaaaaaaaacagtcatattttactcccccgcctaataagttataaccaggctataaactatttttgtgaataggctagatctatatgggacttgctgattgttgcttttttctccacaagccttagctttaattgccttcaggtttttgttgaattttaagctgacctttttgcttattgcttgcttcggagtttacaggatcatgggtaccattattattccttacactttccttgggaccaaagaacaatact

SEQ ID NO: 123855 - DNA, 519 bp, Arabidopsis thaliana columbia
  unsure (1)..(519): unsure at all n locations
nnnnnnnnnnnnnnnnnnnnnnnnnnnnnnnnnnnnnnnnnnnnnnnnnnnnnnnnnnnnnnnnnnnnnnnnnctttgttttttttttttttttttttttttttttttttttttttttttatttttttttttttttttttgaggccaaaaatgtaaacataaaactggccttaaaacaaaggattaattttccttttgattcccaaaggtggtttttaacaatattatctttttttaagattttaatccccagacctcattttgttgatttggctaaaagctggctggaagatattggccccaacccaaagtggggccggtgttacaacaataaacaacaattggcctttgttggctgaactaaaaaccgccatttttgccgaagaataagccttcggggggggagtaaaaaaccctgtcgttgttagacccccaccaatccttggaccaacactgttccctttactttaacccattttgttgacctggttaataaccggctggaggatgttataaagg

SEQ ID NO: 123856 - DNA, 508 bp, Arabidopsis thaliana columbia
  unsure (1)..(508): unsure at all n locations
taggacnnnnnnnnnnnnnnnnnnnnnnnnnnnnnnnnnnnnnnnnnnnnnnnnnnnnnnnnnnnnnnnnnacctttttttttttttttcacaagaagaagaccccttatgaaaccatgttaaccccaatttacaagctagataataggaacatttgcaaaaagctttacaaattaggtatactgtatggaactcaagttgttataatgcttataactttataccaattttttacagaaaagtatatatactttaaagagggtgagcttagctgggttttgttgcagatagcattataaatggcccgtttctaacacgagtgaagttaacgagaccacaggctttgcaaatatcttcaagctcacgttcatttaggaaaatgggagaacctgaatatctcattatttcctgaccaaaattcttcaagaaggggataaaactgaatggaccgtcatagataaatgtgggggccacaaatactgcttcaggtctaagaacacgggttatc

SEQ ID NO: 123857 - DNA, 527 bp, Arabidopsis thaliana columbia
  unsure (1)..(527): unsure at all n locations
nnnnnnnnnnnnnnnnnnnnnnnnnnnnnnnnnnnnnnnnnnnnnnnnnnnnnnnnnnnnnnnnnnnnnnnngcctatgtgttcgttcatgcgttcggtgacattaagggcttttattctgggggctttgtccattaaaccaaatccccaaatttgataccagacccctcccgagattaatcgagtttacattgggaaaccggaaaattttctttttgtttttgggtggtatcccaaaagggaactacttttttatcctttactgaaatatgtcacctgccatttggagaaagaaaccgcttggactatggtgtggtattcgactctattagcctttttatccacccgggctttgggaaccgctaactgaatgtggctttaaagtttgttgaacattttatgtaaagtttctgctggagaaaccaaaggccctgggcagggcattttttcttttttttcaccggtgaccgggatagattctttggggtttgaaaactctttggggttaaccacccaacgttggggcc

SEQ ID NO: 123858 - DNA, 511 bp, Arabidopsis thaliana columbia
  unsure (1)..(511): unsure at all n locations
nnnnnnnnnnnnnnnnnnnnnnnnnnnnnnnnnnnnnnnnnnnnnnnnnnnnnnnnnnnnnnnnnnngcggcctttttttttttttttttaacttaaaccatatggtattattttttattccggggtctttggccaattttaaggggatttttaaaaccattggccaactgggaaggttccaaaaatggtaattaaaaattccggaaggtattaaaggcccctttgggccttggttccaccagaaatgatccattatttatttaatggaggggataaaattaggaaggtaaagaattttcaaaaggaagcctgaaaaacctgacctttttagggttattagaatcgaaaaaggcttacccggagttggttttggtttccgttggctttcttgaataataaataaacgaatcatcagtttcacagcttcacagaattgggaacctctctctcgcagctgaggctcagcgatctaggtgcagctgttcaagccacgcatcaagaatgtcgctc

SEQ ID NO: 123859 - DNA, 516 bp, Arabidopsis thaliana columbia
taggtgcacactatagtagatctatgacgtcgcatgcacgcgtacgtaagcttggatcctctagagcgggccgccctcgcgttcgttttcattgttttaccatttcttttattatacttttattgctttgtttgttttttgggggctccaaaaggcctatttttgggaaaaagaaaaagccttccttcctttggggggaaaaccaaccaaccgggaaaaaatttaagccgggggaactttttttccgcctttgggtccaggaccttaagggttttttgaatccttttttttaaagggtttagggggcctagggtttgcgaatttttgccttttagaaattggcattttgtaaacttccttctttttcgcctttgttttaatttgggggggcctgggcctatacaatatcgcagtccgcccttttggccctactggtacggaaccatgggtttcctccaaatgctgcaccggatcctttaccttatagggcgaggtgtggcgtattttcccctttaa

SEQ ID NO: 123860 - DNA, 517 bp, Arabidopsis thaliana columbia
  unsure (1)..(517): unsure at all n locations
nnnnnnnnnnnnnnnnnnnnnnnnnnnnnnnnnnnnnnnnnnnnnnnnnnnnnnnnnnnnnnnnnnnnnnnnnnctatgtttttttttttttttttttttttttttcttttttttattttttatttttttaatgtttatcatgatttgcattgttttttttcggaagaaacgcccaggaatgaagttttaatctcgtggaaaaaagtggggtttttttttttagggttccccaacaaacaggggttgaggcatcccaaagttctgacaaaggggaacaggggactccccaagaataaccccgaaggggggctcacccttttttagggggctctgcccctcccggggggacctgaaatataggccccacgccgcggctgttgctgccacgtcgcttaacggggtctattttgaagatagaagaacccaaatgcatctttttacttagcccgggaagattcttgggagggcactgcccccaccaagatttgagcaccctttaaattaatgagtcggggg

SEQ ID NO: 123861 - DNA, 123 bp, Arabidopsis thaliana columbia
attattatattagagtgcgtgcggacggcgatcgggcaggcaaatgcgcacgacatttttgatgacaatgagtttgagagacaagtgtaaggtagatgtggttggtgacttacggagttagct

SEQ ID NO: 123862 - DNA, 512 bp, Arabidopsis thaliana columbia
  unsure (1)..(512): unsure at all n locations
nnnnnnnnnnnnnnnnnnnnnnnnnnnnnnnnnnnnnnnnnnnnnnnnnnnnnnnnnnnnnnnnnnnnnnnnnctttttttttttttttgtcattgataaaattttttaattccaaccatttggattttccattgggtaaagggaaacctagattattccactttcatttacctttgaggttctgactgaataccaaaggaattggattaggggctaaacagccattttcatttttattttcttgggaggatcatagccaatgagctcaaagtcatccgcaacaaaagaatctatatctttcttctctggatttatcttcaaaacaggaaaaggttttggtgggttctcaagttgctcttgcagaggcctgacatggtttttgtaaacatgagcatctccaatcacatggataaaatcaccaggaacaagatcgcagacgtgagcaagaatgcatgtaagaagggagtatgaggcaatgttaaacggtacgccgagacccatatcggctgaa

SEQ ID NO: 123863 - DNA, 521 bp, Arabidopsis thaliana columbia
caccgagaagccgcgcggacgaaagccggccggcgggggcaaactataggtgacctatagaagagctatgagcgggcatgcacgcgtgcgtgagcttggatcctctagagcggggcgccttttttttttttttttttatgctaaacaggacggggcctgatatcggagccagaacagtggaaatccaggggcacaaagggagcggggcgctagggaaccagccttacagagcgagaggagagcacacagctgggggaagcgcggcccgcggcagacaatcatgtgaaagagcaggcggaacaggcagggtgccttatcgcgggaagtgggaaagaaactcgtctggggggggatggctggtgagacctgcgaaaagcatcggagagaatcttggtcaggcggggagggaggccatgggggcccgaagaggccagcaatgggaagcgaccgaaagggagagaaagagggggactgccagaggaggagggctaggaaacggcgcacaagcgccaggaacaacg

SEQ ID NO: 123864 - DNA, 501 bp, Arabidopsis thaliana columbia
  unsure (1)..(501): unsure at all n locations
tacgactcacatatanggaaagctggcacgcctgcaggtaccggtccggaatacacgggccgacccacgcgtgcgatagaaccagaaagagcacgtgctcaccatggttgcaagcagcacatttatctatgacgagccatgcagttttatccccttcttgcagaatctgcgtccggaaataatgcgatattcgaggtctcacattntcctaaatgaacgtgagcttgaagatgtctgcanagcctgaggactcgntaactacactcgtgttagaaacggtccatttataatgctctctgcaacaaaacccagctaagctcaccctctctcaagcatatatacttttctgtaaaaactggcataaaggtatagacattatcacaactggagttcatacagtatacataattgtaaagacttttgaaatgtgactattatctagcttggaaattggggtaacatgtacgcaaggggtcttcatcttggaaaaataaaaaaggg

SEQ ID NO: 123865 - DNA, 506 bp, Arabidopsis thaliana columbia
gacactatagaagatctatgacgtcccatgcacgcgtacgtaagctgggatcctctagagcggccgccctttcttttcgttatatccatattgagtttgttcttaccatggttccaagttttttttttttttaaagaaacaacctctttttaaagacaaaaaccgtctttctgggtttctttttcattttgggggaagaaaaaacccccctttaccaccttaagaccaaaaacggggtttgaataaaaaatgggtgtgacaactaacgtaaccccccccaaggcctttttaactgggggggggaaaaaaaaaaaggggggcaaaaatgggggcgggccccccaaaggctcatatctttgttcaagccaaacatggggaggacaagtttttgggggggcccctttgttccaaaaaaaccaaagaccccccttttttgggggcagccttttcttggttcccaagttttaggggaaaaaaaaaaaaaaaatttttttttttccaaccca

SEQ ID NO: 123866 - DNA, 587 bp, Arabidopsis thaliana columbia
  unsure (1)..(587): unsure at all n locations
gactcacctagggaagctgtaccctgcaggactgtccgcaatccccggtcgaccacgcgtccggagaccagaatgagctgtctcacatggttccatgtgtgaaaggncaanngnnannaangctgttnaggcgtgncctacattagtgttatagtctcgaaatgttgtgaaagaactaacacatatgctaccattagacatatcatgnagtgggtgggtaagaaaattgccaggtagccggccataaaacacaacatacgcgattaacgttggggtcgagaagaatttacagtggccaacattgacgaagccgcctaattggtcttagcttttagctacaaaacaagagggaggagctgtttgtaggagagctccttagtttcataaaaaaaacagaacagtttttgttgagaccgtattttttttggtcaattgtatagagagaaaaaaaaaaagttatttctttgcaaagcaatgtcaatcgtttcgcgtgtagcctctttagaatgcgttactgttttggcgtcacgttggggtaaaaccgtgccttaactggtgggccacattaaagtgggactggacaactg

SEQ ID NO: 123867 - DNA, 493 bp, Arabidopsis thaliana columbia
aggtgacactactagagatctatgacgtgccatgcacgcgtacgtaagctgggatcctctagagcggccgccctatgcgttcggtgatggatggagagatgcatttggaagaaactattgaagcggcgtttcagataatttcaccacaggaatgttgagctttgttttgggcttttggggtctacttcagctaccccgagatccgacgcgacggcgacagttactaacggggcttatatcgtttgcgccaatgcggctgcctatggtggaacatatgaatcatctcgcaatctgtgggttttgccgggggaggatgaagtgtaaaaagtgccgaggatgatgcgagacttctttaaaagaacccattgtttttgctacgtgctgttctagctgtaaggctagttcccacaatgtttaagcctctgatttgctttaaggggaacgaactcctgtttgcgtttacgaggtctttgcctttgtggagttggcttaa

SEQ ID NO: 123868 - DNA, 520 bp, Arabidopsis thaliana columbia
  unsure (1)..(520): unsure at all n locations
nnnnnnnnnnnnnnnnnnnnnnnnnnnnnnnnnnnnnnnnnnnnnnnnnnnnnnnnnnnnnnnnnnnnnnnnnntangngttctgtcacgcgttcgtacgagagtcacgagagattcgagagaaggcccaaaaaaatattctgggattatccaaaaaaaaagggggggctcctttgttgaaaagggtttttactctacttttcccccgggaggggaaataaaaaatctcagatttttggttggtacacccccatagtaatcccctttgatttaacacaaagtttttttttggtgccggatcattgctccattacaaaaaaatttcagagatgtctgttattgaggagtcccccccttcctccctttgaaaagtgggggaatttgtggccccaaaaaaccacagtagttgtttcctttcaccatcctttagggtgggcaccagttcctgagagccctgatggagcctttgcgagctgagggagtaccacaatttggaactttttattttcggggggaggga

SEQ ID NO: 123869 - DNA, 523 bp, Arabidopsis thaliana columbia
  unsure (1)..(523): unsure at all n locations
nnnnnnnnnnnnnnnnnnnnnnnnnnnnnnnnnnnnnnnnnnnnnnnnnnnnnnnnnnnnnnnnnnnnnnnnnnctttgttttttgtttttttttttgttgttttgttttttttgtttttttttttttttttttttttttttttgtttgtctgtgtttttttttttgattttttgggggggaaaaaggcccccgattttttatttttggttggggataaagaggggcaccatccccaataatgagaagatgcccctcccccgggggggggggccacttgattttttttttgttaaaagagggatttttacgaaggaaaaaaaattggttttttgggggggggggggggtttgttatatgttttcttgcaaatgatccggggggggagggaatctctgcttatagctgaaatttttgggggtggggaaactggttctactgaaatttttgctccaattgaggggccgtggggggggggtttggaccccccccaacccacaaaggggtggtttttaaaaaaaaaa

SEQ ID NO: 123870 - DNA, 498 bp, Arabidopsis thaliana columbia
  unsure (1)..(498): unsure at all n locations
nnnnnnnnnnnnnnnnnnnnnnnnnnnnnnnnnnnnnnnnnnnnnnnnnnnnnnnnnnnnnnnnnnnnnnnnnctttttttttttttttccaccgctgcaaatgcagcatcttaatgataccacgttatgatgcaccctagagctaaaggaaaacaatgactgttaggctttgatttattagactggggggactaagcatttgtgactgccaaagcttctttgacccaagcgattccatttgtactaaaccggggcaggcttgtgaacttgagcaacgacgacagcacacactttccatatgctggacagaccagcaggaatcctaaaagtcgccttaccttaacttcgctgatgctccaatacatgctcattgataagtatccagacctgaagcttcttatccttaacaccgacaaccttttagaacgtttctatcttcatctgcgcaacgccctcaggggccgatgaaacaagtttaccatgggctgcaaaattgt

SEQ ID NO: 123871 - DNA, 611 bp, Arabidopsis thaliana columbia
  unsure (1)..(611): unsure at all n locations
atgannnnnnnnnnnnnnnnnnnnnnnnnnnnnnnnnnnnnnnnnnnnnnnnnnnnnnnnnnnnnnnnnnnnnnnnnnnnnnccacgcgtccgtggtcgcgtgggtcttgctcacaacgttgcaagcactccatgttgctgctatcgctgtgatcacatatgcagtgtcagctaggacagatcagcacacaggagacgagatgtgccgagagaagactgaagagtttctgaccggagcgtatatgcagagtagcttactcgcattgaaggacatcgcagaagaggattaccacagacatacagatattgtctctcatgcagcagaatacgagctatattcacaaggtcgaacccattgagtagcgatgtctttacgcccgcgacgacatcgcctaggtcgaggacggtcagaccagataccctgaccggagagcacgcctttgagcttactatgtgagaaagtgctcctgagcgtggcttgcagcatgacactcgtgtacagaagatcacattcatgacaccatctgaagtacgcaggaccctcctagagactgcttgcgatcgaccgcgatatgagactcctgcagcatagatgaactatgagaccactg

SEQ ID NO: 123872 - DNA, 497 bp, Arabidopsis thaliana columbia
tgagaaagatatctaggacgtggctaggcacgcgtcacgtaggctgggtatcctttagaggggccgccctatgttttttttttttcttttttttttgtttttatggtatttcacacacatgattttttatcgtttcttgttttcatttttgtgccccacaaaaccagcacgggcaacacatatgtttcgggtgaccatgttggggcatacgcagaaaatcttggcaaaatatttgagggtgctgaaaaatgggggggccactgtatagataaagaatttttcttacatggtgacggggaggatccctaaaaattggaaagcgcagagacgactcctccacatggtccatgcacactccgcgactgttttggaggatacgcacttctggtgaacagttcttaaaagtcagcgttagctgccgaggaacccaatgcttctggaccaagaaaaggggagaaactaatgggggggactcacctggccgggccgtaggagta

SEQ ID NO: 123873 - DNA, 183 bp, Arabidopsis thaliana columbia
  unsure (1)..(183): unsure at all n locations
atgattctgccagctctactacgactcactatagggaaagctggtacgcctgcaggtaccggtcctgtattacacgggtcgcccacgcgtncgcngtacgcgtggtgctgtgcagaaggagcttcacacacnatgaatctgatcgggtctgcattcatctncgagtcgacatatccaggacgg

SEQ ID NO: 123874 - DNA, 449 bp, Arabidopsis thaliana columbia
  unsure (1)..(449): unsure at all n locations
nnnnnnnnnnnnnnnnnnnnnnnnnnnnnnnnnnnnnnnnnnnnnnnnnnnnnnnnnnnnnnnnnnnnnnnnnnctttttttttttttttacatattattctatattaacttaggtccgaaactcaaggtctaattggacaattgagagtgatcccaaggatgacaccaaggaggaggctgtgggagacatatgtaatactggaaaacacaagctcataggctaggataatatgttctgtggactggataatttgggcaaatggagaaaaaatgatcagttgatggagagaggcctactacttgtttgggaggtcaataacatgaccagaaggaggcctggcacaaatcttattaagcctctgggtaaccttagggcgaaagccaaagagaaccttgaagtcagaacccaataattaatgaatcgttgagaggggcctatgtcatgagg

SEQ ID NO: 123875 - DNA, 639 bp, Arabidopsis thaliana columbia
  unsure (1)..(639): unsure at all n locations
gactactatagnggaagctggtacgcctgcaggtaccgggccggaaattccgggtcgccccacgcgtcgctatccccggcgatatagacgcgggagccacagcaagacgatcgacctttgacctaaactgaacccgctttcgtccgtctctctctttacgtacgaacaaagctgaaacactttatgttgggttagccattatcggacagtgatcttggcttagctacagccttgcggggcaaattcctgttttggaggacggtgatgcgacgcttttcgttaaggttacttttgatctgagcaatgattagactttcttagatgaccagaaacgtcattacgcctgatgcacttcagcttgaataacgatatatctgaatcgacagactgcgatgattattgctgatgctgaaagcttccgtggcaatatatgtgcagagacaagagccatcacacagtacctacgagaggaatacagtgagaccggtgaccagcttatctgcctagactgtaagacagcgctggcagccactgacgtatggctcaagatgaaggtcaacagttggaccctaacgcctataagcttgtcttcgagcgtgtctctaatgtgatgatcggaatgaccactgaccctgacgc

SEQ ID NO: 123876 - DNA, 523 bp, Arabidopsis thaliana columbia
ttagggggcacttttgaaagagatataggcaggtggataggccaccgcgccgtaggctggatatcctttaaaggggccgcccttttttttttttttttttttttttttttggcacaaaaaaccagaccaatcgccattaactttaaattttttaccccaaccttccattggagaaaccggtaaggtcccttatttaattcataacacccttatttgaggcatataaaccggttacaattcgataaagagaaaagggaccctaaggacctaatattgtatgggctataccatagaaaatccttacccttcatagggcctatatattataaggaggaggtgacctttattatattttaacagtaagggatccattttttgtaacaatcaatagaacatcttcaacggccacttcaacggcggtatcttttccgggagcggttaaaagattggaaacatttaggaggacactaaggtttgtggccgtaacagggtcctttctcttggaaggaaacggtgggcctac

SEQ ID NO: 123877 - DNA, 508 bp, Arabidopsis thaliana columbia
  unsure (1)..(508): unsure at all n locations
nnnnnnnnnnnnnnnnnnnnnnnnnnnnnnnnnnnnnnnnnnnnnnnnnnnnnnnnnnnnnnnnnnnnnnnnnnctttgttttttttttttttttttttttttttttttaaaaaaaaaatctttctttttttttttatcggcaaagatgacccacacccattcccttaatctgaaagaaggaatcgagtttttttgcctcaaaacagcttgaagtggcatcttacacaaggatgagcccatttttatcgtttttataaaaggccgacaagaggctgctcaagggaatttgtagagaaacacggctttgttaattacaggtgaaaaagcggggtcggtccctaaggaacggacctggccgttaccacgcttggttagcacctagtactgaactgccataagtagagaaagagctcaaaggagagtactcttttcatatctacagagtttaaggtagtcttccaacgaatccagcaaccatatggaacactgcgtttgtacaagcagaag

SEQ ID NO: 123878 - DNA, 515 bp, Arabidopsis thaliana columbia
taggtgcactatagaagagctatgacgtcgcatgcacgccgtacgtaagcttggatcctttagagcggccggcctttttttttttttttgaatggtgaattgaatataaattatatttatcaagcttataattaaattggttacataaatatcctaaaccatccggggtattatattggcaataacttttcctttaaaataggctcaacatttccacttggaccattggccattttaaaattggccaatacttcaaggttctttttggcttaatggcagagggtggattaggggccgattctggatttggcggcggtggccgccttggagaggatccccaattggaaggttatggtccctttgggtggaattttccggagttttttttcggaggagggcccgggttcaatattttattggaccaccgcaaatttttaaccttggggtctggaattcggtttggttggagttctttttcgggggaatggcctaataataggattccggttatccgg

SEQ ID NO: 123879 - DNA, 520 bp, Arabidopsis thaliana columbia
taggctgtcactatgagaagagctatgacgtggcttgcacgcctgcgtaagcttggatcctatagaggggtcgacccttgctttctatgtaacctatttggatacgcacagaaaggggaaattgttctgaaagcctaaaatgactgttactttacaaagcaccagagtttgttgatcaaatgcgaaaaatcaaatttaaaggtttgtttttcaaagaacaaccaccttcttaaaacgagaaggataatgctgaaagaccgtggatactatttttttcttatgaattttaataatcctgaaccctaacttgaactacgtttgggagggcttttactaggattaaccttttttccaggggggtttttttgcaaagccaagccaccaccggatgacgtattttctcggtaaagcgggttcaatggccgaaaaactttttcggatggttttatattaccgtggagttcctcaacggtaaaatggatccatcttaataattcttgcggttgttgaaccggtttta

SEQ ID NO: 123880 - DNA, 160 bp, Arabidopsis thaliana columbia
aggtgacctctactaactatatgggaagctggcacgcctgcaggtaccggtatgctattgcagggtcgacctatgcgttcgttcacgcgtacaggtggaattggtgccttacagatgggtgaatatctgcccaatgtgtctgacggagttgatacatata

SEQ ID NO: 123881 - DNA, 486 bp, Arabidopsis thaliana columbia
tttggcggcgcctggaccccttccgaagcctggattcttttaaaggggccgcccttttttttttttttttaccaatttgttgtttggttttttaaagggaaaaaattactccttgacgggaagggttacgttaaggccctttggaaattaacaagagccactttagggcctaccccacaaaattggggtttccaaaaaattggaagggaacctttgccaactaaaaaggtttaaaaaggtttcctttgccttcaattatggaccggaggagttaggctgctttaacacagccaatgcctgggggaagggggcattcacaattgacttaaccttggaatctaatggacctttacacaagtctaaggtggtcctagaccaacctggttttggatttgaccaatggaggagttggctccccactctattaagtattcgttcggaacacaacctgattcccggaacctggaaatatgggatctaatattc

SEQ ID NO: 123882 - DNA, 453 bp, Arabidopsis thaliana columbia
tcactacttgggaagtggcgctgggaccggcgattcggcgacaccgtcgagtaagctgcatattgaaactaggcatgtgacagatgcatggctcgggaggcgctcaagcccgtactcacagagggtcgtggatatttcataagacagttgcacagctgaggacttatacactgactgtcagagatgtgaggatttgtgaattcagatgcatgtggatgaacaggaaaggagatcagcattaaggactaggagtgagggaaatatgactgaggtgtcgcatctgtatcttgaaacggagtaccacgctatgactgtgaagagagtggttgtcatttaagcttggtgtgaagagaatcagagcagaagttttgacatgaagagaagttgaatgtcaaggctgataagaaggtagacacgtgagtctagaaatttggaggagaatgtgataatgta

SEQ ID NO: 123883 - DNA, 504 bp, Arabidopsis thaliana columbia
  unsure (1)..(504): unsure at all n locations
nnnnnnnnnnnnnnnnnnnnnnnnnnnnnnnnnnnnnnnnnnnnnnnnnnnnnnnnnnnnnnnnnnnnnnnnacctatgcgttctgatcattactacacatatatacatattcacattctcttttggaataattcccgcctataccttaaacccaattgaccgggccattcatcataattggatttttggttacaaattaaagaaagatattgtaatttttggtaacccaacccttacgggaaattgaatagtgaagaaaacatttaaatttttaagaaaaaagaatgggggacggctatttttcaatagcttataattttcaaggagaacaccacccttttgcttttttaataaaaaactttaagggaaaccccttgaacgagcatgacgggttttttttttttaatccaaagaaaatggccctataacgattagttccggggtacacgcccccttcgttacctttgcccgtaccggtagaataagaatgccggccacaaccg

SEQ ID NO: 123884 - DNA, 524 bp, Arabidopsis thaliana columbia
tagaagaagtctatgacgtaggtatgcacgcgtgcgtgagctgggatcctatagagcggccgacctatgcgtgcgcaacaaacaaacacatatatacaaatacacatacacttatcagacaaaacagcctatacctgagtcctaatggagcgggctatagttctacggtggataggggggacaagaaacaagaaggagtgtgatttttgttacaaggaccctgttgaggactatggtcgtgaagaaattatctatgctctcacgccatacgattgtggacgcctctctgtctatagcgtatactgctaaggtagcgcacggcgctgtgtctctgttactcatagttgttcgaggcattccttgagacggaagagacgtgtgctgtcttgatcgtccatggaaaatggccgtatgacgatgagtaccggtgtacacgccccctccgttacttttgatcataagcttaggataagagtgccggccacaacctgttggctaaagatcaaaaagaatggtttactagg

SEQ ID NO: 123885 - DNA, 501 bp, Arabidopsis thaliana columbia
  unsure (1)..(501): unsure at all n locations
nnnnnnnnnnnnnnnnnnnnnnnnnnnnnnnnnnnnnnnnnnnnnnnnnnnnnnnnnnnnnnnnnnnnnnnnnncttttttttttttttttcgtgtaaaaaattcactacaagaacaaaccatttcgaggttcagacgttcgacaataggctcgggactgttaaagacatcatatgtcaacacaatgaacgacaggtgaattcgaaactagacactacaaaaagcctgtttgatagaaacatggttacgggcttaataataacactgcgcgcgttcttctaacaagatgaatggtgattccaatttgaaacgcccacacgctcccattcgcctgacattgctggacataagcccctcggatggactatcgtctgaatgaagtagatacactctaccctatcctagacggaatctgctataggacaagatgaaaacgtagctcgtccaccgatgcatcaaacggaatgtctaccctgaatgctaaaaggacatatgaaacgc

SEQ ID NO: 123886 - DNA, 644 bp, Arabidopsis thaliana columbia
  unsure (1)..(644): unsure at all n locations
nnnnnnnnnnnnnnnnnnnnnnnnnnnnnnnnnnnnnnnnnnnnnnnnnnnnnnnnnnnnnnnnnnnnnnnnnnnnnnnnnnnccacgcgtgcgcgggcgcgtggggctgaaggctgatagatgcaggcaagtgataggtttaacataaattctcagcttgagcatcttgaagctaagattgtgtgtacaggtcatgcagatgtgagcagatcagtatggactgcgaacattcagagtgataattatgcttgatacattgtacactacctgatgctttcttacttcgcaatagctgaaaacgaatctatagggctagaacgttacaacttcatgcaaaagatgctcttaccttgcgggcttactacagaaagagaagacgagtgagagctctagtgcatgcgaaattaaaaaaaacattctacttattagaagctggagtgcaatcttttttatctgatgcaccaatgtaattgccgaaatggcttcttctaggtaataggacatactgcacgtgtggatcatgatctaaacatctgcactttgatatagtcctgatacaattgtctacctgaaagggtaaagtgaatctaacggattcgaacgttaggccattggaggttttcatgtggggcgtccgctctaa

SEQ ID NO: 123887 - DNA, 487 bp, Arabidopsis thaliana columbia
actatgagaagagttatgacgtggcatgcacgcctacgtaagcttggatcctatagagcggtcgacccttcttttctttttttaaccaattagatggttggtctgttcaaagggaaagacttttcctttgcctggaagggtacgttaagccccctggaaaataaataaagcaccataagcgccaactcacgaaaatatgggttcccaaacaaaaggaagggaaatttcatcaactaaaaagattcaaaacaggtgcctttgccttgacttaggaacagaagagttaaacttgaattacacaggccatgccttgagggagggggcaatttaaattcgaattacccttggaactaaatggcctttacaggagtcataacttgtactaacgaacccttggtttggaaattaaccattgaagagattcgctccctatgttattaagtatcgttacgtaacaatcctggatacctggaacagcgaaaatttg

SEQ ID NO: 123888 - DNA, 448 bp, Arabidopsis thaliana columbia
tccagctgacatctgactcaatcttggagagcttgccgcctgcggtaccggactgcttacaggtcgccagcgtcgggtaagcactattggtggcgcaacgaagcttcatagctgagtatgctaccactagaattaatacggacgatcccgcaacccgtgacatgattgctgacaacgtcatttccaccgtggctcttaggttgctctatctctggaaagcgtaactgatacactgtaccgggacaagagacatgacatgcaatacatgaactgttgacttaaggagcaatctgaccaaagtacttcttggaaatgcatcctatttactcttatgtattaggtcgtcgtacgatcctgtagaggataccagcactgctgggaagtacatacatgctgcgacacactatactcttgatgccatctgtaagagatattcactgaattccct

SEQ ID NO: 123889 - DNA, 501 bp, Arabidopsis thaliana columbia
  unsure (1)..(501): unsure at all n locations
taggtgcacactatagnagnagtctatgacgtcgcatgcacgcgtacgtaagcttggatcctctagagcggccgacccttgtgttctttgtctcttttttgtttttttcttttttgtttttttttttttctttcaggtgaactctaaagaaagcatttttaccaattgtagctcacaaaacaaaaggatctcatttctgcatcaacaactggttttcaatattaccgagccaaagtgaatccattgaccaaaataaaagagatattgaccttaaacaagctcaatggaagccattggagcattattacctttccttggaagagttcttatgatcctcgtgtttccaccgtttttctcaccggatttttcaggaacctcagcaaacagagcgtgaaccatctgtttttcgcagatatatcccaagggttgtcttcgcttgtgcaacgaaccgtctttagccaatgtaatcatcttggcaacgaacttcctcatcgcactagc

SEQ ID NO: 123890 - DNA, 255 bp, Arabidopsis thaliana columbia
  unsure (1)..(255): unsure at all n locations
nnnnnnnnnnnnnnnnnnnnnnnnnnnnnnnnnnnnnnnnnnnnnnnnnnnnnnnnnnnnnnnnnnnnnnnnnnnnnnnnnnnccacgcgtccgcggacgcgtggggcaaaatccgctttgttgcagaggatcacaatctaatggcgattccaatgtccatggcaatggcgactcctacagattccgtgagcagagtctggagtatgtcttctctcaaatcagctctttcctccaccgcatcactccgattacct

SEQ ID NO: 123891 - DNA, 512 bp, Arabidopsis thaliana columbia
  unsure (1)..(512): unsure at all n locations
nnnnnnnnnnnnnnnnnnnnnnnnnnnnnnnnnnnnnnnnnnnnnnnnnnnnnnnnnnnnnnnnnnnnnnnnntttttttttttttttggagtacatttggtcaaaattattttaaaaaaccaaacaggggccccttaaccaccacccaaaatttggggtcttttacggaaaattaaattaggctttttttggcaattgaaacaacccaaagaaccggttaccaagggaaagggcaggacatggcaaatggtggtggtttctttaaaaggcagaaaacattttccaggcaccagttggtccatacctaaaaggtcttccaatggtggccacacagattcctgagggcaggcaggcaaatccttgtggcattagttgggcaaagcccgaacaagatagcctaacaacccgattcatcgaatatctttgcgagtgttatatcttgtagggctccaagtgttgtctctagcatgtctagaccagcttggttcgcaaacatgaacactggctgtgg

SEQ ID NO: 123892 - DNA, 517 bp, Arabidopsis thaliana columbia
ggtgacactaatagaagattatgacgtggatggcacgcggttcgtaggctgggttcttttagaaggggccgcccttgttttttttttgttttttttttttttttttatattttttttttgaattgtttattttttttttttttgtttttttaaaaagggggggggggggggattaccccaacttttttataaaaaatttgttaaaaaggcaggggtttaaacttaagaatggcctgaaaaagcgttttttttaacaaaaaaaaaatcttttatttagattaaaaaatgggatgttattggataaaatgtggggttttacttgggagggttattttgcggaaaaaaaaaaaaattaggtacacttttgtgttgagggatttaaaagggcctttttttaaaggaggggggacccctggttggacaaaagggaaaaagatttgtaagggggaaatcaaaaaccttttgccccgggaaaattaagggcctgggaatttgcgacgattcttcgaaacaaatt

SEQ ID NO: 123893 - DNA, 289 bp, Arabidopsis thaliana columbia
taaaatttttgcacttccattgccccccgtccgaaagccttggtaccctcctagagggggccgcccttttttttttttctcttttctaataaaacatcttctctctgaactcccacactttttatttcttacattaaaagactacaccactcaactctaacccccctagatcacccattcatcgcaactacaacttaacaacactacccccaccgaaatgacaattgcttataaaaaccagctcacgtcattatttcatttgaggtgaccccttaccagcttcccattg

SEQ ID NO: 123894 - DNA, 498 bp, Arabidopsis thaliana columbia
  unsure (1)..(498): unsure at all n locations
nnnnnnnnnnnnnnnnnnnnnnnnnnnnnnnnnnnnnnnnnnnnnnnnnnnnnnnnnnnnnnnnnnnnnnnnnctacgcgtncgnccacgcgtnncgcctcacgaagaagaagaagacgaagaagaatcaacggctcttgaaatatcccaaactcaaacataaggtttgaattgcgttgaactatcagtccacagcgaactaggaaaatcatacttatagtctccaatgccccatcatttagcattattcggagtgcatagctatggatttttcacacgaacccattacattagcttcctgaaagaactcctttgggacaacaacacggccgattaaagccgatgctgcttcagtgaaaggagaccctaagaaaattggcccttttttgggtcccatccaaccggggaagtccctgtttgtcggtgaaacacacacttgaggtttattcaagcgagcgtaggtttttgctggcccaccaaggcatgcaccacagttgg

SEQ ID NO: 123895 - DNA, 512 bp, Arabidopsis thaliana columbia
  unsure (1)..(512): unsure at all n locations
nnnnnnnnnnnnnnnnnnnnnnnnnnnnnnnnnnnnnnnnnnnnnnnnnnnnnnnnnnnnnnnnnnnnnacctangngnncgncnacgcgnncgacaaaaacaagaaaggggaganccaacgaaatctctcaaggcttatgacgatccagtagagaacaaacaaaaaataaaccatgttgaagctgaacaggactctagccacatccattcttataacagacttagatacgattgatcagtaaataactcctatcatccaaccaaactgtatcttttggttggagcaatgagagatcttacttgattaaattaagaagaatgataatttaaagaggcacagggtaacggttgatgcaatccacccaaggattgttcctggggggctttttcaccttcctaattgccttccacaccacactgttacacttaaaaccagaaccgaaagcgatctgccaaaccttatcgcctttacgaacactttccttggcctccatgtaagccaactcatacc

SEQ ID NO: 123896 - DNA, 376 bp, Arabidopsis thaliana columbia
  unsure (1)..(376): unsure at all n locations
gagctatgcacgcgtgcgtgacctgggatgctatagagcggtcgacctacgcgtgcgccacgcgttctgcaaaaacaagaatgggtagatccaacgagcacgatcaagcgtctctacgcgagccagttaatgagcgggatcgaaccatacggtgctgacgcctgatcagcaacgatccagattcgggtcaagagacgtctgactgattttctgtaggcggagaactccgatgacgcgacccaagtgtaccactagctaggagaccatgcggatcattcggcgaccatactcggaacaagtgctgtttataggggctcaggttgacagttgatgcanacaacacaagggtaagacgctgggtgactatgaacctgca

SEQ ID NO: 123897 - DNA, 477 bp, Arabidopsis thaliana columbia
  unsure (1)..(477): unsure at all n locations
aggtacgcacgcgtgcgtgagctgggatcctctagagcggttcgcctacgcgttcgttctttgactagccgacagaaacaagaacgaccttggaggtgctagttgacgatgttacaaagtcttggttacatagcagctgatagataatttgagaacgaaatctaaacttcttttaagaatacggtaatgaaagagagtcaccaatttgttttctgcgagaggagtacatgaagccagattacgtagattgtgatagtacaggtgacactaatacagagtgctatcggacggaaaaaaacctgcttatattttattagatcgacatggattccaagttggatcatttacctgaagaagctttgactctcttgagcgaggctaaagcctaagaaggggctgagaacaattccaaagccacgaccattcgccgctggtgacgaaacccaagttagtttatctgngatccttgaaaatttg

SEQ ID NO: 123898 - DNA, 494 bp, Arabidopsis thaliana columbia
gacggtcgcaatgcacgcgttccgtaagctgggatcctttagagcggtcgccctatgtttttgtttttttcttttttttttttttttttaaacattgacttttgaagaacaaaattggtttttggtgggtaataggctaacaatatatatatttttggggttggagtttgagtttgctgtttcacacaagattgatataaattattggtctttttaagtggctttttacacccattgggtagccggttttttaggatatggagaatctggttttctttattagccagatgggcccaggcttatggttttgactgtgcttgtcaatctccgtcaaccttttttgttgggggagctgctagagatagcttctgatcaagcttcttggggaacgtttgcacattgttgtggggtttcaccagattgtttttcttttttgaatgaccttgatgcataatctggagtgggaagatacataccgggccccaccgatgtgt

SEQ ID NO: 123899 - DNA, 512 bp, Arabidopsis thaliana columbia
  unsure (1)..(512): unsure at all n locations
atacgactcaatttagggaaggtgggacccctggagggaccgggcccggattaaattccgggtcggcggggttacttgtccgggggcggcccttttttttttttttttggaccttaaacaatttaaatggccggagaagggctattatttattaacctaccaaattaaaaatggtttttttttgaccgacgaccattccaggaaccggggaggaggatttttttgggagtgccggnaattcctggaaaataggtttggagatggagggccggagatttccccggttaccaaaaatttaatttaggagggaggaaccttcttgacaaggtcttcattaagagcagcaatctgagaatccaaggcttaaagggtttcttttttctgactctccaagctcgccaaagtttctttaagctcttcctccaccttcttccttccctccgttggcttttcctcgacttcaacctgagtctccttcttcatctgtgaaagcgcggcggcgatctcagcct

SEQ ID NO: 123900 - DNA, 501 bp, Arabidopsis thaliana columbia
agggaaagatcggccgcctgcaggcaccggcccggaattaattctcgggtcgacgagctaactagtcggaggccgccctttttttttttttttttgtccttgaaacagctaaaatgaccgaacagagctaattatctataaacttacaaaataaaaattgttcttcttggaaccaagaccaacccaagaaacagagaagaacattttttttagagggtgtgggattcctggaaaacaaattttgaaaaacagagacagagaataacacagttaacaaaatcatattttaagaaggaagaaccttcttgacaatgcccttaataaaaacacgaatctgaaaattcaaagctctaaagggttcttctttctggctctacaagctctcaaaaaatccttttaattatacttgcaacttcatttttccctgacgcagggttatatgaaattcaacctgcgttgtcgttatcatcttgaaaaagggcggagagaaagaaagaacat

SEQ ID NO: 123901 - DNA, 467 bp, Arabidopsis thaliana columbia
  unsure (1)..(467): unsure at all n locations
gcacgcacgcgtacgtaagctcggaatgcggctcgagatacaacggcgagcccagtacgccacttagccaatggatatagcatcaaagccaaggtcctgattggatgcaatggtgccaattctatcgtcagtgattatttgcagttaaacccgaataaggcgtttgcttgtcgtgcggtgagagggattactaagtatttttacggacatggattnccacaagaggctctaatgataaagcaaggaaatgtcttaataggaaggctttctttgacggataatcaagtctataaggtttctagtacatatgcaagacaatagtcacaatggtaaagatcaaaattcgattgcgaatctgtgtcaaaaatgggcccgtgacttgtttgaaatcgaaaagaatgggtaaaatatgcaatgcggagtcattaacactcacacacttaatgttccgagcagccatcggaaaa

SEQ ID NO: 123902 - DNA, 412 bp, Arabidopsis thaliana columbia
ggggaagaacctacgcctgcaggtaccgtgaccggaattaatttcttggacgacgagctcactatctcggaggacggcctttttttacttttttttgggaaggacaacccccgggatcctgggcaaggaggtggtccttcgaaaaacaacccgcccaaaagagaggtgggggtcgcagcggtcaccctggaagatagaagacgggctttttttttttgggggggaggccaacactgacccatatataagcgaaagaagagaccacgcacaccaaaaaggacaaaaataggaattacaacactcgtccaagaaaccctcaccccaacgatctggcgccgtggactcgtctgtattaaggtttgatatgatactgccgatgaagtgttataacttacaaatcgtcacacataat

SEQ ID NO: 123903 - DNA, 500 bp, Arabidopsis thaliana columbia
  unsure (1)..(500): unsure at all n locations
aggtgacactatagaagagttatgacgtcgcatgcacgcgtacgtaagctcggaattcggctcgaggaactacgttgttttcggttgttcacttagccaatggaaatagcatcaaagcccaggtcctgattggatgcgatggtgccaattctatcgtcagtgattatttgcagttaaacccgaaaaaggcgtttgcttgtcgtgcggtgagagggtttactaagtacccatacggccatggtttccacagaggtctaggataacaggaatgctaatagagggtccttgacgatatcaatctttgggtttagtacatatgcagacataatcacatggtaagatcaagatcgattgcgaatctgtgtcgaaaatgggccgatgacttgtctgaagattggaaagaatggtaaaatatgcaatgtggagtcattaacactcacacacttaaagtaccgaccgccantcggaaatcatgttagggaaatttccgtcgtgggaca

SEQ ID NO: 123904 - DNA, 429 bp, Arabidopsis thaliana columbia
gacgtcgatgccgcgtccgtagctcggaattcggctcgaggaatacgttggtttccgttgttcacttaaccaatgggaattgatcaaaggcaagggcccgattggatgccatggggccaattctatcggcagtgattatttgcaggtaaacccgaaaaaagcggttgcttggcgagccgtgagaggggttactaagttttttatccggcatgggtttccacaagagggtcttaggattaagcaagggaatggcttaatagggagggctcccttggccgagaataaaggcttttgggttctaggacatttgccagaccattatccacatgggtaagaacaagaatcggttgcgaattttgggccaaaaatggccgcttacctggccgaaaaatggaaagaaaaggggaaaaatttccatggggaagcaat

SEQ ID NO: 123905 - DNA, 234 bp, Arabidopsis thaliana columbia
tcttgggcccttagagggaatggcccctgcattcctacgaatggtgggcttacggtcacactcggagggcccggcaagttttggggcttggaactgcgggcgtacaaccttgtgggaaagataccgactggactggcggggttccctccaaggtcaatgggcattatatgcttcacgccatttgtacgcaacctggcgcccttctaagaacccgtttctgtaaggaagcccggg

SEQ ID NO: 123906 - DNA, 492 bp, Arabidopsis thaliana columbia
ttaggggaagaactacgcctgcagtaccggaccggattactgtttggccgagggttcatacccggcgggggcctttttttttttgttgagggaaagccggaaaagaagtggtgtgggcgactttctcagaggtacaaaaattacgcactcttattaattcaccctcccgaacataaacagtcacctatgcgactttttttttgggggggggcataggcatcgcagaggtactgaacaacacaaccggctaaccgggccgtagattaccgcccagacggccgggtcgtggcgggtggggaaattgcgacgcgccaacccgaagatttactttatacttctcggaacgccagacaagacttgtaaatctgctcaggggaagtacaaagcatacaaaagcctatctaggggtagaccaaaaaaaagccgctgactctatcaaggcaccactagggcgcgacccacgacatacaaaactgttgggcgccgggaaca

SEQ ID NO: 123907 - DNA, 402 bp, Arabidopsis thaliana columbia
  unsure (1)..(402): unsure at all n locations
cccgcccccggcggaaggcaggaaactccgaaatttttagacggcgggggaagcgcccttctaaaaacacacagccttggtgtaacgcggtttagcgcacgcttgccgaactgactgcatatacacaaacatcagacagccacgaaggatttcctcgagcacaaagtccacacagattacttaattctccatcctgactaaacccgcaagaaaattttctctttttgggggggggggggaanagaaacacccccacccaaccccctgatcacaaaacatggctcaagcgcatcgggcggaaacgggtttgcctttcattcagagtgtggtaggtttcggtttgtgacccatcacttactcagccgattcactctatgagcaggtcgagccaagtgcgggata

SEQ ID NO: 123908 - DNA, 435 bp, Arabidopsis thaliana columbia
agaaccgacgcctgcaggtaccgggccggaaaaattggttgacgacgggctcattactcggaggacgcccttcattagaaatttcggcgagagcaacagtgagaaaaaactggaagaaacctccttacaacgggggaccacaacgcaacaccctggggggagcaccttttaaaaacccgcgaagaaagggaaacttttttttttgcgagggtgaacagggcctgggagccacactgcaagacaaaaaacaaacgcacaagactccaagggaggggaaaaaacccagatgggatggagcacagcattacaaagggccggcagccctcgtccccaggaggccagcacacgggaaacaaagaaaaaagagagaaaaaaaaaggcgttccgcacaggagaaacaacaacgaacaaaaaataaaacatcaagcacccgag

SEQ ID NO: 123909 - DNA, 494 bp, Arabidopsis thaliana columbia
aggtgacacttatagaagatctatgacgtcgcatgcaccccttcctaagctcggaattcggctcgagcccattccggaaccaagtttgatggtttcccaaggttcagagggcctggcccttggcacaacctcattaagtttctttaccaagaaccggtttcaaggaacattccaacctttaaagaccaccaagaacctgagaatggcccaagggtttcggccgaacctaaaagccccattgagggggtaagaattcgccgcggtggtggcctaaaaaacctttcctgggcctcctgggggcctcaataacctctaaccaatcttggtttccaaaaaaaagggtcccttaaccgggttgccattcttttacggggtgaaaccgataatgtgagggggcagaccgaagtactcgctgaccagttaaagaacctggcaagtagagaaaatcctgagaaagtccttaaatgaaggcaggcattgaccaattttgcgca

SEQ ID NO: 123910 - DNA, 517 bp, Arabidopsis thaliana columbia
taggtgacactatagaagagctatgacgtcgcatgcacgcgtacgtaagctcggaattcggctcgaggaaacattcttggtagatacaaaaaacatttttcagacacaaaatcataaaatctttggctttagtagatcaaaggtctttacattaatcggtagaagatgagccagtacgatcacaaccaggctggaggagctaacccaccggcaccgatgtctacctgtacattaccaccaccggcgattggttacccgactaaccaaccgagtcatgggtcggtagctcaaggtaaaggggaaaccaagtctaagggtgacggattcttcaaagggtggcttgcgggcatgtggtggtggtgtgccctggacatttgcttcttagccatttgggaattgggatgggctatttatgacgaggttatgggaatgggaagggaattattaatattctcttcaaccctaatggataaaatctctattttttggttaataatttcctggaatactttgggag

SEQ ID NO: 123911 - DNA, 479 bp, Arabidopsis thaliana columbia
  unsure (1)..(479): unsure at all n locations
tgcactatagcagagttatgacgtcgcatgcacgcgtacgaagctcggatcggctcgagctgattcattcgagagagagagagaagggatgctatgggattcttaagagattggagtgaaaagcgagcagtgaattgcttggacgacgcgtctatctatgaccataccgcggatccttactctcacttgccgataataccaacgccaccaagaagaagtacgctctcatccctgaccgcttctctttcctcgaccaggtatcaaaagctctaagagaagctggtcttgaatcatgcncaatctcatttcttcgggagtctgattctcacaaaagagcnaacgagtgggacttgggaaaacttctttcgatggaaaatgtctgcacgcgctcggcgaaacttcgaatcatatgaaaaggcgattttgtatcggncaaacgttggctctttttgatgaagacaatctctgcctttgtttcg

SEQ ID NO: 123912 - DNA, 492 bp, Arabidopsis thaliana columbia
actatagaagattatgacgtcgcatgcacgcctacgtaagctcggaattcggctcgaggttttcggtgagatcaccaacaaggctaccattgactaccagaagattgtccgtgacacttgccggtccattggattcatctctgaccatggtggtcttgatgctgacaaatgcaaagtccttggtaacattgaacaacagagcccagaccttggtcaaggtgttcacgggcacttcaccaaacgtccaaaagacattggagctggtgaccaaggacacatggttgggtatgccactgatgaaacccctgagctcatgcctttgagtcatggccttgcaaccaagattggtgctcggctcactgaaggcaagaagaatggaacctggcggtggtttagaccagatggccagaaccaagtcactggtgaggactaccaagaccatggcgctatggttccaggccgggttccaaacggtccgatcttaacccaaca

SEQ ID NO: 123913 - DNA, 475 bp, Arabidopsis thaliana columbia
cgcatgcaccccgtcctaagcctggaattcggcttgaggcttttttttttttttaacccaataaaggaatttaacttcctattgattcctgagaagaaccacttccatgggaactaaggattttatcggggacctactttatgaatgggaaggtgaagaaatgggttgagaaattagggaagggagctgcttctgtggaaggggtggaagctaaactatggcaggtcccaaagacgcttcacaaaaaggcactctttaggatgagcgcaccaccaaggagtgaatccccattcataaccccgaatgagctagctgaagctgatgggttggcctttggtttcccaacaggatttggaatgatggctgctaagttcaaagcctttttggatgcaaccggtggactctggagggctcaggcactcgccggtaaaccagttggtatcttctacagcactggctctcaaggtgggggcca

SEQ ID NO: 123914 - DNA, 634 bp, Arabidopsis thaliana columbia
  unsure (1)..(634): unsure at all n locations
caaggcccgccgnccagaaagagccaggaacacgggagcgtgagaaagaccgggaggcaagaccccccaaaggaaaagccaagagggggggagggaaaaaaaacggcaacaaggaaaagcacaagaaagaaggggaacaggcgacagaaacaagcgaaaaaggcaaaggcaccccaccaagggaaaaccgggagaagagcaaggaagaggacccgggaccagaaacgaacaaagagaagaaaaggaaggaggacttttcttaaccaaaggggagggggaccaacnnccgacaggagaaggaacaaagagaaagaagaggcgaccgcggggacaaaggaacacgaagagcaggaagcaagaccagagaggagaagaagacagacccagagggaacccagaacgatgagagaagcgagaacgcaaggaaagncccccaagaaacgaggaaacaagaagggaaccaggacgcgcaaagaaaagaacgaaagacagaagaaacgcgggcaggaaagaagacagaagaaggagagacaaagagaaaagagaaacgccagccgagatgccagaagaagaacggggaccagaaaccaacacaggaaaacgacaagaaaaaaacaacaagagagaaaagaaa

SEQ ID NO: 123915 - DNA, 291 bp, Arabidopsis thaliana columbia
gaggacgcatgcacgcgtacgtaagcccggaattccagctcgagccttaccttggattttttctgttcaccatggcttcccgtttcttccttttgtccccaatggattcacaggattcttaaagtcgcaaaacttcctttggttctcttccctttcgcaagaaactttctttccatgaagtcccatttcatcccccccctctccagacttttttttaaggggaagcctttggcgggatacccggaaaagtcgtgaccttaaagccccaccttcaaaggtcggccattaaaa

SEQ ID NO: 123916 - DNA, 644 bp, Arabidopsis thaliana columbia
  unsure (1)..(644): unsure at all n locations
gcgcggagacacgggaaggggacaaaaanaaataggggaccgacgaggcacaaggagaaccgacccgaccgccccgcgcgcagcaaccgacgagcaacccaacacgcgccgcagcgaggcggcaagcgcccgacaagccggcaaggcggagagaggcagggaacaacagaagagggaaaagcggaggaccggagacgcgagcgcgcgacgaagacagcacgaggggggagacggggcggcttattctaacacgccggggagcagacaaccgcacaaaaaggaagaaagcgtcgtgccgcgcccaacaacacacccaagcaggcagagcgcaagagaacgcggcgcgggacaggaaggaacagagggccgccccgcccagcccgccccggacacccaacacggcgacggcaccacgcagatagaggaatcgccggaccgagacgaaacgcaagcacaacacaaaagcacccacaagaccaaccacgagagccaccggggagaggaccgcagaaagcacgagcgagcacgcaagagagaaaagcggcgaacggggcaaagagaaagaggacacggaacaacggacaaccgcccacagaaacgccactcagcaacggagcgccgcacacccgcacaccaggacacac

SEQ ID NO: 123917 - DNA, 506 bp, Arabidopsis thaliana columbia
ttaggtgcacttagaagatcttgacgtcgcatgcacgcctacctaagctcggaattcggctcgagccaaaaaatgggatcttcaccaccggagaagaccactctgcaacggtaccttggacaggttcaaccacattctttaagaaccaaggccattaccggtggaggtttggctggtggtagcgaaggtggattacaaaagctttttggccttccaaagaatcaacttaaaaggggtcttcttaaagggaatattggtggtggggttcttggaccaagaaggcatttctttcattccttattaaaataagtttttaaagggaagaaaggttccccaaccggtggcaaggaaggtattcttgaaccattggccatgtgaaccatggacccattggctttcaatgacctataatggagtagccatagaaggacctccttgaaccttggttggagaagggatcaggagaacttatccaccggtccagcttactgcatggacgtttttcc

SEQ ID NO: 123918 - DNA, 508 bp, Arabidopsis thaliana columbia
atccaattaatatggggaaggctggtccgcttgcaggtcccggcccggaattaattccggggtcgacgagctcactagccgggggccgccctttttttttttttttttctttaataccctggtttttaatatgaggttggggaaggtgttgtgaatacctaaaaacatatggttatcctagaagggtatcatcttaatacagattttaattgggttttttagctgttggattggctttaccttacagagtactaagtgatcataatgagtcccaaggcttgagttctctgtcacgatccatgtgtttcctaatcacttagcctttgccaaagctagtgtcattgacctcgctcgcagggttaggaaaattccccaaaagaatgcgaccaggctgtgcaagatgacccggaagtgcagtggcacatacttgtagttaatccatcccaccaccgggaaaaacgtccatgcagtaagctggaccgttggataagtcttcttgatcctttct

SEQ ID NO: 123919 - DNA, 510 bp, Arabidopsis thaliana columbia
aggtaccactatagaagaactatgacgtcgcatgcacgcgtacgtaagctcggaattcggctcgagaaaaaaaaaaacacaaaaaaggttcaatgggccggcttaacaatggcctctcttcttccctgctttcgccggaaaggctgggaacctttcccctgcgggatcagaagtccttggaagcgggcgggtgacaatgaggaagactggtgccaagccaaagggttcattaggcagcccatggtaccgatcccaccgaatcaagtacttgggtccattctttggcgagtcacccagcttccttaccggagagttccctggagactaccgatgggacacaagtggtctattcgctgaccccgaaacattcgcaaggaaccgggagcttaaaggtattcacaggaggtgggccatgcttggaacccttaggtgggtcttccctgagcttttggccaagaaccgaatcaaggttggagaagcaggttggttcaagggttggtcacaaaattt

SEQ ID NO: 123920 - DNA, 520 bp, Arabidopsis thaliana columbia
  unsure (1)..(520): unsure at all n locations
aggtgcactatnagaagactatgacgtcgcatgcacgcgtacgtaagctcggaattcggctcgaggcttatttgagaaccgaggaaaaaaaaaaccatggcaacttaagccggcgggatcttcaacttcggcattacaaccggcgaaccttcggggtcaagaaacttcactttttcttaacaacccaacggtccaaattccttttctttaacaaaaccggaattcgggccgagaaaaccgatttcttcggcggcggtggtggagcccccggcacgaaaggaggttccgggggattcaagccaccggaggttgacccaaacacaacggcttcgatttttggtggaaggaacggggggctttttcggaaagggccaggggaagaagtcttcggttttaacggggacctaacggaaggaccaatttttggaaaggcggccgggaggagcagggttcttgaaagagggtccgattcttctgagcttagcgaggaaggaccagtgttaagcttgggggccaaggc

SEQ ID NO: 123921 - DNA, 338 bp, Arabidopsis thaliana columbia
tctagaagactatgacgtcgcacgcacgcgtacgtaagctcggaattcggctcgagcttgcatattaatcaagagtacaatgctaatcccgagagttgccgttgtttggttctcatcaactgctttttctatcaggactaagcctatttcggctctttctctcctgttttcctttttttttcccgatgtcaaattgattctccaattcaaggggggttttttcccgatcattccgcccaatgacgatggaatcgattaaagagaagagagttggaccacttgccacctactaatgtgactgtcccaaaacctatattcccccttacaatttgtggttt

SEQ ID NO: 123922 - DNA, 535 bp, Arabidopsis thaliana columbia
  unsure (1)..(535): unsure at all n locations
nnnnnnnnnnnnnnnnnnnnnnnnnnnnnnnnnnnnnnnnnnnnnnnnnnnnnnnnnnnnnnnnnnnnnnnnnnnncctttttttttttttttttgataaactatctgctatagattgggttagaataagaatgtagtaaaactagcaacaacaaggtgtaacgataaacagctttaggcgataataggattattagtcaatatttttttaaacagattcctcctaattagaaaaatgattgatggatccctctattccccagctggatttttggaagatccttcctctgcttaacaagatttcctcgccccgaacaccctttcaaaaatgtataaaatttttttggttttgtgggggcttcaacccattccgacgtggatggaatccaccccaaaaaacatataaattaattgaacttacaattacttatgtaatgtcaacctataaccataataaaaaacccaggtggatcttactttcgcccattccgccaacaaaacattaattgggattgaaccaaggactagatttagg

SEQ ID NO: 123923 - DNA, 437 bp, Arabidopsis thaliana columbia
  unsure (1)..(437): unsure at all n locations
nnnnnnnnnnnnnnnnnnnnnnnnnnnnnnnnnnnnnnnnnnnnnnnnnnnnnnnnnnnnnnnnnnnnnnnnnnnnnnnnnnnnnnnnnnnnnnncctttntttttttttttttttttttttttttttttttttttttttttttttttttttttttttttnaaaaggaaaaagatttttttaaggcttgacccgagtccaaccatttaatttttagagccccgtttttttgtggagtagataaattattaagctgtgccccatctttatcattataaacccttcaattttttttcacagtttttgacccaaggttttggggattttgaaatccatttgggggcaaaaacattgggtaacaaccctccccccctttatttaaatccttaggcctttgccctttggtccttaatttggggggtcccaagggttaaattt

SEQ ID NO: 123924 - DNA, 395 bp, Arabidopsis thaliana columbia
  unsure (1)..(395): unsure at all n locations
acaaatgaatagccttccggaccataatgacaattggaatctttatacctttaactttttgtataggaggnnaactataanccggaccataaagacatggtaaaaggagcaagcttttttttttctttggataaaaatggttggtttccttttggcggataatggttggacagaaaaatgatttggaatatcttaagggacaaggcgggtctttgggggaaaaaaaacccaaaccgattttccggaaatatcaaaatccaaccatcctaaatggtggggctttctcttttggtcaccaaccttaggaaagttttccggaagaaaccaaaaggcttgattaaaggaatgcttgactgagccggttaaagaatcattgggggaaagaaacttgtttt

SEQ ID NO: 123925 - DNA, 499 bp, Arabidopsis thaliana columbia
aggtgcactatagaagatctagacgtcgcatgcaccccgtcctaagctcggaattcggcttgagccaagatggcgaaagcaagccttattctactcggaactctctttctcttcggagccctagcttcaattcaagccaaagaagatcccaaggggggtacccacaagggttacttcgatggaaaaaaccaccgcaaattcccttgtcccggtggtattagaccttttggccaggcaggtccttaaaccggaaaaaacctcaaaaccttgggccccagggaaaaagggggtaggaaaaattggaaaccctttccattccagggaaggcaggttcattcgattctttccaagcttaataaccaaggaaggggacttaacccttggaaccggattgggggaagattaattctatggccaaaagttggctgatgagaccttcaagctgaagcacactgaaccaggtgtactttaattggcaacctcggaagaaaacacaaat

SEQ ID NO: 123926 - DNA, 482 bp, Arabidopsis thaliana columbia
  unsure (1)..(482): unsure at all n locations
atctatgacgtagcatgcacgcgtacgtaagctcggaatgtcggctcgagcagtaacgccggaaactttggactanaagctaggcgtttttgggtgtgtcgtaaatgctagttacatccattaacttagggcagctgatgatcaggtgctccgttgcttcatgcccaccacgttcaagactgtggctctattctctaagaaaaagtcatctgctgcttagagcagggttgactctgagactagcgatgacctcgccaagtggcttggtcctgacagtagaatgttcttgcctgatggtctttggaattgatcagagatcccacagtccttaaacggccaagttgctggagattatgactatgacccatttggtcttagaaaagaagcctgagaactccgcttaaaaccaagctctagaattgatccatccgagaagggctatgttaggagcagctgttttcataatttcctgaagctttaag

SEQ ID NO: 123927 - DNA, 511 bp, Arabidopsis thaliana columbia
  unsure (1)..(511): unsure at all n locations
acgactaatttgnnnnnnnnnnnnnnnnnnnnnnnnnnnnnnnnnnnnnnnnnnnnnnnnnnnnnnnnnnnnnnnnnnnnnnnnnnnncctttttttttttttttgtaatttgaaaaattgcaagaagattcagaaggaagtttttttaacattggaaacaggaggtccaatcgaaccaaaggggccatttgtggaagctcttaaaaaaagtagaaatggtttatagagggggagccctctcggcaggtccagctgcgacagaaagcaagatgtttccaaaggaaccactggaaggcttggaaggatctaacaaaaccttcccaggaacatactttttgttaagaaaaggacctggtaaatatggctaagccccagtcctgagctgataactttgagaaaagcccccatgccagaggctttccaacaggcgaaccaacaaaggacccccggggcgtaaacagtgctttaaaccaaatcgaatggagaatttgtgaacacgcatcatcgagg

SEQ ID NO: 123928 - DNA, 511 bp, Arabidopsis thaliana columbia
aggtgacactataggaagactatgacgtcgcatggcccccgtccttagcccggaattcggctcgagccctaacttggattctttctggtcccatgggttcgggtaatttctttggccccaagggtttcactggattcttaagattggcaagcttctttggttcttttccctttgggaagaaaccttctttccgtgaggtcggttccattggcttctttcaaacctttggaatgggaagccagggtggattccagaaaggggggaccggaggccagcctaaggggggccattaaggaatccggagggaccggaaggaccttcctgaaaggtggccttggccgcagggcctctcctctggttataatggccattaaggccactgtgggctgaaggcaggcttggaattaactaaaatccaactctcctctcggaatcttggaggctgatgccaaaccttctgaagagactgcattctctgtggagggaaggaccatccaggtggtctctaccc

SEQ ID NO: 123929 - DNA, 509 bp, Arabidopsis thaliana columbia
  unsure (1)..(509): unsure at all n locations
nnnnnnnnnnnnnnnnnnnnnnnnnnnnnnnnnnnnnnnnnnnnnnnnnnnnnnnnnnnnnnnnnnnnnnnnnnnnnnnnnnnnnnnnngcccttttttttttttttttttttttttgaacgaagcaattcatgctttttcatttctttattttctcaatacattattaagggtacctattcgggatttaatatttaatcctatttaccattaaaattttttttgatccttatgggcttcaccagtcaatgaaaattgggctgggcccaagtaaactttggcttaaccaaaccaaccagaaaccactttgcgaattcggaaaccggagcatttccaacggggggggaattactggtgagaaactcattccccggtttgaaaggtttttgcccgaacccaggaaccttaacccccccggagcggtccgaccccttccacatttggtttaccaatttttttttttttttaattttcaaaacgttcagaacattgcccgaaggaaatggctt

SEQ ID NO: 123930 - DNA, 469 bp, Arabidopsis thaliana columbia
agggaaagatctacgctgcggaccggccggattaatttttggtcgcgagctcactagtcggcggccgcctttttttttttttttttttttttttttttaagaaagaaacatccatgttttactagagtaaatagcacatcattcaaaccaaagcaaggaccaaccatgtgactcacccgaatttttttttgagagaggtttaattaaaaacatattattcctgttgataagaccgaaccgatgagttctcagaaaccaaagagtttattaagcctcctttttccctgtgaggagatccattaccacgcctttgatgcttacactcgagccgaatttcgagcttacgtacccgtggatatcgaccccataatctcttctatagtgttaactaaattaaaattaattggtcggctttttaataccgtctttcttgtggaaaacctttgtgttacccaacttaattgccttt

SEQ ID NO: 123931 - DNA, 528 bp, Arabidopsis thaliana columbia
  unsure (1)..(528): unsure at all n locations
nnnnnnnnnnnnnnnnnnnnnnnnnnnnnnnnnnnnnnnnnnnnnnnnnnnnnnnnnnnnnnnnnnnnnnnnnnnnnnnnnnnnnnncctttttttttttttttatataaattacatattcataaatcagacatttgacaatccgaaagaaattgtctcataaagagaaaaagaacacagaccattggaaatgaaatgagcagagataatttatattatttgtttgagaaaagaaattaagcttccgcagaagcctgggggcttgcaggcaatagaacatgatgcattgggacccgacggcggatggcaaaatacgaggagcccaatgaaggcgcccggggaccccttcttgcattttcaaaattcctcaacacttagagcggagtcgaggtatcccaacaaaggaagctcccacaatgtccaccaccccacaattttaaaatccaaggagggtgttccggtcattacggaacaaaaatactgaccctaaattcacaatgatcaaaaaggagacccactatagtgctg

SEQ ID NO: 123932 - DNA, 328 bp, Arabidopsis thaliana columbia
ttttaggggaagaaagccaacgcctggaggtaccgggccggaataattgccgggccgacgagctcactagtcgggggccggccttttttttttttcttggaaagcctggagactaaagtaacgagcccaagcccacacaagaaagacaagagcccgccccaaaaaaaaatgaggagggaccgccccgcaccccgcgcccgagggacgtgggaggagatttttttcggccgggcgcggaccatgaaagaaggcaggagttggaacgaccacggacagcgagacgaaccggcaacggagatgacgacgcgaccagcagaccctcaaggca

SEQ ID NO: 123933 - DNA, 462 bp, Arabidopsis thaliana columbia
gggacacactataaaagcctaaggaggtggctatgcacgcgtcacgtaagctgggatttcggttcgtttttggccgcgttgttcattaaaggtgggagtcccaggtgaaagataacgcgaactatagttcggaggtttaaacgctgattccaaacacgcctgggcttgaacgggtgatatttcttgaggtggaggatttttaacctgaatggagtgttctaggaacttcttctgatggggacactgactttgggcttaaggttaactttgaaaataaggccctggggggccacaatgtgcaagttatggaagataagttcctggctattaacgatctcggctttgttggatccatggctgttccagccacgcaaccatttgttggtactttttgaaatttctttaaatcataggggattctcctatagacaagaactttagctcttttgtttggtttggccc

SEQ ID NO: 123934 - DNA, 481 bp, Arabidopsis thaliana columbia
cccctgcaggacccggcccggataaattcctgggtcgacgagctaactagtcgggggccgccctttttttttttttttcgtttcaacaaaaggcgaagttacaatcgaaagtcggattatcaacagcatcgcaagaacctgcaaatctaaaaagtgtagattcagccttataaacaaacaagacccacttttttttttaaggaggaagaaaacaaaaagctaaaatcttcattaaacttccccgggactcatcaatttaaaaatcccgacgtcaataacattcccaaatcctaaccttcctcaaattatacaaatgtgaatataactaaaccgcacaagaataaatgaaagctgagtaagacacgggaaaactagaaacaccgttggaaaaagaaggcacagatgccctaaaaactatgccaaccccaaaccctccaccaaatcgattccaaaaatgacctcaaaaaaaaaataccaaaac

SEQ ID NO: 123935 - DNA, 315 bp, Arabidopsis thaliana columbia
cccgggcggccattccttgggcggcggaccccctcaggcaactaccacaggaataccaaaagacccccccacccccgtagagacgaggcacaccggatcggacgagcgcgcgctccacatcagccgaccggaagaacgccaggaggagccagcaccgacgaactaagtcacagagactaaggcactagaccgcaagccaacaacgagaggcggagcgccccacagtaacgacctcgacggctcgttggcacctcagtcgtgaactcagcgacgaccgagccgaggaatccgatccctcacggagaacgatagacc

SEQ ID NO: 123936 - DNA, 513 bp, Arabidopsis thaliana columbia
  unsure (1)..(513): unsure at all n locations
nnnnnnnnnnnnnnnnnnnnnnnnnnnnnnnnnnnnnnnnnnnnnnnnnnnnnnnnnnnnnnnnnnnnnnnnnnnnnnnnnnnnnngcggcctttttttttttttttcatgaaggggatgcgttggtttgaagctttttaaattttaaaagcttccttaaggagaagaacgtaagcttgaatttcttttggttgaagaatacccttcaattccccaatttatttggaaggatggttaccattaccggacttaaactttaaaggtggaaggatgggcccattggcaaccaggaagcttccaattacccgaaattggaataagggggaggccgtttcctcgggttggtgaagggagaaaacccaccgaccggtggggaggttttttaattttttatggcccacggaccctttaggttttcgaaggtaaatatcatcggaggttccccaggccgacatgctaaagattctggggcccaaacccttatggaatcctttccagccatcttctgctagc

SEQ ID NO: 123937 - DNA, 469 bp, Arabidopsis thaliana columbia
cccccgcagggtaccggaccgagagtaaattatttggacgagcggggaggtcccactaacggcacacctgtcgtgggtgtgtggttgggccaatgagcaagcaccggtcgttacaggtgtgaggaaagggcaaggaaaccaacaggatggccaaaagagcatgggcgtccgaacgcccgcaccacccgaagaacgcacggaccagttttttttttttttgagggggagggacaaaaagagaaaaagaaccaagcgctataagaagcgcacctcctccggcaccgggagcacggggaggaggagtgcgtcgcgcatacctctcaacgaataggtgcagaaccgccccacgtagatgcggcggtgcgcgtggtggacggacagcgcgccgtggcgaatgataagcggcggcactaagccgtgcgggcggagcgccgcgcacaggcatgtgttgaatctgcagacggggagg

SEQ ID NO: 123938 - DNA, 484 bp, Arabidopsis thaliana columbia
gacgtcgcacgcacgcctacgtaagctcggaattcggctcgagatttttctcttggtggtctcgattaacgaaaaagacttggcggtctcaattcttatcgatttaagaaccaatcatctaacgaagattaattccgaagatccgaaaccaaccccaactgggaatcggtggttggtaattctctttaaaatcggcagaagaatttttcttcggtttcttccgaagaaaagccagagagttagaatgggatcggaaccaaaccgttgcaccagcttcacgccatcggaaggtttaaaaccaaagctttggggtaaaggaagggggttctttggaacaccactcaacctggatccctggtcttaaaggtaccgaaggatttggggcggagaaggttaaaccagaagtggttaaggcggtggtggaaaatcctttaaggccttctcttcctggaagctcttcaatagaaaaccctccggctgtggt

SEQ ID NO: 123939 - DNA, 509 bp, Arabidopsis thaliana columbia
  unsure (1)..(509): unsure at all n locations
nnnnnnnnnnnnnnnnnnnnnnnnnnnnnnnnnnnnnnnnnnnnnnnnnnnnnnnnnnnnnnnnnnnnnnnnnnnnnnnnnnnnnnnnnnccttttttttttttttttagtttaagaacaaacttcatcgattcactttattacggaaccaaattcatcatcctctatccctttggaaacaatccattaaaaccatccaagacaacccccaaatcggtttatatacaaatgagtaattaccaccaaaatacttagaaaaaacttccatatttcagaacctttgaattttatcagccttaaccacaggattagctttggcaatctctccacgtccaacttctttgaaatcaaagctgcaatcatgagtctccgggtaccgatgttcgccgcaaaaagtgctcccgcatttgcacttaaaccccatgatcccaacctttttgttacaacacaaacaccggttggttcgtgcaggtctcgatggctcgttcgcctcaagaacccccgaggaa

SEQ ID NO: 123940 - DNA, 375 bp, Arabidopsis thaliana columbia
ccccgccgtaagctgggaattcggctggggggagggcccgccctttttttttttttttaaaaacacataagggggtacatttgttcctgagcgagtgttgaagtctcatagttccataccagaggcttgacacagaatttaagccatcggtgagagcccacaccggcgatatcctgtagtcaccataccagactcactagagcggttcttttcatggtaggggcgagcggaagagtgagttcggcatcagtctccacgttagacgagctcgtctgctcaccatacgacttgggaacccacaaccacttgcacaagggtggccttgtatattgcacgcgccaagcactatagtacggcacgattccagctgccatc

SEQ ID NO: 123941 - DNA, 296 bp, Arabidopsis thaliana columbia
tggaggtaccgggccggaaataaaaccctgtgtcgacgagctcacctacccgacggacgacccttttttttttttttcatgaagaaaacggacccccaaggaaaacaaaaatcaacaatacaccgacgcccccacagcctgcacagaaacgggggggaacgccaaaaacaccaacacaaacgaggaaggaagtttttttttcgggggggaacacaaaccagaaccgctaccccagcttgaagaaacagggggcctccaccaccaacccagcccacggagataaacctcatcaaagg

SEQ ID NO: 123942 - DNA, 526 bp, Arabidopsis thaliana columbia
gactcacttagggaagctggtcgcctgcagtaccggtccggaatccccggtcgacccacgcgtccgacttaccctaatttccgctttcgatattcaaaaagcccctaatttcgaaaaattcccattttcttcaaggttttttaaaaagagtatatgcaacagaatgtctttcttgattccctacccggagaagaagaatcgctttactatggcccaagttcagcccgagcaacgcttttttttttccggaggaaaataggttgagtttcatgcgagaaagctctgcacaagaccgctctaataccctgaggaaactttacttgtttgaaagaagagtgagatctactttggcttggtcgcttaacaacaaacctccatttggtgcctagggagaagcttctttggaggaattatttctcttccatttgagcatgaaagaatgatttgcagggggccaccacgttaaccactttttccgattattcaatggatttaccagcaggccaagcattgaaaccttggactt

SEQ ID NO: 123943 - DNA, 512 bp, Arabidopsis thaliana columbia
  unsure (1)..(512): unsure at all n locations
nnnnnnnnnnnnnnnnnnnnnnnnnnnnnnnnnnnnnnnnnnnnnnnnnnnnnnnnnnnnnnnnnnnnnnnnnctttttttttttttttgagaacaaacacagacatactgatttccaacgacattactggaaaaatcaagatcaaggatgtaggaagtaaatgtcgttcttgttctaagatgatcagaaaacgattcacaattatatgttcaacgaaataaacggagatatggagtgaaacaaacacaactttcttctaccgacaacatcctctctcaggagacaactctcgcattctccgagtttcaaagcgcaggccattctttacggatgtcaaagctgtagttgatctccaagtagcacttattatcatcatcaagaaacttagttcttgcagaatatgatcctcgagcaaacatgccagaaggagtggtctcttctggcatcacgtggttgtatggctccaactgaggactaaaggttccaagcatttccttagctctgtccactt

SEQ ID NO: 123944 - DNA, 498 bp, Arabidopsis thaliana columbia
  unsure (1)..(498): unsure at all n locations
nnnnnnnnnnnnnnnnnnnnnnnnnnnnnnnnnnnnnnnnnnnnnnnnnnnnnnnnnnnnnnnnnnnnnaaccaaaattccttaatttggccttatttccctttgattagatcccttaccccgaccaagacaccaaaattcttgagggcgagagagctgattgatgtctttggtatttggagccagggacatggggttcgacgaccaccaccaccacttttaccaccagggtggagatgatgagaacttcttcttcagaacaagagccgacgaccatgcttttagtcgacagaagaaccaattttttttttgggcttccgaagaggaagaagaccaccaattccaaatggaattgggttcttaataccattttaaagaaccttttgagaaggaccagggttaataaaagtttaaggaattgaagggaccagtttttggaaggggtggaggtacccaccatggagaagacttttgatccgaaggggagaatggataccc

SEQ ID NO: 123945 - DNA, 509 bp, Arabidopsis thaliana columbia
gactcattttagggaaggctggtccgcctgcaggtaccggtccggaattcccgggtcgacccacgcgtccggaaggattatcaaagttgaggaaatacgtggcttaagggaagctggttggaccccagatcagtgggggcacactcgtttcaaattattcaatggttctgctgatatggtgacaaatcaaaaacagttgaatgcactcatgcgtgctcttttaaagacaatgcaagaccatgctgatgcttggcctttcaaagaaccagtggattctcgcgatgtccctgattactatgacatcattaaggatcccattgatctgaaggtaattgcaaagagggtagagtcggaacagtattacgtgacattggatatgtttgttgcggatgcgagacggatgtttaacaattgtagaacttacaactcccccgataccatttattacaaatgtgcaaccaggttggaaacacacttccatagcaaagtacaagcaggtctccaatctg

SEQ ID NO: 123946 - DNA, 482 bp, Arabidopsis thaliana columbia
gcacccctacgtaagcttggatcctctagagcggccggccttttttttttttttttggacagaaactaggggtcttggatattagatcctcccaaaaaattgaaacttaacttaatacagaaatgtatttcacccggttttttaaaaccaaataataaaaaatggttttatttccaagatttcaacctcttttttttttttaagggggttggcctcggtaccaaactttggcccttgaacaaaccctccaggattaccgcaaaatctcggaaacaccgtccctcttgtttccgattcacaaccaagcccaaagagcacttcggttacgcgaactttcctttttaggtgcgcggcaaattaaagagccaaaacctctttctttcctgaggctacccatattttggccgaatgggaaccccggacccaatccccttataaaagacaccgcgctagagggaacctggctaaccgaaaaaaaaaat

SEQ ID NO: 123947 - DNA, 432 bp, Arabidopsis thaliana columbia
cactcctggaaagactcaggacaggaggcagagtttttacatacggtgggcaattcctaacgtatagagggggaccttcccagatatatacatgtgttcaaccacgacgaggaggttatgtataggtgaattagccatcaattcatgtggacgagaatagagtttaggtagatgaggtggagctgataaaagaaaattatttacagaaaacttttttttttttaaggggagggtgaaatacacattagataaatagacagatagacatggtggcggaatgggatggtggagagaaggagtaacagtaacacctcacaacaatgaagagtccccctctaccctctctcgctcaacaaaatataccaagggagtaagaatatggcccggcccccacagaggattcagcagcctgcgccatcccttagagcacac

SEQ ID NO: 123948 - DNA, 491 bp, Arabidopsis thaliana columbia
atgacgtcgcatgcacgccgtaccgtaagcttggatcctctagagcggccggcctttttttttttttttgtaacaatgctaaaccggaatttctgagggggtctaccttagccttttaatgatccggatggttcaagaacctaattcctcaaaagaaagagagggatttcatggagaccaagcgggctttggacattgggaaggaccccctttgcccatcaccttcctcagatagctttgggatggcttcctcggggtgcctgcccggggttggatccttatattggatccctttggccctcctttggttggcccaagccaccatatggaccagggctgcgcttctggccttggggggccacccaggacccaatcaataaatcccagcctggggaggttcctttcaaaaaaaggtcctttccggggggttaccgggggagaatcttcaactgcatttggagaacgcccttggcttcagccatttcaaaaca

SEQ ID NO: 123949 - DNA, 461 bp, Arabidopsis thaliana columbia
  unsure (1)..(461): unsure at all n locations
nnnnnnnnnnnnnnnnnnnnnnnnnnnnnnnnnnnnnnnnnnnnnnnnnnnnnnnnnnnnnnnnnnnnnnnnnctttttttttttttttgtgacatcggaaatctgaactaaaaggggcggtcttcctgaacataataaggatacagcaagaggaccggtctggtcttatggggagacacagagggcatacgtggatgggtcattggccatgatcacacagatgactaacgtttcccactgaagaagaaaaataaagtttagcgaggaatattatgcataatctgcatggaaccagatctagatgtaggactcaggtagacatgatctcgatcagactgtagaaccaagtgtccacttgctgaaacagtgttcgtacgtgcctagatagttgccaaggaatagagtacactgttggctgtaatctttccagaagcaagtcctttcagtgggacaagggtga

SEQ ID NO: 123950 - DNA, 456 bp, Arabidopsis thaliana columbia
  unsure (1)..(456): unsure at all n locations
nnnnnnnnnnnnnnnnnnnnnnnnnnnnnnnnnnnnnnnnnnnnnnnnnnnnnnnnnnnnnnnnnnnnnccacgcgtccggtcgagttagggccgatacttcctacaggaggcatggtgttacatgagacctcaaagatgcgcactgtgagccatacatagagaatggttgagtcgaatatgatcaagatagtgaaaccttatgtctcttacggctctcaacgatctcgacgatggttggcctatgcatatactaagctgcctatctatcatggcagatgggggtatctcagcgctcgatggccacagatgtagatatgtggcgagacaccctcacttgtggctacgagttgaccgtgttgtcgaggattgatctcaccctggagggccactatcattgagacagatgtatctgagaacgacccgcagtaccattgtaacagtgctcgccgggaac

SEQ ID NO: 123951 - DNA, 447 bp, Arabidopsis thaliana columbia
cgccccgcacgtaagctgggacctgtagggtgccgcctatggtttactttaaccaaaacaaatctatttctgggaggccggcatacatagaggccacgcgtgtaccacaccagcaaagcggcgtaaaaatagggcaaagacacaattgtccctgcgaccgtgaacggaaaacagagagattttttttttctaaggcgcggccggggcgtgcgaaccatgcgacacttaaagatggtcaccagagctcgaagaaggctacctcccgaatagaaaaggacataatgcccacagctgcaacgaacctgatgacactagatcccatccttaacggtccgctctcggggcaaaaacaatttggaccaagattgcaggacggccaacaatgctctcggaagcaccgaaagatggcaacccgtagggaatctgcgaagaaccacaaaatgggct

SEQ ID NO: 123952 - DNA, 360 bp, Arabidopsis thaliana columbia
acgatgacttagggggagcagctacgcctgcaggtaccgggccggaattaatggctgggtccacgagctcactagatcggagggcggcctccttttgtttttttgtgcacaaacaacaacaaggggccatttaataataccaggcgcgacagacaccttcggatactcccttaaggaaagggataataaaagccctctaacgcaagcacctcagcaacaggacccctttttttgttagagcggcttaccccgcactgttccattcctcatgcgtggactgacctctccatctcgcctcccgacagctgtgttcctccgcacgcccacctcagagacttccttcctcgcgccccgcctgct

SEQ ID NO: 123953 - DNA, 465 bp, Arabidopsis thaliana columbia
aaaaaaaaaggcctctctagagacactcaaaacttggggggccgccccgccgaagctgggatccttaagggggaccttttttccccttggggacagtcggtggaaacatggatagacattaaaaaaggaccggcctaacaactaaagctagtctctccaaagaccgagatcttgcctgtcctaaccagactttcaacaaatgaagagctatttttctggccagggacaccctatgaactctcacgaaaatagctacatgcaaaacacacaactcaaagattttgccagaatgtccctcttttaaccccgccttatctctaacccggcagactatggctcgacaccgttgaccaagccctagaaggacgagacacacgcctgcgccaccttgcacaatctatggacctcgacgcctacacccggtactcggcccgcattcgccgacttcctcgcgggcggctcact

SEQ ID NO: 123954 - DNA, 211 bp, Arabidopsis thaliana columbia
ttcgcccggaggaccctgggcctggaattatgcggagtggtgccacacgggtgacgttacatgcgggcgtcacaacaaatatagcggcttgcttaacatatcgagtaacctacgagaacggacgagtttaccataatctaaatattcttcgtaacctagttatatttacggttgttgattaacttctggtaaacagaatatggcccacact

SEQ ID NO: 123955 - DNA, 472 bp, Arabidopsis thaliana columbia
aggaggtggctagtgcacccgtccgtaagctggaatcctttaaaggggccgccctttttttttttttttgttaaaactatgccttttttaatggtttaaattcgtggggaagagtccatggggctttaatcgcctaaaaaaaaaacccctttttaaacagcattcctgcataatcaatttttcaactaattgttggaaagagggggtcccttaaggtgggcggggcctttttttgctaaggccaccatggttgaaactacctgaattttgatcctattgcaaaaaaattggggtaattttcaagccggatgcttaagtcgggggttggtttccaagtttatgtggttctaccgagaagaataccggctaacgagtctgtggaacattaccaaacacacggggtatcccatctgggaaaaggatctcctgaaatatacctttggttccacttgttttatggagccccctacgc

SEQ ID NO: 123956 - DNA, 491 bp, Arabidopsis thaliana columbia
gggaaggctggcccgcctgcaggtcccggtccggatttccgggttggaccaaggcgtccgcccacgcgtcggttcgattggaaaagagaaaatacgtcgacttacgttaagtcttttttttttgaatatacccggaaaatttgggaatgggggagtttctatcgatgacgggtcaaccatgaataccttaaaattggtctgctttttttttcactaggtcagtggctaaacccttcttcccaaaataaacccaacgaatgttggagctggaatcctttttcaggactaaaaagttttaggggcttgggtctttgactcgaaccttgggatctggttaacgattaatgcttctctgtacaaaagtttaatgaagatgggttcaattgccagcacttgggcttttggtaggtgatggcgtgggcttccacctgtgaggaggccattaattagggacctggacaccaccccgtcctcagtaggttgatttcccg

SEQ ID NO: 123957 - DNA, 513 bp, Arabidopsis thaliana columbia
aggggcccttttgaagattctggcggtgcctgccccccttccttagcttggattcttttaagggggccgcccttgtttttttttttttttttttttttttttttttaccccccaggccaggggtttaattggacctttccggggattatggttccaccatggatccaattttccgtccaaaatttttactttttgggccaaaatttttacaaaggacaccgattattttgaccagccaggaacctcatcattgaaaagaatcccaagacctgttagaaggaaaaaaaattccttgaggactcgatcaatctcacaatgaaatcctacaggcgcgggtgatcggttcattgtgatcacagaagtagaagagaggcaaaaaccgtaccgattgcagagagaaaaagatatagagcgactcgggtttgtccgttgggagacttttcacctgttgattgaggtccaggggtggtggttggggctctggctgacactggaggtaatggtggttcagtg

SEQ ID NO: 123958 - DNA, 464 bp, Arabidopsis thaliana columbia
  unsure (1)..(464): unsure at all n locations
ggatccttttgagcgggcggcctttttttttttttttttggagaaccattggccactttgaattaaaccaggacccctttaaggtttaacccaccggagattggtccaaggtcttaagaaccatgggggaaatccattaccagggggccggacgggtttttcttattcaaacttcttttaaggtacccccaaccttttattatcctaaggaggtggttcccattatttcaaggtcccaatttaaaccagccaatggaaaaatccttcaccagattttcccgttttcagattaaccccaaagaaccaaccgcaaaacccacttggcagcaatggggattggagaaaccaccggtttttaggctcctccttcttccttctcctccggttctttgttccatggttaaatcctggccctcctntcttaaattccttccctccggccaccggggttccctcctggttaa

SEQ ID NO: 123959 - DNA, 491 bp, Arabidopsis thaliana columbia
ttcatataattcaacctccaccctaccatcataaactaaaattattcgacgagatattgtcagatatacgcccttcgcatcatccccgccaatccgagttaaacagaagggaaagcgtggcggtcaacacgtatcgaggccggagtggacaggcgtttttttttttgcggggtggcgaagacaaacccgcttttatcacataaagcactccaacgtccgctattctgctcagattcatgacgaatgatacatcataattattactgtacacgtactcaccttacccgacatggaaaagtaagttaagtataaattagtagccacgacgcgtaagtgcagtcctgagccccgggcaccagccaaaaactacaagtaaatcttacaatagatatcctagttatttagtacacacaacggcaccctgccgacacatagagctacgagataaatgtacaccacataaacgactaaaggtaacagacgacagagag

SEQ ID NO: 123960 - DNA, 486 bp, Arabidopsis thaliana columbia
accccgccgtaagctggaactttagagggtgcggccgggggtaagcctattaaggaagataccggcccgaatacaggggacctcgggcccggcggaaccagtagagtgagaatggtgcggcggaaagatagatgaggtacaaattggcgagctggcaagcaaacaaaccgtcagcgaggcgggttttttttttgggggggagggggacaagggaattgttggagacagcgccgcccgggctgagaggaagggaaactctgaccggagaggcgtggcgcacctgctagaaaggccaggcgaggcggcggcatcccgggtgcttctacctcggaaggcgaggagttgtgtcggaggacggaagcgcttgaaccgtgcctagagacaaatacatgggacggccgggatgattgcgactagaacctggtggaggggcccaaggagcctaagtgcggccacgtactggctgccactcggaccggacgatgc

SEQ ID NO: 123961 - DNA, 394 bp, Arabidopsis thaliana columbia
tcgaaagttctgggggggcccggccccgcacccgagcccggaatttgggtcgcggtgaaaccaagaggccttttcttggggcaaacctctctcggaatggggggccgcgcaaaggggccctcctctcctggctgcgccgggcaagggcggttatttattctacgcgggcctcctaattattggtaaaccgaccgatccacctaccgtaaggcattttttttttaggggggattcgcataccgaagggtcctgttccaactcctacaagacttgtggtacttattatccatgaaccacgaatacctatccaactggagtaacagcatattttacccggtccgagacccacttgcacatattgtctgttatatcccataaactttttgtttaaaac

SEQ ID NO: 123962 - DNA, 508 bp, Arabidopsis thaliana columbia
ttagggggagaacgtacgcctgcaggtaccggtccggaataatgtctgggccgacgagttcagtactcagggggcgcccaacgttaccggcgcgtagggaatgcatcacaaatccttagacggctcgacacagcggtcacagggggttatattctcgcggaggattgaaagagagggcagagcatgcacgcgacaatgtggaagacttttttttttaagagggtggccggaccaactagaaggggtacgaggtatgcgtgcggcgggggggtggtccaacacataccgtcgagacaggagcccataatgaagcagttaccgccgtacataggcgcgcaatgaagaaaagaaaccagtgcagagcttaccccccggaccacagacgtgagaaagacacatcgactaagactagctgccgggaagttggaacccatcttaacatataacatacggctgagcaaagcagtcatctgtttagttttgcagctttctggtgtatccacaatct

SEQ ID NO: 123963 - DNA, 465 bp, Arabidopsis thaliana columbia
ctgccccgtacgaagctgggatccgtctattgctcaaacttttagtatatattctcacagtacccatgtcctgttatttagtccactgccttcaccgttacgtcaccttgttaacaaacttacaaatattgagcataatcctgacccaccctttataactcagaacctttcggatctaatggcatgtatactcacatagagaacttttctttttgatcagacccgtggcacaagaaattcacatacccccgactccaagtatatataactttcatctcactagcaggatatgtatctcttccgcacttctctatcgtgtacaacgtgcccagacacaatccactagacctctttctgacctccaaactaatctttcttcatcaccacgactatacttttggctaattagtatcatctagtcatgatatcctgacatattataaactattccaccgatcaaagcct

SEQ ID NO: 123964 - DNA, 147 bp, Arabidopsis thaliana columbia
aggggaggaacgacgcctgcagggccgggcccggaatagattgttggaccgcgcgcaaagtagccggagggggcccctgactggggtatgagaccccaaaggcaagagaaccgatgagcacgcctcagcctcacacacgcggagagc

SEQ ID NO: 123965 - DNA, 471 bp, Arabidopsis thaliana columbia
tatgacgtggcatgcacgcgtacgtaagcttggatcctctagagcggccgcccttttttttttttttttagtctgatgcaggcatactggaaggttacgcgatttccaaaattatagggactgggtggttttttttattgtacaagacctattatatcttaccttgagttgcagggataagttacccggcataactctcatcattttctgaaacccggggtcaactgtggcttatttacgtggcacagacaaaattttcgaactttggcaactgaactaagatcccatttttattaattcgggtataacaaaaccaagctcttataagcccgtatatacatgggatcacctgaacaccatttaatgattggggggtcactacttatccatgccgatttgtaccagattttctgtcttaaaacaaatgctatggggacaccctcaccatagacttgaaatgcttttcattgt

SEQ ID NO: 123966 - DNA, 540 bp, Arabidopsis thaliana columbia
  unsure (1)..(540): unsure at all n locations
gggaaagcacccacgcctgcaggtaccggnccggaatacccgggtcgacccaggcggccgcccacccgcccgcacgccatactgaccagcaaccggcgatactcgccacacgcgccggagagcagagggcgcaccgccaccgctgacacgagaggacagcccccagcaggagcacccaagacccagaacccacacaaccggtccaaacgctttttcttcccaggaccgagaccacccaaagagccacgcggaaaccaagcacaacgcaccgacccactacgcactgaacggtgggacaacgaccatcaaaagcaccataatagcacaccagcccccaaccctccagcccccaccaaaaattgaacccacgcgagagtgggaacacacacgcacacaaagacctcgcagaaaagacgacacgagaaacaacgcagtacaacacagcataaacacaaacaatcctgcacacagcagaaaacgagccccagcgcgcacccaccccaagccggaatacacgcatagccaccatgaccacaacag

SEQ ID NO: 123967 - DNA, 499 bp, Arabidopsis thaliana columbia
taggtgacctatagaagagtcttgacgtcgcatgcacgccttcgttagcttggattctctagagcgggcggcccttttttttttttttggttaaaccatgccctttcttaatggcttaaatccggcgggaaaggtaccatgggccttaaaggcctaaaaaaaaaaccccttttaaaccaccattcctgcttattcaattttcaacctattggttgaaaggaggggggccccaatggtaaccctggtctttcttttctatggtaaccttggttgaacctccctgattttggttcctatggcaaaaaattccgggttcttttaaagccggaggctaaagttgggggtgggtttcccagcttttgtggtagtagtggaggaatcccgattagagagctgttgggccaagaccagacacacaggcattccatctagggaatggacctcctgggaattagcgatggatccagttgttattatagagcccccgttccgccccgag

SEQ ID NO: 123968 - DNA, 193 bp, Arabidopsis thaliana columbia
ccgcgttcggtcatctgggctgtggtagttggaggcgccgcgttgcgtccagcccggagactttttgggggcacggttcctaggtcctttatgggttgggtgttcttctagcttgttcggttcttatcagtggttaggcgcagtcaaggatatagacgtaaggaaagggtagtggtccaggaagggaagaggg

SEQ ID NO: 123969 - DNA, 509 bp, Arabidopsis thaliana columbia
cactatagaaggtttatgacgtcgcatgcacgccgtacgtaagcttggatccttttgagcgggcggccttttttttttttttttttttacaaaacaaagcttattattttaaggagtaatggttcaacatacaccagattaccgattcccttgttcacttttaaaccaaacttattttaacaatattttctacttaaaatgcttaaacagatgaagagacttgtattggcaagaaacttaccaacttcctggcccattggtcccaggtggttgccttcgggtcaaggtacggattactggatttttgacccaagggtgggtggagaaggctgatcggcgtttttttttaagattttgactgggttcttccggaacgacctttaaaatcttggcgacgccggggtcggcccgggaatttcggaccggttcctgtgggcgtgcccacttttccttataggaggcggattaaaacttggcgtgattaagggcattggtggtttctgggggga

SEQ ID NO: 123970 - DNA, 315 bp, Arabidopsis thaliana columbia
ccttgccaaccgcgcgcggggggtggaatagccgccactaaccgactcactagagggaagagctggtccgcctgcaggtaccggtccggaattccggggtcgacccacgcgtccgcaaggatctaaaggtcgttgcgggagaagccagccgaaatgctgagagagaacgtcgatcagacttcttcaaccaaccttgggtcgaagatgcagttatacgttccttgaaccggaggccagcagctgggaacgatgggccatttttttggggagtttcttgacgatacatagtctctttcatctcgttatgacgcattt

SEQ ID NO: 123971 - DNA, 494 bp, Arabidopsis thaliana columbia
cactatagaagttctatgacgtggcatgcacgcgtacgtaagcttggatcctctagagcggccgacctatgtttttgttttcttttgttttgatttttttttgtttggttttttatttttttgtttgtgagaaaataggggatttatccattcccttatatgattttatacaataaacaccttctgataagaaaacaaacaagggggacaaaccccctttgaaaatggttggaagcaaatatggatcaaggtttttttgggcctaccaaatgggaaatttaagtttcggggttgaccaagttttttagctttaggctagagaaaccaatttttttttttttttggggggggggttgatggttattatggaccctaaaagggccttcggttaaactgtaaatcccgccaaacgtttttttggatcatttgaagtggaggtttgcccaattttggtgctttttaaggaaacccgaattattttttttttattgggg

SEQ ID NO: 123972 - DNA, 520 bp, Arabidopsis thaliana columbia
  unsure (1)..(520): unsure at all n locations
ggtgacactatagaagggctttggcggtggatggccgcgttccttaggttggattcttttgagggggcggcccttnttttttttttttttttttttttttttttttttttttttttttttttttttttttttggggaaanagggggattattccttacccttaattctttttttccattaaacccgttttgttaagaaaacaaacaggggggacaaacccctttagaggagggttggaggcaaatttggatcaggtttttttggggcctacaaaaggggaaatttaagtttggggtttgaccaagttttttagttttaggttagagaaaccaatttttttttttttttgggggggggtttgatgtttagtttggcccttaaaggggcctacgtttaaactgaagatccagccaaacgtttttttggtgcttttgaagtcgggatttgacccattttggttgactttttggagtaatccggaatttttctttttttaactggggggtaatgcctcagccca

SEQ ID NO: 123973 - DNA, 432 bp, Arabidopsis thaliana columbia
atggaccccttccgtagcctggattcctttgagggggcggcccttggtttttttttttttttttaagccaaaaaacccacatgggccatttttttataaaacccagcaataaaggttaaaacccgacctcattgttccccacagcccttaacaaccatgaaaggaaactcagtaaacttttcccgaccaaccgaaatgattttacgaggggtatttaaaattgggaaatataggttctttaaattaattaatgatcaaatttctctttgcaatcctggtttatttaatactggcgtgggccataagaagttgtgtttggggattgttgggcctctgaagatagaaccttaatggtggctctcagcttaagtaaactccatgtcgaccattctttaaggggtgtacaaatgcaggaaagctcccctccggaac

SEQ ID NO: 123974 - DNA, 502 bp, Arabidopsis thaliana columbia
  unsure (1)..(502): unsure at all n locations
nnnnnnnnnnnnnnnnnnnnnnnnnnnnnnnnnnnnnnnnnnnnnnnnnnnnnnnnnnnnnnnnnnnnccacgcgtccgcggtcgacgattatcccaatctcgccgggattctcctctgcaccataaaatagaagatgagagaaatccttcacattcaaggtggtcaatgtgggaaccagattggttccaagttctgggaagttgtatgtgatgagcatggtattgatcccactggtcgttacgttggaaactctgatctgcagttggagcgtgtcaatgtttactataacgaggcatcctgcggaagatatgttccccgtgcaattctcatggatcttgagcctggtactatggacagtgtcagaactggaccttatgggcaaatcttcaggcctgacaactttgtttttgggcaatctggtgctggaaacaactgggctaaagggcattacactgaaggagctgagcttattgatgctgtactcgatgtttgtcgcaaag

SEQ ID NO: 123975 - DNA, 498 bp, Arabidopsis thaliana columbia
gacgtcgcatgcacgccttcctaagcctggattctttagagcgggcggccctttttttttttttttttttttttttttgtttttttttttttttgggccaattccaaaaaattttgaaattttatttaggaggttttaatgggggacaatccattaccctggtaattattttttacaagaaaaaaccgagcctatggggggggggttaaattaagatggccttaaccaaattcccaaaaagggggaaggggttgtttttgaacgtaagggcctgaacaatttgaatttttgggacaattggtgagggaactatggggggcccgggcttttgcttttgtggggaactgtgagggaactgtggggattccggccatcgcgtttttgggaggggctaatttgtataattccccttatggttatttttttaagggggggtggaagagaaaagtggaaactgctggtttggcttaccttggcctggggctgggagagcttcat

SEQ ID NO: 123976 - DNA, 474 bp, Arabidopsis thaliana columbia
ctgcacgcgtcacgtaagctgggatcctttagaggggccgcccttttttttttttttgtgagacatggaaatttgaaataaaggagggggcatcacaagcattttagggatctgaatgtgcaggatctatttgcatcaatagaaagagagtgtatcgtggagacgaagcgggctttgcacattgtgatgtattttatatgcaagtgacctcctacaaatagctttagaatgaagtattaaccgttgcatgctcgagtctgaatcatcatgttgaacccataaagacatgtgtagatggacccatgcaacatagtgaccagaatctgtactagtgctcttgtgggacaacatgaggtccaagaataaaattaagtgatgtgatttatcttgtgataaaaagtacctttctgtgggataagtggggaaaatttttcatttcgatttgcaaaccactctgattataaattgtcacat

SEQ ID NO: 123977 - DNA, 473 bp, Arabidopsis thaliana columbia
aaacgactcacttagggaaagctcgtacgcctgcaggtaccggtccggaattcccgggtcgacccacgcgttcgctaatttgggggccaacttttcatgcgaggtgatggctctaagttctcacagcgtttgatggtctcactttgccgtttagcggcaaattgaaacgtgatggattggtttttaggacaagacaatggaggatggcctgacgcatgttatttaagggttttattttgtggggtggcgactgggagtaccacgtatagcagccttgacaacacatttgttcaaatggttgtgtctactttaagacatgaaatggcgatctggcgctaagtcattcggtggccgaaagaacgcttcccgcattcacgtaagtctgattgtcccgtctgctttgatgacgttaccactgaattacctcccaacataggcctctcggcctttttgttcatgtgtaactcctccga

SEQ ID NO: 123978 - DNA, 347 bp, Arabidopsis thaliana columbia
actagagaagctctatgagcgaacctgcacgcgtacgtaagcttggatcctctagagcggccgaccttggttttccttttcttataagagatactcttttcgaaaaaggaaggggatattgtacgcattattttatagcaactctagccaacaaagggttacggggacctcgtagaaaaaagatgctcactaaacttggtccttgtgggagcccaactttttttttagagagggggcgaaaaacactttatagaacaaattggggcctaaacttccggatgacgttcgatctaatccccctcgcgattcttttttgtccatttcctccttttgtcttaaaacgactt

SEQ ID NO: 123979 - DNA, 480 bp, Arabidopsis thaliana columbia
gggaagctgtgcgcctgcgtgaccggtccggaatacgggactgtccacacgcccagtcctcgttggggccccctttgattaatgatttgaaaattcgggcgaaggttttaataggtcccaaaggcctgaagtgcctttgtcaaatgggaaaccatatgcaaactcccaacccctgccgggaaagaccatcgagattaaattgtttgggggcgcgcaaagtgaacacaaagcggaatcaaagggcgtgaatatggggggctcactatgtgtcaagctcataggggggcgttgaacctaaacccctcttgttttccaaacctccaaggagatgtaaattatatgaagggcccgccactgctaaaacaaattttatatttcgtttcgtaagcaagacaccgggggttaaggtacacactatttctcaagacgttggactcctttcctagattgcatgtctcaacacattattccctcaaatct

SEQ ID NO: 123980 - DNA, 400 bp, Arabidopsis thaliana columbia
  unsure (1)..(400): unsure at all n locations
aaggcggccgcccttgttttttttttttttttttttttttttttttttttttcggttttttttcttgttttttttttggttttttttttcttnngggggggaaaaaaaacctttttttttttggggggggcccccaaaccaccccaaaaaaattccctaaatctaaaccgggggccccccccccaagggcccaaacccgggtgccctttaaattaaacccccctttggaaaggaccccccgggggtttcaacccctatccccccttaaataacctccccaccttgaattgggcggccccttttggatcctttaaaacataaaaccctccaaattacctttttcactgggtccccccccaagacccggtttcggtacccccccataaaccagggggggggg

SEQ ID NO: 123981 - DNA, 472 bp, Arabidopsis thaliana columbia
ggccggtgcctgccccccgttccgtagcctggattcctttaaagcggccgcccttttttttttttttttttttttttttcttttttttttttacgtttcttctttggtctctattggttttttttttctttttcttgcggaaaaaaaaaatggtttttatgggggtgggcctaccaaacaaccccaaaaaaaaaccccaaacttattttcggggggcccccccccaaaggcccaaacccgggttacccttaaaaccaaccccccttgggaaaggaccccccggggggtcaaacccaatacccccttgaaaaaacctcccccccaggaattggccggccccttttggagccttaaaaaaatgaaaacccccccacatcattttttaaccagatccgccccaaggcccgggttgggggacccccaataaaaccggggggggaggccaaccccccctccccgggggaccccccca

SEQ ID NO: 123982 - DNA, 503 bp, Arabidopsis thaliana columbia
  unsure (1)..(503): unsure at all n locations
nnnnnnnnnnnnnnnnnnnnnnnnnnnnnnnnnnnnnnnnnnnnnnnnnnnnnnnnnnnnnnnnnnnnnnnnnttttttttttttttttttttttttaacctttattcccctaccttaatttattggacaccaaaagaacctttaaaggtttaccttttggatgaactcaaccggcacccaatttttggaaaggccccgggggccgatggccccaaaacctggggattccgtcaacactaaggttggtttggtattacccgtttccttttgtgggattccgatcttaaaagtactacgtttaacagttgaaacaaaagaaatcaaaattttcgagggaggcaaggcaagctcgcactctctcactcttcatcggttccaaaatagcggtctccaaactcgcccataccaggaacaactcggaactcgtcgtttaaaccgagttctatctctgaagtcacaatctttatccttgggaactttttgcacaccacatttactcctt

SEQ ID NO: 123983 - DNA, 512 bp, Arabidopsis thaliana columbia
  unsure (1)..(512): unsure at all n locations
aactatagattagcttgacgtcgcatgcacgcgtacgtaagcttggatcctctagagcggccgccctttttttttttttttaaataattttagttcttttattttagtttttacattctttagagccccaaataacaattctcaacaaagaaacattaatataagaagaatagaagaaaccattgaaagcctaagtcctctgaagctaaagactttatcagctttctttgtaggaagtaaaggcattttttgacaatntattcttattttcaatcccaagaatttattccactttcttcttttcctcataaaatcttgaattggcccaaaagaaaaacttcatttctgtgatcatccatcaatacgggacttcctgttcgcattctccagcaggcacccattatttgacaggctttcatcaggagataaactttttccccagaaacccaatggtgcccttccacacttctggttcatctctttcggattgggcaccatttcttttggtctca

SEQ ID NO: 123984 - DNA, 498 bp, Arabidopsis thaliana columbia
cctgcaggtaccggtccggaattcccgggtttacccacgcgttcgcttcgttccttaacttctttttcagatccaaactcttaccatactttctcaccacacacacactattcgattcgatccccacttttaaaatcccaaagatctcttttaatttgaaaatccattcttccccaaatcaacctgagaatccttctaccagggtgggtcaagaatttgacttcctgaaggacttactgattcacacccttcccttatgggaaggtccattacccattgtaaccgcacgaacctaaattttggtcggaccttttcagctttttaaacctttcccttacccgtaaccaacatcatctcccaatccagtaatcaaaggctttttctcattcttaaaaaatcaccccgaagttactttcgcgtgttatagttcccaagcctcctgggctggctgtgagtcctcaccgacacttgaacactccccctaacttcccccctttg

SEQ ID NO: 123985 - DNA, 531 bp, Arabidopsis thaliana columbia
  unsure (1)..(531): unsure at all n locations
gaccaggtatccccaccggggcggccggcgcgacccacccgacgcgagcaggagccgagagcagcatggaggaaccagccgagacagaaaacaggaagacccacccgacaagcggcacaacaccaccggccatgaagagctacacacgacccgagaggacacacacaaggaaccggccatcttttttgcggagggagcgggacccaaccgggcacaccaccgaagagaagaagcaaccagncgcagacgccaaggcgccgcggctggagcaggaccgggacccggaccaaaacaagaccccccaccagaaaaccaaggaaagagaacacaagggacgcgcgccgcaaaaacacaaacccacacgcgcccgcccacagaaacacaacaccgcacccgaacaccaacggaaccccaaaccacggacaaaagacgcaccggcacccaacacagagaaccccccaagaacacaagggagagcgccaccggaaccccacaagagacccgaagcaagcagccacgacccccccagca

SEQ ID NO: 123986 - DNA, 413 bp, Arabidopsis thaliana columbia
atgcacgcgtacgtaagcttggatcctctagagcggccagcctaatccttttttattaaagatttattgagaaaatctaggggaaagggtgatccccgactctaatagaattcgggtaaccagagctaaaccggaccaaagctgtctaataattataaccgtataagcaaagccaatttttttcaaaaggagtggcgtggacgcaccttacaaaaaggttgaaacactaaaaaaaattcattttgaagaatacaaaaacaagctgcggaggttcttgtctaaaatgaggcacttgaaatcagaagaccgtgaaaaaggttgagcaggatcttcaaacttattaaaccttttgccgagtcgctagcatcgtgggtaaaagctaatgccaaggctggttttctaccataccgagt

SEQ ID NO: 123987 - DNA, 472 bp, Arabidopsis thaliana columbia
  unsure (1)..(472): unsure at all n locations
acactatanagtagcttgacgtcgcatgcacgcgtacgtaagcttggatcctctagagcggccgccctttttttttttttttttttttttttttagaaaatctatggtttatgttgatccccgactctaatagaattcgggtaaccagagctaaaccggaccaaagctctctaataataataaccgtataagcaagctcataagtatacaaaaggattacattgacgttaccttacaaaaaggttgttacactaaaagaattcattttgaagaatacaaaaacaagcttcgtaggttcttgtctaaaatcagtcattgaaaatcagaagacgatgaagatgttagatcaggatcttcaaacttattaaaccttttccgagtcgctgcatcgttgctaatgctaatcccatgctgctttctaccatacgagtcttcgtttatgtaatcttcatcctcatcatcaacaacattg

SEQ ID NO: 123988 - DNA, 369 bp, Arabidopsis thaliana columbia
ctatgacgtaccatgcacgcgtacgtaagcttggatcctctagagcggccgccctttttttttttttttaaactttttttttaaccatccacaggatgtatcacaaataagcaccgatccaactgcgtctacataatgaacaatcgccaccatctcctgtatatacagggcactcacgacgaagcaccgttttttcaaaaaggaggtgaaagccacttcccatactaaacacgtagtgcctgttcaagatttaactcctcgagatttaccatctaatgctagcattctttattgatgacagcaaagcttgaacatcgcctaggctggtgattatgaatctgatgatttactccagctgaattttacctt

SEQ ID NO: 123989 - DNA, 475 bp, Arabidopsis thaliana columbia
  unsure (1)..(475): unsure at all n locations
cnnnnnnnnnnnnnnnnnnnnnnnnnnnnnnnnnnnnnnnnnnnnnnnnnnnnnnnnnnnnnnnnccacgcgtccgggaatcctgcttatgtgaatcataatatggtggagtcgaggctacnaacaattggtgtcattgattatcttctaactggtattccgtggcagtggtaatattgaatgacaatacaagtcttaatatgcgagtaatacgcaaccaatgtaatgtttgtgaaggaacggacatacactgtttttgatgggcattacgggaaatattcccattgcagctgggattcacctgtgtagaaagaccactccacaagctcttgattttgttggacgaactacaggatgttgaacttactaaacttggtggtgaatgattttcagcctttgtgagggaaatggaagaaatggcaatttaagtcaactaagaatctgccatcaaattggttaagttattccaaatttg

SEQ ID NO: 123990 - DNA, 448 bp, Arabidopsis thaliana columbia
ttagatgagcttgacgtcgcatgcacgcgtacgtaagcttggatcctctagagcggccgccctttcttttctttttttcttgttccaatgatgttggtgctgcatgtttttttttgtagcgatcctcattttgctgggggcaaaaaaaaaaagccgttcgcttttttttttttcaaccgaaccaaaatcccccccccttttttaaaaatgttatgcttttaaccttccatcaaagaacctttttttcctttgcatccaaaaaaagaacaacccccctttttgggggtggggataaaacctgggcccacactttttcttggagaggtgaactctccaatttgaacccagacccttgaaatttccccaaaaacatctgggggatttggtttcccattggaggggaattttaactgttggaatccccatcttcccttttacggaaaaaact

SEQ ID NO: 123991 - DNA, 432 bp, Arabidopsis thaliana columbia
gcaggcacgcgtgcgtaagctgggatcctttagaggggcgggcctaggtgtttgtatttttgttttataaaaaaaagttgtttttgttatgtgtttgaataggttaagggtatatgtaatgttggatgagaattacaaagggacgcgggaaaagaggttgaagtcaaagccaaaggttttttttgggaaaaaggggggggcaaacggagaaaaaggggagagggaaggagaaggagagcgaaaaaaatgtcgaaggagagggaatagaaaaagagggaaaaggagccggattggaagggggtattttgcaaggggttatatgtttgacggggcaaatgagaggggggagaagtaagatgggcctggtggaaaagggaagttgcaaggggagggcggtcggcagtaaggggaaaaaaatacgagggggaaaag

SEQ ID NO: 123992 - DNA, 439 bp, Arabidopsis thaliana columbia
ctatgacgtcgcatgcacgcgtacgtaagctaggatcctctagagcggccgcccttttttttttttttttttttttttttttttttttttttttttttttttttttttttttttttttttttttttttttttttgtttatctgataccatggcaacccccgggaaaaatgtttaaaacgcaattcaaagaattttttgggaacaaagaggaaggcccaataaaaaaacttggaccccacaggagaaggaggctaaaaaaaagtgggtgggggaaaaaataaaaaacttgaaacaaagccctgtttggaggggttatttagcgaaggactactttttttctggacaaatatgaagggggaaataaagtaggcccctacgaaaaaggaaactggaaggaattgccggcaaccccataaagaaaaccccccagggcacaacg

SEQ ID NO: 123993 - DNA, 514 bp, Arabidopsis thaliana columbia
atacgactcaccattagggaaagctgctacgcctgcaggtaccggtccggaattaccgggtcgacccacgcgttcgctagaacaatagccgacgcttcgacttatcaacacattagacgctccaaccgaatgccattgctgattagactgctccataaccccatgaagcaaacagaaggtgtcatattccctgcagcacatcaataccttttcctaatatgatttttcttgagtgcattggtacctagcaatcgatctacacacaagaattgtctactaaattcttcaattggaaatcctattatcgccttcagtgctactggagtctcttcttgcattatagcggtgcgcattactggagtatggaaatctgccttgccagtatacgctgggcccaggactcactatgcgacccagacaaaattgccgatagacaaagttacagcttctgatgataggactgcaacgcaatatgtgaaaaccttgtcaagccttagactgtataaactatgaa

SEQ ID NO: 123994 - DNA, 182 bp, Arabidopsis thaliana columbia
cacgcgtacgtaagctggcatgctctttagcgggcgcccttcttctctttttttttttgaactaatgagtgcggtgtataggttatacctgagcgagggctcggacatctgttctaaagaacttttggctgaacgcgacctcagatgggccacaagagaggtctggcctattcaaaaacatt

SEQ ID NO: 123995 - DNA, 477 bp, Arabidopsis thaliana columbia
cccgggttatgcacgacgggggcgaacctgagggccggcttcaaatgtattgggggggagacgtctcataacagttgccaaaggatgccttcggtttccagtcatagaaattgtactcttggggggattctttctgacaatcataacctgggagcgcgacgaccgtacacgtttttttttgacgggggtggagggaacccccgaaaaaagaaaaaaggggctgggcaggtaaacagattctcgagaactatcgaggtacgttaagacagacagtgagcgtacttagataacgattggtttgctatagctcacatggatattgatgacgaccacagcaacactgatactggggtcgggagagcagtatagaacagatcgccaggctctctacatggtgcagtagctaaaaggttacctttcgcaacagatgcaaggggctcgaacggcgcctaacccaccagggaagagattagtcca

SEQ ID NO: 123996 - DNA, 495 bp, Arabidopsis thaliana columbia
  unsure (1)..(495): unsure at all n locations
gcggacggaagcgaggatcctctagagcggccgccctaacccnnnnnnnnngngacgggaccaacaaagcggagagggaagccaaaaagcaagacgaaaaaaacaaaacaagcaggggcaaaccagagagccagggaccaaacgcaaacagaacggagcgccaccacccaaaaaaaaggggacagcaggtttttttaaagaaaaaagaggaagggggtccattgcgtagttaaaagctaaaacaacaaaggatcggagccaaagtgactgagggggaattagggcatctaaaaggggcgaagcagtaatgggaaccactcaaaagctggcggataagaggaagccttaaaaggacgcccaagaaatcaagggccgatggtgttgagcaaccctccaactgggattactgcagtgggaacaagaacaaaaaagctaaagttttttcaaggtagaactggttaacagctgcctaccagccgaagaaataaggatacc

SEQ ID NO: 123997 - DNA, 472 bp, Arabidopsis thaliana columbia
  unsure (1)..(472): unsure at all n locations
ttaggacgcactatagcaatagctatgacgtcgcatgcacgcgtacgtaagcttggatcctctagagcggccgcccttcgctttcgtactgttccaattgagtttaacgcgtattgtcgtctttctttatcataagcgatcaattttcgntacaaaaaaaacactggaatttttgggggtccctgtgtttacaggtcccccgccaagtaataatttttaatcccaaccggggggggtgcttttacttttttgaacaaaacacttttttgggacccccccccgcgttggtcaaaccccccctgggcccattggggccaaattagggttttaatttccgttttttttcccatttttttgaaacccaaaccctttaaaaaaaaattgggccacttggttccccaaaaaaaaaatagggcggaaacctttttaaccctttgacaaaggaaaacccgccccaattttttttaaattg

SEQ ID NO: 123998 - DNA, 457 bp, Arabidopsis thaliana columbia
  unsure (1)..(457): unsure at all n locations
gcactatagaatagctatgacgtcgcatgcacgcgtacgtaagcttggatcctctagagcagccagccttngttttttttttattttttttttttttttttttttattttttttttttttttttggggcccaagtcaacacctttattctagaagagagtaaacaccaaggttaacaccaacatttgggaatccaacggggcgttctaaaaccagaacacatcctaaattggcaaaattcttgcaaatagcatcccgcttcaagatggggtgcatcaacggtgaacaaatgatacttcgagaaaagagtttggaattgaggagggttgataccatcggaccgtttttcttgggtttaagatcagtaatcagacctccggtaactagggttcttaaaaaaaaaggtttaaaacggttaccggcttggatactgaaacacaagctcttctgaaacacct

SEQ ID NO: 123999 - DNA, 538 bp, Arabidopsis thaliana columbia
  unsure (1)..(538): unsure at all n locations
atgcacgcgtacgtaagctaggatgctctttctagagggcgagcctaatcctctttctgctgcacaattgtctagcgccaggcaggagaagaaccatagttaggcactatctggagagagtgcagggtcgcgacccggcatagtcatgccgacacatctactgcactctctcagtccgttaacatacacctgtcctaaacggactaagctagaaggattcccttatcttctctaaggggtggaggaggnanagagaaaaaggacgnctggactgtaggcttaatcgacccacgaggatacgtacaggaccgggctagagtgctccgctccgtattttgtcgttatgttccgggtataaagcatgtatggacggaagcctcaacanaagtatgtgggacagggctttgcagggaaaagatattctgttcgaccggtctggaaagaaataacctatcccaagtcttggcgacgttatcgcgcccaatttgcctggacaaaatttcccatagggaagaattttgggcaaccacccggccat

SEQ ID NO: 124000 - DNA, 472 bp, Arabidopsis thaliana columbia
gttgctccccctgccgggacccggtccgaaataactgggttgacccacgggtccgtaacacggggccgacttattttttgtttgggtgtagattgtgggatcccactgagagattaatagaaagatctaaaagctgtgaaccgaaaagttttgctcttacactaccatagcggagctttatcaaggggcggccggaccaaaaatggggtctctagggagcagtatattacgagtggacctcgatcttaaggagaatatctcatacaggaaacggggtcttaaatacatcgcatcattgtaaaaatggcttgtgccatttcgaagaataaagaaaaggagtcggagaagtccaaatcatctttaagacaaaggaatcgggtttacttggagaggcggaacctatgaggggtatctgtttaaaagaaaaactcatttggaagggaacgccttttcgaagagtggggctattggg

SEQ ID NO: 124001 - DNA, 191 bp, Arabidopsis thaliana columbia
  unsure (1)..(191): unsure at all n locations
atgcacgcgaacggaagcaaggatccacttagagcggccgagctgagccagcaacaaaaaaaaagcaaaaaaggccaacggaaggagaccggaacaggacagcgccaaaaaagaggccaagacgcaacaagccggaacagaaaaaaagaaaagaagaccncagaaacaagcgaggaaccacaaccaaacga

SEQ ID NO: 124002 - DNA, 454 bp, Arabidopsis thaliana columbia
  unsure (1)..(454): unsure at all n locations
nnnnnnnnnnnnnnnnnnnnnnnnnnnnnnnnnnnnnnnnnnnnnnnnnnnnnnnnnnnnnnnccacgcgtccgctgcttcttcttcttcttctttggcttcttattacatatgatttctgtgactgaattcgagaaccatatctactgattacctgatagaaaaaagatgtgctctgatcgactgaaacagacagaactcaacagatcttacattagttttttagcacatcagagaaatggccgtagggtacgccagtggaacgccggctgttcgggactacgattactaactgacaccgaaagtcgctgcgacatggtgaatcagtgcttttggagggctgatcttctgatacaaaatcatgatctcacgacggtgaagactaatggtgacattgcttggaagaggatccaacctacgtggaccttaagatgcatagcgcacaagaaaacaa

SEQ ID NO: 124003 - DNA, 297 bp, Arabidopsis thaliana columbia
  unsure (1)..(297): unsure at all n locations
aactatagattactatgacgtaccatgcacgcgtacgtaagcttggatcctctagagcggccgccctttttttttttttttaacatgggaaatcttttgatttgaacatttttactggatgtaaaatccttcagttcttctgtaaactgtagtgacaggtcttttagtatgatgaattaatgaagaatttgagtagaagatgttagaaatacaacatagttgggagcaatgaaagacataagagactntcagagaaacaccanatgggcttttacctggaagggctttcaatatatt

SEQ ID NO: 124004 - DNA, 258 bp, Arabidopsis thaliana columbia
  unsure (1)..(258): unsure at all n locations
acactatagtattactatgacgtcgcatgcacgcgtacgtaagcttggatcctctagagcggccgccctttttttttttttttttttcaattaatgggttccttttaaaactttactcaagaatcccaaacacaaacatttttcatttctaaaaccaatttggagccaatacacttaaacatttgaaaggaaagagtataggtaaggtagatatttttggaanaatggaagatcattttctttttttccaagcttttt

SEQ ID NO: 124005 - DNA, 449 bp, Arabidopsis thaliana columbia
  unsure (1)..(449): unsure at all n locations
ttaggcaccttaatactatgacgccatgccgcgtcgtagctggatctctagagcgccgccttnttttttttttacatttgtaacaaactcctttgttgtcctggatnatataaagtgacaatacataaactggttatacattctttacataagaaaaacagagagatcgccatgtatgattttggctttctcatttctattattaacgagggctgttattaaaattaaattaaagctttgatatataataaatcaggcagggcctttcttgattccctgacaagctttttagaaattgttctgtaagctttctcggatggatgaacgaagtcgtagaagacgtatttatctgggttggggcatggtattatagccgtaatcatacaacaacacccatttttctcattagaaaatccgtatcttctataatttttaataacatccataag

SEQ ID NO: 124006 - DNA, 384 bp, Arabidopsis thaliana columbia
acgcgtacgtaagctgggatcctcttgagcggcgcgcgctatcccttttttttagttgtaatgacaaccatggggaagatgggttcacaaaaaaggagcgagccaaaagcttccctattctggagcatcacatttcacccgaggcacacgctacacactgaaagaagagacaattttttttttaatgggagggtggaggcagcggggggaatcggaacaacgtgttgtatagggtctcagggggacccctacggggggataggccgttgggaggctttagggtattttaagggggtgagcatttccagactgatcttcctcctgcctgagcttgttctctggatgcgaggcttcctctatgtgcattgcctccatattctttgg

SEQ ID NO: 124007 - DNA, 287 bp, Arabidopsis thaliana columbia
gccgccaggccgggcccggaatccagggtttcccaggcgcccggtccccggggagaaggaccatgaacatttagaagcaagggcggtggcaaggctcacattgcctgcaccatgcgtgaacacgctggaacatctctaaggcctgagattactggccttcagagccaggatagacgcggatgtggttatttgtttaggggggtagacgaagacacccaggcgcgggcacgcggagaaaagacgcaaacacagagggaccaagacagcaaaaacggaccacacaccaa

SEQ ID NO: 124008 - DNA, 342 bp, Arabidopsis thaliana columbia
  unsure (1)..(342): unsure at all n locations
tatgacgtcgcatgcacgcgtacgtgagctaggatcctctagagcagccagccttncttttctgtttattaattttttttgttaatgaagtgttgttgaagatattgttgagttaatttacaattgtgacctatttggagaatggggcggggacaaggaaaggagggcaggaatgtgggaacgataattttttcaaatctttgcaaagaataagaaattaaagggcttttttgggtggaatgaaaccgggaaagactgcatgaaaaacatttccaaacagctctccaaaataacttcttgggggggaggggcccttttataaaagaatgagagaaaaaaccc

SEQ ID NO: 124009 - DNA, 450 bp, Arabidopsis thaliana columbia
atgcacgcgtacgtaagcttggatcctctagagcagggcgccctactccctttttttttttttgactctgatcttcatgggtcaattgcaaattgtacgttgcttgctctgagaaatattgttagactatgaaagatttaagcatcgtaaaaaatattgccgtatgtttagctccatggctctatttaaagcatgggggagccctttctcgatcctgcaaggtagaaaactgatctgttcagacattaaaggtttgcgagccgataatgcccttgaaatggtaacacccaggtcccaaaagcaaagaatcatgaccccacctcggttttcttccttcattcatggtcccctcactttcttggctgtggctccaacatataccctccagcgcattaaacaattgaattagctcctcgcatacgcccatagcccatgagaacctccttctgc

SEQ ID NO: 124010 - DNA, 297 bp, Arabidopsis thaliana columbia
  unsure (1)..(297): unsure at all n locations
agagaagcggagaccccaaggggaaaggcggcgagcaagagcaaggaagagccccgaaccaaccaaagagacaagaacgaacgcgcagcagcccaacagaaagcaggccacaaacaactaccacgcgccgccgggcgcccctccccaagccacaagaggggagggcncggaaacaaaacgaacgaacaggacgcgcagaaaaccaggcccccacgatgagaaagagcgcacccccccccacgaggaacgaacgcaagagcaccgcaaagacgccaaaggaacaaagaaaccaagcag

SEQ ID NO: 124011 - DNA, 216 bp, Arabidopsis thaliana columbia
tcactatagggaagactgacacgcctgcaggtaccggtccggaattcccggctctgacccacgcgtgcggtaacatgcataatcacataaattatcgtctttctatggatacttactggggcacaaggccatgaactgctaaacgagcactaccctcctatgatgtatcccaagctgaaaacagtaactatcaccgctaatatcgacataagagcc

SEQ ID NO: 124012 - DNA, 389 bp, Arabidopsis thaliana columbia
ctatgacgtcgcatgcacgcgtacgtaagcttggatcctctagagcggccgacctatcttttcttttttatctttatgattaacggctctccaactcatattcataaagaacgcagcaccgattcacacttgcttgtgaagagataccatcttggtcctggcaaatactgagtagtgacagctaacattatttttttcaagaacggggagcatcactaccgcctcaacgtggcctttgagagtgaaaacttcgctaaatctagcaacccctgcacggactttatgctgtgcaattagctcatgatatcttcacactggaaggcaggtctaggagattcaaattcattagcaagacgtcaagaagtgtaatacaaaaaagatcccaatga

SEQ ID NO: 124013 - DNA, 353 bp, Arabidopsis thaliana columbia
ggaagctggcacgcctgcaggtaccggtccggaattcccgggtcgacccacgcgttcggatttgcgaaagggccttaccgggttttggcctctgccgggtaggcttaaatttgtattaggaaggtttatggtaagaattttattgttcccgttcgacattttatgcatctgggatggattcgcgaaccttcttgacctggcattggtggtattcctagtgattggcctaactatgctgcctgtcccaaggactctggaacctctaaggtggattcaaaacgtggcaaaatcaaaatgattgaccttgatcggagaaaaagcttgtgacggctacactgtgcaggcttaaaaga

SEQ ID NO: 124014 - DNA, 376 bp, Arabidopsis thaliana columbia
agccgcgccggaacgggagcttttggggggctaaaccaaacaaaaaaaagaaaaagaaagaaaagaaaagaagaagaaagagaggaaaaaaagagaaagggggcaaaggagagagaaaagaaaaaaaggcaaaaaaatttttttttttggtggactgaggacgtaattgagggtttcatggggatgctatataggctgcgagataaaatgtggcatgaggtgaaacaatcgatgttaaagtttgtaagggaagagaattttgttatagtgatattaacaataaaaagagtgagctaatagaagagaagaagaaaaaggaggtaagaaataaaggaagtagggagagaaaaaaaaataaaataaaagtagataaaat

SEQ ID NO: 124015 - DNA, 497 bp, Arabidopsis thaliana columbia
tccgactcacttttagggaaagctgctacgcctgccaggtaccggtccggaattactggcttggtcgacgcgttcgctacttcgtagaggccctttaatattttttaatgtttgaagtactgaaaggagaatcccaaaacagaaaatgtctactggtgtgaacagggcatgatgactttattccaaatcatgctccaatgctacagtcgtcaccggaattcttttttccatagtgtgaaaaatagaaggagcaaagactgcgtaaacatgaaacaaagtttgatgaaatcacttccagttgttgagcccaatgtcaggcaatgaatagctttttgtgagtaacccacttcatttgcataccctggagctcccttaaccctatcatctcccgtaaccctaccgcgtgaaggaatcatggtcggtgaaaaattcgtgcttttaaagtcagggaaacttgtgcgtctttccagacattgggtatacctttaagctttttt

SEQ ID NO: 124016 - DNA, 457 bp, Arabidopsis thaliana columbia
ccgccgcaggccggaagacagatttggagcgtcgtcgtcttacaggtccgcttgttggggtgttcgtatggcgattgtacgccctagtcaactctattgcagcttgcgagaactagcgatccactatagcagggagtagaaaccaaaatttttttttggggtgagagaagacaaacaaaagcttactataagagatctgtggtgtatgattctgctgcttagaatactgtgtttacgcgtacatccaaagcccttactctcactttcaggtgtggttgtatgtaatctccggtgtattgtcgatcgcttgccgttgctacatagtaacttcttaacactttagggtaggtgcctaccaaaacttaagggggctagataaagctgctcttaactcactggaagttgcgcagcctaccaccccaaaagacactcgacaagaatcctcgccccatcaaca

SEQ ID NO: 124017 - DNA, 469 bp, Arabidopsis thaliana columbia
  unsure (1)..(469): unsure at all n locations
cactatagnatagctatgacgtcgcatgcacgcgtacgtaagcttggatcctctagagcggccagccttnnttttttttttttttattttttgtgtttattttttttttttttttgtaaaatttgagaactttgtattattttggaaaaacngggggcacctttatacaaatcgaatatcctaagaccgttttttcccaaaccaatttcaggggacgggaatttttttaattaaaaacccccaaaaatagggggggtttgttttttcccttcgaaaaaccccctttgttgggtcaattttttagccccttcccttgttaaaacccctggaaaacttttttgggtgcacaaattgggttagttttccatgggggaaaggctaggggcgggccaaccactcggggaagcgcaaaagcgcatacacttccccttggttcccggggggggggaaaaatctccagttattttta

SEQ ID NO: 124018 - DNA, 482 bp, Arabidopsis thaliana columbia
  unsure (1)..(482): unsure at all n locations
caggacccggcccggaataccggggtgtgccacaccggtccggtcgggcccaatggaaaaaaacgcgataggcgggcttcttctccaaaggcgaccggttagagaaaccaagcctaccgaccaaaaatggaatcttttctctgttaaaagcccaccgcctaaaaaaaagcgcggctatttccaagaaaattttttttgggggggggaacaaaaaacccgcggggacccacaaaggggggggcgggaaaccaaggacggagcccacgagcaaaggaggaagcccccggaggggccccgcgaaggaagagaacaccgcccacgcaaacggcccccaccaccccgcccccgcgggcaccccgcaccggcgngccaaacgaaaaacacccggcccgcgcggcacagacggaagcccaacacaagaagacagagcgcgcgcgggggagaaaaaagaggagaggcggccgggaaggagccgcccgggg

SEQ ID NO: 124019 - DNA, 471 bp, Arabidopsis thaliana columbia
atttaggtcgaccctatagaatactatgacgtcgcatgcacgccgtcgtaagcttggatcctctagagcgggcggccctttttttttttttttttttaattatttggaaaagaggttattatcaaaagaaacccaagattattggcctaacctccatggaaaccttaaatttaccttaaccggccggtcccttaaatttagccttgccgggtttttttttttgggtggcgcggttccaaaaaaaagggacccttctaagagaagacctggtaggtctgggcgtggttaaggatggttctgagtcctccattgggggcagggatcgtcaaaagaactcctactttgatgcaaaaccagttagctgtccaagatagaccaaacctctttggtttcttgagaccgagccacataatgcatggaaggtagtaagttgttggggcaaaggcgaatcctccaaagaggccgagtagt

SEQ ID NO: 124020 - DNA, 428 bp, Arabidopsis thaliana columbia
gcacgcgtacgtaagcttggatcctctagagcggccggcctatgctttttattattacatttttgtttttcaaatgtggatattttctgtttgtttgatgaaactaaaaagctcattttaacttttttttacatcaagaggttgcgtcttttgacctctaggaactattcgggagcaaaattttttctcctatcaaaagaggtgggttctatgcggagagagcgcaaaatttaaaaataaaaagaattagccccctttggaaccccccgaaaagaagaagggggctttttacctttaactattggataccccagcaagcgggaatagaacctcttacccaggctgatatcaaccccgaacctattagaacaaattattgggttgtactcaactttcaattctctgaccccttttggaggggaaaactt

SEQ ID NO: 124021 - DNA, 452 bp, Arabidopsis thaliana columbia
tgcacgcctacgtaagcttggtcctctttgcgggcggcttgttccttttttttttttttaagacatgagagccaattactcgacacttagagcgcaaattcatatcaacatttaagaaagctaatgcaaacaccaccttcacaaaacaaaagacaggagcccaaggattctcctttactatagggggagaccaagagaaaaataaaaacgggcatcaaaagaccccgacaggtttaaaagtatgagaggccgctaagttgtctgtagagcagcgtagtaaatggcgcctacaccccgctgggtgaaaagacataacgcctggcaaagagaagccaagcgggactaaaaagcaacccggtgtttcctccaagggaaccatactagctcccttaaggatatcgagagcctaatgtaaccggttgccgcattactgatagaccgcgggagtaatc

SEQ ID NO: 124022 - DNA, 494 bp, Arabidopsis thaliana columbia
acgcctgcaggtaccgctgcggcattaccgggtttgcccacgcgtgcggaccggccgaactcccaagaactagctagagggggcggaagacacagagacactatgacctaatcttgtgacccacgactggcctagattcgtagcttagctctagttaacctataccttagtctgaaacccaacccacaacctctgtttttaggggggggggcgaccccgcacggaaacatccgaagtaaacggcgaagcggaaaccggaaagcgtgaaagggagaaagtgtacagagaagaggcccatggggcacatcggagaaaaggagcgagagtgccgataaaagccaaaaccctacataacttacggagagataagggtagcttgggcaaacccgtgggactaccaaagcctgttacatcgctggaggctaagggcacctcacgatgaatactcaggatagcaaagatagtactaggcacccacgcagaccctaactgct

SEQ ID NO: 124023 - DNA, 490 bp, Arabidopsis thaliana columbia
  unsure (1)..(490): unsure at all n locations
gcacgcgtacgtaagctgtggatcctactagagcaggccagccccttttccttttcttttttaagaagataagaatagatctatgagcttgcatatctttactttacaactttaacaagttgtgtattgttccgagaaacaagatacatagtctgactaaccaaaacacctgtcacaagtcaaacgagggactcggaaggattctcttgtctntttgaaggagtgagcgcgctcatctgagacaaataacatgccagtaaataaatactatatcacctcacttctttgtcacgtgagaatgaacacaattcttgatatctagcttatgggagtccaaaatgccctcggatttgggacttagactttcttagacaatgaagtcaacccttaacccattaagaaattcagaacatggttaccttggattggtgcataggcccaatcccgcttccaagattctatcggttagccctggtcccttaccaaaaaa

SEQ ID NO: 124024 - DNA, 545 bp, Arabidopsis thaliana columbia
  unsure (1)..(545): unsure at all n locations
tacgactcaaatagggagagctggccacgcctgcaggtaccggtccggaattcccgggtcgacccacgcgttcgagctgagagaaacgcctttctcatatttcaatccttcactttaccttttctttttttcttgttatcggatcataacaaaattttgggaaattccagggttccctggattgttggattccattattggggaaactcgatctgggggtttttttttggggttgaacggactcaacgttcgatttttttcttgaaaaaagtgaaagttttcggtcgtctnatccacagtacaccgcacccttttacctcgatccaattcacccccctgaatactgaagccaaatttgaggttaattggtactggagccttaaggattatgaatgaacacaggggaatctcggatttgccctggactcaggggaccccagagatttctcctatcctctcccaactggttaacccttggggtttattctccctcaatactgacaaattgctcttggaaccggttccgcgaaaaggcttaaaaacct

SEQ ID NO: 124025 - DNA, 466 bp, Arabidopsis thaliana columbia
  unsure (1)..(466): unsure at all n locations
nnnnnnnnnnnnnnnnnnnnnnnnnnnnnnnnnnnnnnnnnnnnnnnnnnnnnnnnnnnnnnnnnnnnnnnnnnncttttttttttttttttttttttagtccaaagtaaggggatgcattaagcagtcgaataataataacaatcattgccaaccatgagctgttctaaaccaacatcatgtgctctctgtctatatatgttacagaggcatcatcagaaaaataacaattggtcattcttttttaggcttaacacaaagatcgtagtaggtgattagtcgaattggtcatctaaagggtgattgagatgtgacactgaaagctggtgatagaggagtcttcacgggcgcccatatatcagcgccgttgctttgagcaactccaactgtattctccattggaacaagacataatcctctgtttctcaggctgtactgctccagctcctcctgcgtagcatcaggt

SEQ ID NO: 124026 - DNA, 473 bp, Arabidopsis thaliana columbia
  unsure (1)..(473): unsure at all n locations
nnnnnnnnnnnnnnnnnnnnnnnnnnnnnnnnnnnnnnnnnnnnnnnnnnnnnnnnnnnnnnnnnnnnnnnnnncttnntttnttttttttttttttttttttttttttntttnttttttttttttttttannntttttttttttnttttcccaccctaaaagggcccctttaaaatggcccagaaattttcttaaagagggacctcctttttccaaaccccccgggggttttaaacctccccccaaaacacccctcctttacctttttaaaaacccccaccttttagagttatggaaccaaacccccccctttccttaaaattggagggaaccccttgctttttccccatttgggaaaaaaaaacctttcctttaaaaaacccttccctttgcccaaatcaaaccctcccttgtctcgcccctaaggaacgttttgaccccaccctttcccctgggtcccatgaaaaaaaca

SEQ ID NO: 124027 - DNA, 336 bp, Arabidopsis thaliana columbia
actatagatgagctatgacgtcgcatgcacgcgtacgtaagcttggatcctctagagcggccagcctttcttttttttttttttcaaaaaatgtttatcctttgcagaaaatagaatctaaatacattgaatcaggttgcgtgaataattgttagaagccggtaatagggattaggggttacataatagatgatccccatagcctcatttttattacagccaacgaacagtacattaaagtgttattaataatacaaaaagaaatacttgtcattcatcaaaaggacaatagaacatagagtcctggacaataaaactattagctttctagcgatc

SEQ ID NO: 124028 - DNA, 301 bp, Arabidopsis thaliana columbia
acgactcactattaggaaagctggcacgccttgcaggaccggtccggaattcccgggtcgacccacgcgttcgggcgaattcctcaatctagtcttcaatgtgttgaagcttaaacgccggcatatattggaacttcttggttactggaaccagtttggtcaaagggtacttggggttgaatactggcctaatggatcacttcaagaagccctacatttggatttgaaggtgcaccagaagctcacttggaatggacctattaataatggattaagaacttcaaaaggcttggaagttctt

SEQ ID NO: 124029 - DNA, 537 bp, Arabidopsis thaliana columbia
  unsure (1)..(537): unsure at all n locations
tgatttttnnnnnnnnnnnnnnnnnnnnnnnnnnnnnnnnnnnnnnnnnnnnnnnnnnnnnnnnnnnnnnnnnnnnnnnnnnccacgcgtccggttaagcgtgctcaagtgaatattggcactgttgacgagcttggggctaacaagtgaatgacacagcatattgaagtgctagcaccactgtagaaacatatgaggtttgagcagatcttaggggtctcatgaaccagtctcaacagtgatgatattctgttcaaccaacaggatgtgtgatctactaacacacactctaacccggctatctggagctgttgctatacatggagacaagtcccaggatgagagagacagctggcttaatctattacggaaaggaagaactccgagactttgtgttacctatgtggctgatcgaggtctggacgtttaagacatcagggctagctgataactatgatgtgcacaatggagtggaagactatgttcatagaatcgtaagaacacgaagagctggagcgactgatcaggcatctacat

SEQ ID NO: 124030 - DNA, 481 bp, Arabidopsis thaliana columbia
  unsure (1)..(481): unsure at all n locations
nnnnnnnnnnnnnnnnnnnnnnnnnnnnnnnnnnnnnnnnnnnnnnnnnnnnnnnnnnnnnnnnnnnnnnnnnnnnnnctttttttttttttttggaagacaaaatcagttttttttttttccatttggatttacccttctccatcgtacattattaatcaattaaagagttaccctaacgttgtttaaaaatatctccttgttgcttaaaaacgacgataaaagcttgagccttctagctctgttcgtttgtggcctatttccaccacgtaagaagctatgtagttgctcctttaggctttggcgaaggaatctgatgtcgataaggcgaagaaccatgaggactagacagtgttcgaaacacgggttggtgttgcccgtttcttgatccaaatccttgggatcgacctgacccatttttcaaacgttcagcttgcattgtctggaagtagtaagaagagcttgccatgtctttcagatg

SEQ ID NO: 124031 - DNA, 486 bp, Arabidopsis thaliana columbia
  unsure (1)..(486): unsure at all n locations
tttaggcgacactatagtatnactatgacgtcgcatgcacgcgtacgtaagcttggatcctctagagcgggcagcctttttttttttttttttacgtaaccaattcttggcattaaattaaattcataacaaagaaacaataaactttgggttgggcggtgattattgaacaccatcatcataacatattccaacatttatttttaattctttcgcccaggattaaaccaaattaaccaagccttaagggggagttccacaaaagaccaattgttgtgaagccaaagcgagatgggtcaaaaggtcttgaaggagacccgccactttggggattttttcccgcagagattggttggcgctccacgttgaaaatgctcgaggtggtagtttaagccagtggctggtaggtatctttcccgtagattatggttctaggctcagattccaacgaaaactatgccttctagccgaaccttaaaccttgac

SEQ ID NO: 124032 - DNA, 486 bp, Arabidopsis thaliana columbia
  unsure (1)..(486): unsure at all n locations
acgaaccatgcacgcgtacgtaagcttggatcctctagagcggccggcctagactctctttttcgtgatggattatatagggggaggctatacgttggcagatttcttgtataaagaaaatgatctaagtctacgagctaccaattaagaaaacagagagcgataacaggacctcaaaggcgaatccctccattcctgggggagcganacctacgaaccatgggcttagaatttgaggaagcttcccgacgcaagaaaactatttaaacgggaaattgaggggcttgttcccggacaaaagactggtacctcaaacgaccgtgcggccttatttgaaatgcaacttcctttacttcttgggctttaaaaggtgggaaaccaaagcccgggtcctttcacccgagctaatggcccaaatccaaagccctgggacccgatcctcgggccacgggccacaaaattccaaaatcggacgggccacactaa

SEQ ID NO: 124033 - DNA, 308 bp, Arabidopsis thaliana columbia
  unsure (1)..(308): unsure at all n locations
ctttctgtttttattcnctattttgcnngaaaagaaggccctctccatttatttaccgggggtgagtgctaatttacacttaaggctcaaaacatccctaaagctgtccagtttttataaaaacacaccacgatggactggtgttatagtgttttttcttacatccaattagcagccccttcatgattcaatcgtgcctaaggccggggcttggaacctctaattaattaagggagggggaagaaaaggggatgggtgggcctgggaaagggacatctcacccaactttggctgggatcttggcaaaa

SEQ ID NO: 124034 - DNA, 510 bp, Arabidopsis thaliana columbia
  unsure (1)..(510): unsure at all n locations
tcgactactatgggagagctggtcgcctgcagtaccgtccggaattccgggtcgaccacgcgtcggaaaacatacacaatagcaaacatggctacaagctctttctcgtctgcgcactctcgccctctggtttctcctcaccaacgctttcatctaccgcacccgttgtcgaatttcgaaagaagatgacgccagcaacccccgtaggtcccatgactgagatggccagaaggagtttccagcaatcacaacacctaaggagcttngccagagatggggatgagcaagcaattgagggcaaggacggtggtggtgggtcctttccctcgacgatgagtttcgatttccaaggccccccagcagggataccagctactncagcagtgctgcaacgagcttcgccaggaagagccagtttgcgtttgccccacctggaaccaagctggccgggccagtagccttccaggacagcacggacatttccattccagaaaaatttaccagtcagtt

SEQ ID NO: 124035 - DNA, 512 bp, Arabidopsis thaliana columbia
tacgactcaccttagggaaagctggtacgcctgcaggtaccggtccggaattcccgggtcgacccacgcgtgcggttaagcctgctcaagtgcagattggcactggtgcacagattggtgctaacacgcgtacggcacagcatatctgagtgggttcagcaatgtggaatcctatgtggtttgttccagatctaggggttcctgtaccgatcacgacagtgttgatgttgtgttcaaccaaactgatgtgtgctctacttacacaccctctcacccggctatctggagctgttgtttctactggagacaagttccaagactgaaacaagaaatgtgcgtaatctatcacgggaaagaagaacttcgggactttgtagtaccgttgttacccttcccaggtccggacggttaaggcatgccggccgccttaaactcaagaagtcccttaccgtatggagaaattcctgttcgaagacctggttgaaccgcgcagaaccggagcgactgcccca

SEQ ID NO: 124036 - DNA, 469 bp, Arabidopsis thaliana columbia
ccctttacagggcggccttttttcttttttttttttggcttgagaaaactaagaaaaaccccaaaagtcaaaggggggtacaggtggggcatggatccctaaaggagcgtaatgttaatgggtatccacaaacaaaggctggtaagttcaaaactacttttttttaagagagggcctccctccgactccaaaagtttttacctaaacaaaaaagatttagtgcttgaaagaccaatctccaggactaaagcaagcaacaagatgaacatggctcctgaaatgacttggcgctatagggacccaagggctaaggcagtacagaggaaggcacgcctggaaccagttggctgggggggacgcagcatccattcacgggtgcttatggggactaaagctttaaccctggcccatacagccaccccagatccttggagagtatgaggttagcgacaagatgtgcagccacgaa

SEQ ID NO: 124037 - DNA, 434 bp, Arabidopsis thaliana columbia
gcggccgagctttttttttttttatgttgggaacggaactagctgctagatagggtagactataccatggcgatatcttatctttgaccagaaggcttggcccagaccttaggttgcgccagaccaccaaccttttttttaagaagggcgtaagcccgggtgaacggaaatcaaagatcaactgcttgttgttggatttccccgcctgcccaccgcgatatcaacaggtcggggagtaggacgttggagaattgggtcgaggaactcacgatagatagtgggaatcggtgggaaatgtaaagaaacctgaaatcttggtaaccgcttgcgcttttgggttctttaaggattaaaaattttttatttgcgagagtgggaatggatttattactgctagtgcgaagaggagaactctatcgttaaggagcattatc

SEQ ID NO: 124038 - DNA, 509 bp, Arabidopsis thaliana columbia
agcgacacaccagcgggaccgctgccgcactccccgggttccccacgcggacttgcggggcccgaccacctcgaggagacgcggacacgaaatcatgtggaggatccccaagctgctaaaccctggtaccttattcctaagctgccgaacggcgccttcattattcttcacgcgctgagtgacggcctaagcgcgtttttttctgtctggttatcggcctaaccgctggccttcggggattagcacggaccgcttacctggtttccggctatgagtgcgaaactgactgagcaacttgtcatcagagaatgggtaaagcggcagggaagagggtgaaaagatgggaattcaagggaataatgcaaggagcacaaatggttggggtgacataagtattcagaaccgattgagaactggcggaccgcagagcgtttctagtgggcacatggatccccgctcggcctccaagggcttttagcacagccaaatcaacgggcatttgcctttat

SEQ ID NO: 124039 - DNA, 341 bp, Arabidopsis thaliana columbia
ggggcccctgcccccgacaaagctcggacccctaaagggggcgcccttttctttttttttttaggggaaaaaaggggcccttaaggccaagcgataccacgtatctaaaacagtgtattaatgccagggttaggggcaaccccacagaccgaccacaggacttttctatatgtatactcacactttttgaccgactgagctttgcctgcagcggaaggaaagagaaaagcaatatttcgagagctgacgtctcatacaggttgaatggacctaaccggaaacctggcacttgtaaagtttgagacccagatacagctcattctgcgccctacaaaccgcaa

SEQ ID NO: 124040 - DNA, 208 bp, Arabidopsis thaliana columbia
cacgcacttttagggagcagacacgcccgcaggtaccggtccggaatacccgggtcgacccacgcgtgcggtggcctcgaaaaactcatgtcattgcatcacagcgaggcgaccggtgagaagactcagatgccagaagcaaacacccgcaactctacatagagcctcgacatgagcaacataccatgatgaacgtaacctaccacca

SEQ ID NO: 124041 - DNA, 427 bp, Arabidopsis thaliana columbia
  unsure (1)..(427): unsure at all n locations
aaaaagggagaggcaaagacggggggagcgggagcaccgcgagggcggagaccgaggcagccgcaggccgggggcgggcggcggcacacagggacgccgggcggcgcgaagggggaggcccagcgtttttttcagataagggggggggggagcccacgccgaaggagcaaaggagaaaaaagcaccgagngcgcccacccggaggggcgcgcgcaaaagaggaggcccgaggggagcacgcgccagccacccccggcggggccgggagcaccaccagaaggacggacgccaaccgaacccagcaccgagcggcggaggcgccagccgcagggagcacggacagcggggaaaggaacccgagagccggcgccccccgcgaaccagcgcgcacgcccacacagcgcccgcccgagagagagagagaaga

SEQ ID NO: 124042 - DNA, 553 bp, Arabidopsis thaliana columbia
  unsure (1)..(553): unsure at all n locations
cnnnnnnnnnnnnnnnnnnnnnnnnnnnnnnnnnnnnnnnnnnnnnnnnnnnnnnnnnnnnnnnnnnnnnnnccacgccgtncggaaaacatacacaaatagcaaaacatggctaacaagctctttctcggctgggcaacttttggcctttggtttcttcttaccaacgctttcatttaccggaccggtggcgaattcgaagaagatgacgccagccaccccggagggcccagacagagatgccagaaggaggttcagcaatcaccacacctaagagcttggcagagatggatgaaccagccaatgaagccaggacctggtggtggtcccttccttgacgatgaagtcgatttcgagggcccccaacagggattccagcttcttcagcaggggtgtgacgagctttggcaggaagaagccggttggggttggcccaacttggaaccaggtggcacggcaggtaggcttcaaggaccggaccgaccatttccattcaagaaaatttaccaagccggttaggacctggcttaccattggcagaatccaccaggtg

SEQ ID NO: 124043 - DNA, 466 bp, Arabidopsis thaliana columbia
ggcccggagcccaaccacccgaaccagagagacagacgggagcacgtgcaagccccacaagacaaggaggccgaggcccaccggacctcaaggaagctccaggcggccacggacgagaacggtggtggctcagagaggatcggacaccagggaacactttttttgggggggcgcgaggcaagaaacagaacgaaaccacgcctacaagacgcgagaccctgccgacccggaccccgctacaccaaagagaggagaggcagggagggcactggaggcacatcggaacccgccgggccaacaacccaagcgcctgcccacaacgcaaaccaccgaggacccaagccccgcaccgaaagcaggaagagcggacacacggcccgcgccgaagcgcgccaaggccgctaggaccccgcagcggcaaaaccgcccaccccaggcagacagggcggacagaaccggacagacc

SEQ ID NO: 124044 - DNA, 556 bp, Arabidopsis thaliana columbia
  unsure (1)..(556): unsure at all n locations
gcaccgggaaggaccgcccgggccaacggagcgggtcgagaacaccgagcaagccaaaggatcgggacggggacccccagagccagacagagagccaacatggacccgaagaaaaggaccaagggcgccgaaataccgtgcgatacaaccgagacaacggccccaaagagggggaaccttttttacggggggcgggcaagaacaaaaacacgggcccccagccggaaaccaaaggcacgtaaggaacactaaaagggnagacccagagagcgcaccagaaaaaccaaggagagggggggtggacaaagccaaacacgggagaacgcccaccaacccggcgagagcccggaacaaaggaagggcaaggcctgccaaacaacacaaagaaaaggaaccccccgtggccccccgcgcgacgctaccaagaaggggaaaaagagaagcccgacaccaaaccaagaccaagggggcaaggaagctaaacaccgatcccccgttaaaaaggcgccgcacctaaacaacaaagcaaacaggatcaccccccgaaccgctgaga

SEQ ID NO: 124045 - DNA, 431 bp, Arabidopsis thaliana columbia
tgcacgcccgtaactggcttgcttcttataggcggccgatctttttttttttgtagtggtgggaacagataaagctagcgctcgatataggtaggatacttcatccatacaatagatgcaggagcaaagatgagcctaccgagatggttacaaaccatcaggaagagttttttagctgactagggcgtggcaggagtctaaggggataggaaacatcaatggaattgatgtgaagaagaggaaagagaatctatgcacagaagtgtcttaaccttactagtaaatgtaatccaaggaggataggataatgcaagggctgaaccgaaccgaggctaggataggagggccggtccaagagaaagggaggaaccgagggctggctgcgatccaagactaacaattcgaacggaaaccagagaggtggattagat

SEQ ID NO: 124046 - DNA, 543 bp, Arabidopsis thaliana columbia
ggggggggattatctggtgacctcgacgactatgaggggatagctgcgccgcctgcaccggccggggacagaatgggtgggtccacccaggcgtccacccacgcgttcgatccttagaatcacttccttgttgatgacgcatggaccaccaaagcatacgtacttaaccagttgattgatggcaaaacatccacccggtgggacaaacatgctggaaggataaagagggcggctgaagagttttatgacggtgctgactcgaagaagaattacgtgcgctattctaccccccctggttggcaagaaggtggatgataaacgaaggaagcttgtgcgggctgactatttaacaaaggtggaccatgtcgttgttgcccctatgatgcgaacaactatacagacagttggtgcttctggaggagaagaagaacatactgatgcggcggctgcaccacagatggtggcaaataatgcgagcagcaaccatcgtgctaagattactaacaaaaacacccctccctcgctgctgaccacctcgggaaa

SEQ ID NO: 124047 - DNA, 366 bp, Arabidopsis thaliana columbia
  unsure (1)..(366): unsure at all n locations
actcgcgaccgcctacgccggcgccgcgnggggcgctctgattctcgctcttctaccactctctctatagagagagggtacgcgcgcaaggaccgcccgcacttattgggtcgagccacgcgtgcggtcacgcatgctcatgagcggagtggcacgatagtacgaggccgtggtacacatgcgaacagaacatcatattgcagctgaagcagacacagggcatgaagatgtaggcaagtatcacatgctagctggcacacaggtacctcattctctagaggtagaaggaggtttcacgcctcaatccagaattagatggtgctgagcatgctcagcatcacgactcctagacatggccgtatcagg

SEQ ID NO: 124048 - DNA, 541 bp, Arabidopsis thaliana columbia
acgactcaccatagggagagctgctacgcctgcaggtaccggtccggaattaccgggtctgacccacgcgtgcggttatgggtgaggcagataaacggacgatttctaccatcggcttgatcgctgcgttgctaagggaagcgcagcctatgatcagcacattacgcctcgccgtagaagttgatactcacgcgtccaaatgaggagaatgggactatgtttatttgaaagggtgaggactaggacatcaacatcagtgtgcgctggaacagaatcagcttcatgggtgtggggaatggcagcgccagctcaggcttctgcgtgagacttaagcattccttccatcgtagcaaccaaacttaatctctacagcggtgccccgacgcggcgttgaatgccagggaagcggtgcatgcatcggctatgtttgtgctgctggctgctgttgctgcccatgacagaccattacctggccctgaagcttgtataccttggagtcccgaacgcggaaccccacccccaccttgcaccggaggcaggg

SEQ ID NO: 124049 - DNA, 451 bp, Arabidopsis thaliana columbia
agcacgcctacgtaagctagcatgctatttagagagcgccctaaattcctttttttgacacaaaaagacaagagactatgcaatgcagtacgcacccatagtttgacgctacttacatatacaattagttagaaggcaatcatacccaaaagaacgaaattgcgtcatgtgtgcggaattttttcttatgacgcggggccttaaaactcaaaaagttatgcttcagcagacataagagctcctaagactaaaggccaattactactacgggaatagcatatgcagaaaccgaaaacaaaacgctcggatctcaaacccataccctctagctaatatgcctgtgccataagctatgtggccaacgccaaggcctgataaaaaacgatgcccatccttgtgcggatgtacttggtagaataaaaaacccaaggcaatatagacaggcccacaa

SEQ ID NO: 124050 - DNA, 542 bp, Arabidopsis thaliana columbia
  unsure (1)..(542): unsure at all n locations
tacgactcancatanggggagctggcacgcctgcaggtaccggtccggaattcccgggtcgacccacgcgtgcgctgctaacggcgcctcatcggtcgacaagccttaccttctcatcccagactttgatggcaatggctagcggcttctgcatctctgattgttatatggtccggcttcattctgcacaatattcttacgagctacatctatctccggagctgtctgttttgggggtaggaaaacccctcagaagaaaatgtactgcctgttatcccacatcctgacgatgaatcgaagttcttttctccacagtaaactacttagctaccaatgctagcaatcttcacaccgtatgcttgatcacctgcaacgatcatggtatgggcaaggcttacgaacaataagctgtatcggtcatgggcggtgctcatggcttcgcatcaacagctacagactctgaaccatcctaatctcgcaggaagctcttggacaatcaatggctcccgaattggctaacagagattatcgaagaacgaagc

SEQ ID NO: 124051 - DNA, 462 bp, Arabidopsis thaliana columbia
gcttaggacgtcgccttgcccgcttccggtaacctgggttcctttaaagcggccgcccttttttttttttttttttctggaaataaaaggtcctatatggccaatggagatctgctatctggcaaatagaaaatttccagcttaagttgtaaagccttaatgaaagcttggaatttccaaattgatacatcaaatttaggaacggctaatttttcattccacccaaggaaagacaaaggagtaacacagagtggtcaccaattgtattggccactcggaatcatatgaatggaaatagtgagaagtactagagcgagccagtgaacccacctcaatatactcataattatctgctttcgaacctattgggaaacctgtttaccatcttcggcttgagcttgtttttacaactttggcatcaccagaacaacattcctccttcatgggggatgatgatgaacc

SEQ ID NO: 124052 - DNA, 531 bp, Arabidopsis thaliana columbia
gggaaaggtggtacccctggcggtaccggtcccgaattcccgggtcgacccaagccttcggaaaacttcattttcctttatttaagggaggttgattggttggttacttgcttcacttaagaaggggggtgtggggagaggaaggttggggaaaaaaatggggaggcaaaggggtaataatggggccaatccttggctttgggcccttttttgcaccatcggaagcagaaccaaaggctgagccaggttggataatgaccttctacaaggacacttgtcctaaggccgaaaacatcgtccgtgaccaggtaaaactcttctacaaacgccacaggaccaccgttttctctgggttccgtaacatcttccatgactgcgccgttgagtcatgtgatgcgtctcttttgctgaattcgacaggaagagagctaggagagaaaaacccgacaggagcttcggacttagaaactttaggtacatcgaggagatcaaggaagctctcgagagggagtgtcctggtgttgtctcatg

SEQ ID NO: 124053 - DNA, 452 bp, Arabidopsis thaliana columbia
  unsure (1)..(452): unsure at all n locations
aattaggcgnnnnnnnnnnnnnnnnnnnnnnnnnnnnnnnnnnnnnnnnnnnnnnnnnnnnnnnnnnnnnnnnnnctttttttttttttttaaaactgaaatcaagttcaaaattgaaaatttggcttacctcaaacatgctactgtcatgcttttgtttcttattaaaacgataagcgaacaagaacagaacatcgtagctagcatattgtttgaaaagcaaaatggtccatacgcattgatacaaagcttgcatcaaaagtgacgacaaaactaagtactattacttacactctgagctagtaggatctatcattttaattgttcagacgtattaagactaaaagtgtatagtgaatacaaacaatttgtttgggattgtagaatgcaatcttgatagaagcatcaatcgttgttgatctcacattctcactgcctgagtttgtggttca

SEQ ID NO: 124054 - DNA, 539 bp, Arabidopsis thaliana columbia
  unsure (1)..(539): unsure at all n locations
nnnnnnnnnnnnnnnnnnnnnnnnnnnnnnnnnnnnnnnnnnnnnnnnnnnnnnnnnnnnnnnnnnnnnnnccacgcgtccgccaaaattacactgtaaatttggcatttcgagaagaagaagagggagtgatggaattgcaaggagaggaaagcaaaacggcgacgtattgcgtgacgggtgcaagtggatacatcggttcttggttggttaagtctcttctccaaagaggttacacagtccatgccactctcagagatcttgcaaaatctgaatactttcaatctaaatggaaggaaaatgaacggctcagattattccgagcggatcttcgagatgacggcagctttgacgacgccgttaagggttgtgacggcgtcttccatgtcgccgcttccatggagtttgatatctcatcagatcacgttaatctcggtacgaccttttcgttgcaccggtcctttttttttgagcacaacacctaattaaaccgatatcaaccggatcaaaccgttggtattagaagttaaccaataaaa

SEQ ID NO: 124055 - DNA, 418 bp, Arabidopsis thaliana columbia
  unsure (1)..(418): unsure at all n locations
nnnnnnnnnnnnnnnnnnnnnnnnnnnnnnnnnnnnnnnnnnnnnnnnnnnnnnnnnnnnnnnnctttgtttttttttttttaattcgccgtcccacttaacacaattaacactgccaatcattttacagtggtggttcactacctacacatgttcatatggagaatccgtgactaacaagaaatcggttcaattagcaaggatccatattctatcgaataagacactcttttttatggccctgagtgtccaaatccagacaggcagtcgatcgctgaatgatcaatagaacgagcccaaaacaggggtttcccttccacttgcgacctattacataaccaagcctttgccgtaaaaaagattccaccccctccttgaaactccctttttaccccattctttttccagggagccaacg

SEQ ID NO: 124056 - DNA, 510 bp, Arabidopsis thaliana columbia
  unsure (1)..(510): unsure at all n locations
gactcagctgagagaaagctagctacgcctgcaggtaccggtccggaattcccggcttgacccacgcgttcggttgtcaagtgcgtcacactcaattacgctatgggaacatctggctttgccggtgaagatgctatcaggaaactcagttttcatgctgcgcagacacctacatcttttcctacctgactaccacatctggtacctggcaaggtctttcttcactggttgatnaccagcactatagaccacgatccgtatcttagactgactcgtgatggagcaccccggttaggctatagcaagtccgccctgatagagtacaacagtcattgctggctcgcagggagagaatggacaaatgtatgctagtgatccagacactgctatctatgtgactgattccgtatgggacatttaacacaagacaaacagatttagcctcttagaggtgaacaacactgcctggtagagcaccgacaactgagagcaaatttcgaggatgacata

SEQ ID NO: 124057 - DNA, 209 bp, Arabidopsis thaliana columbia
  unsure (1)..(209): unsure at all n locations
cgaatgtattaggtagcactatagnaagattatgacgtcgcatgcacgcgtacgtaagcttggatcctctagagcggccgccctttggttttttttttttgaaacaatgttttttttaacaaaaagaagttcttaatatagtataaatctaggtgtgagctatacaaagctcaatgtccacttatttgtttgaaaacaaaggaaagaaa

SEQ ID NO: 124058 - DNA, 514 bp, Arabidopsis thaliana columbia
  unsure (1)..(514): unsure at all n locations
nnnnnnnnnnnnnnnnnnnnnnnnnnnnnnnnnnnnnnnnnnnnnnnnnnnnnnnnnnnnnnnnnctttttttttttttttttgacacaacgagtacttttagcacaaaggacgttgctcgctggatctagaatttaagatccaaggtcattgtaagccattgctacatataatttttagacaccgaaaacttaacctaaatcaatattaataccagggaaatatttatttttcataattgttacaaccgtacagaaaagatagtcttgagaacataagaatactttgaaacgctcaagtgacgctatctgatatcaatgacatcaaacttgaaaagaggagctgtggaaagcatcttacaggcctctgaaattgggcactccgaccaactgataactgtgcgcatgaaattctatgtcgggatagatggttatcatcgggattcgttccgtggttgatagtcagaataatcgcgtgatttcttgaagattcttgtggcaccttaacgactgtc

SEQ ID NO: 124059 - DNA, 506 bp, Arabidopsis thaliana columbia
aggtctcatacgactcactataggagaagctggtacgcctgcagagtaccggtccggtattcccgggtcgacccacgcgtccggtcactatgtttattttgcaagaagaaggtctctcttcacctaatacttagcatatgagcattcgactatgattgctgagatctgctttgaacttacaggtgctctcaaggacgaggatcgatcttgtcttgcgaatgctctatagaacaatctgcagagactgtctatatagctatcagatgtgctagaaaatgtgactaccattgtgagaaagtcagttgatgctttaagagctctactgatacaacatgacgaactagcagctttcgggcgggaggagagagctatgattgaaacgaaatgctaaacgctgtatcaagcttggtttgtgaagacttatcagattgtgaatagtactaatcatcttgaactagcttcatagagtgattccaaaggagactaatggataggttaaacctgcc

SEQ ID NO: 124060 - DNA, 493 bp, Arabidopsis thaliana columbia
  unsure (1)..(493): unsure at all n locations
gtgnnnnnnnnnnnnnnnnnnnnnnnnnnnnnnnnnnnnnnnnnnnnnnnnnnnnnnnnnnnnnnnnnctttttttttttttttatatgagatatgaactccataacggggctaacagtacatgaaaccacgtaatgctttgcttaaagacggtgcaagtgaacaagtgactatgacactgctctgatgaatttactagcagaccacatctgcagaaacatgttatgtacgtgactatgtgactgtcgattagtgagatctcagaccatgacgcgagtaggtaagagacgataatctaactgaggataacgatcacatgctaacgtgactgagtattgactagcaagcttgagacctgcgaggaacatataactgaacatgcgtgagctttccttctgcactcgtgggctgacttgagcttaactgnggaactgaagtaggccagcagacaagcgacggacgatatgacggcggaatatgcgcggacatgtga

SEQ ID NO: 124061 - DNA, 545 bp, Arabidopsis thaliana columbia
  unsure (1)..(545): unsure at all n locations
nnnnnnnnnnnnnnnnnnnnnnnnnnnnnnnnnnnnnnnnnnnnnnnnnnnnnnnnnnnnnnnnnnnnccacgcgtccggaggcgcaccctaatcctttaagttgctggaccataattaagcagaatcgaggatgaagatgcgcgatcttgaccctaccagatcctgattgtgccatctttatccggccagtacgagtctgtgcgatcttacacccaagctaccactgtaaattactctgacgaagactcccattgcatatatcaaagcagtgctattcactctcaactatttgaacgctacaacgcatgatcaagttgtgatgtaagtacctctcgcatgttttgctggttacatcgcactgtgcgatgcacatagtctgttctattcatatcacctctgacactcaatctggaggtgtgacaagactcacttgctctttatctgaagcttatcccttagttcaatcatgtcaacatatctcgactgcatgactgtagacagattgtagttctgcgttgctacagacatctatagggtcctgaa

SEQ ID NO: 124062 - DNA, 501 bp, Arabidopsis thaliana columbia
  unsure (1)..(501): unsure at all n locations
nnnnnnnnnnnnnnnnnnnnnnnnnnnnnnnnnnnnnnnnnnnnnnnnnnnnnnnnnnnnnnnnctttnggtttttttttttttnatttttttntttcttgaaaaatgggatatcatcaatgaaaaaaagaaacaaagaataagaaagattcctcgaagatgagaaaaaaatccaacccacacacataataattgtatctaaaaactccaaaattcatgttgtgacggagcggggatttgaagccatcaacgagggttacctttattctatacaaagcagatgaatcgctaagaaaaacatcaagtgttttattactaagtttttttttgggggcaaatagcttaaagcattctttctttgcgaataagcacggtaagctgctaatcccgcaaacccaacagctggtcccactgagacaaatagaagtgagctattcacgaagttggcggatattcctgctttttctttcctgactcctgctctggaatgctcatgtgagg

SEQ ID NO: 124063 - DNA, 381 bp, Arabidopsis thaliana columbia
  unsure (1)..(381): unsure at all n locations
nnnnnnnnnnnnnnnnnnnnnnnnnnnnnnnnnnnnnnnnnnnnnnnnnnnnnnnnnnnnnnnnncttttggtttttttttttggagccctcaagtttcatgcacaaacggaaatttaggagcgctcaaaggctaatgaaatctatgagattcccagcagattgaagtatatgccatccacacaagctttgcttattctataaagacaagagaaatcattttttatagagcggtgggttcaagccatgaacggggtgcctctcacatatatgaaacagcaaagaaatcgctaaagaaggacattgagtgatatattactgggttatgtatgggggtcaaaagacttatgcattatttcctggagaattagcacggcaaggc

SEQ ID NO: 124064 - DNA, 536 bp, Arabidopsis thaliana columbia
  unsure (1)..(536): unsure at all n locations
acgactcacnctagaggaaagctggtacgcctgcaggtaccggtccggaattcccgggtcgacccacgcgtccgattctactgttttaaatttggaactgaataatctgagaagtgtggactcatcaactgttgcttatgatggaaatcgtggatcatgtatagagctataccagattgaaccatatgcgagtgactgtcattgatcgagactgcgaggtcatatatattacggatcatacttgcgcggaaatacgcataagactagatggagtcatggggatgacgaacaaggtatgatgatgcagcatgtgactgtgggtatgagagaatatgacagcgcatgacgtctactactggtaagaggcaagggaaattctcatggaagcagcaaggacgggagatgaggaatgtctctaagaccatttgcattatgggtgcggtcaaagtatactggaaaccgtattgaatgaaagggcagagatatgatgacactgaaacaccggttaattgacatgcgtgcctatggatcatgaa

SEQ ID NO: 124065 - DNA, 452 bp, Arabidopsis thaliana columbia
  unsure (1)..(452): unsure at all n locations
nnnnnnnnnnnnnnnnnnnnnnnnnnnnnnnnnnnnnnnnnnnnnnnnnnnnnnnnnnnnnnnnnnnnnnnctttgtgtttttttttttgggacccttaagtttcatgcaaaaacggaatatccggaacgctaaaaggatacatggaatatgaaagattcctcgcagatgggaaataattccatccccaacacattttaattgtctttaaaaactccagaaatcaggttttacaggggggtggtttcaagccatcaacgggggttcccttatatatatgcaaaggcgaatgaattcgctaaaaaaaaacattaagtggtttactactaagttttttttgggggcaaaaggatttaagcattactccttggaaaataagaacggtaagctgtttttacggcaaacccaataggctgacccagtgggacaaataagaagtgagctattcatgaa

SEQ ID NO: 124066 - DNA, 458 bp, Arabidopsis thaliana columbia
gctcacatacgactcactttaggggaagctggtacgcctgcagagtaccggtccggaattcccgggtcgacccacgcgtgcggtcacactgctttatatttagccctgaaaaatctgaaaagtctgcactcctcaattctttcttacgaaggaaactctgaaacatgtataaggctccactagggtgaacgatatgcagtaactgtcattgatcaacctgcgggttctaagataaccctcatattgcggcaaataccagatgacagaggtaataagtttctgacgaacaaggaatcgttggcagcatgtgatgttgctgtcgttgactatgacagctcagacgtctactcatggtgagaggcgaggaaaattctcgtggaagtagctaggaggggtgaatagagatgtctcaagaccactcgttttctgggtgcgggcaaagatgacttggatccata

SEQ ID NO: 124067 - DNA, 498 bp, Arabidopsis thaliana columbia
aggtagcactatagaagatcttgacgtcgcatgcacgcgtacgttagcttggatcctctagagcgggcggcccttggttttttttttttttattttttttttttttttttggggggattaaccaatcacaattaaattcccagaaacaaaatcagaattgggttaaaatccttagaaaaaaccattatcccaaaaattaaaatttcaaccttaaaaaaaggtaattttttttattgggttcaaaggttattggtcaaggattggtaccaggtccgggcccccagatcggtttaggtattttccttggaagggtaccaattacctgggccctaccgaccccgttaaggccacccccccggcccgtttttttttttcaaaaacctgggttttacctaccgccgttaacgggtccttccttttcattttcaacttcatttttggtccctttttttccgccgccgccaccgccattttcttaaaacgggggcaacaaaccaa

SEQ ID NO: 124068 - DNA, 487 bp, Arabidopsis thaliana columbia
  unsure (1)..(487): unsure at all n locations
gacgtcgcctgcacccctacctaagcctggattctttaaaacgggccgcccttggttttttttttttgaagccactcgttttttttaatgagtggccaacccagaaccaggaggtcaaacctaatttcctggttaatttcatggaagggggcccacaagcggtcctttattcccactgagggtgtgccacaaagngcccaattttttagnccgagaaaggtggaaccgggggtggaaaaggatgcaaaatattcgccaaagtctgtgtctgatacatctgaaccaaatccaacatctgtttaaaatagtgaaccgtgggcctaaatccaaccttnttaataattttctccctggctttcgtatgtatctaaatacagcgaatcttcctaaacatctgtttcttctgttccctggacagaagaatacgccatgtaaagcttgtcatataatgttacatctcccttgtctttcacaagtaacacttgtt

SEQ ID NO: 124069 - DNA, 427 bp, Arabidopsis thaliana columbia
  unsure (1)..(427): unsure at all n locations
nnnnnnnnnnnnnnnnnnnnnnnnnnnnnnnnnnnnnnnnnnnnnnnnnnnnnnnnnnnnnnnnnnnnnnngcggccttttttttttttttttgatggaaccaaagattcctttatgattatcatggaggggccgtgtttaaaacccttaaatcattggcttatacagattccggaatgaagaaggcaccttaggtaaggaaattggctttgggtacctttacttaagatttttgaaacccttcattttagggggaaaattgtttggaccatggccttttaacttgattggaaatttaagcctttgggaagaatcttgtcccggctgaaaaagacctggattcatccgaggaagtaaccatgggtggtttttggacaacagacccatttccaattgacacagaaccgatggggtactggaattggcc

SEQ ID NO: 124070 - DNA, 552 bp, Arabidopsis thaliana columbia
  unsure (1)..(552): unsure at all n locations
nnnnnnnnnnnnnnnnnnnnnnnnnnnnnnnnnnnnnnnnnnnnnnnnnnnnnnnnnnnnnnnnnnnnnnnnnnnnnnnnnnnccacgcgtccgaatcaaatctctttgagattgttgggagtccgaatagttgttcgagtctttatcaaggaagatgcaatgtagtggtgggagagatccttttgggggcgagtatggaggttctttctgcggtttacgaagtgcatcttttgcagggtttggaagaggttcttttggtggatctggtggtcctaatggtcctccgtatctaatgtctaatctgttcagacgaacagaaccattggacgaccctctcttgactgagccttatgcagatgagctgtttcaatgcaacttcgtgggttccaccatgaatccttttgcactattgctacgtctgtcacatggtatgatagagaataatcactctgcaagagcgagttaaacacgccgacctgttattgcaaagattgattcaaatgatcacaaagattgataacgtggtgtaaacacgaaaggaattctaagtg

SEQ ID NO: 124071 - DNA, 519 bp, Arabidopsis thaliana columbia
aggtgccactatagaagaatctatgacgtcgcatgcacgcgtacgtaagcttggatcctctagagcggcccgccttttttttttttttttcaatgcaaaagggttctgatagctgaaaacgagccttacccatggctcaacctttgggaaaatcatgacttaattattcttcactggggcctaatgagcaaaaatgaccaaattgtttttctatggaagtcaagggcttacctttacgcctattagcctcctttttttgctgaagcttttttattccttccttattagatttgaaatggtttactatggttccttttaataccgctttcttggttgctggctcgaattatttgaccaatatgctcctcttggtttttaacctttaaaactaaggttggcctacaagaatcaccctgattttttccttattaaaccaaattctggcccaccttttattctccttcaggtcactctaaaaacgctaaacctcacgctgatgctcattgacataaattgtcc

SEQ ID NO: 124072 - DNA, 523 bp, Arabidopsis thaliana columbia
  unsure (1)..(523): unsure at all n locations
nnnnnnnnnnnnnnnnnnnnnnnnnnnnnnnnnnnnnnnnnnnnnnnnnnnnnnnnnnnnnnnnnnnnnnnnnccacagcagtccgtggactgcctggagactgacattagcttgtggttgcggcctgatgtggagggcatatgtccgtcggaagatattagtccggaacaagaccacgaaggatgatcggtaccttcgtcgctgaaccaacgggagattataataacactagctacggtggagaaggattcacacgctatcgcgaacagcttttcatctctctttgtttgcctgcgatcaactctatctgaggctactggtaactcggttgatcacatggcttgctttggagaggcagtgggacggcttcaagaaaatgctctagatgcagccaccatatggaacgcgggcatcaactcttgtctcagattaaacgaggaaattaaaggcgttgagaatttggtagctcaggtaaagcacctgacgaaaaacgtgtatgttcttgacacggctgtaaacaag

SEQ ID NO: 124073 - DNA, 522 bp, Arabidopsis thaliana columbia
  unsure (1)..(522): unsure at all n locations
gacgtcgcatgcacgccgtacgtagctgggatcctctagagcggcccgcccttggtttttttttttttttattatttttttttttnttnttnngttttgtgntgttggggggtgttgaggnggtgtgggttttatgaaaggttaagaagagaggaaattttgagtgcaggggggggagcgcggggggggaatttaaaaatttaaaatttcttccattgggggggtttggcncggcgggaatatctttggtaccaaaaaaaaaagctatagggggttaaaaaagggcctctccctggttaaaccatttgaaaaatttttggcaatataagaaaaatatcccgccatttttctggaaaacatgtaagaaaaaagcgcccacactttattaattgccacacagtaaaaaaaccggcggaatattatttaagaaaaaganaggggcccctcaatttcccctttataattttatagaaagggattttctttttttttgtacccgccttttaatattaaatttgggtt

SEQ ID NO: 124074 - DNA, 503 bp, Arabidopsis thaliana columbia
taggtgaactatagaagatcttgacgtcgcatgcacgcgtacgtaagcttggatcctctagagcggccggcctttttttttttttttagttggagagtggattttgaattgaatagcggaagttataccaaaatggtatttttggattccaagggtagcgatttcattcaacaacgattgggatcagaggagatcaattaattcaataccaaatggcccaaacgaatttaaaaggccaagtaataacttagacaacccaatacaggaagataaataacctctaatggcagctctagatctatctctgtctcatctatatataatgccttggctacttacctctagataaacgcagacttcttcttccgcatactacaacctcaagctttgcaagtttgtagtatactttgttaggactatacaaaagcactctcttatctatgggattaatctctgcaccagctagttctgccaaggcattgaactgagtttatcgaaacgct

SEQ ID NO: 124075 - DNA, 478 bp, Arabidopsis thaliana columbia
tgacgtcgcatgcccccctaccttagcctggattctttaaagcgggccgccctttttttttttttttggaaggtggaacccatgggtttttccttcaaccaatctaccattccccattaggtttttggtaccaggaaattaaccaaaaccggttcctgggaaaaatggttaaaaaaaaggggcccaaattaggggtggcctgttattttccagggaccttttgcggcccttcccgagacggtggaaacatcaaaatcaaccacccaggggccattggtccagcctaaggccctgtttatacttactgggctttctaatccgaggtttcttcagttttttcgtcactccccgggttcagcgatgatagctttccgaatgactcttttgcatccccaaagtagtctttaactttgtcgaacactgttttaagctggtcctgggttgggagctcaataacatctgaagtactaagtgcagc

SEQ ID NO: 124076 - DNA, 478 bp, Arabidopsis thaliana columbia
accttgccttccccccttccttagcctggattcttttaaaccggccgccctttttttttttttttttttttttttttttttttttttttttttttttttttttttttttttttttttccaccaaaacccggggattaaattcccagttttccattgacttaaacccttgggggaacaactgggcccaaaaaacaagggtttttttaaaacctaaattcgcttttagggcttaccaaagttttaaaacaaaaccaaaaaccatccccaattggaattatggttaaccgtcaaacaaaaaaaataaaattctaaactttgtttaaacaatgggtttccaagattttgaattttttggccaaaaataaacacattcttttccgtttggcccagtgatagaaaatccttttttttcacccttgggtttgacattgcccccagcttttttttgaaaatacatgaaaacaccgtcctttggggg

SEQ ID NO: 124077 - DNA, 479 bp, Arabidopsis thaliana columbia
tgacgtcgcatgcacgcctacgtaagcttggatcctttagagcgggcggcctttttttttttttttggtattagcttttttattccttaggtttcaaaaggggattcggtttcgatctggctttattttggccgtaccgaaaatttttaaccaaaccagggttattcaatttaaaaattggaaatggatttggcgatttaataaccattcccaaccaaaaccaatggaaaaggttgagaaaggaaaggtcacctaacccggtattctaaccgaaccgttagttgagccacttgcaccggtcgatttaaccgaagttccttcgccgtttttatggactcctcctctgggcacatgtaccgaagagttcctccacaaaaacgacgcgtttttaagaaaagcccaccggtctcttgcacgtaccgaatcactaccggttgaattcggtacagcactggctcgaacgctaccggtagcacctt

SEQ ID NO: 124078 - DNA, 484 bp, Arabidopsis thaliana columbia
tgacctcgcatgcgccccttccttagcctggattcttttaaaccggcgccctttttttttttttttttttataggttgattcaaaggtaattaaaagccaaaaaaaattcctaggatataatttggtggccagtttgtgtgtgattaaataaaggtctaatctttaatttttattatggagaaggggaaaatccaaaccttatggattgttcagagctggagaatggtttacatgtctgcagctacagggatagttcctttctaaacatgaccccacctctttataaagaaattatccaccaccaatctgaaccatggagatagttacacagctttatcgccagcatttgctttcttcaccagctccttaagctcttccctgctcacgtacttgatctcagccacttaatctgggttgggttgaagcttcacatcccgcacgatgaagagtagatagtcaacttcgtgctctccccatttccca

SEQ ID NO: 124079 - DNA, 543 bp, Arabidopsis thaliana columbia
  unsure (1)..(543): unsure at all n locations
nnnnnnnnnnnnnnnnnnnnnnnnnnnnnnnnnnnnnnnnnnnnnnnnnnnnnnnnnnnnnnnnnnnnnnnnnccacgcgtccgcccacgcgtccgcttcttcttcttcttcttcctcttcccgatttgcccctccccgtccttctccgatccgatctccggcgccgaggactcagctgtctgttcgcgctttctcagccgtcaccatgaccgattctaacgatgctggaatggatgctgttcagagacgactcatgtttgaagacgaatgcattctcgttgatgaaaatgatcgtgtggtgggacatgacactaagtataactgtcatctgatggaaaagattgaagctgagaatttacttcacagagctttcagtgtgtttttattcaactccaagtatgagttgcttctccagcaacggtcaaaaacaaaggttactttcccacttgtgtggacaaacacttgttgcagccatcctctttaccgtgaatccgagcttattgaagagaatgtgcttggtgtaagaaatgccgcacaaaggg

SEQ ID NO: 124080 - DNA, 514 bp, Arabidopsis thaliana columbia
  unsure (1)..(514): unsure at all n locations
nnnnnnnnnnnnnnnnnnnnnnnnnnnnnnnnnnnnnnnnnnnnnnnnnnnnnnnnnnnnnnnnnnnnnnnnnctttgtttttttttttttttttttttttttttttttttttttttttttttttttttttttattaaacctattaattttttttaaacccaaaatatttttttttttccaacataacccaaaatggaaaaacccccgtattaaaaaacaaggtggtatataaaaaaaggtttttaacggagaaaaactttttaaaaaagggcgattttggaccaaaaatgccaatgggaccaaaaattcatttggttaaaccgttggaaaagaatcaaaaattccaaggctggcccgaggcacattttttgaacccaacaccataaacccaagcccccaaggggatcccaaaaccgaattcaaccccccaaatggaaaaacccctctcaataaaaaaaccaccctggggatcatttcaaccaaaagatataaacccaatagtttatttgaaaa

SEQ ID NO: 124081 - DNA, 505 bp, Arabidopsis thaliana columbia
ctatgacgtcgcatgcacgcctacctaagcttggatcctttagagcgggcggcctttttttttttttttattggaaccattattggtttttaagggaagagtgagaaaaatgcgcaaaaccggtaaaaaacctcaaggtttaaaaaccacccccaaagggtttaaagggatccggccatggactttttttaaaattttaaaaacctaatttttaaaaaacctaaatgggaaaagtggaccttatgcccggttattaccttacagccccaatttttacttattaaaccaatgaaatgctgctttcacctccgggaggtttcctcacgccgccaaagtagtctcggaactctgactttccgtctgcaaaaatgttgtttccgctcatttcacggagtttagctgagcttaactgcttatccgcactaccaggtgattcatcgcctttgaaaatgccgttgcctgtgagttcctgaaacttctggttatgtatcttctttgatgtctt

SEQ ID NO: 124082 - DNA, 563 bp, Arabidopsis thaliana columbia
  unsure (1)..(563): unsure at all n locations
taggggccctattaaagattatgacgtcgcatgcgcccctacctaagcttggatccttttgagacgggccgcccttttttttttttttttttttaacccaatccgggttatatatggattctcaattttaccgggagagggtaagccgggataaattaacactcttttccaaggaccgtggctctgagatccaaacctcctttgtctgaaaagaggcgtgaattaccgtggtgcggggccacctctcttttgaggggaaaacggttataacctctatttttgccaaatataaaaccccccatggccaattgggaaaatcgcttaacctattgcccatggaaacaccttctaaaattctttgcctttcttctaggtggaanaaaagggataggaaaatcctctggactctggaggaccatccaatgctacaaggccttatctttgttgtttgaggagggtggccgaagcggcttttgcaaacaacccttcgtttattataaaaccatcccggttaaagcattgccctgaagccaaactagctgtttgactctttactcactgaa

SEQ ID NO: 124083 - DNA, 392 bp, Arabidopsis thaliana columbia
  unsure (1)..(392): unsure at all n locations
nnnnnnnnnnnnnnnnnnnnnnnnnnnnnnnnnnnnnnnnnnnnnnnnnnnnnnnnnnnnnnnnnnnnnnnntttttttttttttttaaaagcccgtctaaataaaagaaaccttcatagtggttttgacaggtatatgcaaggaaaaaaagaaagaaggaatcctttgcttttttaaaggtggtggttttttggagggttacccgcgggaattttttcctttttctggtcccggaaaaaacccaaggggttttacccctttggaaaaaattttgggaatgggccccgggaacaaaaacactttaaatttttattgggaatttttttggaaagggccttttgggggggccattcaaaaagggggccccaaaaaaaattttacgggggctttt

SEQ ID NO: 124084 - DNA, 482 bp, Arabidopsis thaliana columbia
tatgacctcgcatggaccccttccttagcctggattcttttaaacgggcggcccttttttttttttttttttttttttttccccaaaaattaagcctggatggacctaaattttttggttttccttaaggatccatggcctgggaccttaaggcccacttttggtggttggaaccttccaaaggctttccttaaaaccttggcaccattaaatatgattccttcgggtttttcctttggaggaaaataaccactttttttaattacttcaaacactgatcccggtttggttcgtgccagcctttttgcgttccatgctggcacattacggtccgtttctcccgtcacaatcagaacagggcatttgatttcttgaagccttttagacaatgggagttttttctctgagccattattatctgttagtgtagccaccgtgaattccacgagagctttgtcccatcccttggctttaagaggctt

SEQ ID NO: 124085 - DNA, 496 bp, Arabidopsis thaliana columbia
tgacactatagaatgactatgacgtcgcatgcacgcgttaggtaggcttgattctttaaaggcgggccgcccttttttttttttttggattcaacaatttttttatgataccattcatttttaacttggaattaaaaatgggccttaaccttaccatggggggggaagaagaaaacaaaaaaatggttttttaaaaataaaaaggttttcctccaaagttctttttggttaagaactttggctaacttcgtgtaaatttttccaaccaaaataagaagtaatggggcctttgtttctgggttgcctcgaaaaaagattcttgaacaatctggttggtaggaaaacattttgcatccaaatgtcattcccaaggcagttccaagtatgaatcctataacagctgctatccaacttataaaatattcttcatcttcttctggctctggcgccatgtaagattgttgcggtgttttcccatggatatcacaaattatat

SEQ ID NO: 124086 - DNA, 512 bp, Arabidopsis thaliana columbia
taggtccactatagaagatctatgacgtcgccatgcacgcgtacgtaagcttggatcctttagagcggcccgcccttggtttttttttttttttttttttttttttttttttttttttcttttttaaattaaacctcgggatttaacctttaccatgggggccattttcttgggaaaccctttttttttccatttgggaaaaccaaaaaaatgttcgggaaccccttttttggaaagggattttttaaggtgggttttcctaaccggaaagcaggaaaaatttgtgggccgaaaacccgaattttaaagccaagcaaaatcatttggggaaaaatttagaacccgaccttacttgtttttcctaaaatgtttccacggtttgatacaggtttttttttaaaagaagggacctttttagtttcttggaggccttgtagggaactcagaaatcttgtgagcatcaaatgttcgatttcagtttcaatctttctctggaagatgcattcaagttc

SEQ ID NO: 124087 - DNA, 476 bp, Arabidopsis thaliana columbia
tgacgtcgcctgcacgcgtacgtaagcttggatcctctagagcggtcggccttttttttttttttttggaataattacaattatatatcattattccaatcaacatctattggtgtggagaagtgggcttttattcattttataaaaaaatagaacactaaaaccttcttctaaagaagacatgtttccagagaaaaataagatttttttctctgagatccatacaagaaaggtgtataccagggaagcattggcacaagcacattatagtttcctttgagctttcgcatgaactcccaaaggtaaaagtcacgttatggactggaagccttaatgtggtcggttttgctgcagacctgtccaggcattccctgggggcaacatcgcatgaaaacgaaacccattctttattggcggctaaatacttgaacttaaagggtggcggttcgagcctcaaccttttgggcacttggtgg

SEQ ID NO: 124088 - DNA, 529 bp, Arabidopsis thaliana columbia
  unsure (1)..(529): unsure at all n locations
ggattgtannnnnnnnnnnnnnnnnnnnnnnnnnnnnnnnnnnnnnnnnnnnnnnnnnnnnnnnnnnnnnnnnnnnnnnnnnnctttttttttttttttatgtccagataagatcatcccatcttacatccatattcttgagagcacattatcacatagcgtagtgcgttaaaacatttcatttaaaaagaagaaactctttgttttcgccctgtgtgattaagcatcaaaggacgatgccatgttgttatatattccatgtgatgacttaatcttaaggatctagaagcttcttgggcccaaggttacgctcgttttccttgttgacagagactccgggagcttcttccatgtcaatatcgacaaccttcatgccttctggtatctcccactcaaactgattcatacgattccccaaactaatctggaccattgttggaccctatatactgcaggacacattctccggccgcctacaaacggaacagctcaagatgctgccctttggctaagcctatttatccgtata

SEQ ID NO: 124089 - DNA, 483 bp, Arabidopsis thaliana columbia
cgcgcatgcccccctaccttagcctggattcctttaaaccggccgccctttttttttttttttatataccaggttttggtggtttttttaataacccaggggaaaggtaattattccggttaatggaaaattaaacatgctttcactaatttggatggagttcttaagcggaacctccaagggaaccattctggagtcttgatgttccataaagggtttcttcaaagcggataatctcgttctttgagccataagcaacttgagttctatcgccaaggttgatgatggtcttgccaagcacggacttgtgtccatcactgctgaatccaccagcattctctatgagcaggccaagaggagccacttaaaacaacagcctcaactttgccttagccgtaggagaagtcacatttgtgaagattcctttctccttcacaataatctggttaacatcaggaaccattcctccggtgtatcgcagtg

SEQ ID NO: 124090 - DNA, 495 bp, Arabidopsis thaliana columbia
gccacttttaaagattcttgacgtggctggcccccgtccgtagcctggatatcctttaaagcggccgcccttttttttttttttttttttttttggaacaacagcacaaaattttattttttatccataacaataaacacattggctgccataaaaggttggaacattgactacaatttgggcaatattttacaacaaagtattattgcccgaacaataagaagattttgtgggtataaaaattttcagggcacatgagatgcgaggacttacattacattatataacattatgttcaatgtagaacatcatctcttctggaagaattggctacctctctcaccaattccggtaccttcaagactggatgagaaatgagaccttgcgcccggcctccacgttagttctttgagaagggaaaccaaagacgagagtgcggctgaaatttggctgtcttttatgttcttacatgatactactctcatgctctcaagc

SEQ ID NO: 124091 - DNA, 488 bp, Arabidopsis thaliana columbia
cactatagaaagagcttgacgtcgcatgcacgcgtacgtaagcttggatcctctagagcggccgccctttttttttttttttttttttttttttttttttttttttttttttttttttttcaaccaaacaaagaaaatccatttcccaataaaaaaacaacgaatataaaattcgattttttatttaccatcaaccacttaacagaccacaaaatgaagggtgtttacggattcaacacagattaacgggtttgtatgtatgatctaggcaacggggggggggggaccaggataagcaggaagagtgatgatccgcttgtctacaactggacctcccacagggaaatgggacagactctgaaagctagagtcattaatccccagaacctggggcactggatcatcgaaatagcacccaatcccggttggtgagatccccattgggtgtgcttccaggtacaaaacttgtccaacaacacccgtttccc

SEQ ID NO: 124092 - DNA, 481 bp, Arabidopsis thaliana columbia
gagctatgacggcgcatgcccgcctacctaagcctggattccttaaaacgggccgccctttttttttttttttttaacgtattaataacctggtggattggtccggatattggaaggctcctaagttattaccaggactggaccaaatggatggtaaacaaaaccgaatctttaattcaattcctaattaaaagggaccaaactggacactgttctatacagctttaatctgttgggttacccttgcggaatagatcaacgagtatgttccagattttgatcctcaaagcggaagcttcttccggtttaaaccacttcttgtgaatcattttcaaatcctgcaatgtcagcctttgaggagcctcttcgatgaaacgtcttatgaagaagagcagaaacagaccacagtcgaaatcgttcttctgttgtggaacctgcacttcagcttcgttgatcatattgggaaggtctctccatactt

SEQ ID NO: 124093 - DNA, 512 bp, Arabidopsis thaliana columbia
  unsure (1)..(512): unsure at all n locations
ccnnnnnnnnnnnnnnnnnnnnnnnnnnnnnnnnnnnnnnnnnnnnnnnnnnnnnnnnnnnnnnnnnnnnnnnccacgcgtccgggaagaaatcagatgataaagtgattaatttggatgaagatgaacctctgtctccaatggtagtagaggaagcatgtgaacttcctgaagggttaccagaagatatttactacccatcaagtgatcaaagtgatgggcgagaccttgttcaagtatctcttaaagatctgaaatgcctttcacctggggaatatcttacatcgccagttataaatttctacatcaggtacgtgcaacatcacgtgttttcagctgataagactgctgctaattgtcatttcttcaatacgtttttctacaagaagctcacagaagctgtttcatacaagggtaatgacagggatgcatattttgtgaagttcaggcggtggtggaagggttttgatctattctgtaaatcatatatatttataccaatacatgaagat

SEQ ID NO: 124094 - DNA, 444 bp, Arabidopsis thaliana columbia
tttagagtcataaggatggggtctttatggacgaagggagacacaatgcatagtgtgcttaaactgttgtgcacattgtgatccaaaagcttagcttatgtgctcaccaaataaaccgaccagatgcgtatgacacaagttaaccctaatcttctctttatggggggtcacacacacgttcatattatatacatacaaaaggatttttataaatgaaacaatggagcagtgttcttcatatcctaaggacatcttaggtacctttacttcttgttcctgatccttgacttgtactccatagatcatgttgttctctggcgcaagcccaacacatgccctaagaatgttttccagcattgcccgctgcttcgacagaacgttaaccaccggtgttccgggcgggacaagaggtgcctttgtgaggtaactggagttggtagcttc

SEQ ID NO: 124095 - DNA, 423 bp, Arabidopsis thaliana columbia
  unsure (1)..(423): unsure at all n locations
ccaagctctaatacgactcactataggagaagctggtacgcctgcagtaccggtcagattccgggtcgaccacgcgtncgcaatncactcatctnaaactcctatacaatggaacacaacacaaaattcagaaactgggcaactacggggccccttccttttttttgggcgggaaaaagggaattccccgcgggaaaatttggtaaagtcccctaaattttccggggggaaaaataggggccccgtcttccgaaaaagccccaaagggggggggccctaaaaaaaccgggccctttttaaaaaatccttgtggggcggccaaaaaaaaaatttttttttttttggggggaaaaaatttttaaaaaaacgggttttttaaaaaaggggggaaaaaaaatctttttttttttttagtgggggggg

SEQ ID NO: 124096 - DNA, 443 bp, Arabidopsis thaliana columbia
  unsure (1)..(443): unsure at all n locations
nnnnnnnnnnnnnnnnnnnnnnnnnnnnnnnnnnnnnnnnnnnnnnnnnnnnnnnnnnnnnnnnnnnnnnnnccttttttttttttttttttttttttttttttttttttttttttggaaccaatcttttattatcccaaaacttatgccttctgggggattgggtctaaagcctaaaaataattaccataagaatttcaaaccgactaaaaagcccttaacccattatttaagttaagggattaaaaagcccctgttttatttgaaaccaaaaccgaagaaaccccccccatggatgggtttgaaaaggattcaactcaaaacatgggcccaaatccctcaccctgatggggtgggaacccaacaaattcaaaattgggccccaacctgtgcaaccacccttttggaagtggatccctgggaaaaccattggttaaggatcc

SEQ ID NO: 124097 - DNA, 483 bp, Arabidopsis thaliana columbia
  unsure (1)..(483): unsure at all n locations
ctatagnaanattatgacgtcgcatgcacgcgtacgtaagcttggatcctctagagcggccgccctttgggttttttttttgcaataagccaccattggataagggagagcagtttagaagacacatacgggaaacagctgctcacacggagacgagactttgcgaagcacctatgacgtgcaactttgagaagcaagatctatgacgaggaaccatttgttacaggagttttttaagactctgagagcaccacaggagcatgccatgatataggactcgaatctgaaccacacaccgcatgcctatcagatgatggcaaaaaatggtactgctgcatcttagtgctgctgatcagtaatcactgacatgaatgacttgctttaacccagaagggcacttgaacattggccagaggccttggtaagagctcaaatactccggatcgctccattggatcaaactagggaactcctttgttagga

SEQ ID NO: 124098 - DNA, 521 bp, Arabidopsis thaliana columbia
  unsure (1)..(521): unsure at all n locations
cnnnnnnnnnnnnnnnnnnnnnnnnnnnnnnnnnnnnnnnnnnnnnnnnnnnnnnnnnnnnnnnnnnnnnnnccacgcgtccgattgagtcctcataaaacaatgcagaagtcacatatattgcatatgataatgcaagctgagatatatatgttactggttattctagaagataatgcgacagtaaatgatgtagtactaaagcaagtgacagatatacatactttagagacgagagcagccatcatacatgatagaggtaataaatcttattgagagaagaagatgcgatagaaactgtgttctaataacaataatgatgcaggaactaactctatagctgtaaatgacttcagcgatgggtgaaatgttgacgtagaaacttaaaccaggtctaattgaagagtcactaaatgtaatctgaatcaaatatatggatatgaataacaagagagctttgcagtggacaattataaagagatccctgcacgtgaagaagagtattaggtaaatacttaatg

SEQ ID NO: 124099 - DNA, 500 bp, Arabidopsis thaliana columbia
  unsure (1)..(500): unsure at all n locations
nnnnnnnnnnnnnnnnnnnnnnnnnnnnnnnnnnnnnnnnnnnnnnnnnnnnnnnnnnnnnnnnnnnnnnnnnctttgggtttttttttttttttttttttttggaccctaaaagcacacactttcattcagatcacacagagttagagagatttcttgaagtagaagaaataaagaacaattgttgacactataagggaagttttcagatggggaggttttcttgtatagtaaggaatgatcctatgatcttgccaccgagatctgggaatgtctcgcatccaggaagagaactcactttgccttgtttatcgacttgaactggatacttaagaagatgacctgacatctctgtgacttcctttgctgcatactgtccccaattcagctcactcaattgcctaactcgtctcacgcattccatgttctctggttcctcgaattcttgctctagaaaccctagatgttctgcccataacgacattctatatccaaagatc

SEQ ID NO: 124100 - DNA, 491 bp, Arabidopsis thaliana columbia
  unsure (1)..(491): unsure at all n locations
nnnnnnnnnnnnnnnnnnnnnnnnnnnnnnnnnnnnnnnnnnnnnnnnnnnnnnnnnnnnnnnnnnnnnnnnnnnnnnnccacgcgtccgctcgagagagagaaagagaaaacanaaaacacctggagaaagaagggaagaggaagaagaagattngtggcttagtcttttttgcaattcacaccccacatcggaaggagggatttataaaagtttccaacctttttcctttaatttcccaaaaatttggatccttaaaattttggaaggggaaaaaaaaaaccccagacccagaatttggggggaatcgaattcccaaaaattggaggtgggaaaaaaacacgtttcagccccctaaaagcctggaatttttaaaagttggggggggaaactttttttttttaaccgctttttaaacctttttgggggccttttgaaaaaaaaaagggggagaaaaaaaaaaattctggggcaaggggggggacttttaa

SEQ ID NO: 124101 - DNA, 495 bp, Arabidopsis thaliana columbia
aggtgacactatagaatgagcttgacgtcgcatgcacgcgtacgtaagcttggatcctctagagcgggccgcctttttttttttttttttataaaagtgcaatttcatttttaacatcgaatcctggaaaaacaaaatggttttggtaataccaaaagcggtttacttttggtggacaagctagcagcattaatgtgtgcccacatggtagcaagggaaaacgtgctcctttgaataagattgtatacgtgctataggtcagactgacgggatcacgcccgggttaaaagacatgtaaagcagggttttagttgggcccgggtgagtgacagcaggttagacaaagaaccctgatgtctctcttatagatggaccacccgcttaggcttctgtaagtttacagatatgatctgtttttacaaccttatcaaggcctcatgcgtctatgagaggcgcttcgggatatacatgatcgagcccaccgaggggtggtcc

SEQ ID NO: 124102 - DNA, 480 bp, Arabidopsis thaliana columbia
  unsure (1)..(480): unsure at all n locations
nnnnnnnnnnnnnnnnnnnnnnnnnnnnnnnnnnnnnnnnnnnnnnnnnnnnnnnnnnnnnnnnnnnnnnnnnnnnnnnnnnnnnccacgcgtccgccagatttcatcagcaattggacaagactactgaaactgcagatgcataggtnnntgcggtttggatggtccgataccttncagtatttctagcttaaaacaagcttgnacccgaccctgagaattagcgacttanggagggcaaccgtctttctttccccccaattggaaagaaattttttgaattcattaagcacgctttttcctgagaaaatgccaaataatttgggcccaatttccaaaaatatttttttttgtgggggcctttaaaaaacccaaaaaacctgggcccccagtttttaatttccccaagggggggaaatccttttctcctggtgtggggggggnntaaattaaaaaaaaccgcttttttttttttttgga

SEQ ID NO: 124103 - DNA, 466 bp, Arabidopsis thaliana columbia
  unsure (1)..(466): unsure at all n locations
cgcacgcacgcgcaccggagcnaggcaccactagagcggccgcccgcgggggcggcggcgccagagcaaaggggaccaacaacggaaagcccgggaagacggcgcccaagaacacacaaggggaanaggcccagaagccgaccaaagccagnccccgcccggcgggacacacaaacccgaacagagaacgcaacacgacatcttacaggggggggctcaaacccgccaaaccagtcaacgaacgccccggaaagaactcgaggcccgccaagaggaaaggccccgagcgcccgagccacagcgacgaggaggcgaggacacagccccaaagggccaccagggagcccgaaggcaaggaggaagaaggtcgccggacaacccaaccccgcaaagggcaccaccaaaagaacccatccggaggcccaaagaggctcctccagaccaaacaagcccaggccgaccggca

SEQ ID NO: 124104 - DNA, 472 bp, Arabidopsis thaliana columbia
tgcctgccccccttccttagcctggattcctttaaaccggccgccctttttttttttttttttttttttttttttgggaaatccggcctttcccttaattaagaaaagccagggtgccgccaaatccaaggttttagggttaaaaccggtggaagaaaaaaacggcctgatccccaaatttcagtcccaaaggtggataaaataaaagtttcttctacctaaaaaaaacaacctaacttttttttttttttttcagcctttgcggtttttttggctctagctccggcatgccttttgttagtgcgctcaaggcgtttcttgtcaaaagccttgaaagacttcatttctgaagtcagcttgacgagttccatggtaggcttctcacgtacaataggcaagtagtctccttgaacttgggtagcattagccaactcttctggtgtagagtcaccagccttgaccttgcgggcac

SEQ ID NO: 124105 - DNA, 483 bp, Arabidopsis thaliana columbia
  unsure (1)..(483): unsure at all n locations
aacgcacgcgggacggagccgggacccactagagcggccgacccacgcgggcgggaagaaaagaaaaggccaagcgacagggcggggcgaaaagaaacagaaacacacaagggacgnggaggcacgaaacaggcgcaaaagcgaggaagacagaaagaacaaccccaaagagggacacaaaggcgagaggcaacactttttttaaacgtgttatctacctgtactgtctaccattcagggtcttacataaacttgctcacattattataagaggacccttcttctcgcacaggggttttagccatctaggccagctttttagcccataaccgcctttgctctgccttctgacaaacaatcactttccttactggcttctgcgcttgggcccctaccaataaactttcctattttacacacaactggggggcggcaacggtgactcctatgttcaacacttttgggaaaaggttgctaattgag

SEQ ID NO: 124106 - DNA, 531 bp, Arabidopsis thaliana columbia
gcacgcgtacgtaagccttggatcctctagagcggtcgccctttgggggtgtttttttttttttatggatacatcgtgccactacgggaaatctatttaggtaactttataattggaaacaacgaaatgttactgggtgccacttatgtaaccttttatctagtacatactataaatggaaatgagcgtttaataaatccgacgcgcttttttttttttctgagggtgataaagaaattactgatcactgaagcttcattactaacaaatcatgttcatatgaggcacaagaaagccttataacctactcccacctctctttatgtcttttctgctatgcacaaagagaaatactctgataggtaaaaaaagcccaaagaagacctgcctctctacacctcttaaatgcttatgcaaattctaaaaacaaacataaccggaccatctattgctaatgacctaatatagataagaaatgtggaaggagggatattacatttggataataaccaatcttgcaatataacttcc

SEQ ID NO: 124107 - DNA, 477 bp, Arabidopsis thaliana columbia
cccccttccttagcctggattcttttaaaggggcggcccttgggttttttttttttttttttttttttttttttttttttaaataatgggctaaataataaaatcctggcggcctttaatggcctagattaatttaaatcccttttaataccccaacctttacattttaatttttttggggcttgattttaattgtaacaatttttttttggacttaaattttttaaagccttggaaaggggttggcctctaaagaaatccttaaaaggctaaaaagcagcccgtggtttgaacaatggcacctggggacctgttcctttaacgcgaacgaacgttagtccttatatacacttccgtccatcctccaacctgttttttgacataccaaggatcccaaggaagttgggtcctcaaactaagtcttgctagggagtatctagtagctgtcactggtacaactgaatcgacgtcaccacg

SEQ ID NO: 124108 - DNA, 456 bp, Arabidopsis thaliana columbia
tgacgtcgcatgcacgcctacgtaagcttggatcctttagagcgggccgcctttttttttttttttttttggcacaacatattttggtattagggcatgccattactcaagtagcaaaaaaatggtgtaagcgccaacctgggatgggaaccaaacccagaagccgagccctttggcaatctggtttggaggaaaaaaaaggtttattttcactggattttattccttaattttaaaccccctggtgcaaacttcagaccattgaagcttcaacttccacttttttcattttaagttccgaaaacggtttggggccaccacattggcaatggcttggccggaggcaaaaatccgggccagggcatggctgggggcacaattaataacctggaattttctgagaacaggcctaatattcaaaaggggcttcaccacatttgggttggcagaattcct

SEQ ID NO: 124109 - DNA, 373 bp, Arabidopsis thaliana columbia
  unsure (1)..(373): unsure at all n locations
nnnnnnnnnnnnnnnnnnnnnnnnnnnnnnnnnnnnnnnnnnnnnnnnnnnnnnnnnnnnnnnnnnnnnnccacgcgtgcggccacgcatgctactacatcgtnctgtcagtcttgaaggcctcgctggacggcgaaagtagagaaaggatagatgaggctctagtgatagacgacttacttctacagcgcaccaaaggtgatatcgtgcagcataaaggaggctcgctgactattactgcgatcggtgcgcctgtctgggaacgtgaactagctgaaggtcacactccacaccactgatttagtggctcttcattaggtgatgagacaactcagtatatgtgagtactactacaatcttgaagatgctaaca

SEQ ID NO: 124110 - DNA, 485 bp, Arabidopsis thaliana columbia
cccttccttagcttggattcttttaaacgggcggcccttttttttttttttttttttttccttttttggcctaaggggccaattggttgaacgcgaaaaggttggaccattccaaaccggccaaagatttccccccaaagaaatttaaaggagggccagccaaaacccttggtttattattaccaccactcttctttaacagaaaccaccactggttaattaaacccttaatataataaccaaccctgttattcaaagagcccacttttttattggatttattccaaaagcctggaaacccaccctggatctatacgcctttggttaaatcagggggatgtttttggatcaagagagaggagggcacacaaaaccagaggggggttggcccccacaggttataaaagcttgaagccatgaggattgaagatgtttaggtggaaaagctaaagccttatggttgagcaaagacaaacgggtgtttt

SEQ ID NO: 124111 - DNA, 501 bp, Arabidopsis thaliana columbia
tagggtgacctatagaagagtcttgacgtcgcatgcacgcgtacgtaagcttggatcctctagagcgggcggccttttttttttttttttggattacacaaatcaaaacggatttattagcaacaaccaaatatcttaatattttttattaggtaccaataaataccagctttcccattatacttaaaaaccctaaccttaaaaactcatttattagagcatttttggttttggggtattacctactacccttgggttacttcttacaacattacacacaacttaaacttacaggaggttatttattaacgaattccctttaaatttcttcattttggattccattttcttcattcttaaacggtctggtttgaatctaaacatttggggccggggtttcttaattcggcggtttaatttcaacaatttctttttcattcttaacaaaatccgtttttggggcctaagccttttttttttaagccttaactaaacctcatg

SEQ ID NO: 124112 - DNA, 515 bp, Arabidopsis thaliana columbia
  unsure (1)..(515): unsure at all n locations
nnnnnnnnnnnnnnnnnnnnnnnnnnnnnnnnnnnnnnnnnnnnnnnnnnnnnnnnnnnnnnnnnnnnnnccacgcgtccgcggacgcgtgggtttttctgatgatgatgacgaaaacaacaatgagattggtgtagagctcgatctcgaatcagtaatgtctgacacttttgtctctgtcgggaaataccgagtcagatcgggttcatccactatactaagtgctgtcatcgaaaagcacggagacattgctcaaaactgtaagctggaatcggattcaatgcgatcacgttacctcgagtgtttatgctcactgatgcaggaacttaggtcaaccccggtagggcagttgagcaaagtcaaggtcaaagagatgcttgcggttctcaaagacttggagtctgtgaacattgaagtagcttggctacgttctgttcttgaagagtttgcgcagtctcaagaagatgtagaaaatgagaaagagaggcatgatggtttagtgaaggctaagagag

SEQ ID NO: 124113 - DNA, 404 bp, Arabidopsis thaliana columbia
  unsure (1)..(404): unsure at all n locations
nnnnnnnnnnnnnnnnnnnnnnnnnnnnnnnnnnnnnnnnnnnnnnnnnnnnnnnnnnnnnnnnnnnnnnnnctttggtttttttttttttttttttttttttttttttttttttttttttttttttgggggaaanctataaaaaaccataacaccaatttgttttttcccaaaatttggtttccttcaaaccaaatggaacccccccccccaaattttaatcccattatttttgggaaatccaaaataccaagccctaaattggttcccttaacttttttaatcaaaaacccaagaaatttccagttatttttccaaacgggttacctaaattgggggttaactcgacggggggccgtttccaaaaccgggataaaccacagccacacgggggagcctttttt

SEQ ID NO: 124114 - DNA, 401 bp, Arabidopsis thaliana columbia
ttgacgtcgctgcaccgtcgtagctggatccttaagcgccgcctttttttttttttttttttacgacaatacctttggatgaaatcggaaagagctatccttcttgaatagcttaaaaaatcccaggggtcaaatggaaaaaaaaaacccttttttccccatccttttttagggcttttgtaacatttttttttttaaaggggggggtttaaaaaaacaaagggttttttccccctcaaaagggggcccccttaaaccctttccgccccccaagaagaagagaaatggtgggggggtttttccccccctctccccccctataggaaaaaagaaaaaattttttttttttttctcccacccacctttttatttctccggggggggggggggtgggggaaaaa

SEQ ID NO: 124115 - DNA, 543 bp, Arabidopsis thaliana columbia
cgcgagacggtgaagtattccggagagggggggggggggaactattggggacccccttcgaagattcaggacttcacaggcccccgtcacgtaggctggaatcccctgaaggggcgcgccccggggcgctcgatggggagaacttacagaggtgcccggcgaggggaggggggtaataggcggatagatagaacatacggtagtattagaggttgctgagctaggtgggtaaagagaagaccgaccccaaagggtcatgggaggttagggttagggagtcagaagacaacatgttttttcagggagtggagcgagggggtagcgtcgggtggggctgtcaagaagaaagttttttgcgcgccggccgacttaggaaagcccccctcgatgtcgcagcagaagaggagagagcctatatggcaagcatcgacgaggcgtaggccgcgttatttgatacgagaaggcgccgccgggcgttgttctccgaagagtagggaaaggcccataagacaggagtgggcacgctagaacagaggggaggga

SEQ ID NO: 124116 - DNA, 496 bp, Arabidopsis thaliana columbia
  unsure (1)..(496): unsure at all n locations
gatctccnnnnnnnnnnnnnnnnnnnnnnnnnnnnnnnnnnnnnnnnnnnnnnnnnnnnnnnnnnnnnnnnnnnnnnnccacgcgtncgaaaaagtcttcgacactctctagattncctttgctctttggtctggccatggaaatggcaaaattcgcaattttaacccatcttgttggccctaccttggaatgacattttaaggaaaggttttccacccaaagggggggaaaaaaaaaaacctggggttggagaaaattcccggatttttccggggaagcccaacaggggcgttttaaaaaatttttcgggtgtaacaacccgggaaaaaaacttttgggaaaaaaaactttttttttttgggacaaaaaaaagttttttaacccccctttttttaaaaaaatttttttaaatagggggcaaaaaaaaaaacagccattttttttttgtgaaaacccaccggccgccggaaaaaaaaagcccccccccataaaaaa

SEQ ID NO: 124117 - DNA, 381 bp, Arabidopsis thaliana columbia
  unsure (1)..(381): unsure at all n locations
ggtcacactatagnaatatctatgacgtcgcatgcacgcgtacgtaagcttggatcctctagagcggccgcccttttttttttttttttttttttttttttttttttttttaagaaacatgacatttaatttttgcataaaaaattgaaaacaagggagtattactatcttcacatgaaacggataatgatgttttcaatgactcgaggagagaaaacgtgtttcttacaacacaaatgcacatttgggacacgggccatattatggagatacaacagggcgggtcgggttgcggctaacaccaagtcccaaacccataggaacatgttcattctggcaactgcatccatagccataatagtaagtcaaagagggacaatg

SEQ ID NO: 124118 - DNA, 353 bp, Arabidopsis thaliana columbia
  unsure (1)..(353): unsure at all n locations
gatctccagctctatacgactcacttaaggaagctggtcgcctgcagtaccgtccagnattcccggtcgaccacgcgtncngttggactccttgacttacttttggccttggtttcacttgaaaaagaaaatttcctttggttttgggccttggttttcccggtcccccccgcgggggggggtttcaaaaaatacggcccggcccacaaagcccttgttttggagggaatcttcttttctcccccaaaaaaaacacccttttatccccttttggtggaaagagccccccccctgtgtggggggggggccaaaaaaaaaggggggtgtctttaaaaaaaaaaaaaaaaaaaaaa

SEQ ID NO: 124119 - DNA, 500 bp, Arabidopsis thaliana columbia
agaagattatgacgtcgcatgcacgcgtacgtaagcctggattctttagagcgggcggcctttttttttttttttttaacacaatcctcttgattttccttattcaaattatccagacccggggttaaggaaccaggagtggtttggaccaccaccttccccaccaccaccaccccacccttattaccaccattacccttaggacctaggaaggatttaggaccttcaaaggatttaaaccctcaggtaaggatgacaagattgggttttaacccaattggcttcagaattatcagtcttcttcactggcgtcttcttaactcttggcttctgcatcctccatttaaacatcaccttggtctccaagattccactgttcaggctcatcttctggggctcctatgggtgggggtatgtctgcagagtcccagtcgttttccccatcatttccaagctcttctccacggcaagagacctgcaaatgtggtcgtctccttgcc

SEQ ID NO: 124120 - DNA, 487 bp, Arabidopsis thaliana columbia
tgacgtcgcatgcacgcgtacgtaagcttggatcctctagagcgggccgcctttgttttttttttttttttgaaaccttcactatttgtcaagcgcatgtgcaaacacccaacctaagaaatggggatttcctattttccggacagatattatataaattgggccccgcgggcaacttacctttgagaacaagagaaaaaagggtttttttctccttgttttttaaacaatttgggaggggaaaaaggtttatatgtaaaataaaacaccccccccctcataaaaaaactcagagaatgatccctaagaaagcttaatgatttttccaaagggtcttgtggcgcgggcaaaatcaaaaaatagtaaaattgcgggaaaaggggtgctcttcaaggccccatttgaaaaaaaagcttctccgggaccctgccctcagtgttaaaaaaatcttttttccccttttaatttaaaaattccctgtttagga

SEQ ID NO: 124121 - DNA, 505 bp, Arabidopsis thaliana columbia
  unsure (1)..(505): unsure at all n locations
nnnnnnnnnnnnnnnnnnnnnnnnnnnnnnnnnnnnnnnnnnnnnnnnnnnnnnnnnnnnnnnnnctntgtgtttttttttttttttttttttccgaaactggaatgtgtcttatgaaaacaccaaaagtattaaggaagaattgcaaaatatacatacaaaaattatactataaaaatcttatgcaagtgagacttatgccttatttcatctaaagaagttcgaatgtctaatcatcaagattacacactgatttctcgataactatatacaatcttccggtccctttcattttcctccaaagccaaagcagcaacatgaggaagtgttgttcgggttacgggagctttgatgagtcggcgttcttgaagatccactcacatttgctccagaacttctctcttcacggactttattgaagatatgcgtgtatccgtcagctgatgacgggttgttctcgtcccagtcaccgaatttaggcaccactgtgactttttcaggactt

SEQ ID NO: 124122 - DNA, 510 bp, Arabidopsis thaliana columbia
  unsure (1)..(510): unsure at all n locations
gtgcactatagaagacnatgacgtcgcatgcacgcgtacgtaagcttggatcctctagagcgggccggcccttgggttttttttttttttttttttttagaagaaataaaccccagaaaataggtccaaaatattaggtccaaccgaaaccttaaaaaaaaaggttaaaaggttacccatggcttaacacccctaatggttaaagccagcgggggggaaaatttttttaaacttcttcattttggttcctttaagattgggattatttttaagtggggggattgtaagattgggtttaaccacattattggcaataatggctaattcaaggcttaaacttcctgggaatccggctcccgaaggggtggggctaatgggggttgaacccagaggggaaaaaagcggcctaaaagaaaaaaagtccagggtccttaacagactggtcgttctggtctggataagttttttttctcagctcatccatgatggagttttctgggttaatctccg

SEQ ID NO: 124123 - DNA, 505 bp, Arabidopsis thaliana columbia
  unsure (1)..(505): unsure at all n locations
gtcnnnnnnnnnnnnnnnnnnnnnnnnnnnnnnnnnnnnnnnnnnnnnnnnnnnnnnnnnnnnnnnnnnnctttgtttttttttttttttttttttttttttttttttttttttaagaaacatttttaatttttctattttttttcctttgccaaatttttccgatgtttgaaaccaggtcctggattcccgggagggggattttaaactgggtggggttttttttaaaacaccattccccccaagtgaaaaaggggccccccacttgagaactggccaaatacaattgttgttccccccctccaactcaaggaaaggaggctaaaatccatcctggtcccaaaacaattggggttaaaaaaggtctttaagaaaataataacccttctagattgaaacattgggcctaacccccacttggcctttttaaccttggaaagaaagttccccccttaaaacaaaccttttttttttaggccgttaaaagaccccagggcttttaatt

SEQ ID NO: 124124 - DNA, 400 bp, Arabidopsis thaliana columbia
  unsure (1)..(400): unsure at all n locations
agtcacctatanagatcttgacgtcgctgccgcgtcgtagctggatctctagagcgccgccttgttttttttatgacatgccctacctttaagtccaaatcaaagcaggttgatcctccggtggggtaacctacccggtgcttggttaaaaaaccaacctaatccaaaaggggtctctttttttttgggcccggatttttttaaaattttggggggaggggggccccccctcccccataaaaaaaagggccccgccccttgggggccccccctgaggaaaaacaaaaccactttttttttctaaaaaaaaggggtttttttcaaaaaaaaacccccccaacccctttgagaattttttatttttccccaccaaataaatacccccccccccgcccccccc

SEQ ID NO: 124125 - DNA, 536 bp, Arabidopsis thaliana columbia
  unsure (1)..(536): unsure at all n locations
nnnnnnnnnnnnnnnnnnnnnnnnnnnnnnnnnnnnnnnnnnnnnnnnnnnnnnnnnnnnnnnnnnnnnnnnnnctttgggtttntnntnnnnnnnnnnnnnnnnnnnaacccgataaagaaatttattaagagacacatgccggtttccaagaaatacagatttccgttcccatgcatttttctaaaataccttttatttgattaaagaaatggggaaccccctttaaaccttggcctttattttaaaaccaaggacttttggggccccattttttttttttttttggcccttaagaattttttaaaaaaaaaacctcagggaacaaaacacccggtggtctttccctaaaaaaaaaccccctggggggacccttttttttttttttttttccacgggtttttttaaagaaaggggagcctcttttaaaaaaacccccaaagtttttttaaaaaaaaattaaatatatattttaaaaaaaccatttttttggccgaaaggggatttaccccgggggggaaaaccccccccccccc

SEQ ID NO: 124126 - DNA, 483 bp, Arabidopsis thaliana columbia
ggggcacttttaaagatttttgaggtggatggcacgcgtccgtaggctgggttcctttaaaggggccgccctttgggtttttttttttttttttacgggcggaacctttcgggaagagaaatttaaagaacggagaatatccaaaactttggatttgggttcttttaggaattgatgggaattgaaacggacaaggagtgaaccctaattgtgcaaagtcttttttaagggctggtgtgtcaggtactacttacaatgcgggacttaaagacgggggttataaactgagaaatgggagcctttcctcttgcaccaggaggatgggaggtgctttcactacttgaaattcgaaaagaagtagtttgagatactaaggtttccataggcttggggagctgaaactaattatatgcagtgggccacaaccgtctgactctgggacattggattgaagggaaacctggtatggggacttgaaattca

SEQ ID NO: 124127 - DNA, 528 bp, Arabidopsis thaliana columbia
  unsure (1)..(528): unsure at all n locations
nnnnnnnnnnnnnnnnnnnnnnnnnnnnnnnnnnnnnnnnnnnnnnnnnnnnnnnnnnnnnnnnnnnnnnnnnccacgcgtccgaggagaccgtcgcaccgtcaaggtctcactactggtactctcctttgggtgaacagctttcacagaggcagccagcgactgttctagatcgccaaactaaagttgcacctgacattcagcatctcaaacagtcatagagactcttagatgcagcatgcattcgtagattacaacatgtgtcaaaggaatatagggcgctgacgccgttacggacatccaaaatctgttaccgagagctctgagctcgaccctgctgcaaccacacactgaactctgatcagctgtattctcagttgactagccagacctcgatcacccttgccctatgcactgatgactaccatgcctcgactctttacacctggtagccggaacatgggaacagtgctcagtactacatgtatactcattggaaattatacgcatgcgcaaccactggcatct

SEQ ID NO: 124128 - DNA, 288 bp, Arabidopsis thaliana columbia
aagcaccgcaccccctgaaagtaccgggaacggaattcccggttcaacccacggggtacggcgatcacacaatacatcataaaatggtatttatacaaatttcatccctgggcgcgacgtggtttgataagataagttaacctcccatactattccttcaaacctccaaccatgtattaagtaacattcattatttcatacaccaaggactgatccgcaatttttttatttattggggtggtttccacaaccacactcccacaaacaagccacccgagaaataccctt

SEQ ID NO: 124129 - DNA, 471 bp, Arabidopsis thaliana columbia
  unsure (1)..(471): unsure at all n locations
gaccaccaaagcggccgccctcggggggaggggacccaaaaaaaaccacaaaaacacaaacgggagcgcaaaacaggagcgaacgaggaggacagcccagcacgcaaccagaagcaacccaaaaaacccaccgagccaacccaagaaaagccgcaaaaccccgcaccaagaaaagcccctccaggttgtagggcaaanacccccccgcccaaacaccccacaaaacacccgccacgacaggagggcccaaaaaccaaaaggacgccccaagcagaaagagaacaggcccccgccaacacagaaaaaacgcgccccgcaaagaacacccaaaacacacgcccgcccgccaggccaanacccgcacaaaaccacaaaaccacaggaagaccaacgacaacagccgaaccgcggaccccaaccccacgcgaaaccgcaccaccccgaccagaccgccagccaacagcaaacccc

SEQ ID NO: 124130 - DNA, 540 bp, Arabidopsis thaliana columbia
  unsure (1)..(540): unsure at all n locations
gcctgcaggtaccggtcccgaattcccttttcgacccacgcgttcgttccaatatacaaaaaactattaatagaggaatatacctttatcttaacaccctaaaccaacctctttaaataacacaaccctcccaaacccccttctcccacaccccccactctactaacaaaactctcttctccacaccaaaccagacccaccccagtttttttttctgaggggggtctcccccnaacaccccccatatatcataccttaaacaaaaacataaccacaaacccccatcaaactcacatcccctcaccaacaacaaatacttacgtcacaaacctaaaccgctccactctattctaagtacccccacccctcaccaacaaaactatacataatacccaaccccaccatcacacaccacactcacacttcaacatatctaacgacattataccaacaacaacaacccactcatttatccaaactaccatccacagaaatcccacatgcgcccccacccactcacacctcattaaaccaccacaa

SEQ ID NO: 124131 - DNA, 204 bp, Arabidopsis thaliana columbia
ttgacgtcgcatgcacgcgtacgtaagcttggatcctctagagcggccgtccttttttttttgtttttcgataagataagggccttatggattatggaaccagaggaagcagcctttgcgactaatacgctgcttcgtaccttatggcttgcttaatacattccttatgtacagtgagagagaggagagctatattctgtgaaa

SEQ ID NO: 124132 - DNA, 226 bp, Arabidopsis thaliana columbia
ggggaagcccgcacgcctgcaaagtccggtccggaattcccggtgtcgacccacgcagtgcggcccctccataagccacagttgattaccacgataacttttttgtgacaggcatgccatctactaatcttcattgataataacaaaacatgaatattagttaatccgttttggggccagcacgaagatagatgtttaatctccctccctccccacattactctac

SEQ ID NO: 124133 - DNA, 360 bp, Arabidopsis thaliana columbia
  unsure (1)..(360): unsure at all n locations
gcgtacgtaagcttggatcctttagagcgggctgtccangggggttggttttctttaatccatggaaacactagaagttttattaatttcaaggatggctgagttttaccaccttggggagaaaggagaccaccccgtaacctttattagaacatggattcacctggccttaccactttaagaatgaacgggctttttctgggggtgtggacccaagaaaagaacttcggcaaagaatgccggccaaggtaacggcccaatttgccatccggggaactcctcctttggacaggtaacaattcgtggacaactcgggcctggttgtaaatgggactgtatcaattgacgtaagctcaatac

SEQ ID NO: 124134 - DNA, 514 bp, Arabidopsis thaliana columbia
  unsure (1)..(514): unsure at all n locations
aaacgactcactanagggaaagctggtacgcctgcaggtaccggtccggaattcccggttcgacccacgcgtccgcccacgcgtccggcgagaagacaacagaagggtacgggtgctagaagacgacagaagggtaccgtttggataagacgacagaagggtacggttgctataacacacacataggtactgctgccagaagacgacagaaggattttttctttagaaggtgacacaaggcggagaagagatcgagagaagaatatttttatctttttgggagaaaaaatatggctgctttagtgatgctctcttcggggacattaaaaccagttggtttcacggtggagaagacttgcgctagagggtttcccgcgctcacacgagctagtccctccttcaaattagctgccgtggggtcaagaagatcaagaccgtccttccctttgggttttacggctgcatggtcttttatgctggggttgtcgcctccttgcgaaagggcgagggatac

SEQ ID NO: 124135 - DNA, 418 bp, Arabidopsis thaliana columbia
  unsure (1)..(418): unsure at all n locations
aagagctatgacngtcgcatgcacnngcgtacgtaagcttggatcctctagagcggccgctntttttgtttttttttttttttttttttgcaacactagaagtcttataatncaaagtatgtctgagttttacacattagagagaaagagaccagcacagaacatttatangaacatgattacacatgccctaacaactttaagatttactgagccatagcactttgtgttgacacaagaagagcacctcncggaaagaaattccggcgagagttacnncgcccaaattgccaatccgggtgactcctcctttgtacacgtcaccactcgctgaccactcgttctcgttngtaataggactgtatccatcgacgttagctccatacttgtcgacgtactttgaaacaccgtatcccct

SEQ ID NO: 124136 - DNA, 521 bp, Arabidopsis thaliana columbia
  unsure (1)..(521): unsure at all n locations
nnnnnnnnnnnnnnnnnnnnnnnnnnnnnnnnnnnnnnnnnnnnnnnnnnnnnnnnnnnnnnnnnnnnnccacgcgtccgcccacgcgttcgtacggctgcgagaagacgacagaaggggtttgacccacagctgcagtttgatccacagctacagttgtcgcactccttgttgtagttcttctcgcaactgcaagagtcaccacatttgcaggaggagccacatccacagttagaatctgccatttctcttacttctctttgattgaataactatctggaggttcttcttcttctgtgatgaagnaaaaannnnnnnnnnnnnggggcaccccaaccaaccggggccaccagaaaaaagaaaaccgcgaaggccacccgccccgccacagaaagaacccccttaaaaaggaggcggcaacggcgacaaaaagaaaccgacaaggccccccccaccgaaaggcgcgagagcgcccgggagagacaaaacgcgcccccccacacaggagaggaggagggggg

SEQ ID NO: 124137 - DNA, 188 bp, Arabidopsis thaliana columbia
  unsure (1)..(188): unsure at all n locations
cgcacgcgtacgtaagcttggatcctctagagcggttgccctttgggtttgttttttacataacaaacttgctttcccagcttaagacacggagataacagagaacacagcataggtcatatcttgtatcaatcgatcaagagcaaagtacaaccaacacattttaatcgcatagagggcgggncctt

SEQ ID NO: 124138 - DNA, 283 bp, Arabidopsis thaliana columbia
  unsure (1)..(283): unsure at all n locations
agctttgacgtcgcatgcacgcgtacgtaagcttggatcctctagagcgggccgcctttgtggtttttttttttttttttttttttttttttaattttttggaatnnnngggaaaccaggaaaacccctatggttgctgggaattaacggaaataaccagaatgcttggattcttaaggttatggagagcaaaaaaaccaatgttttttaattttttttatgggaatttgaaccaatggaagggacttagtgcacctggtcccctcctttgaaaactccgaaa

SEQ ID NO: 124139 - DNA, 306 bp, Arabidopsis thaliana columbia
ggggaaagctccgtcacgcctgcaaggtacacggtaccggcaattccctggttacgacccaaggcagtacgccagacacgtagaataaaaaacgttaatcaataaaaactatgccttaactatccacacaatcttcaaagattatatttagctcaaaaacatccatacacacctacaaacccaccacgaattccaaattaagacatcacaataaataaatataaaaaatgtatacacacaaaaaatattaattagagatgtagacaacaccacaaagactatgaaagaactaacatatacaaaagc

SEQ ID NO: 124140 - DNA, 197 bp, Arabidopsis thaliana columbia
tctacaagagctggacgagctatgcacgcgtgcgtgagcttggatcctatagagcggccgacctacgcgttcgcggacgcgtgggcaattttacagaagaaagtgaaaagaaagagagaaaggggaagatgaaaatgtaaaaccaccatgaacgttgctcacactccttactatatgttttggattgtgcgatctca

SEQ ID NO: 124141 - DNA, 514 bp, Arabidopsis thaliana columbia
aaacgactcatttagggaaagctggtacgcctgcaggtaccggtccggaattcccgggtcgacccacgcgtccgcggacgcgtgggcaattttacagaagaaagtgaaaagaatgagagaaaggggaagaagaaaaatgtataaatcaccattaacgttgctcacacttcttactatatgttttggattcttcgatctcagcagtgctctttatggatttttttcaggtggggttcagcctcactgcttctaactttaaggccaaggttcttaattcaaatggagtccgtctcgagagaattatttgcaccatggtgtggtcattgcagagctctaatccctacatgggaaaaagtggctaatcctgccaaaaggaggtttgtcctgagagctgcattagatgcgaatgctcataaagccgcccggcccgaattattgcttgagaggttttgccctactgatggttttgttcctttacaagccgcaattggatgccatggggacaagatattgt

SEQ ID NO: 124142 - DNA, 310 bp, Arabidopsis thaliana columbia
  unsure (1)..(310): unsure at all n locations
gactcactttaggaaagctggtacgcctgcaggtaccggtccggaatttccgggtcgacccacgcgtgcgactgaatctgaaggttcggccactgggagattcccgtcgcggacagagccaaacgaggtgatgatggattcattatttgtgaactattcttactggctcttcatcatttaccattatcggtggttaaataagtgtaccattgtactctctgtcctgtagtggaaaaatgccacagatcctctgtgcgngttttctttgttctcttcataatttttccatacacatactaataaattcttt

SEQ ID NO: 124143 - DNA, 547 bp, Arabidopsis thaliana columbia
cgacgccgcctccaccccccgggggggagtaatcccgggtcttaaccattattttggggaagctggtacccctggcaggacccgtcccgaaattccgggtcgaacccaggggtccgcccagccttccggattagccggttggttggtggccaagggttgattaaccagggagaagttcaacttggcttggtccagaaccggaaggagagaaatttggttggccaatagagatttgaattaattggaggttaaccaaaagggcttattggattttgaagactttggagaatcactaaaggtttacaatcttatggcttcctataaggagaaaacggactttacctttaggcttcaccacatggactgccaaggtctaattgacccccaaaaggtgaaccaaatgttagatggcctttctgtggaatttgaaatgaacctggtctgggacacaatagagaggatcctggaccacacttttgaggccccacatggggatcgctatggaagaattgaaaaacaaaggggacctatccccttactcaaaccc

SEQ ID NO: 124144 - DNA, 486 bp, Arabidopsis thaliana columbia
acgtcgcacgcacgcgtacgtaagcttggatcctctagagcggccgccctttgtggtttttttttttttacccatatattatttaagttttgtgatttttactaacagggacattaaaaccaccattagggcattatttaacaacggggcatacttaaaccagaagacaatttttggcacatcttgggagacagaatctaaaaaattctccttggaggtttttcaaaaaccaccctagccttaccccgaaaaaaaaaacttaaaagcttcgccggtcttggttgcgccaactaaacctctaaagagattccttcggtaaccacccacaatctttattggaaaaaattttcgcacaagaatattactttgcgaaaccctttaacacaaggggaatcctcccttttgaaaaagtcttaggaaacctgaatcctctggacttgaaaaaaaacaaatggtaatatttctcacagggtttttcgcttttta

SEQ ID NO: 124145 - DNA, 483 bp, Arabidopsis thaliana columbia
  unsure (1)..(483): unsure at all n locations
cgattgattaggtgacctatagaagnnagctatgacgtcgctgccgcgtcgtagctggatctctgagcggcgnctttntgttttttgggcctgtaaaccaaaacagaagaaggggtggatttttttttcccaaccctcaaaatccaaatccattcccgggctcctttaaaacccaacccatttcttataaataattgccccaaggggggaaaaaaactctaaatttttgtttgggggggccccccctttgagaaaaaaaaattcctggggggagcccttttcccccccaaaaaaaaaaaccccccttccccaacccttgttgggggggatatttttggccccccccttttttttgttacacaaaaaaaaaaaaaaggggggggaaaaaacaccccccaccgggggggggggggcccaaaaaaaaaataaaaattggggtgggaaaaaacaaacacccccccttttttaaaaaaaccccccccc

SEQ ID NO: 124146 - DNA, 484 bp, Arabidopsis thaliana columbia
gccgtacgaagcttggatcctctagaacggcccgtccctggggggtgggaagccaaaaaaaaaaagggaaccaccccgagggccccggtcttcgcacgcggcgcggccagcgggccggggggagaatcaaaaaagcggagcccccgccagcggagaacccggtagggaaaaaggcccccttgtggatgtctctccacaccaaaacttcataggtgggggggcccccccaagaaagaaccccaccggaaaacagccgaaccccggcccccaaaaatggccggggcccaaaacaggaaaaggctcggacaacaaagcaaccatgcctttgaccccaagacgaaacactgaaatcccgggcccgagtcccccaccacaagatggccgaggacgtggaagcaagaccaccctccccacaactccccaaagaaaaggggcacaacgccgagggtgccaagcacccccaaggaagagagaaaaaacaccg

SEQ ID NO: 124147 - DNA, 518 bp, Arabidopsis thaliana columbia
  unsure (1)..(518): unsure at all n locations
nnnnnnnnnnnnnnnnnnnnnnnnnnnnnnnnnnnnnnnnnnnnnnnnnnnnnnnnnnnnnnnnnnnnnnnccacgcgtccgcccacgcgtccgaaggagcaagcgacagacaacgccatccttgagcagattcgaaagatggttgaagtagagattcctcaatctttatttgaggaacaaggaagacagttttatggagctaggcttctagagattcagggaaacatgaagcttaacgaagaccagttggcttctctttcaagtcaaaaagcagtaaatgagtttctagaaactcaaagagagagcatcaccaacataatcaagcagaatatagctgttggagatatcttcaagcgcgaaaacttagagttctcaacagatgaactagttaaagaggtcgaaaactcgatctcagaattcaagaaacataaacaagagttcgacgaggagcgtgtgaaagatcaggtacangagattttagaaggagcaaaagtgcttgaatggttaaaagaccgag

SEQ ID NO: 124148 - DNA, 255 bp, Arabidopsis thaliana columbia
ccgaaagcaggaacgcaccacagcggccgcccacccggaagaccccaaagacagagcaaaaacaaacgcaagaagacacaaaaacaacaaccacccgcgacacaccaaccgagacacagagaaggcccaccgcgccccacaagagccaaactggaacccacaaaccactacgacaccacaacaccaaaaccttccaccgaggggagacacccccaccgaaagaaagccgccaaaaaaaggaaaaacaacacaacg

SEQ ID NO: 124149 - DNA, 559 bp, Arabidopsis thaliana columbia
  unsure (1)..(559): unsure at all n locations
tcgtaagcttggatccttaaacggcgccctgggtgttccgttctggaaaaacacacaaacgggtaaataaactttccctaaggccccgcattagggataaaaaaaactaccccccatcctttnttccaaaaggcattctggtgctccaagggctggaaaaaacaacaactcttattggggtgaggccgagaaaacaatccagcaaaatcattcctgggtcctttggaaatcctacccttgaaaggaccgtgtccccctgccctggatcccggcttagccctgaaatctatttggcaacctctttcctgggaacaaccaactggcaataccacaatatttgtgctatgaaaaagtggctttcacggctacgacaggataaaacgtttttgattcccggcgagggggaattacttttctttccctaccccaaaacctgtaaggaaaaccagccgctgttccattcaatacattcccaaaggcttttcccgcccccctcccgaaccataaaccggtctaaaacggggacacctttggtgattccaaaacaaacttaccccga

SEQ ID NO: 124150 - DNA, 536 bp, Arabidopsis thaliana columbia
gactcacttaagggaaagctggtacgcctgcaggtaccggtccggaattcccgggtcgacccacgcgtccggccaggcgtaccgaaaacagaggacatagacggcacatttatatagaaccctccccccgagccctagtggaataaatactaccatcaggaccgagtggcctttgaaccatcatacactcaccatgcatgatactataccgttgagtggaccctttttttcgagaggcgcgaaacggtgtatattaaagaataatgtaaaaaattcagctcttcgtctttcacgagccacgtcagaccctagagcttctattattaccgagctccaaacaagatatttaattcttaccactagaagccgtgtccgcgaacccccccgccccgaaatgagatgaccctgacagaaaaaacttagttcgattgtagtaggtttcggccgccgccaggaacgagcggcgaatgggaccgctctcgaccctagttatacgtgtgaagggacccgcacaattacatataagaatcataaat

SEQ ID NO: 124151 - DNA, 576 bp, Arabidopsis thaliana columbia
  unsure (1)..(576): unsure at all n locations
tagagagctttgacgtcgcatgcacgcgtacgtaagcttggatcctctagagcggccgcccttngttggttttttttttttattttttttnaatgggttttnnnntnttttntttnnggtntnnnnnttttttttaccgccacacaagcgtctttctattggacttgcattcaatattagaaatgcatgagaacaggggaactacatctaccaactacacacttttgataggacatgtggaaaaaaaaaaaaccttcgtccctgactccaagcagaaaaaggaagactcatattgatttttccttttaagggntgttattacaagtaaaaaaaactctttactgagacgggattacttaacagccctgggtaagaaaacagaaagggtttctgggtgggtttttttttgaaaagggctccccaagccaaagacggaaatggaccctttttatccttaaactccttgacagcctaaacattaacggaaaatcctttttggttaaaggtatcaatagcggcctgggcttgtcaaccccttttactctgacaaggatcaaccaattaacaaaagtgggg

SEQ ID NO: 124152 - DNA, 341 bp, Arabidopsis thaliana columbia
  unsure (1)..(341): unsure at all n locations
gaagcgggaccacagagcggcgcccccggggggaaaccaaaaacagggagacagaaagcgggacaagaagaggacggcggagggccacacaggagaaaagaaacacaccaacacaanacggaaaccaggagaccacgcgccacaacaaaaggaaaaacccaaccgtgacagatgacgggacacaacaaaagcgcccccagacaaaagaccaggaaagcgaccgcccaaagaggcaacgcggagaccccccccgaagacaaaaaaagacccagccgaccacaccgaagcccaaaaaaaaaggaccgggacaaggcacggacgcgccaaaaccggcaaaccaa

SEQ ID NO: 124153 - DNA, 384 bp, Arabidopsis thaliana columbia
ccccgcccccgccaacacactaacgcccccgccgaagcccaagcaccaacagaaacaagaccgagcgcgaccccccaacaacggaaacgcacacccacaccaacacggaacaacacacccaaaacccgaaacgcgcccgaacgccccaggacagacgcccaacaccccgaacaaaccacccgcgcggccacggacggcgcgacgaacacgccggcaactgcgaaacaaccgcggcagccgatgcggcggcccaagaagccacaacgagccgcgcccccccccaacgcggcaacacagcacaacccgccggcccgacaccccaccgaccggcgccgcaggcgacagaccgaacgccaccaaacggaaagaacccgagcgaaaaac

SEQ ID NO: 124154 - DNA, 581 bp, Arabidopsis thaliana columbia
gggaagacccgaccccaaagaggaacgcggaggcaacaatcaccagttaccacaaaagaaaagccacaaaccgatacgaacgatccacagaccacgatggaattgatgttatcttactaaccgcttgacgaacggaacatggacagcgccacagccaaactccaaacccgccgcgcggtgcggagatcgcaacagaattcatagaagtactccctcacccccacaaactttttttccacgcactgcccttacacaaaccgccgctaccgtctctacgcgactccaagacataaataaacaacgcacactacgctccacttacatattaaatattacatcacttccgaccaccaacccaaaacgacaatccgcaacccaaatacactgtaccttaacattccaccccccgcattctcaccgtacctcactcatcagatcactccctccacttttttatatatgccatttgcctactcgtatctttttattaataaatttatcaaccccgcaccccaacaccgccctactatatatccgcgcaaaaaaaatcccctaacattaccccaccacaacaaataata

SEQ ID NO: 124155 - DNA, 393 bp, Arabidopsis thaliana columbia
  unsure (1)..(393): unsure at all n locations
ctttttttttttttttttttttttttttttttgttggaacaacaagtcatcatcgtgtanangttttatacccaaaaaatcccattgctaatatagaaaaataccatgtagcgacattcattgatttgagattcaatgaggattttttaatataaaagaactctccagttgatcaacatttgctcctctaccacatagttactccatctgaaaatagagaatatgcaacgcagaactcgggatttctgcgaccaaatccttttcggaaaccaactgtcaatgatgttcccaataggagattccctttgaatttgcagccatctgtctgcaagcttaaacccatacttagatgcagctgacagaagaagaggttcatcaaccctttctgaaaca

SEQ ID NO: 124156 - DNA, 339 bp, Arabidopsis thaliana columbia
ggaggttactcgggggacacaacaaaaaactagaatccttcagactactatgacggacgcacttttagggaaagctagggtacgccctgctggtaccagtgaccggaattacccgggtttgacctacggcgtacgccaacgcccagcgggcgtacactgcgcagtggcacgctgtgagatttattatggggtgtaccgaacgcagtaatacgttggtggtgtcctatcaaatgggagagagtggccctaagctatacgcaaatggatatattgattattttgggacaaacacaagagggacccaggcgtgtacaacatatttcacgccgtgggtaccca

SEQ ID NO: 124157 - DNA, 473 bp, Arabidopsis thaliana columbia
  unsure (1)..(473): unsure at all n locations
gtaagcctaggaacccccagagcggttcgccccggtgtaagagccctctaaaaacaaaaaacctgccgnccgcaggcgacagtcccccccaagccaaaacaacaagcacaggacccgccaacacaccggccagaccaaagcacaagagcgggcaaacgcccccgcacccgtcgcacacaaacggaaagcacccccctccttctaagaagtgggcacgcaacaagcacgcaagaccgaaaaaaaaccccccccgcgcgcaaaaaaacacagccgaagacccaccgaaccacagggcccagacgggaccccccgggaccgagcccacgaaacccagcgcgcaaacacagccgggcgcgcccaaaaaaaggaccaacaacacgaaggccgccgccaaacaaccaaaaccgtccgcggaaacacccaatccccccaccgcccaaccaacgaggccgcgcgaccagaacacaaacaaa

SEQ ID NO: 124158 - DNA, 322 bp, Arabidopsis thaliana columbia
atcacgactgatttatagggaaagccggtacgcctgcaggtaccggtccgggattcccggttcgacccacgcgtgcgcactgatctccatctacttacgatgctctacaggtaggtttataacgcgtgctgtaacgtgggtatatgttacttaccaaaccagagtacgtaccgcattgacgcgtagctagatacgagaagtacctatcaccggtattcggattagtgactaccctctatttatcaggaaggatcttggcaaccaaagattcgcagtcttcacagtataggtcgattggcggcgccgatgaacgctgccgcgt

SEQ ID NO: 124159 - DNA, 292 bp, Arabidopsis thaliana columbia
ggcgcacgcacacgtacagtgaccttggatcctctagagcggtcgcccttcatgttagaacattaagaaggactacacgttctagataccactgggaagacaccgtgcagaataccatctggctgtatgccacttacacataggcccgcaatgagctcgccagatctatgtgtaaaagaggttaaggccacatacctttttgtgggttgggcgccaacgtagaatagacgaatcgtgctgtgtgtgccgtgctaactcaccctatctaaaagagatggaggagaaggcttga

SEQ ID NO: 124160 - DNA, 291 bp, Arabidopsis thaliana columbia
tggggagcagaaaggaggaaagagtgctcgctcacttctgggggaagcttttttcgggggggcggccgccttcttctactgtttcatattattattccttttttgtccgatgggtttattttatctgtgagcccgccgattttgatttgaaattcgttgaatgcctttccagcagtcctttaatcaagaacggatcactgatagaataagcgaaggcaagatgcgtcagaatgatggaagagtctgcctgccgggaaagaatgagaggtagagaaacggtgggaggggggg

SEQ ID NO: 124161 - DNA, 433 bp, Arabidopsis thaliana columbia
acgtcgcatccacgcgtacgtaagcttggatcctctagagcggcccgcctttttttttttttttttattgtacagaaatttaattaatattgatcgggaaagtgttacaggtacattggtcatattaatacatggttattcgaccttattgatttaaggtttgattccctattccaaggggtaaaaaagggccgaagtcttggcttttattttcattggaagctgggtaacatgctttattcacgttccaagcaacctgcccgtgaaaggatgaacacccaacaagacatcagcaacttcttgttctttggtttccggaagccatgccacttccagaacctcgagccttcaatggtagggtcgatcaccaaccgaccttcaatgacatagatcactagacacttcattccaattacacaacttgttgcttaac

SEQ ID NO: 124162 - DNA, 520 bp, Arabidopsis thaliana columbia
gactcactaaggggaaagctggtacgcctgcaggtaccggtccggaattcccgggtcgacccacgcgttcggctgttttaaagctaatattgcctaggagaggaggtcacgcatttgttgcgcagcataccaaaaaaacaaaactggcacaataaaatgtatctgtgcgctcccagcatctcggttgacgagaggcccaccctttagaccctcaatttttttccgggggtaaaaaagaaggcggaggtgcttagaatgggacccccgccttttggacaatctggcgggacatcgccagcttcttttaaattataacttcaccctgctcagcaaaatgtttgacactgctaatcaccaggaatggcaggcccacgcagtgtgtgccgctaccgattaatagcatgcaacggagtaaaaccatatgtttccaccaacctcgaattccaaacaaccaagaacagcgttattttcataccgtcacacgccgatatacagccggaataataaagagttatctttg

SEQ ID NO: 124163 - DNA, 386 bp, Arabidopsis thaliana columbia
  unsure (1)..(386): unsure at all n locations
tagagactgcggctgccgtcgtagctgatcttacgcgctgngnnnnnnnnnnnnnnaaaacagctggggccagacgccaagctttacttttactaattgttaacgcttggaacagcaaagaaagacctcctttcgttccagggttaattccctggtttgggaactttttaaaattgggggttttggaaacaaaaaaaggtttttttggggattttaaaaatttttttttcccccttttttgggggggtgtggccccaaaaattttttttttaaatcccccctttttcccccgggttttttttttggggaattttttttggccctcccaaaaaaaaatattttttcagggaaaaggggtttcccccatttttttttttttccccccc

SEQ ID NO: 124164 - DNA, 629 bp, Arabidopsis thaliana columbia
  unsure (1)..(629): unsure at all n locations
agctttgacgtcgcatgcacgcgtacgtaagcttggatcctctagagcggcccgcctttttgtttttttttgatggcaacattggaacccttctgattatataattgcngttacaagcaaaaatttatttcatgaaatacatatttggtggaagaagaaggaacctgaccctattcattttcataggcttctggggtgtctaatgaaggtattggtgtttagaattatagcttttaagccggtattagctgcggctgagcccatgctgctgacctaacaggaccagccttcacttgcttcctaccaccaaatggcccaaggcctaaaaccccttgcctgccaagagatatttttcagacttcaaaattgatccatggctcagctcttcatgattattaggctgaggacccggtagccaattgggagcttgcttggtcccaattcccctttgcaggtaggagcagagaagctgcatgagcctgccgggcatgttccacacaggaggactttgngagagatatgtcctatgccgaatgtanggatccatgaccacttgtcctcccttctatatcacaccatggtcgatacttagatcaatcagtcttagtgacttctctcatagacctatt

SEQ ID NO: 124165 - DNA, 672 bp, Arabidopsis thaliana columbia
tatagaagagctatgacgtcgcatgcacgcgtacgtaagcttggatcctctagagcgggccgccttttttttttttttttccgaattaaatttttggttggaaatataagaaaaggttcaaaatcaggctaatggattacccactcttttttatttaagcttggaactcggaccaattaccaaattccacccccaaccaaactttggtccttagaattgtgccctagggagaaccaagggtagaagtaaatcaaaacttcattccttttcctccttaacccttttttgaagaatttatgaattgggcctaaccttacccttggcgggaaaccttctttcgggattttccggtttttttgaaggcttaatggagctttttgctttcagggctaagcaatactccctcgtagaaagcattgggctgcctcgtcaacccgctgtagcaaacgcagagcagcgccttctctgaagcaacctttaggccaatctgggtttagttctctgcaggctttagcatcagataaggcatgctcagcttgtcctagtcgcaaccagcagaggcttcggtttgagataaggtatgatccgttgggtaaaatcaattgcttgtgataagcataatagccatctgaaatcctttctggaaaggcgtcttgcctctggctttgctct

SEQ ID NO: 124166 - DNA, 389 bp, Arabidopsis thaliana columbia
  unsure (1)..(389): unsure at all n locations
nnnnnnnnnnnnnnnnnnnnnnnnnnnnnnnnnnnnnnnnnnnnnnnnnnnnnnnnnnnnnnnnnctttttgttttttttttttttattaattttttgttttgtnttntnnngnnngntnnnaaaagaaaggaacaaagccctctccgatattatgggcttttggcctaagacctttcaagggacattatgggagaggtgggaaaccccaaaaccaaacaagaattttttcagggccttaagaatcttggacaacagttgaaaaaaaaaaaccaggtcagagccctgacatgggtggggctttaagccaagtaaactgggctggatctaacaatgaaattactttaagggattttttgaaacaagaatttggttttttccatttggggt

SEQ ID NO: 124167 - DNA, 495 bp, Arabidopsis thaliana columbia
  unsure (1)..(495): unsure at all n locations
nnnnnnnnnnnnnnnnnnnnnnnnnnnnnnnnnnnnnnnnnnnnnnnnnnnnnnnnnnnnntcgccctttgtgtttgtgttttttttaaacactattttttggggacatacacaaagtttaacatgctgtccttcgccaatgaagacacttacataaatgtataagttttaaaacaaaagcaaatcattgcgacgtagatggagatagtttatccgaagaacattttgtaaggagtttgacaacctgctcgtgcgggccttcttagaattcgacactaatttgatcgacattaggtgaaatgacgttcttgccccccaagtcatgagccttcaaggactcttctgtccaatctgtgtgataaacaacggccaaaatggaaattgcacaagctagctgtgccccagcacgccatatataggcccatgaaccctaaaccccacacaaacgctaaaacaaccggaactggtgctccaactacataaaagggcgcagaa

SEQ ID NO: 124168 - DNA, 509 bp, Arabidopsis thaliana columbia
aaccgcccaatatggggaaggctggtccgcttccaggaaccgccccgaaattcccgggacgacccgtgggtgcgttccaataaacatacactaacaatggatggtacactactattcaggttactataattctaccaaacaaggtgactatctgaacattgtcctaagtgtcggaagacgagcataacaaacaattctcggcacctgcaggtttcctggtcggccaaacatcattctttatcgagggtggttgtaaagaccactgacaattcttcgcacctgtataagagacgactcgcttacgccttcccgcctcttttataacgatccttaagtctatttgtttgttatctaatattaatatggtgttgtcttgtatctcttgtgctattcgacactccgggaacgccgagctctattctgtatagaaagagcatttgcggttagaggaatccctttgttgctcctctttctttgacgtcgctgcctgcctcactatccgattattc

SEQ ID NO: 124169 - DNA, 626 bp, Arabidopsis thaliana columbia
  unsure (1)..(626): unsure at all n locations
acgtaagctcggatcctctagagcggtcgccggggggggaaagccggagaaaaaaaaacgagaagagancagcgggcacccacacaaaaaaagcccgagctgctatccatgccatatgccgcagggaagctacttgaaaaaagaaacgcgtataaacacaggaaacaacccagacgcgtcaggacacaaaacattcctgnctgcttgtttggaaacacanaaggcgcaaggggggcaaccaagaaaccccccggaagcggaagcaccaaacccacccgcctgggggccaaaacacggaacaacccaagacaaggggcagggccaacaaaaaagaccacaaaaaaagcaccccccggacactgactaacagccgaaataaggaccgccgaccggcaccaaaagggcaacacagaacaccctacggggaaaaaagagagacaccgggagggcccccaccagaccagggaacgaaaaacagcagacagatcccggacccacagggccaaccaaagaggaacccccaaccacgcgccccgaaatccggaaaccacgagcgaacccggacacaaccaaagaacgcgcaggcacaacaaaccagaatacaaaccgaaggaaaaaaaaccggc

SEQ ID NO: 124170 - DNA, 601 bp, Arabidopsis thaliana columbia
  unsure (1)..(601): unsure at all n locations
cgcgtacgtaagctnggatcctctagagcggctgctctggggggggaattctttttaatacaaatctgggatcacaagagatagatctgagggaatgtaagcacatggaatttagaaataagaatggccttaagaaagaagtcgcccaatagtgttacagaatcactaccgctcggttngngatccagaatttctgataagctgttctcgaanacanncagcagagcagaagccaaaaacaatcagagtatgaataagggtagccaatatttcggttctgagctgctggtgcctctgcttgaagcgtatttcctctctataacctgccagaagacgtggagtgcccattcggaggacgggggtacgggagattcctttaggaccgacccccctctgggcatgggcagcgcaactcatccgaacaatggaacaccttttaactccaactctcctgaggtcccataaaacaccctcggcttccaaaaaatacccggaggtccaaggcaagggctttaagacacagcgcccctcgaacaccacctccagaaaaaaggattgccccctgtgcgcttnaacacccttctgggcatttccccgccga

SEQ ID NO: 124171 - DNA, 557 bp, Arabidopsis thaliana columbia
acacgactcatttagggaaagctggtccgcctgcaggtaccggtccggaattcccggttcgacccacgcgttcgtacggctgctagaagacgacagaagggtgccgggtgcgagaagactacaataagggtactcgctgcttatcatacatacacaatggtactttctggccgagaagaccatcataatgtggttgttatagccgacacacgcgaccaaattcccggtatttttttttatggggggtgttcgacagtgccaccttatttcgttgcacgcaactcttacattgtgagccttctcgggattttgttttggtaagaccatgcgttttttttttatctgccgcctcttccgagtacgtgtgtctgtttcataaatgtttctttgtatatccctctccgccccgactcggcgtgctttaacaatcgcacctattcttacgcgccgctgtttcccttaaattgaaacattgcacgcgccgcgcatgcatgcgtcggttgttgtggccgacttctattcgccgacacgacacatcctgcaatgtgacgtaagat

SEQ ID NO: 124172 - DNA, 119 bp, Arabidopsis thaliana columbia
aaacagcgccacaccgcgagcttgaccagagcgcgcttggggacccaaaaaccaagtgtaacgcaaagcgaaaaacactatcgcacgaaacaccagcggcggggacgaaccagccactg

SEQ ID NO: 124173 - DNA, 180 bp, Arabidopsis thaliana columbia
  unsure (1)..(180): unsure at all n locations
gaagcnnggacctctagagcggcctcctnngnggnaagatccttaggattataatgccatttttattggagcaacactaaaggagtgtacatgtgaattcatatgatctaaaaaaatccagagtagtcaacagcgtagatgctgagagagagaaaagaaacagtacctaataaataacaa

SEQ ID NO: 124174 - DNA, 430 bp, Arabidopsis thaliana columbia
cttagagagcttgacgccatgcccgtcgtagctggatcttaagcggcgctttgtttttgtaaagcctgagaaaaacaacttgattggcattacagagcaaaaaaaaaaccgagatcacctcttttatccttgaaacacctctttgtcaagcttccttataacctagttacacacaaactcgacaaactaagttgactattacaagtggaaaatattatacttcaattcaagtagaccacctgctcttcttgtaatatcacgcacacgcataactttctctttatctccccctatttcttggctggaccactactctgacacccttgcacagtggcttgtgggatccacccacactatagcttggatttttaccccgctgacacatacagcttgcgagcggagctcgatctctttttgaaagttgctctat

SEQ ID NO: 124175 - DNA, 214 bp, Arabidopsis thaliana columbia
actctagaagactatgacgtcgcacgcacgcgtacgtaagcttggatcctctagagcggtcgccctttgtgtttttttttggaagaaagagcgctgatatactgggaaagtccgtacgtaaggacgttcagagagatgcgattgacacgcaaacactccggttgttgggacccaaaagcactctatgagattcgcaaccgttacaggatcactc

SEQ ID NO: 124176 - DNA, 304 bp, Arabidopsis thaliana columbia
  unsure (1)..(304): unsure at all n locations
nnnnnnnnnnnnnnnnnnnnnnnnnnnnnnnnnnnnnnnnnnnnnnnnnnnnnnnnnnnnnnnnnnnnnccacgcgtccggtcaagagaagatcttgcactgctatctcgtgcttccttaagtgctgtgagagctcacatgaaactactagaccctcctgccagcttctgagatatgatgccgatggtgaaactgaccgtgaccttatactagagcctacgagacgtgaccactccaaggtaggagacttatataggtgaagcttgaacatgtgccactcgaccgtgttttaccctatggtatt

SEQ ID NO: 124177 - DNA, 530 bp, Arabidopsis thaliana columbia
  unsure (1)..(530): unsure at all n locations
gnnnnnnnnnnnnnnnnnnnnnnnnnnnnnnnnnnnnnnnnnnnnnnnnnnnnnnnnnnnnnnnnnctttgtggtttgttttttttgacaattatataccgacattttccaatagactcatcaaaaatacaacaagataatttcttaaaacaccatctaatgttcatcaagtgaagacggcgcgcgaagaaccagggtactatgatgctttacagctgcatcaatgttgggggggcgaatgaaaccccataattacgggtaaaccgctacataaatggatgggctgtgtgctttcctttggaaaatggccaatacatagaaaccttatccattgcacaatcctcttgtggttcattaacatttgaagccgagagactttgttttgtggatactcacgagtgcaacgatgttttggaggttgcataatgagaaagaaacccttctagaacttcttgtgatctttttattctacaccttgttaatagggagatgtgcaatgaagtgagaacaagcatgttgagcttcagccg

SEQ ID NO: 124178 - DNA, 517 bp, Arabidopsis thaliana columbia
cagctctatacgactcactttaggaaagctggtacgcctgcgagtaccggtccggaattcccgggtcgacccacgcgttcggttgaagatgttgaaatagcttacagagatggtgttgcctgctctgctgggaaaccttagaaagaaccagaaactggaaatgaagcccaaaaaagggttggaaaacctattccaatggattttagcgaaagaaccgcccttttgagtatattaattccaagtggggcaaaaaaccatcattgggtagtaaggcagggagttttgccaggtgccccttaaaatcaagcccaacccagccacacccttactggttttcattatgaaggaaaatgccttgaaactggtcattccacttaaggaagggaaggtggccattccattggtttggccaatggaataaaggccgaatctttttaagggtcttaggattcttgagaatcccaagggtccttccaaaattaaaaagaaggagggtgaccggcaccttatggggaat

SEQ ID NO: 124179 - DNA, 437 bp, Arabidopsis thaliana columbia
ctttagaagaactttgacgtcgcatgcacgccttccttagcttggattcttttaagcgggcggccttttttttttttttttaataccaattttgggcgaccattatggtgaattaaaaattccggatttggagaaggttccatggagttaaccaaccagggaaaggaaaaaattggattattaattgtgccccaaaccaaacaaggccttaattaaacttaatcttaagaaattttggtttaataagcaaagaaacccccgggttaagtaaaaggttaacattactttttttggttctttcacagctttttcggctttttgggaatttgtttttgtggcaccctttgttcctttggtccaatgagggctttaaggttaaaagtttttaccttcgcgttgagattcagcaggaccggattctctcaggtttccagtta

SEQ ID NO: 124180 - DNA, 458 bp, Arabidopsis thaliana columbia
agctttgacgtcgcatgcacgccgtcgtaagcttggatcctctagagcggcccgcctttttgtttttttttggttgtgaaatgcgcttatttacctgggaaattccgtaccggttggaccttcaattatatagctttgacaagaccttgaccttcggttgaaaagaaacccagagaaatcctatgggattctcaatccgaaataggattacctgaagtgtggccatttggttagagagccttcttcaccttgaaaaaggtggagccgtcattggtcggttggttcatggctttcggggatgcacaggcccccggacaactttattttttaccacctttattggttgggccaaattcttggaggccctccaacctggtggtaggatcctttcaccccttctttggcggtcctcggcaggtacttccgagtaatggcctaaccaaccggctatacccttg

SEQ ID NO: 124181 - DNA, 501 bp, Arabidopsis thaliana columbia
gacgtcgcacgcacgcgtacgtaagcttggatcctctagagcggtcgccctttgtgttttttttttggaaaaaaacagtgtctttcacaaaggaaccagtgcattgcgtaccaggaagagcacaaccgtttggcctcgagaaaatctaacagtacaaggtgtttgaaagccaaccagggaggggtcctgccgaaaacacaggcggtattttttggagggtgtgcagaaaacagggtaaacacgcttggcgaatttgggggaagatgcattcttaccaggttgtgcagagattcatgctaactgggacaaatatagagcccttaaacaaggaccagctgttgacccaaatcctgttaggggtaaccaatctaggatttgagggcctccccggcctatgataatgcttgggggggccattcgttggagggcatcttctattttatcacctgagggatgagaaccgattttgaccaagacacaccctgggacccttgggctttt

SEQ ID NO: 124182 - DNA, 569 bp, Arabidopsis thaliana columbia
atacgactcacttgagggaaagctggtacgcctgcaggtaccggtccggaattcccgggtcgacccacgcgtccggaacgacccttgtttaggagccaaacagataacttctccttgtggctgctgggctccttcctctggccctggaaccgactgatttatataatcgccttctgggatctgacagatggcgttgactaacaccatcggtgccgagtcctattatcctctggcacttatcctgcctacgtctgactactcttgttgcgatggttacccactattccagatatcatcgggtttctgctggatagagccaccgatccgcccgcaagagtagagggtctccatcagaactacccggttttgggacataacacctaaaacctctctagtctcctacagtgatagcggctcgggggggccccccttggaaagtccccctgcgggccggatgcgatacctttacccctgcccatagttggcacaagaggcactcttcctgttaaaatctgatggccttggggggacgtttttcgcaccaaaagcccccctctgataatatgttt

SEQ ID NO: 124183 - DNA, 182 bp, Arabidopsis thaliana columbia
  unsure (1)..(182): unsure at all n locations
cacgcctacgtaagcnnggatcctctagagcggttcgccggggggttaaagccttttaaaaaaaaatattttttcatnanggaggagacttatcaaaaangcaacaagatgagtctctttgaaaaccaaccagcgtacatcaagtggagaaggcgcgcgaagaaccatggttccatgacgca

SEQ ID NO: 124184 - DNA, 451 bp, Arabidopsis thaliana columbia
  unsure (1)..(451): unsure at all n locations
gggaaggcaggacccccggcaggacccggcccggaattcccggttcgacccaggggtccggccaccggaacaaggactcccggccgcagacaacactagtgtgtttctaatctctattcgcttaaacccctttttcgaccactattcccgttccgaacctgcttgggaagataaaccgcaagacccacacagcttggccaatgccccaattttattcggggagggcctngaaaacaaggaaatcgctaaacggctaaaggaacccttaaggacctaaatctctcgcggtatgaaatctcccaaccactgccctatcgggaagggaaagaaaaccctgaagtcggaaccaaacaaaagaacgtcgacctgattacgctatggctcccaaataatcctcttccgtgtggcggaatcggctcggtaaacaatatcacactccaagactatgaaa

SEQ ID NO: 124185 - DNA, 438 bp, Arabidopsis thaliana columbia
accagcccttttagggaaggctggtccccttgcgggtcccggcccggaattaccggttcgaccacggcggtcccgacacaaaaaacaaaccactacatctggctgtgtcactaaacacgacttctgctacttcttcaaaacaagttctctctgcatatgtctaacaggcggaggagaagtcttaacataaattcgcccctcctctatttgtgcgcccgccatcgctcttatttatctgcctgaaaacccttacatactaacacgtaaagaaaaaccactcgcacccccacgaatccccacacacaacactaacctccccgatattcaccacaacgttatgatattttactctactctcctttaagcaccccctccccgcaccccctctcacgtatcgtcaccacacctccaaccccctaacagcttcacgtccgtcac

SEQ ID NO: 124186 - DNA, 316 bp, Arabidopsis thaliana columbia
  unsure (1)..(316): unsure at all n locations
cgcacgcacgcgtacgtaagcttggatcctctagagcggctcacctttgtgtttttttttgatgtggagtagaccaatctacaccaacactgagttataagcgaaccacacactggatgcacaaggtgattttgatctcatggtctaggtgacaaggacagtaccctgggattcacagtatggacaaacgagaggcacgtgttttttatcagggttgatgcacnggtgaagaggtcaagaatgtgcgacgtcgctctcatgatgcgcagccaaggaattggcctgcatatcatacagggcagagtgaatgacacct

SEQ ID NO: 124187 - DNA, 439 bp, Arabidopsis thaliana columbia
ctaaacgacccataaagggaaagctggtacgcctgtaggtatccggtcccgaattctcgtttcgaccatagcgtccgacccgacaaaaaaaaccaactctcgcagtaaaatactattactcatatactttcaaaccgcataataatctataaagaggacaacgacttaggatactatgaatatgttatataaataaaattacttctgaagtccattgcaaaaaaaaaatatttatcttaaatgatggatcaagtaaaacttactatttaatagtctatcaaacacaataatgttaacatattcactatacttacccatctaaaataataaatattaattattatataacaaacacaaacaaccacactcgatcactatcgataaaactatctgtaaacactttcaaccgcagcacttctttacttcgtaaatcgttaca

SEQ ID NO: 124188 - DNA, 479 bp, Arabidopsis thaliana columbia
  unsure (1)..(479): unsure at all n locations
cacgcgtacgtaagcnnggatcctctagagcggttcgcctangggtttaattttttgaaagaaacaatgtttttcacataggtgcatgtgaatagtgaagaaagaaacaaacaaagaatgaatagcgaaacatctacagtacttggagttgcaatgcaaatcaatgcattgtcgtgtgaagaagatagcnggattttgttgggtgttttgcngncaacagcnacaacagaanaacaaaaanaagggccagagacaggagcagcggngncagacaaacnccaggcngcncggaangcncngggaggacnacgagaagaagcacanccggacccagcnccnccnnggcnaaaccaaaagagaaaaggcgnnncncgnccccacaagagcaaacaggnanagaacaacggccngagggcccnnnacaagnanancacgaggaggaangnngagnggannccccngagcacgaaacacacgca

SEQ ID NO: 124189 - DNA, 444 bp, Arabidopsis thaliana columbia
  unsure (1)..(444): unsure at all n locations
gcacgcgtacgtaagctgggatcctcttgagcggccgggctaaacctnntgaaataagagatttctgaacatatggcgccaggcaggagctctgaattcacaaaataaaactccatggaagcaactatacccgaaatcgagaacataactcctgaggcgcaaaacatacccaatctctcttctggaggatgttgggnaaanaggaaaacatgaaggaaaagaaacatgcaatacatagggggggggcatgccaaccaacaacatgcgagtcaaaactcccattgaaacccaacccctgagagaaaagtccgaaagatgagggataacaaaagggcggccacggaggagaaaaaaggcaaagatgaagagagggggcgcaataaaacagcccctcctggggggtgggggagggcaaaaccctgacgtccgcctaaaaaacgggag

SEQ ID NO: 124190 - DNA, 524 bp, Arabidopsis thaliana columbia
  unsure (1)..(524): unsure at all n locations
ggacccggcccggaatacccgtttcaacccgcggtaaagcctccccaaacaaaactatttttttccaccgagaacacccccccaaaaccaaccggcacccccccancgccaaccttaaacggctaaactttgccttggtctccggagggggacgacaccctccacaccgacacaaccccccagcttaaataacggctgttttcaccccccgccccgcacacacctgtcaaaaaacacaattatctccccagncccggctgtggcgcaccccccctcccctccggaccccgcacacccccctcacccaacacactccacacaaacaaaactcacaccaaaaatcccacccccaaaaaaccgcaaccccacaccgcgcacacccaacacctcttcgtccccaaacacctaaccgagagagaaacccactacccaacccacccaaaataaaataatcacaccacccccccccttcccagcccacctccccaaccgcggcccaaaaaacacgctccacccccaccccc

SEQ ID NO: 124191 - DNA, 459 bp, Arabidopsis thaliana columbia
  unsure (1)..(459): unsure at all n locations
acactcatagattactatgacgtaccatgcacgcgtacgtaagcttggatcctctatagcggccgaccttagcctncgaatataattttttttatgactnnccatgtgaaactgttccataccgaacgagggccaaaatacccactccaacaaacaaaacatggttctgcttcaatagatcaacaaaacatatagacttcatgaaaacttttttaaattcaaggatttacttattattttgaaactgttgaccacaatcagatcgattatgagcaattaccacataccacagactaattatcacttaacatcattgcaactttgtttatggaacacttcgcacttgttttgcttttaaaacaataatgtttggatcagaatcccagccgagctttctggaggggggaacagaaaaacgagattttgccagtgcattaaatcgaaaacaatatgggttca

SEQ ID NO: 124192 - DNA, 402 bp, Arabidopsis thaliana columbia
aggaaacgtccctgagtaccgtcgatcccgtcgacacggtcgcgctaaaaagaactttagaccattggcgacttatatattaatgaccgggggaacttcactaaatggaccttcttagaagggtttgttcgaaaacatcttggtcgcctttttctggatattaactaaccccgggatcttccggaatagactgcttttacttaataaaatcccattcggccaaaaaacctgatttgattctaagaaaacaaattgccaacttaaccatgcaaacatgtgttggttatggaaaggcaaaaaaacaaaaataaacctttgttcaccttcttctaatttcacaaatatgcatctcatggaaaatttccaatggcttctactaaacatgtgccatcagggttacaa

SEQ ID NO: 124193 - DNA, 302 bp, Arabidopsis thaliana columbia
  unsure (1)..(302): unsure at all n locations
ccccccgcaggaaccggnccggaaacccggttcgcccaggggaaaggcgaaaaaaaaacagatttttgggccggaggaggaaaacgaccgggaggacggcccgcccgcaccacgccccaccagagaggggaaccccgcaccgggcaccagaaagcccccgcgaaaacaaaccgacgccggccctttaattttggggtgaggggggnccccgccgggcgggagacctgaaaaaaaacagctcccccgcagagggggggaggacccccccccgcacgaacaggaaggaaggaggaaccggccgc

SEQ ID NO: 124194 - DNA, 452 bp, Arabidopsis thaliana columbia
  unsure (1)..(452): unsure at all n locations
ctatgacgtaccatgcacgcgtacgtaagcttggatcctctatagcggccgcccttttttttttttatttttttttttttttttttttttttntctttttagccaaatgttagatggggtaattggaggagtttaccaaaattaacacaaattatactgggcaaatgggggtcctaaaacaaaagaaattcctgcttttgaggcttattgtggaaacgcttcatctaaaaatttaaaaaatgttggctttatttccaatttgacccccctggaaacaaaaggaaaattcggtcaattaacaaaagaatcgaatgtttccgaaattaccgatcgcctaggtcaaccaggaaatttcggatcggtaatttcagggcctcctgtttttacccataattactcgttttagaccttgggggaataaaggtttttccttgtaaaatgggttaaacagc

SEQ ID NO: 124195 - DNA, 323 bp, Arabidopsis thaliana columbia
  unsure (1)..(323): unsure at all n locations
atccgactcatttagggaaagccggtacgcctgcaggtaccggtccggaattcccgggtcgacccacgcgtccggcaatttccaatgccttcgtttcttttactatttgccctgatgtttccttggggtacaagcatgtcttttgggaattgagagcaactttgtttaaattttcggttgcaaaatttttagaagaacctctgattttngttctttttttaaaggatccctctttgtacagcaaaactcttgttaattttggttcatcaccccaattatcaaatcttatttttggcttanaaaaaaaaaaaaaaaaaaaaaaa

SEQ ID NO: 124196 - DNA, 510 bp, Arabidopsis thaliana columbia
  unsure (1)..(510): unsure at all n locations
cccgaaggccgggcggaaaaacttttccggccgggggaaaagccccaaacaaaaaaaagttttttataaaaaaagcggaccaaggggcagcccgcgacagaacaaccaaccgccccaccagaagaaggaagagcacgccccatgacaccgcagccgtgcaaccaacgcgcgaagacagacaaaccaaaaagaagggagacacttcatanatggggggggggcacccccccgcaacaaaccgaaacggcagaaaaaaaaccccgccaccacgagaaagagaggcgcggccaccgccagaccaaacaagggacgaagcagagccagcaaagagcgacacgaaaaagaagaaaaagaagaaaagacacagaaactacgacaaaaaaaagagccccaaaaagggcgcaagaagagacaagacgaccgcgagagaaagcaacaccgcgacgagaacgaggagaaggcaaacgaaggcaaagaacaacaacaagagagcagcgacgacaccgcaaa

SEQ ID NO: 124197 - DNA, 465 bp, Arabidopsis thaliana columbia
  unsure (1)..(465): unsure at all n locations
cccctgaggtaccggccgaatcccggtcnacccacgttaaggcattaacaaaaagatttttttcacgggaaacgaaggccccaaagacaggtagccacctccgggtggggacaaagagtttactgcagagaaggccggaaccaacaaagccaagaccacgcccgcaatttcctaatgtatgtttgananaaaccgcggcggtttgggaaaaaaaagccccccagaagagggcaggggccgcacgtgagagagccggagccggcagtgcccgtgacccaccccagagcaaggggcagagaaaaagcggagcaaataacgagaacaccacggctacagacccgaaacacacggaccgacgggtagcaaggagcactcgagacggtaaccgcacacaataagaacaccaactcccgcgagccacgaacacgcaagagcccgacagacaaaccggctgaagataccgaa

SEQ ID NO: 124198 - DNA, 515 bp, Arabidopsis thaliana columbia
  unsure (1)..(515): unsure at all n locations
agggaaagaacgtacgcctgcaggtaccggtccggaattcccgggtcgacccacgcgtccggtgcacactggctacactgttttctaagccctggctgcttaaatgactaagatatccaattctacaagcttgactgaaaaactaactttcctggtaaaggatctctgaagatcaaagagaatatcgacccgggaactctatgtgattttattggaggagacacctaaaaagctccaggcagagctgaaaacangcacctggcagtgattatggacgaaaacctgagattggcttaacagaacgaattgtttacgtcacaaagttgccaagcttgagcttaacgagttatatagttcgctgagctccgctacaaactaaggactaataccgcctcaactatcccattctccattaaaaattggggaatacacaagagaaaagtccaacgcctgaggtataaaatccaacatgggctcaagtcaaagatcccatgttttcaaaacagaaaattcga

SEQ ID NO: 124199 - DNA, 512 bp, Arabidopsis thaliana columbia
atccgactaatatagggaaagccggtacgcctgcaggtaccggtccggaattcccgggtcgacccaggcgtccgcactacacaaattcaacaactgaaaccaactcagagcaaaagcttgatttgacactatggcgagcattagcaacgagcccgagcgtgagaacagagacgaagaagagactggagccaacgaagatgaagacaccggtgctcagtttgctcgtgtggtcaggcttgaagaagtcgtcgtcaccaccggtgaagaagacgaagacaccattctcgatctgaaatcgaagttgtatcgatttgattaagatggaagtaagtggaaggagagaggatctggtactgttaagtttttgaaacatagagtttctgggaagattcgtcttgttatgaggcaatcgaaaacttttgaagatctgtgcatatcattattgttggatcgggtatgagtgttcaagaacacgctgggaatgataagtcttgtgtatgggaacgctcggg

SEQ ID NO: 124200 - DNA, 504 bp, Arabidopsis thaliana columbia
ccctgaggtaccggaccggattcccggttcgacccggggtaaggccaataaaagtgatgctttagcctgagtgagctccagagggaagcagaagcccagcaagggaaatagttggggaaccaaagaatcaaaaggggagcacccagaaaccgacaggagaaactcgacagaggaaccaagtttataatttggggggggcaccagccccaaatcgaccagtgaaaaaaaaaaaaacccacaaaataaccgcccggaagaaaaagaacgcataaacgaggagcgaggcgcccagcgtgcagatgccgagggagagaatgggcgagacgagagagagggggacaccgagggcggtgagcggcgccaaggagggaaagggaagaataccgggaccgccaggaagctcacggagatgaatatgcacggtaaacccggggcacagcaagcggggcaccagacccccgggcccaagaaaagaagcatagggctaccggaccccgaacaaat

SEQ ID NO: 124201 - DNA, 501 bp, Arabidopsis thaliana columbia
aacccgactaatttagggaaagacggtacgcctgcaggtaccggtccggaattcccggttcgacccacgcgtccggaacagagaaggcactatgtctatgcaggattcgaggtgatagatactcgtttcttattggtctccataagtgtcaataggaatagaagctgattacaccttatgttggctcaaatgagtatgcttagtgtacattatcagctactcctatggtttttacagcttcaataagagtatgttcatgaaataggccctcgatgctgatggaatggatatggaaattgacttgtcaaacctgaggaccgacaataccatgtttgctacattgctcactaaactacgggggcctatcaagactactgtctctgctaatgttctagaagaggctatcaatggaactgccccacgtcggcctcttcctattggaacatcacttaatgggaaggtgcgaacatcacaacatgggttagactattcttctaccat

SEQ ID NO: 124202 - DNA, 218 bp, Arabidopsis thaliana columbia
  unsure (1)..(218): unsure at all n locations
gcctgcgtgagctgggaccctctagagcggtcgacctacgcctncgcggacgcgtgggcaatgttacagaagaaagtgaaaagaaagagagaaaggggaagaagaaaaatgtataactcaccatgaacgttgctcacactcctcactattatgcttgggatgctgcgatctctttataagctccggtggatctncgacacctgaggtgcacctcactg

SEQ ID NO: 124203 - DNA, 511 bp, Arabidopsis thaliana columbia
aagaacgtacgcctgcaggtaccggtccggaattcccgggtttacccacgcgtgcgggccactcttgagccaggtcgaagctaggaagaggacgaacctctggctacaagtgcatgatatcactgtgacttccagaggtgtgcattgtgaactttagaatcggaatgtggtctatgaacccttacatcggggccgaggagatttttttagagggggtttcaaacatttgccatcaccctgagtgggaaaaacccccaagcctcgtgcaaataaagtcggggggaactaatgaagaaagatcataccctgcctcaatgttaggcactggaaaccttacctgcgaaaggaacgcgccgtaatgaacgttaacaagaacgctgaggggaaagtaattcaaccacgcgaagtacaggatctggtgtgactcggacaacctgcaatgaatgtgctggaccgctctcgaacaatcgaagggtcgggaaatctatggttataggacgcccccaatctt

SEQ ID NO: 124204 - DNA, 364 bp, Arabidopsis thaliana columbia
  unsure (1)..(364): unsure at all n locations
tccgactaactaagggaaagctcgtccgcctgcaggtaccggtccggatttcccgggttgacccaggcgtccgcccacgcgtccgcgtacatgtctttagtctggccacctaaaccaggccatttgtttagagcgcttttataatggatgaagcttaggtactttacaaataactctttttctataactaggtatttcccataaactacatttgcatgatttattcggaggttagggtanagctgtgacactatcttggctaataaggagctgaatagagacttactagggagaaagatgaaaacgggagctctggatgctactcattcgagatgattcggcaagttcagggatacaaaggatc

SEQ ID NO: 124205 - DNA, 516 bp, Arabidopsis thaliana columbia
gggaaaactgtacgcctgcaggtccggtccggattcccgtttcgaccaggcgtacgtgttaacaaaaaaaactgatataggttctcttataagatcccattcttgtagcaaaaaccccgaagaacaaacttttcgaacaagacgactaatcaattcatctgattatggagagactacagagaatcttcggagccggcgttttttttggggggtgttcgcctgattctacgactgttgatacatgagaaccggtttacatctcttctttatctctcctcaatatgcttaaaccctgatgagctggtgtttctatggaactcctcggtatagtcgcttgcgccagtctttcgtatgatatacacttgtaaagggctggagatgtattattccattccctacaatatggtaactgccccgcccacgttgaacgctgatgagacatgctcttcaccacttagtatgctacaccttgctcaagacaataatatagtacctataatacgcggtaagtattga

SEQ ID NO: 124206 - DNA, 439 bp, Arabidopsis thaliana columbia
caactatagaatagcttgacgtcctgccgcgtcgtagctgggtcctctagagcgggcgccctttttttttttttaatcaataacaagttttatttccataatctttttcacgacgatcttggtacaattattctgaatcaatataattcaagacaggagaagaacagttttcccaacccatatttaaaagcgagggaaaattttttggctggtcttctacttatcttgggaagatgagggctgctccaaccaaaccaacccacagggtcaaagcaagccaaaagactgggttcttctccataccgaccaccggtggccaaacaaagagctttcctagaaaatcatcactcgagttgagctgattcgtagtcgatgcattcattcgccgctctttatccctttccttatcactccatgtcactgcatagctgtcgtaact

SEQ ID NO: 124207 - DNA, 512 bp, Arabidopsis thaliana columbia
actaatacgactcactatagggaaagcccgtacccctgccagtaccggtcccgaattcccgggtcgacccacgcgttccgaagggccacaatttttggtggtgaaaaccaaattggttaacttttggatttgaaggccattattcccccccttaatggcttgaactttaataaccattaaaaaaaaaaccttccaatccttgtattccgccgccaaccttttttttttgggttttttgccagcctcttagctttagaatttttaagaaggaaagggttcctattcccataaccggtccaggtaccaacagttttccagggccttgaagtgataaggaaaggaataaggaccggcaaatgattgcttcaattacaaataacttcacctcaagtgatgattttttaggaaagctcttggtttgccaaccggtggtcggtatgaaaaaaacccgattcttttggctggctttgacactgtggtttggttgggttggaccaccactcatcttacaa

SEQ ID NO: 124208 - DNA, 517 bp, Arabidopsis thaliana columbia
taatcgactcacttagggaaagctggtacgcctgcaggtaccggtccggaattcccgggtcgacccacgcgtccgcgttctctctatctctttctctcctcaaacatagattgatcaataggcaattgtgattttttgtcttcattcaagattcatcttctgttctgttttggtgttttaaggatttaaagaatctgcggaaacagttatactcagcatctgagtacttcgaaacatcttatggcaaagcagaacacaaagaaacagtgatagagacgttgaaagagtatgcagcaaaggcagtagtgaacacagtggatcatcttggttctgtctctgacaaattcaactcttttctctctgataactcaactcatttctccaccactcatcttcgtttatcttctcttgaacaaaggatgagactatgcagagattacatggggaagagtggcactcatcagcatttgcttctatttcaatatcctcgccatcataagcgttacttcttccctca

SEQ ID NO: 124209 - DNA, 167 bp, Arabidopsis thaliana columbia
  unsure (1)..(167): unsure at all n locations
ccgcgtacggaagccgggatcctcttgagcgggcgggctaatccnnngaaaaaaaaaaatctttcgncctaaagtaaaaatataacctccatagtgtatttgacagtaataatgcaaggtttaaagaaagaaagtaatactatgctctttataataggagaaggagg

SEQ ID NO: 124210 - DNA, 469 bp, Arabidopsis thaliana columbia
gggaaaaacggtacccctgcaggtaccggtccggaattaccggttcgacccacgcgtacgagcaaatgctatccgtgtcctctgccggataatagactgaacccttctaactcaggattgagcgatactttgaaacaagcccttagtggataagaatccctgttgtttcaagtgccgctttagaacaaagggccacactagctcaatttttttttgagggggtggcaaaaagacggagcactgaagtttaagaaaagattccactcgaaatcagcccttgggtaagatgacatagccctagcttaagtgcatcaaatacgccacgagggatgggttggctggaaaaaaaattgcttgggaggtttggccatggggatgcggggcgctctccctatggctcagcgtccgccgagtaccatacaccacccacgggtatgccgcgacatggacaacgtaaagacaaacagga

SEQ ID NO: 124211 - DNA, 389 bp, Arabidopsis thaliana columbia
  unsure (1)..(389): unsure at all n locations
nnnnnnnnnnnnnnnnnnnnnnnnnnnnnnnnnnnnnnnnnnnnnnnnnnnnnnnnnnnnnnnnnncttgcttnnnnnnttttatgtttttttttatttacacntttttntagttatcctatcattggtttttttataaagaaacaaaacattctggttgtgtgattggaataccctcaaaaacttcatcattttctactgttttgttncaactggaaatgggttgaatgtcaaaacaactccaagtgcccaaacccctttgtgtaaaaaaaccctttgggggccagggagaaaaacagccccctgacgtttttcgctccacaaaaaaatgattcctggggctgggggacccttgggtttgaaaagagaaattggtgggatgggaattc

SEQ ID NO: 124212 - DNA, 518 bp, Arabidopsis thaliana columbia
gcctgcaggtaccggtccggaattcccggctcgacccacgcgtccgggccaagtgcctgaacggttatgggtgctccctgaagagaactaggagaaatcttccaacagcactttcataggtttcgaaagatcaacgaaacttggacttaccttctgtccaagaaccaccagctctgatgcaacggggacgatttttttgggggggtgcgggaaacactccggcgttctatgagagaagccctatctcagcgactgaggctttttacaaccacaagttccatgggtcaactccctacctcgatgggaaagaccccaaactccataagcttgcacctctcagatattccggacttattctacgagagagggcgttgtttcacaggaaaaaacattcggaccgcataagaaacttatgcaagtcgggcagaacccaaccaagtgggaaaacctcgcccgagagccagaagaaaagtcagttgcccaaaggaccaggaaaaagcggaaaagcaccaaaacac

SEQ ID NO: 124213 - DNA, 494 bp, Arabidopsis thaliana columbia
ctgcaggtaccggtccggaattcccgggtcgacccacgcgtccgaaaaaaaaaaaaaaaaaagagtttcttcattcggtcttcgtctcgtcgtttgattagttctctacttttgtttttgattagttcgcgattcatttctatcttgtctccggtcaatatttttcttcgatccgtcgatcggatattttgactggagatttaagaagtctgaaattgttagatcgcagctatgtcgtactctgactccgattcgtcgtctcatggtggcgagtacaagaatttccgacagattacgcgtgaacgactcttgtatgagatgcttagatctgcaaagacagggagctcaaaatccacctggaaggtactaatcatggacaaacttactgtcaagataatgtcgtacgcctgcaaaatggctgatatcacacaagaaggagtttctttggttgaagacatatttagacgaagacaaccacttccttcaatggatgc

SEQ ID NO: 124214 - DNA, 493 bp, Arabidopsis thaliana columbia
agggaaagacggtactcctgcaggtaccggtccggaattcccggttcgacccacgggttcgagctcttgaaggccacattttttttcatagaagagacagagcaaaactcaggcagatcccttcttggctcttcgaacctcaccaccacacacctattgcaaaccctaaccctaattttagctcttcttcttcctctgcaacactatatgttgggttttgccttccctaaccaaccagagatccaaaaccacttcttttccttctgcccggtttgatcttttggacagtactactagctatggaggtttgatgatggacagagagaagaacaagagcaatgtatgtagcagacagatcaagaaaagtgccatcgatgcatgtcattcagtaagatgtgagataagccgtggggatctgatgaataagaaagatgatcaagtcatggggttggagcttggcattagttttaggaattccaaccaagtacttgat

SEQ ID NO: 124215 - DNA, 176 bp, Arabidopsis thaliana columbia
tagagactgccgctcgtagctggatcttatacggcgcctttcctttttaatgataattcgttattcaaaccaagctaatcacggaatctccagataatatcgctaaaaagctttaaaacaaacgctactaaagataaagaatggagagggatttttggtttgagagtgtgcaccga

SEQ ID NO: 124216 - DNA, 478 bp, Arabidopsis thaliana columbia
ccctggcgggacccggcccggaatcccgggtccgcccaaggggtcggctttttacaaaggaaaaatttaacccctaacaagaaggcttggaaggccaaagggagccgtgcgaaccccaaccccggaaggattctgaagggacaaattcaactacggacggactaggaaatggtacaaaaaggccggaacttatttttgggggggtgaggaggaagggataccccaggacggaaaaggttgggaaaacgttatcaatgagggtgaccgtactttcgtgaaccacggcctcgcttctttcgcgtgagatgacggaatgtgcctagacaggctcgctccttgctccatgcccgaggtgcaggacttaagggagcgcgctattggggggtgccgaaccggaattgaaaacttcattagggagagtacaggaattttcggggaacctatttgaaggtaacaaggaggggagccattttttggg

SEQ ID NO: 124217 - DNA, 495 bp, Arabidopsis thaliana columbia
  unsure (1)..(495): unsure at all n locations
ctgnnnnnnnnnnnnnnnnnnnnnnnnnnnnnnnnnnnnnnnnnnnnnnnnnnnnnnnnnnnnnnnnnnnnnnnnnnnnctttntttttttttttttttttttttttttttttttttttttttttttttttttaaagtcttgaatttaaggggtttgagtaaaatcaacttattttaaaacttttttttttaaaaaaaggccacaattataggggcttttttcacatcatctctttttaaaccttctttctttatttttgttagccatgttaaaggcccctccccccgttattacaaatttccccccccccctaaacacattgaacaagagccaagccttaccacctggttaaaataaaaattccagttcccctttcccctttgtacaaaacccctcccccaaaacccacttttttttacccggggaggcaaacctgtcatgacaattggggaccctttctcccctttccccatgttgaaaatcccgaaaacaac

SEQ ID NO: 124218 - DNA, 275 bp, Arabidopsis thaliana columbia
gagagagaaaaaaaaaccaccccgaatggaccgcggaggggccccccacccccaagaggccacggcccaaacgaagggggcacaccaaacgagaccagagaagccccacaccaccgcaaaggacgcgaaaaacccccaaccgccgaccgcgggaagcacaacaacgccaaacaaggaaccgaagacgcagcacgcaaaacccccagccggagggagagaggagcagaggcacgaagctagaacggaacaagaaaacaggaaggcgcaagaacaca

SEQ ID NO: 124219 - DNA, 457 bp, Arabidopsis thaliana columbia
  unsure (1)..(457): unsure at all n locations
aactatagacttactatgacgtaccatgcacgcgtacgtaagcttggatcctctagagcggccgcccttttttttttttttttcaacaagtttggaattaacatgaacaagaaagtagttctctttactttagttagagataacagcacaacacaacacatcagaagaagatgaagcancatgtttatgtattgacttaaacatttgcttcagctctggaagggatcttccttatgactgagatggtatcaccaactttgattgttttctttccttcgccttcagtgttggttaagttccaattccaaaccatctccttgccaaagaaaacctttccacgcggtttcttgtcaggcattaagacatggtctgatctgaatttatcagagtttcagttggttctgctttacccataacccggttcttgattaacagttggaccttgcagcggctacat

SEQ ID NO: 124220 - DNA, 229 bp, Arabidopsis thaliana columbia
  unsure (1)..(229): unsure at all n locations
acgcgtacgnaagcnnggatcctcttnagcggccgggcaaaccctnttaaaaaaaacttttttttnnnnnggggggaaaaccaaaacgggaacccaatataccaaaagccaaaaacaaagggcctccaanaaaacaccgggctacaaacgcccatcaccgcacaagaaagtttctccttaaaacgggggggaaaaaaaannccaagttcaaaaaaaaaaaattccaaaa

SEQ ID NO: 124221 - DNA, 492 bp, Arabidopsis thaliana columbia
agggaaagacggtacgcctgcaggtaccggtccggaattcccgtttcgacccacgggtacgggtgcttccagctcttaactttaagttgactggaatgtctttccgtgtcccaaccgttgatgtctcagttgttgaccttactgtcagactcgagaaagctgctacctacgatgaaatcaaaaaggctatcaaggaggaatccttatgttaagtggttggaatccttggatacaccgaggatgatagaaactcaactgacttcgttggcgacaacaggtcgagcatttttgacgcctaggctggaattgcattgagcgacaagtttgtgaaattggtgtcatggtacgacaactaatggggttacagttcccgtgtggtcgacttgatcgtccacatgtcaaaggcctaagctaagaagcagatctcgaatgatagggagtggaaagtcatctgttcatccccttttatggtctgaatttgacgttttcgac

SEQ ID NO: 124222 - DNA, 513 bp, Arabidopsis thaliana columbia
atacgactcactttagggaaaggctcggacccctgcagggtccgggccggaattcccgggtcgacccaaggggtcgggcctttcttgaacacttggttaaatcaaaattttaggggggaatttcattcccaagcccaagaaccaaaccctttcccccttaagttttggtggtttcggtaggttggttttttaaaccaaaactgggcttggccaaaggaacttttttttgtggggcggggggccggggttcttgcaaaaaaaattaaaagggcaatgaaaagaagggggcttgaccgttaaaaattggaaggtccagaaaggtggggcggggttgcggatctaatatttaaattaaaactagggcaccaccttgaattttttggcaggaaatcttttcctgttcttttataagatccccattatcttcatatgggggtgggggccacaaagatcagaaagggagagggatggcaattaaatcagcttatggggagcttttcacagagccggggg

SEQ ID NO: 124223 - DNA, 436 bp, Arabidopsis thaliana columbia
  unsure (1)..(436): unsure at all n locations
ctatgacgtaccatgcacgcgtacgtaagcttggatcctctagagcggccgccctttgttttttttatttttttttttttttttttttttgttttttttttttgaggcacaagttattaaattagttagatgtttttttttttaaagaatggttcatttcttacaatataccaaaagctcaaaaaaatttgttctttcacaaagtttttaanngaagcatacagcctacactaaggagagtccatttagattgggggttgagtttataatatatacacattctactttgggggctttgtcaccgggctgctacacgcttttggaatctgagttcccacaagctttggtgatccgttagagcattggaaagtggctggaccctctgctccggtatactggatgttcacgtaaccaacctaaacggtctgacatggat

SEQ ID NO: 124224 - DNA, 212 bp, Arabidopsis thaliana columbia
  unsure (1)..(212): unsure at all n locations
ctatgacgtcgcatgcacgcgtacgtaagcttggatcctctagagcggccgccctttntttnttntttttttttttttttttaaacaagtaacaagaaggctaaagataaattaccggaggacgttgatgacagagacctagtgatccctgtatcttgtctgtaaagacaaaagttgctagctccattcaaacaaaagactttttactatta

SEQ ID NO: 124225 - DNA, 542 bp, Arabidopsis thaliana columbia
  unsure (1)..(542): unsure at all n locations
ccggcannnnnnnnnnnnnnnnnnnnnnnnnnnnnnnnnnnnnnnnnnnnnnnnnnnnnnnnnnnnnnnnnnccacgcgtccggctactgatactgccagctacttctgtccttaaactctctgtctctgaaacattcttaaaccagaccaaacggaaagatcacttgttatgggtctctgcatacatgggacttcttgctacaacgacagtgttatgcaatcacaagatgttattattcccaggagtgagagagatgaataagtctgcacattctaattcagctgcatacgagaactatgttagatgattactgctctctgcttactcgctccacatactgagctacggactcgtacaagcttntacataaacgccatctggaagagcgttgatacgcgccgattaatcaaacaaagatcctgtaatggctcactgacaagcaatcttgatccggaagatcaaagaggtcatgcacagtcctggctttagaactacaacggagcaggttgtgtctaagtccaagatatttatatctgtgtg

SEQ ID NO: 124226 - DNA, 471 bp, Arabidopsis thaliana columbia
tttaggacacactatagatttactatgacgtcgcatgcacgcgtacgtaagcttggatcctctagagcggccgccctttctttttttttttttttttttttttttttttttttttttttttttttttttttttttttttttttttttttggtcaaaaccaacaaacaggctcttaatttaactgggtttaataccaacaaataaattgttttttttccaaataaagatggaagaagagttttcccctttttttattaccctcaacagaaaatttttccttacccaaccccttttgtttttaaaaaaatactttttttttttttttccaaaatcctaaataatctttttgcctaaagggttttaaaccccccaggcgaaaccctcctccattcctttgacccctttttttgttaacttttttggacgcccgccgttttttttcccctaaaccaaatttctttttaaaaggag

SEQ ID NO: 124227 - DNA, 410 bp, Arabidopsis thaliana columbia
  unsure (1)..(410): unsure at all n locations
atgcacgcgtacgtaagcttggatcctctagagcggccgccctatcttttttttttttcaatacttgcgtggaacaatttaatatggttcacatcaagaaatatctgaacaacgatacatggtgattacagtttgctccattttggctgtgttttttccgttananaagcaagattctcgttnncgggatgttgggnannacaaaacaaaggcacaggccaagcttcttaggcctgaggaaaagggggccctctttcaagccagggcctgaaatcagaagctgctgctttgccccttttttactcctctctctttgctgctaagctctgactacacctagactcttctgcaagttctccatgtgttccctcattccagatttctctgccttgcagttttttttatgctcc

SEQ ID NO: 124228 - DNA, 501 bp, Arabidopsis thaliana columbia
gggaaagacggtacgcctgcaggtaccggtccggaattcccggttcgacccacgcgtacggcgggagaaacaaagtgcgaatttctttgacaagacctgatcctttccgtgaaagtatagccatggctgatgtgggatcctttacaggggttactgggtctgctggctatgggtaaacgactctgccctcaaggaaaggaggtgtcctttgggggggaggggcggggcttgtcgaagaaactcggagagaaaccctgtgcgaatagatcacgacagcgagattgggagcttagaggttgtgatcttggtagtaccctcgggtgtgaagaacgaggcgatcatatgggtgtgcttcttgttgtagttggggtacttctctgatgcagatttccaccgtggtggtagcttcgccacccctcgacggacggggaacttggagtgagatggccgtggtaacgaccatggcggaggagcggggggggcgtgcatgtgcggtgggag

SEQ ID NO: 124229 - DNA, 370 bp, Arabidopsis thaliana columbia
  unsure (1)..(370): unsure at all n locations
aaaaaaattctttggaggggggggaccggganacacaggaaggggcggccccaaaaaatacgcttgcccccacccgaggcaggcccaaaccacggacgggaaaaaaaaaggaaaaaacttacagccggggggggagggnnnganagggcggtcgaccagaaaaaaaacccaccccgggggggggggggccccccccccatacgcggccgaggggagcaaggggaaaaagaaacaccgcaaaaaaaacgagcccccgcgacggccgaaaaaccgggacgaagaaaaacagaccagcggacagcggggaaaaagacgcccacaacagcagaaaaaaggggagaagggagagaagggaccggccgccccacgc

SEQ ID NO: 124230 - DNA, 416 bp, Arabidopsis thaliana columbia
  unsure (1)..(416): unsure at all n locations
atgcacgcgtacgtaagctaggatcctttagagcggccaggctaccctttctaaaaaaaattttttagaagaacatatgagntgnncaataaatgccaaagcattgatctagagaatagctcccattacataagagaatttccatttgtggaactaaaaacattaggatagcacaattctctttnngnngtctgtagaggaggcaaccatgtgatgataaccaaactacgaactttatgtgtagtgctctcccacactagaccaccaaactcaggcctcttcatccggaaccttgtcctgaaaagaaccgtgtaggaaagcttctggagcttcgaagtgaaattgagtgttctgggctggacagttacggatgcgcctttgaatggccagacagaaaccccggagcttgaaatgtg

SEQ ID NO: 124231 - DNA, 355 bp, Arabidopsis thaliana columbia
  unsure (1)..(355): unsure at all n locations
caatcaacaagagaaaacngcggaggaaggaggaggtgacgaccccagaaccacaaagaacaagaggaggggcacaagaccccaattccaaataagggcgagaggcaaattctcctaacagggttgttggncnncncnaagaaatnaaaagaaaaagattcaccaaaagggcggagggggtgggcccctaacaaagaggcggagggagaagcggtgggggagagaaacaagggggcaaccaaggggggaggagaagggcgcggaaggacggagggcgagagccagagggaacgcggggaacggagaagcggggcgcggggggggaacagggggggcgcggggggggccaaggagc

SEQ ID NO: 124232 - DNA, 496 bp, Arabidopsis thaliana columbia
ggaaagctggaccccctccaggtcccggcccggatttcccggtccaccccgggggtccgaaaaaagtaaaaccccggtttttttaaccgccgtggggctcctacttcttcttctaccggggttctttttaaaacaaacaaatttccgacaactaattcgttcctcccaaaatcagaaaattaagggaaagggcttttacgcattttttttaaggggtttcccgaggaggcaaattgagaatgctaaaatgattggctctttaaggtctttctttgttgatgccactcaccataaattccaccaggagactaacaattttttttgagccaaaatactatattggtgggctggaaagctccgagtgatccgaaggatgcaaagaaaaaccttgctcagtttaggaaagtatttgctaagaaagttcaagtgtatcgttaagagttcattcttgagattgagatgctttggtgttgaaaaacatcgtagggatgaggct

SEQ ID NO: 124233 - DNA, 507 bp, Arabidopsis thaliana columbia
cgcccgcgcgaaccggcccgcgcgcggggcggggcgtgaaataccggggacctcggcgcgcatgcaattccgcggggcagaccccggagcgcacaacgaggacccggacaggtagagcccattgcgacagacggccggcgcggccgggccacagccggaacaggccgatgaaggacaaaacgcaggccagcacccacagagagaagcagcaaccgcgcgggaagaagagaaaggaagcgcgagcagagaacccgcgcgcgagcaggagggagagtcccgtggtcgccgcgacggaccgaagaaggccacacagcaggagtgttttattgaagggagagagccgagcggagacgcgacgcgaaaggaagaggaggagacggaaacacgccccacgcaacgagaagacccaaggtagcgggaggagatgtgcgaggcgaagcggggggcgagcaaggacgacaaggggcaccgagcgaaaccgcaccctcgacgcgacggcgccccacg

SEQ ID NO: 124234 - DNA, 478 bp, Arabidopsis thaliana columbia
  unsure (1)..(478): unsure at all n locations
nnnnnnnnnnnnnnnnnnnnnnnnnnnnnnnnnnnnnnnnnnnnnnnnnnnnnnnnnnnnnnnnnnnnnnnnnnnctttttttttttttttaatgaatgcattaaaaatacattttagtatgtgttgtgacaatgtatcattaaatcaaaaataaaataaaactacgctacagattttgtcgatacaacccccacccagaaaatggtacagaatataacttacaaaaaagacccaatcattacatcatcagaagcttccttataaatttcaatttccggaagtttttctttcttccttccttcaattttgttttcctctaatctctttacttttgtatttactccgcattaagctaaatagcttcttttgacaattgatttgtatagaaccccaaaaaagaataaggcagttataaataaccagaaactgaccttgtgtttagtccagagccgttttgtttcttcgaccagttaaagg

SEQ ID NO: 124235 - DNA, 476 bp, Arabidopsis thaliana columbia
  unsure (1)..(476): unsure at all n locations
gccgcgtacggagcttggacctcttagcgggcgcgcaaacttggaaaaaaaatttttacacccacgagactgtagaaaaaacaaacggcgcggcacacagagaaaacactgcatgaggaaagacgccgcgaaacgccaacaaagacggcgggaggaaagaaaaatccctcgtttttgaggttgtagggaccaaaanagaggatggcaggccaaaaaaaaaacccgggggaagggcgagtgagggggcccacccacacgcagggaagggggaaaacaacgggaaacaacgcacaatgcccgcggtgcggaaaagaacagacgggtgatcctagtatatgaaaaaagcaactgtccaggaaggaggagaacgggaacaacgcggagagaaagccaaaccagccctcgggggcgtgacacccaggaagggggttttctcagggggaccaaaaggacaccaggctgaggggaacaaaaag

SEQ ID NO: 124236 - DNA, 277 bp, Arabidopsis thaliana columbia
  unsure (1)..(277): unsure at all n locations
atgcacgcgtacgtaagcttggatcctttagagcgggcgccctataccccnnnaaaaaannnnntgnnnnnannnnngcaatacaacactgctgaaatgaataaatggaaacagaggaagtaatttattcgtgtacgttagggtttttaatcttaaaatataaaaaacttagaaatttctcttagnacaagttttgcaaaaganncagaacagaagcgcgncaagaaaccaacaccnccagaagaaggaaaccccggggaggaacngaaaccgggaa

SEQ ID NO: 124237 - DNA, 512 bp, Arabidopsis thaliana columbia
atccaattaatttaagggaaggctggtccccctgcaggtcccggcccggatttccgggttcgacccagccgtccgcccagccttccgggctctaattccttctaatccttttaactctgttaatgctggggctaaaacgtacgtggatcagttcacaaagggtctacttgttgagtttaaaaagagtgggattgatgttcattgccaggttcccttgtttgttgcaccaaggatgacaaaattaagaagagcttccttcttagttgcttcaccagagggttacgcaaaggcagcactgcgttttgtaggctatgaagcacaatgcacaccgtactggcctcacgctctcatgggtgcagttgtctctgcattgcccgaaagcgtttttgaatcatttaacatcaagagatgcctccagatccggaagaagggtctccaaaaagactccatgaagaaagaatgaatcttccaggtttaagttactaccaagaatttccttcttctgaagttgt

SEQ ID NO: 124238 - DNA, 337 bp, Arabidopsis thaliana columbia
  unsure (1)..(337): unsure at all n locations
tttttcttttttttttttttnnnntntgggntttttttggggccnaacacaacttccaggagaaacaggctttccaattttgggcaaacgaatatgggtatgggggatttaccttcaacgatttccctcctngacggggtgggtggnnaangnaagaacaaaaananngaaaaaacacaagccccccaaggggcaagggggggcccccacggncnccaaccggggaccgggaaaaaaccnnggggggngcaggcaaaacccaacccgagcccggggaaccacccacgaagcccaaggcagccccaaaaggncccgcagagaccaaccccggccgggc

SEQ ID NO: 124239 - DNA, 374 bp, Arabidopsis thaliana columbia
  unsure (1)..(374): unsure at all n locations
gcacgcgtcgtaagcttggatctctagagcgggcggcctttgnntnnnnnaataaaaggttttgtttnaagacagttgttttggtnngggggttgagtttttggaaaaattggaacccaattggcctttagtccagggttaggccaaaatccgtgggaatattttccctggcttttttggaaaatggggtgggggaaccgacccaaaacaggggaaaaaaaaaaaggaaggcaaacccttataggtggggggggcgtataaaagttccaaatttttaaactggaaacatcccaaatttttttcaaactttaaggaacagagggttacaaaagaggagagtttccttaggagggtttggttttcgggtttttttt

SEQ ID NO: 124240 - DNA, 470 bp, Arabidopsis thaliana columbia
  unsure (1)..(470): unsure at all n locations
aactatagaatactatgacgtcacatgcacgcgtacgtaagcttggatcctctagagcggccgcccttngnntnnnnatnntannttttttttttnnnnnnnnnnnnaaaccagaaccaaaaccttagccaaagcattgtaaaggcaaacacgagaacagagacttttaagtttcaacaaaccaacgacgacttctttcttactctgaccaaaaaccaaaatttcaacttattctcacttctccacttgcgtgtacttcctttacagtcttatcgaattcatcctaatcggcttcctttttttccacctcctccttttcctcctccacgttttctgcatcttcctcttttacatctgcatcccaatttcctccccagccaaaacctccgatggatcggaaaacaggaggcggtgttttggcgtcagccactatcttaatgatctctttaacggtctgaagggaaaaggtt

SEQ ID NO: 124241 - DNA, 523 bp, Arabidopsis thaliana columbia
ccgagctctatacgactcactataggaaagctggtacgcctgcagggtaccggtccggaattcccgggtcgacccacgcgttcgaatttcaccccaaaaaagaaaaaagaaaaattcccaccagaaaaaaaaaagaaaaagaaaggtgattcttcgcttagggttgaaatctcttccatcccaatctcaaattaaccttccatcggcatctctttccctttttttttcccactttctttgggaatcgcgagaacttggaatcgcattcttgaatttgggatactggtttttttttttttaaacctggttcattttcacgggaaattcttagctggttgaactggacttggatttcaaccaaaattttggagaatttttttttggttggggttttcctttctggtttggggggttggaaataagggtggccagccaaaatggaccagttccaacttgtgaaagaccttagggcctggaattttggaagtggccagcttattgagggccaaaacctttagggact

SEQ ID NO: 124242 - DNA, 196 bp, Arabidopsis thaliana columbia
  unsure (1)..(196): unsure at all n locations
tccctctagaagcggccgcccttttgtttttttttttcttttttgacgccaaatgaaatgggagaattatgtgtacctagtgtntttgaaaattgtctttgtnaggaaggtattaaacaaaaacaaaaaaaaccgtggttaccaaaactctcctccatacaaatcctatgggnaatgtaaatttataagttctctg

SEQ ID NO: 124243 - DNA, 439 bp, Arabidopsis thaliana columbia
ctatgacgtcgcatgcacgcgtacgtaagcttggatcctctagagcggccgccctttgtttttttttttttttttttttaacaaaaccaaatactttgttatgccaaacaagtcacaatgaaaccgctttattacaaccttggttaatgtctgagaacaagctatagaatcctctactacacatacagttttttacatagacaacacaagtggtacatttcttagagagccttgaggatatcatcggcgctggaaactgtgaattcgccaccagattcgacattggctacagtcactttgagatcatcaagtaacagagcaaatctccttgacctaacaccaagacccttgtctttaaagtcaagctcaagttcgagaaggggtgtgttttctccagaccatcagcttcaaacttacattgttggtctctgggtttgtt

SEQ ID NO: 124244 - DNA, 425 bp, Arabidopsis thaliana columbia
gcacgcgtacgtaagcttggatcctctagagcggccgccctttttttttttttttttgatatcagacattattttactatatgattcaagtaaaaaaatacatgaaattacagagtagttgtcttataacccttaggaaaaaagaatgaaaatacatgtaatctctatggacttgtttttacaaagggcgtgtatggcgtgtacattcattcattacggtccaaaaacaagttctttcaaagatctaaacggcgagttgtgaccataagccactgcatctctccacaaagccagtcctatccatgagatcaaaccaattgtagctgccacgaagaatgactggctggtgcaatttaccaggtataagcaaagaatatttccatattccataaaagagagttgcccttagcgaaccagtgagccac

SEQ ID NO: 124245 - DNA, 368 bp, Arabidopsis thaliana columbia
ctatgacgtcgcatgcacgcgtacgtaagcttggatcctctagagcggccgcctatgcttctgataaaattttttttagaagagaggcgggcccaaaacttattaaaggagaactgaattcaaacaaaaaaaaggtgacatcaaccaaaaaaagaaaaggaggcagccattattgttcttttttgtgcacatgtgaaaacctaatgaatagataaagagattctctctgtctgtctggcggctctctctcttttgctctcagtctactaaatgctctggcttcttctagggattttcctcaaaactaccaaactaagctagcagctaagagacacaacacaactttttttacagagctcatccttgac

SEQ ID NO: 124246 - DNA, 528 bp, Arabidopsis thaliana columbia
cggcactaatacgactcatttagggaaagctcgtacgcctgcaggtaccggtccggaattcccgggtcgacccacgcgtccggtttcactgccaaatggaagagcactgcctccattgtttaacttcactgcccaagaacttgcgggtgcatcaacagagctgcgacagcgtctaattccagcacattgccagggaacgggaagtagctcttaggatcatttatagcgtgtccaaatccagctttctttctctccctctatttactgcagtgtgtacatcaattttgaaccacttctgcttccaagcttttgtcgccggaggagagattggaaatctgtacgccgggacctgatgaggtgtgaaataactggggtcatgaagcttcttcttcttcttctgactggcttttctctcaatttgctatccttgttattttcaccttcactttcatttttttgtttttttttccacaaatctgaccccccttatatgttgggtgtatcatttttatgtgtttgtaatccatc

SEQ ID NO: 124247 - DNA, 415 bp, Arabidopsis thaliana columbia
  unsure (1)..(415): unsure at all n locations
ccgcgtacgtaagcttgtttcccatcgaggagacgtgtgatcccttttttttgaggagaaaggttgaagctttataaatcgcaaatttggtccattcattcaccaatcaaacacaaattaacccaacaacaaacatcagaaaactgaaaacacagtaaattttttcnaaaattcctcttactagatttttacccactcagcagataactcataccaactaggcagcgcctgaaaccaaatctcccgcagcagtggcagcaccaccgtcgtcagaagcgagagtgaacggactccattccgccggaagaggaggaagaggagcgtaaacagtaggctttctcttaatgtcccaaggctgagtcttcttcggcctcgtcttcctgtgatgagccgtcgatttcttctgtggcctcga

SEQ ID NO: 124248 - DNA, 533 bp, Arabidopsis thaliana columbia
  unsure (1)..(533): unsure at all n locations
cactaatacgactcacgttagggaaagctcgtacgcctgcaggtaccggtccggaattcccgggtcgacccacgcgtccgcanagataaggaaaccatgtctgtgtcagcgatctttggtaccagaatcgtcaccgttgctgcttctccgggttctccgccatttcaagttccaaaaattgggtaatggaggaggattagggatggtgatagagtgttcgtcgaggcctcagaagaaatcgacggctcatcacaggaagacgagggccgaagaagactcagccttgggacattaagagaaagcctactgtttacgctcctcttcctcctcttccggcggaatggagtccgttcactctcgcttctgacgacggtggtgctgccactgctgcgggagatttggtttcaggcgctgcctagttggtatgagttatctgctgatttggttgtaatctagtttgagaacttttgttgttgtttactgtgttttcagttttctgatgtttgttgttgggtttgtttgtgtttgattgg

SEQ ID NO: 124249 - DNA, 507 bp, Arabidopsis thaliana columbia
tgcaggtacccggcccggatttcccgggtctacccaggcgtccgagccactgatcctggttcttttggttgaacattgaccataacgtgagaaatcctgattccttcaacagcagtgaagaagaaaaaggagtctccataggttgattaacatccggcttcgaaagcatagaaaacaaaatccgggacgaaagcttctttaggagagcggtgtaccgccgaaatacatcctccgttcttttagaaatagagaaaagaaagtctggcttttcgtggaatcagaacgctgaccctggaaaacgacaacttttaagcttcagggattctgctacggaccaatggacatcctgtacaaggattctaatccacaactctggttgtaagttcagatttttatatgtatctatacatgcctgggggacggacacctgcgtataccaccaatgggagtgtaaaggttcttttaagcctcctcaagggaaaagtgtgtttatcaaatgtcactaaa

SEQ ID NO: 124250 - DNA, 455 bp, Arabidopsis thaliana columbia
  unsure (1)..(455): unsure at all n locations
ctatgacgtcacatgcacgcgtacgtaagcttggatcctctatagcggccgccctttgtttttttttactcttttttttggataaaaggaaacgttataaatttagtaaacaacacgcgaattaacatttcgttccagacaaagaagacttaaacgaaactgtttcatcaaaaaagtgaaccaaacgaacgatttccaaaccagatgtggtgacacanaaccaaatctaacccaaaaacagagcagcagcacgcaaacaactctatctttgattaccagccgccaccaccgcctccgtaacttccaccatcaccgcctccgtaaccacctccctcacggngtccaccaccaccgtatccttagccaccaccgcctccaccagacccgtaacctccgctacgtctttcgtaaccaccaccgcctcctcctgagtttccgccgccaccgcctcctga

SEQ ID NO: 124251 - DNA, 442 bp, Arabidopsis thaliana columbia
atgcacgcgtacgtaagcttggatcctctatagcggccgagctaagtcttctgattaatggtttttttttttttcgggcgacccttactctctcatgcgtttacttaattaatcaatttaggttcaggtttcgagtttatagaaaatgaccaaattccatatatggctggaccaatatttttctatacgagtgtgacagatccaaccatgccttcacgaacgttaaattttttggaaataaaaaactacatttctggttgaagcacaacgaggcctacctgtgatccattttaaagctgttgaaatgccctcatgcacattgactggaagaagttcctaagacactgaaaagccgaagagctccagttaccactagtgatatttctcaggctcctcctcagaatgtatggaacacggacaggttcctgcgcccactagggga

SEQ ID NO: 124252 - DNA, 490 bp, Arabidopsis thaliana columbia
  unsure (1)..(490): unsure at all n locations
agggaaagaccggccccctgcaggtaccggtccggaattcccggttcgacccaggggtccggcttcatcaatttctcttttccgatggcaaaagcttgcctcttgcagtctactctactcccagcttactctccacttcacaaacttcgtaatcaaaacatcaccctctctttctcaccgcttccgctgtcccgatgccgaccctttttccagggggagncacggccggggagactacaatacaaaacatggaggaagctccgaagatatcatggggatgcaagattgattcacttgagaacgctacttctcttcagaactggctctctgattcaggtctcccctccccagaaattggctattgatagagtcaacatcggtgaccgaggcctcgtcgcttcacagaatctcataaaaggagagaaaatgctcttacgttccttcttctcttcgtatcaggggctgattcccataatgcaaggttaaaaga

SEQ ID NO: 124253 - DNA, 365 bp, Arabidopsis thaliana columbia
gacctgcacgctcgtagctggatctttagcggcggctttttttttttgaattggatcctatttcttgtcgcttagagaactgagaacctcattacatacaatcaaaccaccatccctgttggtagactagcagtgatttttaccagagtttcacacattaagggttatggctatatttctaagagcttcacaatcaagcatgtaaggggcttagctggcgttaagcagacaaagctagcttctgaacagacaagctgagagtcttcaaagcacagaacgagcaggggacaatacatccaagctttccctgggtgaactctgaacgccaacaacaagttcctccttactctcttaaatctggaccg

SEQ ID NO: 124254 - DNA, 588 bp, Arabidopsis thaliana columbia
  unsure (1)..(588): unsure at all n locations
cgcgggcgaggagggggtgttgggggggggggcttactgttgctcgcccacgatangtggggggcccggggcgcgacggggggcgggggagcccttaggaggaggggaggcgcccggccaaaaaaaaagagggaggacacaagaaaggagacaaaggcaacaggagaaacgaggaaagaaagacaagccgagaagggacaaccaggggaacacaccagagcaacgaagagaggagaaaagggagggaggagcgacctctaccaatacaagaggaaagaaccacaggcgagaacgccgaaccgccggagaaggagggaaaggaagacgaaaccacaacgcggagggcaccagaaaaaggcgaaagggacaacaacaaaacaagagaggacggacccgaacaacggaaaagaagaggaggaagggaagaagcgcacccggaggagagcacagatccggcataaagcagcaggaggggaagacacgagagaagaagccgaaaggacgaaagagagaagcaagagagaaaagagaaaagaagaaagaggagaagaagagacagaaagacaggagaaggagagagcgtagcga

SEQ ID NO: 124255 - DNA, 364 bp, Arabidopsis thaliana columbia
  unsure (1)..(364): unsure at all n locations
cccgcgtacgtaagcnnggatcctctttagcggccgggctaatcccccgataanagactctttgtgatacacacaacacaaattgctgaaattaagatgagaatcccaaactaatgtacatacgactccacgattgaacacaataatattaagtgagtagaacgaagaagaatccctccttgnggggggtgggacaacaaancgnngtttttgttcaccaaaattttaatagaagagggcaatggtccatgaaccgcgacgaaagcgggcttattttcgacttccccggaccatatgccccacgaatctgaacttctctcaggtcttgtacaaggggacaggaaccacacattacatgagatag

SEQ ID NO: 124256 - DNA, 515 bp, Arabidopsis thaliana columbia
  unsure (1)..(515): unsure at all n locations
gcctgcaagaaccggnccggaattcccggtttgacccaggggtaaaggccctcaaaccaagnnnatttgtgtccccgcgaacacgagtatccgcgaaagccgataaaacaacccccggcgggacaaaggaaaccggaaaaagcacaccaaaaggcacactgaaaccgaaaaggccaaacccaaaaagaattttttttgagaagtggggaaaccaccgcacccacactctccaaaaaaaaaccccgacaccccagcctacaaaaagagcaacgaggccgggaaagagaagagagggcgggggccgaacaacaaaccaccgcaacgagccaaaaaccaaacccgggcaagaaaaacaaccccacgggcacacagaccgggcaaaacgggcaaacaggcggggcggaagacacagccaaacgcagaaagcagcagacagcactacgaaaagagggggcgccggaacgacacgaatacgaaccaccgcgggaccacgaccaaacaagaaaaaaaaaaaa

SEQ ID NO: 124257 - DNA, 416 bp, Arabidopsis thaliana columbia
  unsure (1)..(416): unsure at all n locations
cgcgtacgtaagcnnggatcctctanagcggccaggcaaacccnnnnaaannaaaagcctttgaggnncaagganaggatcacgaatnnccacatanatccccatacagaagnctgaaagtttcgcaagcacagatatgattgctttaaaggataaagagcagnaaaaaccctcccttacaagtgtttttnnannagcngncaatgtcagnnacaaaccttctcaagaagtaacgcagacagttcaccaaatcctgtgacaaagatctgtttagagctagcccttgggagctaacgcgaaacttgtctttcgcaaccagtccctttgatctatctctgcggattccacgtctatggtgacatcagccatcacttggatcatctctacgacaagaacctgcccgtcccgtgtctcta

SEQ ID NO: 124258 - DNA, 337 bp, Arabidopsis thaliana columbia
ctgcaggtaccggtccggaattcccgggtctacccacgcgtgcgagcgcacagagactcgttagatgtgacgaacagggaacagaacgacagagatcccgcaaacagcgacaacagcaagagcaacaaagactccctgataagagaacaactccagactagatagcgataagacaaacaccgagcaaagcagaatatcgtagaatgtttatcgccccaaaacccagacccttctccagagaaaaaagcacaagagagctgcttatcgctggaagtcaacgctgacgctcatagatgacaacctgtaaaacgaaggggcccaggatacaaagcaagag

SEQ ID NO: 124259 - DNA, 414 bp, Arabidopsis thaliana columbia
atgcacgcgtacgtaagcttggatcccttagagcggccgcccaacctttttttttttttttttttttttttttttggtttttttttttttttttttttttttttttttacaaaattcatttacaaaaatcacccggggccggaaaaaacttgggggacatgggttaaaaaactttcttccttgggggggggtgaaaaaagaaccttcccaattttgggggaatacctaatgaaaaccgcccggggtataaaaataaaaatacatatatcggaacctacaaacaaagaggggggttaaaaaccccggggaaaaaatcattgggccggtgcaaaaccccaaacttaaagggggcatcccccgggggggggtcaattccacaaaaggggactgttttccaaaacccaaaaaaagggg

SEQ ID NO: 124260 - DNA, 179 bp, Arabidopsis thaliana columbia
gacgccccacccacgcctacgtaagcttggatcctcctagagcggctctgcccccttcggtgtggggcctttcccttacctttcccgcatgcagacgaaggaacgcacctaactcccacaatggtactaattcgcacaactgccttatagtccaaacatgacgcaattgcctaccccca

SEQ ID NO: 124261 - DNA, 607 bp, Arabidopsis thaliana columbia
gctagcacgcctgcaggtaccggtccggaattcccgggtctacccacgcgtgcgtgcggctgcgagaagacgacagaagggggagacagggcaactaacaaagaggaagaagaagaagaagaagaagatgaagaagaggatgagttgcgtgacaccagcacttcctccctcactctatgctaatgggaaatcaaacgactcctttttatgtgagtaggaccaacccgaacagttcgtaaaggttagcgaacccggcgcagataatggccccccggatagccccgaaggcccccgcttgccggttggcagatgaggaggaaccccaacattcaatcgaagttcgaaaagccttaattcaagatcagaacctggggaaacagagccccaactaatggagccaggcggaccaatccagcattaacccctgggggcaggcagcccataaagcccctcactcaaccatctagttgggaaacatcacggcctctttaaagggcttattccaaaaccctccgcgtagacaacggagtgcgcggcccctcagctaacgacaagtacgacgcctgaccaagggaatcgtaaccacaccccgcccccctggttggcc

SEQ ID NO: 124262 - DNA, 470 bp, Arabidopsis thaliana columbia
  unsure (1)..(470): unsure at all n locations
cacgcgtacgtaagcttggatcctctagagcggttgcncgcgggtttaagttttttttattgtttgaggtggaagcccggagctgcctttctcgaaagacagatccggggtccacacattacataatcatataatactgtctacatatgggcgactaaaccggtctatgcaaacccgacggccctgaaaccaattcctcctttgttgtttacaaccccattgggggtcccttgtaaaaagaaatcccaccacgaaactagttttgtatacaatgcccctgactagcgaattaaattttaagaattttaagaacccttctttatttcgtaactagaaccaccgtggccctcctaagttaaaaaggccattggataagagcaacaagagaacgggttctttattgaagaaagaatggaagacctaacaaagcgtgattaatattggtggtttcaagccacttaaatttttct

SEQ ID NO: 124263 - DNA, 416 bp, Arabidopsis thaliana columbia
  unsure (1)..(416): unsure at all n locations
gattgtnnnnnnnnnnnnnnnnnnnnnnnnnnnnnnnnnnnnnnnnnnnnnnnnnnnnnnnnnnnnnnnnnnnnnnnnnntnnnngngnnnnnnnnnnnnnnnnntttttacgagggaacatcaacatgctcccgttgctaacagaagtatagttaaaactctcggtgctcctctgattacggattaaacatgacactcaagattactcgtcttaagtctgcagataacttcgaccaatcacttctgtatgaccgttcaggacgtttatgttcggagcaaatggcacaaagaggtacccatgacttcatgctacatctgactacatctgccaagactcatccttaatacacacgtagatgtaatggacatcatggtaattgcctatcgcatattccactgaacttccatcatgatc

SEQ ID NO: 124264 - DNA, 629 bp, Arabidopsis thaliana columbia
catacgactcacttttagggaaagctggtacgcctgcaggtaccggtccggaattcccgggtcgacccacgcgtccgcccacgcgtccgtgcgagtagacgacagaaacggggaagcgagatctgaaaagttaacgacggagatggctacaagagcacctactcaatcttacagcgagcaatgtgatagtgactatcgttacaagaatgaatcgtgaaccgttgttatgctccaggtgtatacacctttaactactctcatcaatctctatgttccctcacgatatcaacgagtcctcgtcattgggctgagaaactcatcgtttatcgaaagcatgtaggttgatggatactaacacgtgctcatgttttgatatatgattcagcgggactgatgccacgattaacagatactctgatcgtcctcacctcaaaggttccaagatggatggcctggatttgaaagcattcgaagatgcatcatctgatgctgcagtctataaaggatccttacactccatcttgcgtggcagtaatgcaaggcctactcacacaaatgctagaaagcttgggacggcctcatggtaaaggatctatatccagatacatatgtgatccatcagccgaatc

SEQ ID NO: 124265 - DNA, 512 bp, Arabidopsis thaliana columbia
  unsure (1)..(512): unsure at all n locations
nnnnnnnnnnnnnnnnnnnnnnnnnnnnnnnnnnnnnnnnnnnnnnnnnnnnnnnnnnnnnnnnnnnnnnnntntttttgttttttttttttttttttttttagggcttcataacttactcataactttttgattttgattaaggagaacattcagattttaaaggacattaatgttagtattatgatgaaaaaaaagggtttacataaatggatttgatacaacaaaatttcagcatagctgcttctcttcatttcaagagtcttctactgttttgtaatttcaaaattcctcaggcgagtttcctccttttatgatccctatccgtaggcaaagcttcttcagacttcttttcgagccacttaacgcatcctgtgttttccggaagtagagatccagctatatgcataacctcttcatcaaaactttggacttgaaggcgcaacatagttccaagctttagtgcatgccgtttatgcgatctgctcacgaaagaaccttcaccatctctc

SEQ ID NO: 124266 - DNA, 658 bp, Arabidopsis thaliana columbia
  unsure (1)..(658): unsure at all n locations
aggtctactacgactcactatttggaaagctggtacgcctgcaggtaccggtccggaattcccgggtcgacccacgcgtccgcccacgcgtccgcggacgcgtgggcggctgcgagaagacgacagaaggggaggtagtgctgaaacacacaggagacgacgagtcgtgttcgccacgtcagatggctgagaacatcatctcttacctgcaaaacanaggttatcttgatgtgctaagtcaaagtcggaaaaatcaacccaatttgtcgattctatatatggctaaaggattgttctccctgattcggtcagaagcttgagacctgganacgatgtcgtctcgcttcgtcacactatcatttgttcttgaattgtgttgaagtcaaaagccaaagggaatatatctatanttgttctaatcatcatttagttagtttataaagagtttttgctccaatgatatcgactgtgttgtataatgtgaataaataaggtggatttcgttgtatttacaanaaanaaaaannaaaaaaaaanaaaaaannnnnnnnnnnnnnnnnnnnnnnnnnnnnnnnnnnnnnnnnnnnnnnnnnnnnnnnnnnnnnnnnnnnnnnnnnnnnnnnnnnnnnnnnnnnnnnnnnnnnnnnnnnnnnnnnnn

SEQ ID NO: 124267 - DNA, 501 bp, Arabidopsis thaliana columbia
  unsure (1)..(501): unsure at all n locations
nnnnnnnnnnnnnnnnnnnnnnnnnnnnnnnnnnnnnnnnnnnnnnnnnnnnnnnnnnnnnnntctttttgtttttttcttttttttttacatccatcataagttcattgttatttggggcagatcacacccgccggcagcgcgtgctgcttccctaaaaatctaccgtaatgcgccttgccgtacaggactcttttcccaatcctccatgttgtgtccgtacttttcccggtttgaacgctgctatgtagatcagccataaccaaggcaccctatcctcgggcccgtatcctaaacgccaagtttctgacaggcctcgtgcaccggtcttggtcctttacacggacagtgctggcttagtgccatgtattaaaagtcgggagatgcccatctcaccgccgagccactgcgaagccgcaccatcaccattttccaagccttgtagggacgtgttggggtctatgggctccccaagttggaagggtgctcgatgcagctcct

SEQ ID NO: 124268 - DNA, 488 bp, Arabidopsis thaliana columbia
  unsure (1)..(488): unsure at all n locations
gacgtcgcacgcacgcgtacgtaagcttggatcctctagagcggcctgctctttggggttggtgcgttttaattttttgatcgagacaaaacttttttcctactagcattcatagtgtcaaaaacaaaagtttcaaataatgccaggttaaatttataatttttgagcacaaaagtggtttgacacttgcattaaaaaatcggacaatatttttaaggggggacatnagggnactgcgtagttttgactatagaggaaacaaaaacctactgttgattcctgctctgcacaacttcaagtcagatgaagacctcaagtgaatctgggtatctgcaggaacaaataaaacatctcccattgaaatcccatcggctgatgcttctgtagacattcttccttcaccttggagtacaagcagaagagaagggcctggaacagagggaaacaccgtcgaggctccgctgggaagatcacacagatcaacttca

SEQ ID NO: 124269 - DNA, 509 bp, Arabidopsis thaliana columbia
  unsure (1)..(509): unsure at all n locations
nnnnnnnnnnnnnnnnnnnnnnnnnnnnnnnnnnnnnnnnnnnnnnnnnnnnnnnnnnnnnnnntttttttgttttttttttttttttttttttgaaaaaaccagcggatgtaactttgtgcaaaagattcacgccataaatttccctaaatcagggatcttctttcgtcaccggaacaaaacattgacatagcggacacatcgtgggttatccggtctcaccatcttactaccaggtacgctacccaaacgctttgaactgcttagcctaaaaatgatcatctagctcacataatccaaggacttctttttttaacccaaccaattactctttccttgcacggataggcacacacaagacctactttttctgcgggcctacctgctcatcacactttttgaaaaaaacatggccgcattagctaagggccactagggacatattgtctgtcgatattgactttgctttctgtgacaaatgtaccatttattctaagaactactggatg

SEQ ID NO: 124270 - DNA, 271 bp, Arabidopsis thaliana columbia
ctactatgggaagctggtccctgcaggtaccggtccggattccgggtctaccaccgtcgtacggtggaaagcacagaggagctagaccctgctatggttatctcccctgtagtactcgcaatgcgaaacctgatacacatgtttggaattccttcagccttatatttgggatgcactgacatgcacctgtggaatcacgaccttgtgccggtcttgctgcactgatggacatggtccaaggtactctagctaactgtctagcgttctgcta

SEQ ID NO: 124271 - DNA, 528 bp, Arabidopsis thaliana columbia
  unsure (1)..(528): unsure at all n locations
cgattgtnnnnnnnnnnnnnnnnnnnnnnnnnnnnnnnnnnnnnnnnnnnnnnnnnnnnnnnnnnnnnnnnnnnnnnnnnntnnnnttgtttttttttttttttttttttgggcggaaaatccataaccattaactgtctgtaaattgaatagaaaaatcaaaactaattattagtctcgcaaatcttacgaattatgacactgaaatgtgaactcacattgggagaagaagaaggcacaatttttgtcacaccatttgtctctaaatcttacactacaatctaacatctcagatgggttctgatttaaatcttaaatctttttttacacttatagatccaaagaatactcaatatatggacccattgcctcactgtttacagacaacacaagttgttgatgcttgtgatgatcaggaccgcttcaacaagtactgcggagatgtatcatcggttggttcttggaggagctcacgggcaagtctcactggtctgtcctgtagatacgcaatatcgctgtttggtgctg

SEQ ID NO: 124272 - DNA, 344 bp, Arabidopsis thaliana columbia
tgacgtggcatgcacgcgtgcgtaagctgggatcctatagagcggtcgacccacgcgttcgtacggctgcgagaagacgacagaccatataaaaactcgtgttgatctgttacacgttgaataatttctgagaatttcaggctatagccaaaacccagacctagtccgcgaaaacctcgcatatgcggcagacagagatgtcgactcgttacacagcggggcctggaaaaggcaccgagagaaaattcaagaaggcgctcttacttaattgctagaagaggaattggtctatccatggcgcttgtttctccacgatgaactagtctctttgggttcagacacaa

SEQ ID NO: 124273 - DNA, 488 bp, Arabidopsis thaliana columbia
acgtcgcacgcacgcgtacgtaagcttggatcctctagagcggcctgtcctgcggttttttttctttttttttttttgtggagaaataattggtaaacttttgcgggacataccgcttgggtcaagttacaaacggataaaccggtatagaatacacagagtttttgaattctcccatttaaactggaacttcttcgaactcatcctttttttaggtggtgggcaatatgttggcgtaattgacttttgcgaaccggaccacaaccaggtattgagtcttaaggtgctgaacaacgggaacaactgatccaaactttttgaaccaataggaatcttttcttaaaattttgacctcagaccctttcttaagaacaatcggtggtgggttctaggtaagcgcgcaattggggacctgaacccggctttccggttcatccgcatcgccagtttttgttacccaaaatgggccatttggagctctcaattcc

SEQ ID NO: 124274 - DNA, 446 bp, Arabidopsis thaliana columbia
  unsure (1)..(446): unsure at all n locations
gaagctgacacgcctgcaggtaccggtccggaattcccgggtcgttccacgccgtgcgccgcacgcgtccgtacgggctgcgagaagacgacagaagggggggccggcgatgcgtcctggtcggatcngaacggagcntcctgaccgccgatcgattcggcgcgtggaccgacgcggattacggtagcggcctaagcccgggcttattanatcgcgtgtggagacgtcgctgccgtgatcgtggtctgcaacacgcgcctaaaggcgtgccttcggattcaacgggctccgggcgtcggcctgtgggctcccattccacccggcttgtacaaggaccaaagagtccgacatgtgggcgagcaaccggtgagtaaaccccgaggcccacggaagctgaatggccggatcctccccgggtggcaccgccacccaccttgatcttctaa

SEQ ID NO: 124275 - DNA, 503 bp, Arabidopsis thaliana columbia
  unsure (1)..(503): unsure at all n locations
nnnnnnnnnnnnnnnnnnnnnnnnnnnnnnnnnnnnnnnnnnnnnnnnnnnnnnnnnnnnnnnnnnnnnnnntttttttgttttttttttttttgtctttttaatgaaaacaagttaacattgtaaagatgtacatattggcaagtttgtcagggagcttaagaccttagacgaaaccttaagagtcaagttaacacagagaagaacaatagtcaggtcacttccttacgcctaatcaaaagaacttcttgttgaatgatcgaatctcttggcaatgacaggacgaacatcgttggcatcaaccaatgtctttaagaagggaagtaatgtaatcagaccatcatcaggtggatcatcataccaacttttaatagggatcccattgtttatttgcaatctgtacacctgtggacagttgtcaactatagccacttttgctagatcaagacccaaacgggtaaatccttggtataaataccatctgaaagaatgcatgaattccg

SEQ ID NO: 124276 - DNA, 481 bp, Arabidopsis thaliana columbia
  unsure (1)..(481): unsure at all n locations
tacgactcactatttggaaagctggtccgcctgcaggtaccggtccggaattcccgggtcgtcccacgcgtccgctgcgagaagacgacagaaggggggcaatacagaacaccaatcggataatccacaagacaaaacttgtaatcaggagaagacgacagagagagagaaggagagagatcttccatggcggattcggaagcagataagccactgttataaatctcagccgctntcaaaaactagcaatcatcgtgaattcaccgaatccggaagttcctgtaacgcaattctctcacgcttgctctctggtctcgcctctctttggttgcctttgaaatagctttttaagttggcggaaatggactatgttgccaaggttgatgatcttgtgagggcgtcgagttcgatatcgacattagtggtaatgattgacaaagatattgggggcagattgtgtaagggaaagctggtagtcata

SEQ ID NO: 124277 - DNA, 241 bp, Arabidopsis thaliana columbia
tatggcttaaattatagcctctgcgtcttagtgcggtttctgcactcagacatggcagttttcacacgttgctgacctttgactgtactaccagggggaaaaaggatttggggttttagactagaatgtaatgaatttatccactgaggtttgccccaaccggaaatctcggacaggggttgcatttagttgaacattgagttctattactttctcatagtgagttgcctcaaacattatc

SEQ ID NO: 124278 - DNA, 594 bp, Arabidopsis thaliana columbia
  unsure (1)..(594): unsure at all n locations
gcctgcaggtaccggtccggaattcccgggttgtacccacgcgtgcgcccacgcgtccagccacgcgtncgctgcctctggagcagacgtttgattacagccgttctgatcaaaactccagtgaaagttcaaagtacacagagagaaacaaaaaaggaagacgaagaggttgaagaagaagagcccatgaacgctccctcatctagggggtcggaacngcaagcnagcatgctaggctacaagggcgggatnccaagctcgagagaaggctgccccatcccttccgacaaaccaaggcggaatgtaccatacccgaagaccaagggtccattatcatcatcccgtgggtccagagttcaacacgaaaatgcgaaaggtcccctgaaaagggggaaacacataccatcccgacgatggtcccggacgaatagaccgattgggctaacctcatgactgggaaaacaccgcaggcactgttccctacgggaggagctaaggagggcaccggtaggaaccctagccagctccgattccccccggccgcgccggtagactcccattctcccctccagaaatgtacgagccgagtcggat

SEQ ID NO: 124279 - DNA, 331 bp, Arabidopsis thaliana columbia
  unsure (1)..(331): unsure at all n locations
gcccgcagtaccggnccggaaacccgggtctacccacgcgccgaacacccgancgaaggcagcgagagacgacagaaggggaagaacaaagacganncgacggaanncnccacaagagggccgacccgaanncgaaaacccgnaagaaccgaancgaagaggagcaagganggnnngagcaacgaccatttttcancagggagggaagcanncaagccanncgacacagacggcgacggcaaaancgcaccggccgagcccggaaccnnaaggcggncacncngcggcaaaccaacagaagcacaacgcagagcaaacacaacgacggaga

SEQ ID NO: 124280 - DNA, 411 bp, Arabidopsis thaliana columbia
  unsure (1)..(411): unsure at all n locations
nnnnnnnnnnnnnnnnnnnnnnnnnnnnnnnnnnnnnnnnnnnnnnnnnnnnnnnnnnnnnnnnnnnnnnntttttttttttttttttttttttttttttgggaaaaagcagcgttttttatttgttgcaaaggataccagccataagtattacaaaatcaagggtattttttgttactggaacagaacatttgaagggggtacattatgttttaaccggccttaccagccccaaaccagatccaatacccaaatgcttgtgcttcttaaccttaagaagaacggcgagctcaacgaaacccgtgccttctttctttaacccaaccaagtttctattcttgcaagggttggccaaaacaaaaaaaaatttggccacgggcattaacttgttaagaaaatttttggaaaaaa

SEQ ID NO: 124281 - DNA, 513 bp, Arabidopsis thaliana columbia
  unsure (1)..(513): unsure at all n locations
gattgtnnnnnnnnnnnnnnnnnnnnnnnnnnnnnnnnnnnnnnnnnnnnnnnnnnnnnnnnnnnnnnnnnnnnnnnnnnttttttttttttttttttttttttttttttagcaaatagtattcatcaattagataagtaacagtattcatttccagatattgaaacaaagacattgagagaaatgaagtaacgacggtcaagaacacaaaaaacgacaaaaatgatctctaatagtttctgtaaaaaattgtgtcctgtgtatagttgcttagttatcatatgaacaatataacttggatttgcataatcatcgtatgaacactcgtaaacatttctggactctaccatgtcattgtataatccttcacttgtctttctatttgtttagtttcttcagctaatgaatcgttgagtttgcgatttccttgagatactgcttctcggaactagccattcggctttggaacattgtccattcccgtttacatctgtctctcaccccttgccaccc

SEQ ID NO: 124282 - DNA, 499 bp, Arabidopsis thaliana columbia
  unsure (1)..(499): unsure at all n locations
cgattgtnnnnnnnnnnnnnnnnnnnnnnnnnnnnnnnnnnnnnnnnnnnnnnnnnnnnnnnnnnnnnnnnnnnnnnnnnntttttttttttttttttttttttttttttgggagaatatattttttttctcaagatttagaatacataaacatgaaataaattattataacacaaaatgttggtctagttttccaatcttactcactatgcactgattgattcagaggtgtgatcatagccttttgaagaagttcatagccagctaagttcaaggctccgagaggagcagtccaaaaaaaccttggaacagctcctttgtagaaagcaagaggaccctcatgtgtgagaattgaataagcagccatcaacatcgacaattccacgccttgtggagccgtcatcattcttgttttaatcacatcgaatggcgttgttaaaactgcagtgaaaccaccggacaaggctccaaccgcgatggcttcccacggctccaactt

SEQ ID NO: 124283 - DNA, 608 bp, Arabidopsis thaliana columbia
  unsure (1)..(608): unsure at all n locations
tacgactcactatanggaaagctggcacgcctgcaggtaccggtccggaattcccgggtcgacccacgcgtccgcccacgcgtncggcgagaagacgacagaagggtacggctgcgagaagacgacagnagggggaatntctctctcctaaaaacgctatcaaaaagaaaaacaaaagctatntgttctgttttgtaagaaaaaaagtagttagaggagattttaactcagtgccgagtcttgtgatactctgagccacaagaaagtgttttggtgggaggatctactngactggtttgtatatggnggagatacanagcaccattgagccaccgcaacaagactctttcttgaaagccctcagaggctatggtggaaggagatgctgnnggtaagaacacagaactggcgaagatgggatatggctgaccagacatatgagatagatgctcgattagaaagagatgaaaagctgagacggagataaagagtagaggttagaaaatgagacatgctgnactcaaaaatggagagaggttgagcaccaagatgagacancagagctaccacatgatgagatccgatggaagaaagcaactgatatgggt

SEQ ID NO: 124284 - DNA, 519 bp, Arabidopsis thaliana columbia
  unsure (1)..(519): unsure at all n locations
ttgtnnnnnnnnnnnnnnnnnnnnnnnnnnnnnnnnnnnnnnnnnnnnnnnnnnnnnnnnnnnnnnnnnnnnnnnnnntttttttgttttttttttttttttttttttgaaaagcaaacaaagtcgcataaagatgattgaattatacaagtctaaactatcgttaaccattcttctacctacaaaccctaacttcacttcttaaccctagaagaagccctctttgctggagacttaaccgtctttggcttcacaaccttcttaaccggagtcttcttctttgtggccaccgtagcaactttcttcgtggcagcaacagctttcttagccggagatgtaaccttggccgttttggctgccttggctggtctagccttagccttgggcttcgcatcaacagctttcctcttagttgcagcagcagtggcacgaggaacgggcttagccttagccttcgcgctcactttcttttcctccgcttattgatatgcttaaactcagcgggtaatcccgcctgac

SEQ ID NO: 124285 - DNA, 509 bp, Arabidopsis thaliana columbia
tgttttaggtgacacttagaagagcttgacgtcgcatgcacgcctacctaagcttggatcctttagagcgggcggtttttttggtttttttttttttttttttgccacctttaccgaattcaatttcataaagggacccttttttcaaataacaccgcttaattttgacccaattcccaattaccttaaccattaaaccctttttgaaccaatcctaagaattggtctaatctaaaaaattcaaattttcacaaatttaaattttacttaacaaccattctagccataaaatccttattccggatcttaccattaaaaccaacattaacctttttgatccaattattaaacttacttgggtggaatttcttaccgattcttggaaggatttggcttaaaattggccccagaaccaattccgtacctttcttgtgaagcactttgaaccccttaccaaacttgcgaacggaccggttttgtttcaaaaggttcccccataaaactaagaa

SEQ ID NO: 124286 - DNA, 391 bp, Arabidopsis thaliana columbia
  unsure (1)..(391): unsure at all n locations
acgtcgcatgcacgcgtacgtaagcttggatcctgtagagcggcctcttntgagggtagatccgttatttatcacaacgtaaagacacagcatgttgagccagtggtgccaggatcagctactgttactgagggagccacggttgttgagctaaagcgatccagcaattaagccgacgttacaggaaagcataagctcctaacaaagttttttgacgagggcacggggaacaaaattcaccgcttgttcgagtgatacaggtacaccacattgtacttctcgccaaaagatagatgcggtgcattaacaaaatgcaccaccgttgccaaaacctctacagaggaacaaaagtaaatgacttatcaccaccctaagccaaaaaacaatagac

SEQ ID NO: 124287 - DNA, 210 bp, Arabidopsis thaliana columbia
gactcacttttggagaagctggcacgcctgcaggtaccggtccggaattcccgggtctacccacgcgtgcgcgcgcgcgtgagaagacgacagcggcgaggcggcgcacacgcgtccgtacagatgggagacgacgacgcaatggacgtgctggtataagacgacagaagggagcagacgagaccacagaaggatactgctgcaacaaga

SEQ ID NO: 124288 - DNA, 514 bp, Arabidopsis thaliana columbia
ctatgacgtcgcacgcacgcgtacgtaagcttggatcctctagagcggttgctccctgtggtttgttcttttttattctttgagaaaaacaaaacaaacttgatctctttgaaggtacggtatcacgttctattacaagagggaaaaaagattgttcaggagaaacgcatcataatccgaaagaactcagaatacaatcacctcgtatccaacaaagatagtttttttcattagcggggtattagggaaaacaacactgactttaaccagatacctcacccctcggaaaacaaattcccattacttttaacggctggctaataatcatctcccccctaagccacatcctataccaagcatgaaaatcttatgacctttgaccaacctaacccataaacaaaggatctttaccaaagacctgcccccacacacgagaccacgactccaaacaaatgtctaaacctaacctctaaaaaatttacccaaaccccgtggcgggaattacaacaaccca

SEQ ID NO: 124289 - DNA, 315 bp, Arabidopsis thaliana columbia
ttacctaagcctcgggatcctactagaagcaggtctgccctccccggttccgtttttttttttatcgctaaccgatccataggaaagtgagggagcccataatacacgtcccccaatgaagggcaagcagcgaaccaaaccccccgcaggcaactaaatggtttaaacgcccagccgaattatcttaacccaagatattctctaatcctcacccatagaccagcaaagaaaaaacttttttttcttgagcgggggccaacacaaaaacccaccactacgcacctgtttaccacccacccatatataaacccccgc

SEQ ID NO: 124290 - DNA, 610 bp, Arabidopsis thaliana columbia
accgggcccgaattcccgggtttaccccagcgggcgggagcgcgcggaaagaacgacagaagaggaaggcggggcctttgcaggcaataagcggaaccaggcaccgcaagaaagagcaaaagcgcggagagacgaacgccgccacaagaaaacaaaaaatggagcgcaaacgcacaccgggacacatctcttaatgggagggggcgggaggaaaagggaaaccgacgcacaaacagggcggccaaaccacgagggccggcccagccaaacaaatagggaacaatcacacaacccgacccacccaacaaccggcccaccggaacccaccagacacaacagacgaaaaaccgggccccggggacaaacgagaaactctacaagagacccgaccacacccaaaaacacgggagccaaaaacccaagagggcacccggggcacccaacaagaaggcccgccaggcaccgcgggggcccagccgcaacggagagcaaccagaagctcgaaccgaacgcgcggaggaacagcacggcgcacaagccgcgcccaccgcggcaaaaaaccacacaccaacaagcaccgtcgccgaggagcccccacccggccaaggcg

SEQ ID NO: 124291 - DNA, 384 bp, Arabidopsis thaliana columbia
  unsure (1)..(384): unsure at all n locations
gaaagctactcgcctgaggtaccggccggatcccgggtcgaccaccgtcgacggctggagagacacagaggatcggctgnagagacacagagggtcggtgcagagacacagagggacggtggaaaacacaaagggtacggtanatatctcacggaggcaagagttgattaaaagcttggtgttacacgaaagctctaaggactanaccaattgatcatgcatgatatcgctcattgaccctctcgtagaaacggagcactangtggatgattgngtctatgtcgatatacaagaaagcatcagtcacanaaccagttacgaatatgaatcgcgatgctagagaaatcagcacactgtacttcgtcacgacgtcgtcttctctca

SEQ ID NO: 124292 - DNA, 495 bp, Arabidopsis thaliana columbia
  unsure (1)..(495): unsure at all n locations
actatagaagagctangacgtcgcatcgcacgcgtacgtaagcttggatcctctagagcggccgctctttgggttttttttttttttttttttcggggccacagccacggatgggtattaaagcacacctgagtgggacatcgattgcggagtgccagaaactaggtgattaccagacgcattctacaggacacgctcaaaaggggcattcccttgaagcgagactagtccgcccggggctccaaaaaaaaaggtctttctttccagctgataataggacgggactgcacccatccataccagatcatatggcattgaatactatccataacccccagaggaggcccaccgggcaccaatcgcccgaacgagcactccagggaaaaggaacccactcagatgaatgctgggtccctggctcatgaacactttcagatgcggaccggccgctcctttagaccttggaccctgcaccgtagggatcccacctggatc

SEQ ID NO: 124293 - DNA, 520 bp, Arabidopsis thaliana columbia
aggaccggccggatcccgggctaccacgcgccgacggccggagaagactacagatgaggagaccgccgaccaaccaccgaaacagtacgcacgcacacccacaaccccccacccaaccacgcgcggcgaccaacaacccccgatgacgccagggaccgagagacctgctaggagggcggaacccgacacagccacaacgcgcacaaaccacacagccggagtgccggaccaaggcagccccagcagaccaacccgcgacgcacgaatgggagacgcccgaatccgcccaccacccgcgcacacaagctcacgaccaccaaggagcacccacaaaaacacagacgaccctgacggacagcgccccagggaccggaaacccgaaccctccggccgcacccgcaggccccaccggaaacccgacgacccccggaccggagaccaacccacggcacgaaacccaagagccaccaagaaacaacaccaacaaagaccgccacaacccacacccacgcgcaaccac

SEQ ID NO: 124294 - DNA, 507 bp, Arabidopsis thaliana columbia
  unsure (1)..(507): unsure at all n locations
nnnnnnnnnnnnnnnnnnnnnnnnnnnnnnnnnnnnnnnnnnnnnnnnnnnnnnnnnnnnnnnnnnnnnnnatccangcgttcgtactgttgctataagacaaaaaaggacacgaagaagtacccaaggttccacttctattccaaaatatgaaataacatgtttacatataaattataaatatcagagtgagtccaataattggttctgatcgagataagctgtataatctaaaacctcagacaaacacaatttatttgactttaaaccatcaaagtatcctaaaggaccaacaaatctaaacaaaaactaaacttatcttggaaaaaagcaaataaagccacacaaataaaattcccaagtctcagagaacagagtcatagccattgatctaatgtacaacacccaaaagaagagaagattgattgtttgggctaagaaaacaaaaagagcgtaaccaaccccgtagaagagagtttcagataaccttcttcttatcgaaaaacg

SEQ ID NO: 124295 - DNA, 503 bp, Arabidopsis thaliana columbia
  unsure (1)..(503): unsure at all n locations
aggtgacactattanaagagttatgacgtcgcatgcacgcctacgtaagcttggatccttttgagcgggcggcctttttttttttttttttttgcttaaaagaaccggtaccgagaagctggaagattggggaccatgtttttaaaaaactcacataactttaaccctggttccccaaaccttaacggtttaaccctttccaaaaaaacacttatattttggaataaaaaaacaagtccggggctttaagatttgattgatttttaaccgccgttccttggataaaaatctgatctgggttcaacacaatcggcgggggttaaccttctttgaaaagttcctacaacctcctttggttttaatttttcaccaaaccccgaatttgttgaaaggttatttacccttcttaaaaatcaagacccctttttgaaaaccaactggaactcttccctattcttgcgaacggaaggtggtgggtctatattattacccaccttttctag

SEQ ID NO: 124296 - DNA, 633 bp, Arabidopsis thaliana columbia
  unsure (1)..(633): unsure at all n locations
gcctgcaggtaccggnccggaatacccgggcctacccacgcntcctaaagcgcgaccggaaaaggccagagaccacagaaggggaagatcaaaaacaaaggcgcacgaaccgcccagaagacggcagaccccaattccaccacccacaacaacccaaccgacacagaaccacgacggccggagttttgaccatttttttgcagggaggggagcanacacgcgacccaaaccagacaggcacctgaagagcgcaccggccgcagacgaacactaactgcggacactagccggcaaaccaagcgaagcacaacaacccggaaccctgaacaccggaccagccaaagcctccaggcggaagatcaaaggcgcctcctgcctaacgggaaaacctactggatacagcacccggccttccgccagattctgccaacgctgaaagctgcccacaaaggaagctcccggattcatccgcttggccatgggcgaagatatatcctatacaactctccgccaaaaacttccccttctctagcctacatctcatggaccacatagcgttgacccccaacctgatggcacaatgccaccttaaggaccatctgcccatgcctaggcgcgatgattagtatccca

SEQ ID NO: 124297 - DNA, 500 bp, Arabidopsis thaliana columbia
  unsure (1)..(500): unsure at all n locations
actctagaagactangacgtcgcacgcacgcgtacgtaagcttggatcctctagagcggttggccttcgtgttagaacattattatggtcttccaagcacacgacaaatagagccaatactgccaggatcaagtccttttacgaatgggatgcaatcatgttcattgaacgcgttataattgacagtccatagtggcaatgaattctaagcacaatatactgtcttttggagggatgccgaaaaaacagagatgatcgcgctacatatcccgcaatacaccaactctatatagtagaaatggaggacttagaatttacaccgtccttgcctacagctatacagtggaggaaaattaatgcaattgcctaaccttaaccaaaaacacttgacttctcaagaacttctctgaacttttagagcaaccaccccaataaactgtcacactaacccttaactagatttcccaacttcgttgccggtttaacaaaacactaacagt

SEQ ID NO: 124298 - DNA, 507 bp, Arabidopsis thaliana columbia
  unsure (1)..(507): unsure at all n locations
aacatacattaaggaaagctagacaccatcacgtccaggtcctgaattgccaggttgacccacactgtacggcacaagatcagactcacatacatgcacgacatgtgtctcacagatcgtacagctgccataccactacataatgcacatcttcagagacgactacagatctcctgatctacatatgatcggctataacaatactttattgaggtgaacatcaacaataagagatctgtcacactctaatactctccagatcaatgatccattcatctcatgcactgaaacaacctatatctgtatgattccatcttctccanaccgtgttccttcaaccgattattcccctctactaacctgttcctagacactgagctgttttagatgatgctgccctctatcaacaagctttctacacattagatattgagacactgctcagactctgtccaagttatgctacactaacagcttttgcaataatactctaatgacacctactct

SEQ ID NO: 124299 - DNA, 569 bp, Arabidopsis thaliana columbia
  unsure (1)..(569): unsure at all n locations
acgactacnatagggagagctggctacgcctgcaggtaccggtccggaatcccgggtctacccacgcgtgcgtgcggctgcgagaagacgacagaagggggaggaggtatcaccaaggaggaggaggtaattaccaacgatgaggaggaagataccaaggacgaggaggacggcaccaaggaggatgaggacgataccaangaggcggtgggcgacactgatgaggggggatgtggngaagttactgccgacactgctgctgctacagangttacaacgtgctgctcaagatgctgctcgtatgccggaaaagctgatcagactcaggccgggcactaaaaacatatataacgcaatcaccaccgatgcgtgtattggatgatgtatggatgaatttaaagcaacccatggtcccgttcgtattgaactcgcttaaagggttgacgccctatagattaagaagaaacctatggaataaagctcgatcatgaatgcttaatgtggttgagttgaattctaactgttgcaaataaacactgggagttaaaaaaagaaaaaaaaaaaaaaaa

SEQ ID NO: 124300 - DNA, 650 bp, Arabidopsis thaliana columbia
  unsure (1)..(650): unsure at all n locations
ctcactatttnggaaagctggtacgcctgcaggtaccggtccggaattcccgggtcgacccacgcgtgcgtacggctgcgagaaganacagaagggggaggaggtaattccaaggaggaggaggtaattccaaggaggaggaggaagatccaaggaggaggaggacggtaccaaggaggaggaggacgataccaaggaggcggtgggcgacaagtaggagggggaagtgggggaagttactgccgccactgctgctgctacagaggttacaacggctgctcaagatgctgctcgtatgccggagaagctgttcagactcagcccggtcactaaaacaatatattaaccaatcaccaccatgcgtgtattgcattatgtatgtatgattttaagtaaaccatggtgcgtttgtaatgaactgcctcaagtttttgaggcactatagattaagaagagaactatgggaataaagtttgattatgtaatgttttatgtggtttgagttgaatacttgctgtttgcatataaaatcgtttgtagtttaaaaaaaaaaaaaaaaaaaaaaaaaaaaannnnnnnnnnnnnnnnnnnnnnnnnnnnnnnnnnnnnnnnnnnnnnnnnnnnnnnnnnnnnnnnnnnnnnnnnnnnnn

SEQ ID NO: 124301 - DNA, 513 bp, Arabidopsis thaliana columbia
  unsure (1)..(513): unsure at all n locations
nnnnnnnnnnnnnnnnnnnnnnnnnnnnnnnnnnnnnnnnnnnnnnnnnnnnnnnnnnnnnnnnnnnnnnnntttttttgttttttttttttttttttttttgggccacagtatcgtatggtattttgctcgactcagtaggacatgatatacggcatcacgatactaggtgattaccagatgcattctacagtagacgctcgaaaggggcattcccttcgagctttgcaagggtgcccttagcatgtaagtcgaagctctctcagccgagctgtcaatcattgggattccagccgcccataccagcgcaattggcattcaatacgatccagaagccccagcggnggaccaccgcacacccagcgcccgaacgtgcactcgcgggaaaaggaacccgcccagaggaatgctggttcctggctcaggtactctctcaaatgcggcccggccgttccttttgaacttggcccctgcaccgtagggatgcacctggctcaaaaggtcgacgttgag

SEQ ID NO: 124302 - DNA, 452 bp, Arabidopsis thaliana columbia
ccgcacgcgacggaaccaggaccggtccacggccgtaaaccgaccaaacaaccccgggggggggacaaggaggcgcccgccaggaccacaagaccccacccggaagagaattgatctcacccaccatgtcggccaagttggccaatctaacctaccgggcagatgacgaactcttttttgcgggggaaaacaatgggaagaacccgaacagcctgctaaattcacaggctagtaagaggagtaattcataaatgcccctggacacttcctttggtcgaatagcacgaggaccttcccgggcgagaatgcaagacagcgcgctcgaagccgacaagaaaaagttcttgggaggccctagactcccttgacagaaaccaccccaaagggcgcctggaaaacccaccggaacccccgggatgtggttctgcccgcgacggggctcccacaggtcc

SEQ ID NO: 124303 - DNA, 511 bp, Arabidopsis thaliana columbia
  unsure (1)..(511): unsure at all n locations
nnnnnnnnnnnnnnnnnnnnnnnnnnnnnnnnnnnnnnnnnnnnnnnnnnnnnnnnnnnnnnnnnnnnnnnnnctttttttttttttttttcattacaattttaaattaaaatacttttgtgatcatagggacaaccaaaggaaaaaatacgtcattttatatgtcatagatcatgtaaaatacaataaacataaactctcgggaaagaatcgattttaaacatctgcaatgaagatttcattaaaaacaaactttaaatatgtggctctttacatttacctcattatccagaagccttggctccttttctctattgtgatgctattctattaataaagttatccaaatatcctaacatcttatcaatattgcttcctgaaacttcagaaatcgtatttctaaatgaatgactcttttatagcatctatgtatctcactgcacttggattatcatttggatagctactactgacgtgagcacagtcttactaataattatatgttatggag

SEQ ID NO: 124304 - DNA, 505 bp, Arabidopsis thaliana columbia
  unsure (1)..(505): unsure at all n locations
tatcactactttggaagtggccctgagtccggccgattccggcgacaccgtcgaagtcatgtatgtaaacttacttcaatatattctaatgataattgatataaactttagaaccttagaactaatattagtttaaacaatatgcttatgttcatatctgacagcagtataagacatatgnatctatgatcaatctcataaatatgaaactcgatcctgtctgtctatatgatactctaatgacactcaagtacttagcctttaaaaagtgaattagctatggatgttcttcagatagaaactgtgagatgctctctactagatgccttgttacactgcctgaaacaaactagctcctctgttactataacataaaaccaagtcttcttgacttatgatataatttaagaatctgcgccagtgcttattacacttactgttttagagcactatctaggatggagatgctttggttatagcacatgctcatttcataatatgtaga

SEQ ID NO: 124305 - DNA, 393 bp, Arabidopsis thaliana columbia
  unsure (1)..(393): unsure at all n locations
ctatagnnagactttgacgtcgcatgcacgcgtacgtaagcttggatcctctagagcggccgccctttttgttttttttttttttttttttttttttttttttttttttttttttgttttttttttttgtttttttttttttttggggggaataaatttttttttaatttcccaaccaaaaaaggggcccaacccgcccccgcccctaacaagatttccagcgttttgttgggtgttttttcaaaagcctttaagaatttcaaaagctatttcaaagttgaagaagggcccctaaaaaaaaaaaaaaagttgcccatttaatatttccttttaacatcactatctctggcttaaaaatgtttgatttgacctccttgtggggaaaacaactcc

SEQ ID NO: 124306 - DNA, 424 bp, Arabidopsis thaliana columbia
  unsure (1)..(424): unsure at all n locations
tacgactcactatanggaaagctggtacgcctgcaggtaccggtccggaattcccgggtctacccacgcgtgcgagaggtggatgaaccgtcgaaatatggagtggttgttatggaagaaagcactggaagagtggagaagtctgtggaaaagccaaaactgtatgtaggtaacaagatcaacgctgggatttatcttctgaacccatctgttcttgatatgtttgagctgagagcgacttcaatcgaaaaagagactgtccctaagattgcagcagcgcaagggctctatgctatggtgctaccagggtttttggattgacattgngcacccccggactacatacgggtttgagactctacttagactcccttangaagaatctcctgccaaattaaccagtgggccacacatagttgggaat

SEQ ID NO: 124307 - DNA, 486 bp, Arabidopsis thaliana columbia
gtcgcatgcacgcgtacgtaagcttggatcctctagagcggtcgccctttggtttttgtttttttctaaatatacccatttgtttgtgcttgatctaggacccccacgattgagttggcccttcggccggggaaaaaacttttttttcatatcgcaaacaaaaagggggtccctatcaattttcgcccccaaaaagaaaaccccctgtgttagggggggggacaaaaagccactggaaaatccaaaaccgatttgcacattgttgaaggggcccctaaaattcaaaggccggcggccaaataaaacttcattccaaacaaacaatagtggggttgaaaaagatatttattgacccccttggaggggggaaaagaaaccctcgatagtcattaacccgctcggatcaaaaaacttcctaccccggggttctgtttgtccttcatcccggcccattttactaaccgctagaggccccctattaatttt

SEQ ID NO: 124308 - DNA, 625 bp, Arabidopsis thaliana columbia
  unsure (1)..(625): unsure at all n locations
gcgactcactatttggaaagctggcacgcctgcaggtaccggtccggaattcccgggttctcccacgcggtgcgggggtgggtgaaacggaaaaatatggagtggttgttatggaatgaagcacttggagagtggagaagttcggggaaaatccaaaactgtatttaaggaacaagatcaacgcctggatttatcttaacaaccccactgggcttgattggtcngtgcgggggggggccccacaccaaaaagaaacctttcctaaaattgcgcatcgcaagggctttattctattgggcttacaagggttttggattagactttgggccagcccctttgatacatacagggttggtgaatctatttaaaatccctttagaagaaaattccctgcccataaaccacatgggccacaacttagtgggaatgtctttggttccaaaccccttaattgggcgaagagtgtttaatagaccctaatactcacttgggcagggctaattgtttcgttagtgtgggaattctcccaattccacgcaacgggtggtgccatatataaactttgcgcgttttgtcccatactaagccgggatacttactgttggagaaggcgcagaaaaaaaaa

SEQ ID NO: 124309 - DNA, 428 bp, Arabidopsis thaliana columbia
tattctcagcttatcactacttaggagctgtccctcagtccgtccgattcccgtcaccagcgtcggcatcatatatatctctataattcgatctgccaaaaagcgtggcaaatgagtctaaatccgtttggttctggttctccaattccggaaatggccctttccccttttaccccttaaaggggagtttgattttttgagggggccttttaacggggttttttttttttgaaaaaaagggtttccccccttttttttttccccccccccacgggggggaaaaaaaaattttttttggggggaacccccccccgggaattttttttggggggtaatattgggggggggggggttttttttggggggcaaaaaaaaaacaaaaaaaaaagtcggggaggaggaattttttttttttttttttttttttt

SEQ ID NO: 124310 - DNA, 410 bp, Arabidopsis thaliana columbia
  unsure (1)..(410): unsure at all n locations
ggaagtgcccctcagtaccggccgattccggcaccaccgtcggcggctcttgttactaatgctacacacgatttcaacagatctgtgagtgtctgactatctgtgacacatcaacactgtctgacagctcaccatagtctacctgagcacgacangcaatccacgacgccatcngatgaaacctcagacacaactgctacttgtgcagtgatgaacacatcctggacaggctatcaacccaacctcttgaatcggactactagatgacggtacagaggaactcagacaccatgtgagatataccgccatcgttgcagtgatacaaccttggaatattcaaaatctagattgccaagcgcattgatgcactcttcggtgggatgatgtgcaggggccaatctagacagtta

SEQ ID NO: 124311 - DNA, 521 bp, Arabidopsis thaliana columbia
  unsure (1)..(521): unsure at all n locations
nnnnnnnnnnnnnnnnnnnnnnnnnnnnnnnnnnnnnnnnnnnnnnnnnnnnnnnnnnnnnnnnnnnnnnnnnctttntttttttttttttttttttttttttttttttttttttttttttngggaaacaactttttgcttgttccttgataaaataggtaaattcaattcatgttacaacataaacatttgggttgaagaagtgaacacgaccaaatttgatatcgaacttagcaagaaaacaagaactgaaaaagataaccggttggttgaaccagcgccagacatttcatcggtatagtcattataagaatctaaaccgctagtaccttccgatccagtagtagtccacatccccagattgttattcctgccaccaacgccaagaacaccagagtgaaatgtgatttgggtgatgaatgaggcggatttaggctcgacgctatatgccttctcatacctcatttccgcaccttccccggatgccacgaagaaggctccattcaccaaaatgtccccct

SEQ ID NO: 124312 - DNA, 475 bp, Arabidopsis thaliana columbia
actatagaagactatgacgtcgcatgcacgcgtacgtaagcttggatcctctagagcggtcgccctttgtggttttttttttcacacaaaaagatcagtgttttggaagctaagacatagtctcccacttagaacaaaaaactaaccaacccgtagtttactgacaatgatgaccacatccgtctgtacatgatccagaaaagctctgtgatggatctacaaacaaaatttttttcgtggtacgcttcgaatagtccagaccaaccaccaaggccacttattgctaacttaatgtcaatgcacccagaacccgccccattattgatcgtgacctaatgggaacagtgacttttgtggttatcattgccactaaatctgtgttgacgaaatgtggttcatacttcattctactcttgagcacctcctcctaagggtaaagatgtcgtagcagttcccttcttaaatcttttgttcg

SEQ ID NO: 124313 - DNA, 564 bp, Arabidopsis thaliana columbia
tacgactcactatagggagagagctgacacgcctgcaggtaccggtccggaattcccgggtctgacccacgcgtccgcccacgcgtccggaataagtcattcacgcatcttctcatatatcggtttgaagagataaactcacatccaaagatctctcattgatctcgttcccgcttctgctgctgtgaatgtctgttacaatgtagctagaagccgtataaccgtcgtgattgaaggggtagccgggaaacaggtgatcgagtatacggctattcactggtattctcgcggtgatatctccactgccatattgaccaacagaaggatggatgattggaagataatcctttgccggactacgacccggagctctcctcgaatgaagcggtagcctggcgattgtctcctttatccggtagcggatcccctataactccatttgctttaggtataggagtatggcccgggaaggtatcttcctaatgcttctttggtgctcgtaagaacattccactaaggcgaaggcttttattttccttgtcgagttggtcttatggaaacgtg

SEQ ID NO: 124314 - DNA, 363 bp, Arabidopsis thaliana columbia
  unsure (1)..(363): unsure at all n locations
nnnnnnnnnnnnnnnnnnnnnnnnnnnnnnnnnnnnnnnnnnnnnnnnnnnnnnnnnnnnnnccacgcgtccgagatgtcgatcacgagacgatctgtgtattggatagcatgcaaaaaaacaccttctagagagaaaacagtctgtggcaaagcctactctgcttgtaagactcactatcgactcatcaatttatgcactcatcccatatgttcttgatcttatatagcttggacctacttacatcagcatagaactgtgactaacattgaggatgatacggtctatatgctactgtgcttccatcgttatctatagacatcaaacatccacgtgactacttctcaagactatagactctgc

SEQ ID NO: 124315 - DNA, 502 bp, Arabidopsis thaliana columbia
  unsure (1)..(502): unsure at all n locations
actatanaagactatgacgtcgcatgcacgcgtacgtaagcttggatcctctagagcggtcgcccttttttttttttttttttttttgaagtccaaagttcattaagaagagattacaaatagagagagggatgacaattgaactcagtgaagaattataaaagcaaagagatccaagattgcgatttatgtcccagctggctaataaaaacgaacatctattttttggtggggataaggaatgactatagcttggatctgctccaaaggcttcccttttggatcaggcaccatggcaatgacgaaaacaatggccagcgcgtttgtggcagactaaatgaagaaagttccgtaagaactccaggacatgaggaaatttaaagtggtataaacagcccacggttcgaaccagttcaccagggtggacatgcctcctgctactccttttatggtaaagggaaattttttagaaatgaccacccgcgggattgttaccattcct

SEQ ID NO: 124316 - DNA, 526 bp, Arabidopsis thaliana columbia
  unsure (1)..(526): unsure at all n locations
ccgaattgtcnnnnnnnnnnnnnnnnnnnnnnnnnnnnnnnnnnnnnnnnnnnnnnnnnnnnnnnnnnnnnnnnnnnnnnnnnnctttttttttttttttgaatgaaaagaatcactctatataccctacatgaagctgacaacctcagacaacaactcatccactatcatactttctaattcacaaaccactgactcatcatcagcttcgagttctaaccactcatcaatgtctatgactggcactttggccaatgattttttcttggatcgcttctcttgcctagaaagtactttccagagttcttgtttcagtccacatgtgcttagcgcagtgcctagcctcctagaaacgggtttcttccatgttggtgtagctgaaaaggattctagaatctctacaagacttgaattgactctgtcaaacaaaatctttctgtcagatcttttccaagatgtctctgtgtaatacttcttctccagtttctcgaagatcttgggggtgatgactaaatcccgtttgcca

SEQ ID NO: 124317 - DNA, 466 bp, Arabidopsis thaliana columbia
  unsure (1)..(466): unsure at all n locations
caacgaaagcccgcanccccaaaaacggttgaccagccgggaaaaaacccnnaaaccaacnnccaacgnnacaggggggaccatatggccacacagagggcaggacaccgaacaaacagaccagaagacacgcccccgcaaaaaaaaccacgcccgcccgcaaaaagaaaaacccaacaaaaaacaangacatttttctggggggggaccaaccaaaggcaccccccccagaccaccagagcccgcaccaaacccgagcccggacacaacacaccccccccccccgaggaaaaccccaccccaccacgaccaaccacaggcgaaaaaccaaaccacgagcgccggaaaaaccccaaacacaacaacaaaagacaggaaaaacccaaacaccccagccaccccgagaaacaaaccaaaacgcaccaaacaccccacaaaagggaaacaccccacagccccccgaaac

SEQ ID NO: 124318 - DNA, 675 bp, Arabidopsis thaliana columbia
  unsure (1)..(675): unsure at all n locations
accccccgcacgcgccgtatccggtcatggaccgcgtttttcccacgctgagcgggagcgctggtatgagacgaggctgagtgtccgtggcagtcactcgaaccacttccccttcgctcgtgcatcgtttccacggggggacacctatagctgtccaaaccaccgcgacatcaatgaaggtatatgatagccatccaccaccgcgaaaagttctatcattagggggggggcagacaaaggaacgcgaatgggctatgatgcatgacctaaaagatcgcgcacccgtagcagtatagacctacgaccagcctgccgctaaacaagccgacccccgatggacccaaggccgggctccatacacaacaagatgagagagcacagagggcgaaacgtaacgagctcgagaaactcgcacctagaagcacgcaggcaaccgctccgttgatcatgcaatgggtgacgggagcgcgagccgtgcgaaagagtttgctactaccatgagtgaggcctccgcgacctaacaatacgtgcacacacggcagcactagccgcaacgccggttgccgctccgacgacaagcgacacgacccgtgccgttatcgatctacggagcacacccaccaaaccgcatgcacgcacggcaccgacaccangttagcacgtgaaagatagcac

SEQ ID NO: 124319 - DNA, 510 bp, Arabidopsis thaliana columbia
  unsure (1)..(510): unsure at all n locations
cagctctaatacgactcactcttgggaaagctgagcacgcctgcaggtaccggtccggaattcccgggctacccacgcggtcggaacccgtgcaggacaggatcatcgtgctagagacccgcacagagagaaccctagagagagcacagctgaggcaaaatctactgagctgaacagactcgcttctgatgtatcatcttctgcgagcttcgaagaggttgaggtacttttatggcgtggagctggngacatgctcatagattagggaaatgactgcgaagatgatgcaggaagataggccactgtgcactccatcagcatctacagtgtccagagatggagatgatgcatacccaaaacaatatggcggctccgatagaagagagcggagaggattgagccatgctgcgaatcctcctaggaatgacgaataacgtgcttccaacaatggacggactggggaatggctagatgtagcctgaactcaagatctacttcctaccaggaaca

SEQ ID NO: 124320 - DNA, 525 bp, Arabidopsis thaliana columbia
  unsure (1)..(525): unsure at all n locations
gnnnnnnnnnnnnnnnnnnnnnnnnnnnnnnnnnnnnnnnnnnnnnnnnnnnnnnnnnnnnnnnnnnnnnnnnnnnnnnnctttttgttttttttttcataaaaattttttgtttttattatataaaagcctactattatacattcatttttcaattttgaatccattttgataaggaacaaaggcattcacccattatataggggaaaagaaaaccatctttttttaaagtttgaaacctcttttttttacctttaaggcgatcctacaaaggcgtataatatttatatggcacataataatagaatataactcttgaatggggggaaagatgcctaaaccttgtacttgatctcagacatgaggaacccccgcatttgatactacgccgagaactgtaagacatcctacatgatctgatcgagacctttgaagcccaccaaactctcgggaaattccttcaacaacgcaccgtatgtatttaggatgtccaacgttagtttccctgcacagcttatgaatggt

SEQ ID NO: 124321 - DNA, 231 bp, Arabidopsis thaliana columbia
  unsure (1)..(231): unsure at all n locations
caagcacgcgacgaagctnggaccactagagcgccctccaaggangttgagagccaaaaaaaacacnnnnnaaaacnaaaaagaggccacctanaaacaacaaggggaagaagaaaccacaagaaaaacaaaacaggcaacacccaagaaagaacggcacagaaaaccaccccggcgaacaagactctacacctcctcttcagggggggaggggacccacaaaagcacaaa

SEQ ID NO: 124322 - DNA, 523 bp, Arabidopsis thaliana columbia
  unsure (1)..(523): unsure at all n locations
nnnnnnnnnnnnnnnnnnnnnnnnnnnnnnnnnnnnnnnnnnnnnnnnnnnnnnnnnnnnnnnnnnnnnnnnnctttgtgtttttttttttttttttttttttttttttttcttttttttttgttatgtctttttctttttttgtggaaaaaaattccgtgggggcttttttttcacaatttttttttttggaaaaggtgccttcccacccaaagagaggggaaaaaaaaaaaaaaagctttttttaagacccaaaaatttttctcaaacggccccttgagtaaaaatctctttggcaacccatggattggaaatttttttgcttttttcccacctttcccccggttattttggggacctttcttgctcttcaatgaaaaaaaggaacccgttttttttttcccttgcgcctcacaggaaataatcaggggccggttttttggctagacccccttttgatttttggggggctgcatcaaaaacacaaaactttttgtttaaattctcatccacctctaaaatg

SEQ ID NO: 124323 - DNA, 476 bp, Arabidopsis thaliana columbia
tacgactcactttgggaaagctggtcgcctgcagtccggtccgattccggtcgacccacgcgtcgccaccgtcggttggggaaaacaccttcgagaggacaacctctctgggaaaaaaaaaacacactttgttttcttttatgcaattttaaagtttgtaatttgcgttgatatatttagttttttgtgtccatattgctcattgctggaaaaaagaacaagaaatgtaacctaacagcaataacacttaacctgcagcttgaagaataaatgaagctttgtttaacttgaattctattgaaaacatgtcaagatcatctctgcactatatgtgcacttatggcagtcttactgaaaactttaagtggggtgatgctagacatattgttttgaatttgtaccagtttattggtgaacttctctttttactctaggtaattcaaccttacttattaagaccacaaccgaattccagt

SEQ ID NO: 124324 - DNA, 511 bp, Arabidopsis thaliana columbia
  unsure (1)..(511): unsure at all n locations
gcactatcgaacacctatagacagagactatgcgcacttacgtgaacggatatcctctagcagcggccgtccttgttgagcatttgctacgttctggtccttcaagtagtagcgacagagatttcaagacgaagaaacccagcagggtctagaagaacttgggaggaggaggtgatggaagatgcatcaagtctatagggaaaaaagaaaggatgcatttataaaactaattttatgaggaggggaggaggccagacgagaggctagtaattgccgtagctctgtaacaagttttgaagcggtgtaagtatcattgaatactgcacacggattactcttggaattcagcattacagagacagagctatgagtcttgttacatacatgaaatgtactttcggcagtatcctctcttacgacgagtctgttacaggtatcgatcttgctatgattggatntatcctctctaagagtgtagcctaaatacagactctcacatcgttatatgtgc

SEQ ID NO: 124325 - DNA, 562 bp, Arabidopsis thaliana columbia
  unsure (1)..(562): unsure at all n locations
aatgcatctatcgcacgatcatagaacccatgcagaattgcatgactatcatacactcataatctctcttttttgtcaaccattgattaatgatatcaatattcgttcgaagttatatcatagctaccaaattctgtaagtgtctccctcaaatggcaaaccatatacaaaataccaatcccgcaggtaatgattattgatattcaattttatgtgggtgtattagatggatacaatgtggaattaatggctgtgaatgtggcgtgctcactatatggtatccntataggcggggcttgaatctgagccttctcttcatccaaaagcactaacgagaagatatataccgaggggtctgaaacttcgaacaccaaatatatagacgtntcgaaacattcatacggataaagcagcacacacttctaaaattgttgactctgttctgattccatcctcatcacattatgcttcattctttctcctcactgacatcattattttcaatttcagagtatttctgcattaagctcagtaagtctcgctatataggtctatactatga

SEQ ID NO: 124326 - DNA, 453 bp, Arabidopsis thaliana columbia
  unsure (1)..(453): unsure at all n locations
acgtcgcacgcacgcgtacgtaagcttggatcctctagagcggcctgccctttgtggtttttttcaaccaaaaaaaatcttttgctttatctatgagaggccaaggttgtatcacatagcgaagcctgttttaatacttggaaacacatatttgctcactcaagcggacctttactccaagggcggaggctcaaacaacaagcaattaatcgttggggtgaaagcnaagnccggagctcgcagcataaattagctgatagcatttatcatcttggacctccccgaccggtgacagtggaagctacagccacacaagataccccgagtgtgaaagctcccttacggggatagaaaaagcgacttaggaacatccccatcatgctctagacggagccagacatgcacggccttagtctaatgagtaactctattatcttccacataaagcattga

SEQ ID NO: 124327 - DNA, 598 bp, Arabidopsis thaliana columbia
  unsure (1)..(598): unsure at all n locations
acgactcactattgggagagctgacacgcctgcaggtaccggtccggaattcccgggtcgacccacgcgtncgcccacgcgtncgaccacgcgtccgcttcactaataacagtcaacccaatacagacgactcggcgcaactgcagcgatacgccacatgacacatgagagaaacatgaaaataangagcaggatctagaagagcaagacaccaagactgctcttgcggcaagggacagaaacaacaagtgagctgctatgctgctagagcgtgagcctaagctcaggaaaagtcttctcatccactcccgagacatcaaggaggcatgcccataccgaacacgacggacactaccatgagtcgtagggtcagagtccacagacactgcacgaaggccatgaaggtggaacagatacgccctgaggtgaaccgatgaatgactcattgctcagccctgacatggaaacaccacagcgaaattcctaccgcgagcaaagaacgagggtgcatccagcagctaggtctccaaccgacgctgcacgagcacaaacagatcccaccgctgggaaccaccgagccccccgcaagaggcccggc

SEQ ID NO: 124328 - DNA, 418 bp, Arabidopsis thaliana columbia
  unsure (1)..(418): unsure at all n locations
gggaaggtgggacccctggcaggacccggcccgaatttccgggttgaacccagccgtccgaccggttgtcagaacgcttcnaaaggggcccaaatggggaggcgaatcttaaaatggggaaacaaagccgcaaagggcttttcccagctgcaacatttatagttttggatccgctcccaatgagcactctggtctcgtccacaaatcgatcattgaagagtaggacaaacgttactctcatctcgcatctaaagaccaccactatggctttaatagaccaagataacgcatggtacattgtgattactcactaatgttctaggatgtaatcatcgatgaatgttccaacatgaagaatgattctgactcccactagacaatccacctgagaccaactaaatatgattcgggaccatat

SEQ ID NO: 124329 - DNA, 409 bp, Arabidopsis thaliana columbia
  unsure (1)..(409): unsure at all n locations
nnnnnnnnnnnnnnnnnnnnnnnnnnnnnnnnnnnnnnnnnnnnnnnnnnnnnnnnnnnnnnnnnnnnnttnntgtgtttttttttttttaannttgacggggccggatttttctaattaataaataaaatttggagcccataatttacattggtatatctttttattgcttctggcttctaagtaattttatcatcggccacacaaaaaaaccctattcgagtttcaactatgttaatcgaccatggccattttttttatataaacttattaccctggttgtttgaaattaatcctgcaagtacctccagggcagattctgaccgatttgaagagagaggtcaccacctcattccagggaaaattttaattccgggttaatttttggctggaccgagaattatgccaa

SEQ ID NO: 124330 - DNA, 519 bp, Arabidopsis thaliana columbia
gcacgcgtacgtaagcttggatcctctagagcgttcgctctatgggttagtctttttaaaatactaccgacgcgcggggctgtgacacttttacaaaatgtggcattgtgcaatataaacactaaagtttttgaaaagagaataaaagtccccagaataaaaattattattccgccattttaaaaaaaaaaaactcttattggagggtttttctgccccggctagaaatgaatgatgaaaaaagacccttttggtaggcttcaacgctataactctgccactataaaccgccccaccctgttaaattccggttaataaactccctctagaagataccagggcaaacccaatggggcgataaaacctgcttccggggtatccattaacgccggactaccaccagaaatcttgggtgcgctttatagcatgggcgctgtccacttgccttatttaaggatgcagggtagatcaagtccccacccgtagttggctttagacccgaccccatgctaggcgttt

SEQ ID NO: 124331 - DNA, 454 bp, Arabidopsis thaliana columbia
gaaagccggcacgccctgcaggacccggcccgaattcccggtctaccacgcgtccgtctgggagaaaaacacaaaggggggcggctgggagaagactacaaatgggtactttggcaagaggactcctaatgggggaaaaacagagagatatggctagtgccatccctcctgttcgcccatcttagaaagagaaaaccggggcttttttttagggtattgctggcgagggcaaacctccagaagatgaccttatggaactttgatttttaaggtcgtgacctgaaggcaataacatgtgccacctgattgtcaatcgggatagtggactgcatctaataaagatggcctggaaacacgtattttccgatgaatcctgttgaaaagaaaattaaatcatgggttccctgcaccttaaaggtgcagggcaacttgacttggccctgaaatggtatcc

SEQ ID NO: 124332 - DNA, 470 bp, Arabidopsis thaliana columbia
ggcatcgccgcgtacgtaagcttggatcctctagagcggtcgctctttggttttgttctttttaaatatttttaagaaaccagcctatatactcatgagtaagctcaaggattcactcattactggtcgctaaagcgcatctgccaaagttgtcacactaccatttcagaggacggacgggcagggaaacaacccatttttttatgggggggtgacaacaaaccttaggctttgctacagaaaagactttgtaggctacagggcctggcatatcgaaacttccaaggacctggtttgattctcttgtgcaaagacacttggcttgaatgtcctgcgatcccccctagggaaccggggggtggctgccggcttttaagtggtttttttccggttttgcgcaatatcctttataaaaaggggtgcctttcggtaattccgcacgtaaacttattgcattaaatggtaactca

SEQ ID NO: 124333 - DNA, 494 bp, Arabidopsis thaliana columbia
  unsure (1)..(494): unsure at all n locations
gaaggcgggncccccggcaggtcccggcccggaattcccgggtcgacccaggcgtccgtccggatgagacaaaacgacggagggcggacctagaaaccttgatttcactaccaaccctttatgattgctgtgaagactccgaagagttcgcaaaaacttcctatgccttgtgaagtgcctcgatggaagggctaactccggcgactttcttagtggttgtttacgacgaaggaatcctggcgcctgcacgatatatccgtgaacttcaacgcttggtgaatatgacagtaacgaagacgacaatattagctctctcgaagatgacacagcttttttggacgatcactaaacatattcttcaggggacactgtataggacatgttccatggatacaaagatggagcttcctccttctgatccgttgatgcgcgttatttctaaggggctttatagaggttggccgcaaccacagtattgcgggcgacggatgtat

SEQ ID NO: 124334 - DNA, 520 bp, Arabidopsis thaliana columbia
  unsure (1)..(520): unsure at all n locations
tgacgtcgcatgcacgcctacctaagcttggatcctttagagcgggcggtttntttggtttttttttttttttttnttgaaaaaagggtggtggttattcctttattatgaggttatagagcaattttgaaactccggcctttcaattggggttagattcccagaccccttaaataccaccattggtcggctgggcttaatgggggttcaaaaggccaacacccctgccccaatttgcattggttgaaccctttgcggccattccttacaaaaattcttcattaaccggttttaagggaggttgaccttctaaattaaagccttcttttggcataggcaattaaaaggggattaaggatcctccaaaccttaaccttgtggcaaaattccttaactggttataggtatagctaccatccaaaattttgttgccacacttaattgaataaggggttccttaataaagaatagggtcaagggattcgcctaaaaagcaactaatatctctaacttcaattgg

SEQ ID NO: 124335 - DNA, 367 bp, Arabidopsis thaliana columbia
tacgactcactatatggaaagctggtacgcctgcaggtaccggtccggaattccgggtcgaccacgcgtgcgtacggctgcgagacacgacagagggggcagatctgaatctgatctttagagagagagagaagatgcagaggacgtgtcgagctgcacacttacactatggagacgctctctattgggacgcttcgtacgtgcaagacgcgcttttttaggatgataccaatgtactctcctctccgtccttttgacagcagctacgctctactagtcacgagtactcttggtagctgtgacaactcctaatgtcataggatataggtgacgatgggtgtgacgacatcatgaatgttgatatctc

SEQ ID NO: 124336 - DNA, 491 bp, Arabidopsis thaliana columbia
gtcacctatagaagatcttgacgtcgcatgcacgcgtacgtaagcttggatcctctagagcggccgctttttttttttttttttttttatttttttttgcttttttttttttttttttttttttttttaataaagggaaagcatatgaacattcaattcaattcaaaaaacacagaagatagattctttcttcaccatagatctaatctaaattactcttaaaaagccttaaaaactcaaaaaacacaagagaggggatttggttgattaatcaatcgtcttcagcagatggcttggaagcaccggtctttttaagaagaagaagattgggaatgttaggcatcacacctccattagcaatagtcacatttccaagcaatttgctcaattcttcatcggtcctcaccggcaattgaatatgccttggaacaatcctcggcttcttggtatccctcgctgggtttccaggcaatttcaataccttaacgggg

SEQ ID NO: 124337 - DNA, 489 bp, Arabidopsis thaliana columbia
cacgcgtacgtaagctgggatcctctagagcgttcgcccttgctgtagatcctttttaaaattaaaggagaatcaaagaacggccattaggcacacactagctaaagacatcccacaaacgggaccgagagttttagtccacccctacaacggccttcaggacccgggaactccattgcaagaaccgaagttttttttccgagggaggcaacagaccaacaaaggaccaacaaaaccacaaaaaagcacacaagggaaccgaagcccacaccgcggcgagaaaagagccacaacggaagaaggacccacaaagggccacggacgaaccagcggggggcaacaaacccacaccgccaaccggccgaaaaggagaagaccaggggcaaaccagaaaaaaagcagcgaaaagacacgaggggccagaggaaagccgcgaccccgcacggacagcccgggaaacacaggggaaacccagaagaaaaccacaac

SEQ ID NO: 124338 - DNA, 498 bp, Arabidopsis thaliana columbia
gcctgcaggtaccggtccggaattcccgggtctgacccacgcgtccgttcagttgtgagaagacgcactcagggcatgtgatgctacaatacgacacaagggggtcaactcgccaagtcatcatggatcgacagcaaacacaagccgttttgcaagctggaaacccagagtatcctttcctgagccctaatgacccatttttttctgaggcttgctagaaagataaccaaggagactcacacacaattttttacgcccacaaagccattatatttacagtatgcgaaggccctttcccgttggtgtaaatttccagagtagtcattttggcaactaaatctgtacccccgtcattggtttcaaaaaacctttacagtgcaatgtttcgaatggtttgcattacgatatatttcagtgcttcttgcataatggccttccactccttagtatatcttcctaagaatcccctgactgcgggccccccactcccttcgtcct

SEQ ID NO: 124339 - DNA, 514 bp, Arabidopsis thaliana columbia
gcacgcgtacgtaagcttggatcctctagagcgttcgcctcttgggttagttcctttttttttttttcgggagaagacgattcagtataagactaatgtttccgggtgaaccataatacatattaataagtccctgaccgccacacagaaggcaacgttacaaaatactacatttgcctatgtttcctgggtttcctgccttaaacggagaaagggcaaaagctccaaacaaaatcttataatatgaaattgtgttggacattaatcgctttattcatgaagacaatcaaaatttaggactggtgatggttccaagtttgatttcttatatattatgagaaatccccataaagaaccttacatggatcaaagctgaccgctgcagaaacttgaggagacaaaagaaaagccttggattcctcttccatcctccatggggggtccaaaaaaattgggctttatttaagccccacgatctacacaccacattgctggggaacccttaattcccatt

SEQ ID NO: 124340 - DNA, 500 bp, Arabidopsis thaliana columbia
cacgcgtacgtaagcttggatcctctagagcggtcgccctttgggtttgtttttctaaatttaactcggcattctgacacaggtataaaaagacaaagtggcaacaaatgaaatgtataaagactgcgacacaagagtaaccaaatatcatatccattgcctattgttacaaaaacatataaccgtctccacatttgctggctatagggggtgttggacaaccaaacaaccagaccattcactgacaaacatggtatgataaagaggttcatttttgacacatttatagggtataacgccagggccacaaaaccagagggaaattgccatcttcttcggacagaataaccaaattagcgcctagctatactcaacaatagccttttacaagaactagaaacatttctggaaacaactcacccatctgctatatatggggttcgtcaccccccccagtataatatgtaatctccaacaccctgttcagacatacctttact

SEQ ID NO: 124341 - DNA, 483 bp, Arabidopsis thaliana columbia
ggcggccccgccggcaggacccggcccgaaattcccgggtctgacccacgcgtccgataacccgagcttacggttgtttaataatacggagggaaccttctgcgacaagataacacagggagtcggctgcaaaaagaaacagaaaggggattcgatggcttactgtatcatttgcatacacgcctaaaaactagcataggtgttgtttttaggggggagcttgacgggatcggattaaaccaccttgaaagatcagcttgatatagcttgggacgtgtcattgtaaccattcccctgcgtgaggacatgaccaaaaaagatcctcccacttatgttgtataatgtttctaaactgtgtgatgctcatgaccgtacggtgagattgtcaaatggtttaaggagatcccattttctgaaagataatgatttattaacaatgttatctggtcttcctaacaagacgtatactttcccttggttcat

SEQ ID NO: 124342 - DNA, 501 bp, Arabidopsis thaliana columbia
  unsure (1)..(501): unsure at all n locations
accccttccttagcctggaaccctttaaacggttcgcccgaggggttaagccctttttaatttttnaaccattaaaccctatgcctaactttccctatttggaacaccttcccataaaaggtcctttttgccctccggaatatttaccaaaaacaaggccctttggttcctaagaaaaaagggcagaacccctttttttttgggggggtgtaaaccagcaacggactccttcccttaaaaaaattctcaaaacaatgtggctaataatatttgtcacccaacccttgagaaggtttctaccaatttgaaaaataaaaagcgcttggcaacggttttttgacattaggggaaacctccaaaaaaaattcgattctaccccccttttcaaaatttgttttaaccctcttttggagcataaaaaatagcccttcaaataaaaaaggcttgaaaggaacctaagagaaacgctttagattttttaaagctttaaaccaacacttt

SEQ ID NO: 124343 - DNA, 466 bp, Arabidopsis thaliana columbia
  unsure (1)..(466): unsure at all n locations
ccgacaggaagaggggaatcgaaaacctggaatcctacgcttcacccaatgggtggctaatcaaggcttaacaggcccaaccttcggtgggaacaaagagggaagcctgcttggagattaggggaatttttcagggatgacaaaaagatttttttttagaggtttttatacgggncaaacaaaaacacttaatgggagttcttagatctaaacctttccggttcaagaaaccggaatccaaaggaaaattttcatgcttaaagaaaaactcaaaacctttcgtgataatcgaaccgtgaatgaattcataaaaccttctcattttgagggtttccttttcaaagccctatacgatttttgaacaggacctagctgaaaaaatattaaacaagagcgctttaaaagaaaattttcatacaagtcgcgttacaatccgaatggctaaacttgaaggatgacccctaag

SEQ ID NO: 124344 - DNA, 486 bp, Arabidopsis thaliana columbia
  unsure (1)..(486): unsure at all n locations
acgcacgcgtacgtaagcttggatcctctagagcgtccgctgtngggttttttcttnnnttattttttggtagcaatgcatcacttttatttcatacgaaagataaaaactttattatgatgcaaagagttagaaactggaatcaatcaagccgaagctacaagacccccatgcttcatcagcttctcattgatctcatttttcgggggaccgacaacacgaacaatgatggtgccttctttcatgaaaacaaaagtagggattggcttcactttgaattcctgagcaacaggttggcattnatcaacatcgatcttgaagaagacaacattagtgaacttcttagccatctttgcaacactggtggcatgaaacgggcaggtggaccacctgatgctgtgaaggctatcacaatcaagttcttggattcattggcgtctttgaacttttggttcaaaacttcagggtatggcaagcaatcacttc

SEQ ID NO: 124345 - DNA, 499 bp, Arabidopsis thaliana columbia
  unsure (1)..(499): unsure at all n locations
cnnnnnnnnnnnnnnnnnnnnnnnnnnnnnnnnnnnnnnnnnnnnnnnnnnnnnnnnnnnnnnnnnnnnnnnccacgcgtccgtacggctgcgagaagacgacagaagggggttcccctgagatagagataagagaatttcgagagattcgagagaagagacgatgggtttccaagatctcgaagctggtactcgatctccggcgccgaatcgttttaccggtgggagacaacagagactttcgtctcgtggggatccatctcaggaggtcgccgccgggattttcaggatcagcacggctgtcaattccttcttccgcctcgttaattcgatcggaacacctaaagatactcttgaattacgagataagctgcaaaagacaaggttacagatatccgaattggtgaagaatacttcagctaaacttaaggaagctagcgaagccgaccttcatggatcagctagtcaaattaagaagatagctgatgctaaactggca

SEQ ID NO: 124346 - DNA, 466 bp, Arabidopsis thaliana columbia
  unsure (1)..(466): unsure at all n locations
ccccttccttagcttggattcttttaaaccggccgtttnntttttttttttttttttttttttcccaaaggttcattgcgttctattccaacagccagagtttggaaatatatatatggtcacttcctttaaaagaatataggtccgcggacacttacacacagatataaacctggctctctcacgttcttcatgtgatttatcacgcgaaacacattagcgctnttcttctaagaaattaactcttgatcacacagcattcagaattcgacaccacctgtgtcacccatgtcacctgtgtcacctatatcagcgatgtgagaaaccttttcaccaaccaacaacccaccaaataaaccatctccaagccaaagttctagtcctattccatctccagccttaccatgcttnttgggtttgtgcggttcaccatgatcttgctgttgcggaaaaccgtatggaccct

SEQ ID NO: 124347 - DNA, 516 bp, Arabidopsis thaliana columbia
  unsure (1)..(516): unsure at all n locations
cagctctatacgactcatatatggaagctggtcgcctgcggtaccggtccggattcccggtcgaccacgcgtccgctgcgagagacgacagaagntacggctgcgagaagagacagaagggtacggctgcgagaagacgacagaagggaagactatggatcagcccgtcaccgcttacccgcccggacacggtgcaccgtctgcatcccctgctcctcccgcgggtccttcttncggatatccaccacaaggacatgacggtnagcacgatggtgtttatggatacccgcagcaggctggatatncagctggaaccggtggttatccgccacctggtgcatacccacaacagggaggttaccctggatatccgnctcagcaacagggtggatacccgggttatccgccacagggtccatatggttacccgcaacaaggttatccaccacagggtccatacngttacccgcnacagcaagctcatggtaaaccgcagaaaccgaagaagcatggtaa

SEQ ID NO: 124348 - DNA, 524 bp, Arabidopsis thaliana columbia
cgcgtccgtaagcttggatcctctagagcggtcgctctctggggtttgttctttctaagatattaggggcgcccttccttttccatttttttgcgccgcgggcgtgcattgacactttgtggaagaggcctggggtacctttttttggtggaactcaatggagtggttgccctcgcggcgatatttcacgggaatttttttttgggggaggggggcggggcccgaacgccttaaacgggcgtgtgaggggtagggtttgcttaagatagtaggggccccatttgttgaggtttcggggaggggtaggttctggccctagggggctcccgcactttacaccgttcgtatcacagagctggtgtggagggggtgtccctcccacgagacggtgtgggctagaggggggtgggcgatgctcgggttgcatatgctacaccgcgtgtggttgcttgaaacgcgacttgcggcaggctcgggtggtcgggtgcatatcggaaggggggcgattgccagttaccacgcgg

SEQ ID NO: 124349 - DNA, 461 bp, Arabidopsis thaliana columbia
ccggggactaaccacgccgcccggacagcaaggaaaacaacgaacaaaggggaaagggtcagcaagtggcgggaaacaaacacaaaccgagggcaaggcaaaaaccccaaaggaccgcaaagggcgaccaagaagcaagcacaccgaccggcaaccacccccagcctttatggcggggggcccccggggaaaagcgccccacaccacgaccaaaggaacaaagaagccggaacacgggggggccaaccagggccgcccacgcaaccaacgcccagacaagagcgcacaccagcctcaccagccgacgcccggacgaccaaccgccggcccaccaaaacaaaacgggccccaaggaccacaggcggccagcccgcccccccgcgcaaaacacccacgaggacagggcagggccaaccgaacacacgcacccgaacgcccacccgcaaacgacgcccccaccc

SEQ ID NO: 124350 - DNA, 461 bp, Arabidopsis thaliana columbia
  unsure (1)..(461): unsure at all n locations
ttccgtaagctgggatcctttaaagcggtcgctctaggggtttgttctttttaaaaaagaaaaaaatgggctttaattaccaactcgggagcatataacaacagataaccgagcgtacaaaatgtgaaagttgaatgaaaatttcacaaaaaactgagatttgattgtccaaaagatacaagacaaatttttttcttggggggttgtngaaaaaacacacccactcccagaaatatttttaaccccaaaccgtgttacaaaatggattttacaatttacccgtcctcgttttcttgtttttgattggctttttgggggcttttcgccttctaaaaaagtttcaaaaattggggaaaacccatggttttcccgggaaaaataatttgggggggaaaagtcttcttcaccaacgccaatttcaccccccccggggaattttgacccccccctttttaaaaaaa

SEQ ID NO: 124351 - DNA, 535 bp, Arabidopsis thaliana columbia
aggtgacctatagaagagcttgacgtcgcatgcacgcgtacgtaagcttggatcctcttgagcgggccgctttttggtttgttttgtttttaattttttggcccaagaaccttttcaatttggtttttttttttagatccctggtcccttaattagaatcaaggtggggttattcacccccaccatttttacaattttcttaggttccacttttaaccacgaggtggttaattttggggacctaacaaaaattattctattttccacccaattggtgattctttttttatttggagaactaaaaatggttggttaccccttttggaaaatttccaaccccagccgttatgaagggccaggtccacgcaagggcttccggggttattaacaaagaattgggttcaacattattaaatggttgggggtccttggtttgtaactttttatggaaccaattggttcctttttttgacccttggaatggttttaacctttataaaggcaagaatggatctcgccgtttttagggtaactt

SEQ ID NO: 124352 - DNA, 514 bp, Arabidopsis thaliana columbia
  unsure (1)..(514): unsure at all n locations
nnnnnnnnnnnnnnnnnnnnnnnnnnnnnnnnnnnnnnnnnnnnnnnnnnnnnnnnnnnnnccacgcgtgcgtacggctgcgagaagacgacagaaggggggtggactgaggctattgcaactacattggcagttccgagcaatcggaggtttatgtttgatgtaacaggaagagtaacactagaaacgacgagatcaatcatcgcatttataatggtgaagacatttcatgtgttcagaaaagtatcaatgtggttcatgaagaggttacagacagaggacgccaagcagttgaatatgttggagccaaatcttctgttataatcactgtatgccttgcgttgtacttgcacatcataagccgctgtgttcggaattctcccataggcgtaagccagcatttttagttcttcagatgaagaagagatcatcgatttggttggatataggataatatttggtaggtacacaagatttatcagctcgtttgttatagttggagctgagaatattg

SEQ ID NO: 124353 - DNA, 506 bp, Arabidopsis thaliana columbia
aggtgacctatagaagagctatgacgtcgcatgcacgcgtacgtaagcttggatcctttagagcgggcggtttttttggtttttttttttttttttttttggagaactaaatagacttttattttggaatttcataaaacggaaggtttttggaataaaaatgattatttggagtattaaacagattcttaagaattcgaattaaccaccttggttcaagaagctggtgtcttttagcacttttaccggaaccttctgacttaaaccgaaaagtcgggcctggaaaacaagaatcccttacttttagcattttggcccttttcattttttattaaaggtccttccatttgaacccggacattttttttacccttgacttttttaagtaaattcaacggggttaaatccaatggccttgacccaaccttggaagccttggatctattccacttttttaacgcatccatttacaacattcccggaccacccgttgttctgagctaact

SEQ ID NO: 124354 - DNA, 347 bp, Arabidopsis thaliana columbia
  unsure (1)..(347): unsure at all n locations
nnnnnnnnnnnnnnnnnnnnnnnnnnnnnnnnnnnnnnnnnnnnnnnnnnnnnnnnnnnnnnnnnnnnnnnnnnctttgttttttttttttttttttttttttagnncaaaaagactcaattacatcacaaatttgtcccgtcccatgaatcaatgtttctgagcggacaccatagtcgattagaggtcttcttaaagggtatacttctattgagcgagaactacatccttgtctttgaccaaaaaaacctcaccgggtatgacgattccgacaacaataaaggctaaacctcccatcgagttgactttcaaagcctgtgaggattaccgatctttaattgattcac

SEQ ID NO: 124355 - DNA, 509 bp, Arabidopsis thaliana columbia
agctctatacgactcatataggaagctggtcgcctgcagtcccggtccggatttccgggtcgaccacgccgtccgttcgactgcgaaattacaagactggggctgctgaagacttggacatgtcacgacaagcttatgtctttgggctattaaaggagtcgccaaggttgactgctaaacatcacctactacttatattgacggctcgggaccaccttatgcaacttcaccaattttcaggattatttgtcgaacaggagctggatggctttagtatcttcagggatccgagagtccagaaccagatcatatccacccatggttttacattggctaagacttctgggacgctgccttgccaataggaccacagggatcctgtgtttatggtaatgcggcaatcgaagctgatcgtgcccaacctacacatgggctaagccgcatctgcatattagactgcgaagggcacaacgagattggcacaactgatgcatttactgctgaccctg

SEQ ID NO: 124356 - DNA, 482 bp, Arabidopsis thaliana columbia
  unsure (1)..(482): unsure at all n locations
cttatcnactactattggaagctgtaccctgcagtaccgtcggattcccggtcgccaccgtcagacgacgaaggatgtgttatacagggtttgatgactaactacaagcagattgagttaagacaccatgattgctatttacttgattctcaagaaaaaaagcctcataactacagtgatcaaccatcaaaggtctatactgatgatggtagtaggaggcacagatacatccggccttaaccgtggaatgggcaatgtcaaatttattgaatcatccacaaatactagagaccacgagacaaaacattgatactcaaatggaacatcaagtagtcgtcgtttgttgaaagaagaagatttggtaaacatgaactacttgaaaaatgttgtgtcggagacactaagactttaccctgtggcaccacttatggttcctcatgtgccatcttctgactgtgtaatcggtggattcaacgttccac

SEQ ID NO: 124357 - DNA, 371 bp, Arabidopsis thaliana columbia
  unsure (1)..(371): unsure at all n locations
gaacctgcttatcactactattggaagctgtcgcctgcggaccgtccgattccggtgacaccgtcgccacctcgacgtggaacacaaggctaatttcttgaatatccatgcgacgtgttatgtcgtaataccacatctagtccatactgttcgtggaacgaaatacatgtcactatgtctagaagagcaaagtcttcttcttgtacatcatctcaagcagtgaccagaagcagtccattgtactttaagatcacangagctgaactgcatgctctaacggagctgcattgcgatcttcgtgtagtataactctgctgtaactatagctacaccagagcctccactcactccgacattcggtaatgggtttc

SEQ ID NO: 124358 - DNA, 518 bp, Arabidopsis thaliana columbia
gaaacccacgcgcacagaggccatggatccaactagagcggcacgcccttagtggatgacccatattcaagatctaaaaagcctgaccgcgaacacatcgggaagctcaatggtgtactgcggatctctaccacacaacgggcgagctcaattatgctttggataatgaaactcaagtccccatgggctgcgaatcctctgttttatctctgcggtgatacgaggagaggtgttggctcatccataaatgacacccctaaacttgaggaattatccaattctctcttatagcaagataacatacgcgctggcaacttggaatacgggatccttcacccgggtgtaacaaacgggcatctccagacctctcaccgaggacaacaccaccctatccatccccggtctatccaagccctaccgaatccccttgtgtcatcaagaaaccccccccccatgagacatgactctccataccatgctcgctaagcccctaacatctacttgcgaccggcttccat

SEQ ID NO: 124359 - DNA, 526 bp, Arabidopsis thaliana columbia
ccggcaggacccggcccggaatccccgggccgaccaaggcggccgaccggcggaaagaaacaacagaaccgggaccccaaacccgagaacgcggagaaacaagaacccggcaaaagccacccgggaccgaacccagggccgaaagaggcctgaccacacagaaaaaaggggcaccgggaaccagagccaagaccagcggccacttttattcgagcggggggaccaaaagcacccgccggaaaaaaaaaaccgaggggccacccaagagcccagcccattaggcgcggggggccgcccctcccacccaaacaaagggacagaacccgagagaacacacggaggaagcaaagcggcgaagacccaggcggtggaagaaccgagcgagaagcaccagaacgcaacgaaaaagaaaacaaaggcccaacacaccggcgccccggcactcgaaaagacaaccggccgggggccacaaaggcaaggctgaaacagcgccgcgaaagccaaaaaaacaagggaaccccgcaag

SEQ ID NO: 124360 - DNA, 466 bp, Arabidopsis thaliana columbia
cgcctgcagaaccggccggaatcccgggtcgacccacgcgtgcggcagacgtgagaataattcccttggcacagctgagtgagctaaccacaacgtgatctggttgtacagatctcaccaaggcgctatcttctacaacattgcataggagctggatgtgcgcaagctatagaatgagacagctccttttttgctgtgttgtactaagaatcgatacaacaaggtctaggtccatgccattgaggtgatccttctctacgatggaatctgcgagaattaatgagattggtcgtcgaccgtggtaggtacaatgccgatagccggataattggaagcggcttacacagtgttgatttctaatccaataacactgacttcaagctctgatacatccttctagttataacccccttcacatttgagaaccttccacctcggggcttagcaatcggtggaaacccccttc

SEQ ID NO: 124361 - DNA, 482 bp, Arabidopsis thaliana columbia
cctccaggtcccggaccggaatgccggggtcgacccacgcgtccgaacccatgattagaatgaaactgaaagccaaaggagttcatggagactttgatcgtgaagcttaaagactcactggccatagcacttgtccatagctatcctatcgcaggtcgtctctctgctcggaaaaccgacaactaaagatctcactctgtgtttgtggataggaataatagacctggtgctaaatatatccatgctgaatcagatctaagcgtatcagacatcctgggatccacatatgtagctttggaagtccaatctctctgatatcatgacaaatcattgaatcgtgatggatacaccatgagtacctgatcgagtcaggtaacacatctggtacatggagcgtacataagatagcctatgaatcatgaccctagaaaatgggaaggtcctcctggcaatgtcttcaactactgtgatagagatcttca

SEQ ID NO: 124362 - DNA, 403 bp, Arabidopsis thaliana columbia
  unsure (1)..(403): unsure at all n locations
nnnnnnnnnnnnnnnnnnnnnnnnnnnnnnnnnnnnnnnnnnnnnnnnnnnnnnnnnnnnnnnnnnnnnttnnngngtttttttttttttttttttttggctccatttaatatttatttgctttattcaaacgtacaagtgaacccaatgtggggccacctttttattaaatttaatcccaacgtgccttagtgaaacaaaccaatcatccaccatatacaagatacaataattggtcttttttagacctaattggagcttttggattaaggggacgaatgtctcggattttcttttcttttgaaaggtttccctgctactttaatagaacatggtcatcagtcggttcataagcattttccgtaacacccgaatctaaggtgactcttgcaacaaggttttt

SEQ ID NO: 124363 - DNA, 527 bp, Arabidopsis thaliana columbia
gacgtggcttgcacgcttccgtaagctgggatcctttagagcggccgcccttttttttttttttttttttttttttttttttttttttttttttttttttttttttttttttttttttttttttttttaaaaaaaaaaacccctttatttttttggccccattaatttgtttttgttacaaacaatacaagggtttttttattttttttattcgaaaggttttttggtccaaattttaaaggggggaaagaaatcttttttttccgtttaagttttagttttttttttttttgctgggggtttgattggaagttcctaaaacttttttttcccagttttgaaaatttttttcacaaaaagctggggggggcctttaaaaaaatacttatggccaaatttttatgggttggactccttaatttttaggaaaggggggttcggtcataaactccaaggaatgtttgccaaatttttttgatttgggaaaaatttttgggggaagcgtttccaaattccaacgatgaagt

SEQ ID NO: 124364 - DNA, 509 bp, Arabidopsis thaliana columbia
tgcatgccccccttccttagcctggattcttttaaaggggccgccctttgggttttttttttttttccccggaaaaaaccaacctttttccattatggtggtggagccaggcggggattcaaattggcgggcaaaccaaatggccacacatatcctggtccttataccacaccagggggtaaaccaccattcaacttctttataaactaactttattaacatcttcctaattaattctttcccccaacccatgcaaagttttgggggtgttaatattatgggcgtgtataacatattggatccttgctcataacctttggggagccatgaactgctgttgccggccttctttaataaatgctgctgcaaagtggcgttgtgcaaggaatagttcttctcctcagggatggtagcgtaggaatatagtcatagctaaaatggaactacatagggaagagctgtgatatccgcagactctattctgaaagctgggttccacacctgcaagg

SEQ ID NO: 124365 - DNA, 487 bp, Arabidopsis thaliana columbia
ccctcctaacctggatctctagagcggccgccctttgggtttttttttttttaattatttttttttttttttttttttatttttttatttttttttttttttggggggaaaataaaagggaattgtttttttttcctgttttttggtacgtagtggaggcggggaaccaaaaaggaaaaaaaaaaacctttcccaaaggggtgcccaaaaaagcgattcgacaacgaaaaaaaaaaaaaaaactgcttaggaaaaggctcccgcggaaaaacctttttttaaaaaaatggtaatcccaccttgttaaggacaaaaccaaaacccggatcattcaaagggggccacggaaaggcactttaaaagggggggcacattttcgttagctaaatcacaacggtgtaggagaaacccacaaaaaatcccaggacgaatttcgcccgggggttgcccctgcgggaaaccaccttctaaacgaacttcattttgt

SEQ ID NO: 124366 - DNA, 527 bp, Arabidopsis thaliana columbia
ccaacgcacgcgtacgtaagcttggatcctctagagcggtcgcccttggggtttttaatcatttaaatatttttttaatcaggcaaaacgggtatagattgatatctgctaccacaaggagtggcacttaggtttgtttttttcgcccccgaatagatctcactaagtgttaccggttggagaagagcacatgactttttttttgtggggggaaaaaaacaaacagggtttttttcctttataaagcggcgcgatctttttgtgttacgggtgtggaaatgcaaaaaaaacacgtcgcataaagctttttccatcggagggttaagacagcttccgaccaaatttgtttttctccaataacacgctctacgcccgcggaggttccttttgcttttgcggcaccactaggagagaaatatttacgaggtttataaaaaaaaaacgcttggtacaagcccccttttgttcgtgaaaaaaaccaatctctaaaccatggtggtgaccccacaaaaaaaaaattttttttt

SEQ ID NO: 124367 - DNA, 546 bp, Arabidopsis thaliana columbia
  unsure (1)..(546): unsure at all n locations
nnnnnnnnnnnnnnnnnnnnnnnnnnnnnnnnnnnnnnnnnnnnnnnnnnnnnnnnnnnnnnnnnnnnnnnncttttttttttttttttttttgttaactgtttcctatcaatatagtatattgcagaaccaaccacattcgtatcaatctaaaggcaagagttaaatccatgtcctcttctactctatggttacaaagttcctcacattacattccataaaataagattcaaaccacatctagattacacttaaaccatttacgatcgggaaagcttcaccaattcaaagaatatacagccgcacacatcaatagttggcttagatggcatcttgtttacttcgcaatagcgcatgctctagatgttcgaactccttcaaattgttcactacattctcaactttctttgctatctgattactatgctcttcaacaatctttgcaaaagcatctaactgttccttgtacgctgcacataaccgcttcttgtttcgcagctctatcgncagttcttgaattctcttatccttctcgtccagggtatg

SEQ ID NO: 124368 - DNA, 536 bp, Arabidopsis thaliana columbia
acactatagaagagtttgacgtcgcatgcacgcgtacgttagcttggattctttaaagcgggcggcctttttttttttttttttagacttaagaagaacccttggaaaggaaattacccccttacaccacccaaaaaattccttcctggccccttttaaggtaaaccccttttttcctttaaaatcggccccctttggttccaggctttattaaaacattaactttttaccacggccaaaatcctatttagggaataagccggggataaacccacaccggcgaacaactaatggaatttaacacaaaatatatttgtgattagccggggattatagcgtcattacaagcccgcattttgggcgatgtgagcaactttgaatggcaacacgtagttgttcggtcaaccttcttcctccttcggttaattcaaaaccgccaagtaggtttttctccaccatccactactctggcttgggttctcaaaaagatcatctacactcttcttctctttcgctgggcttggggcaccttcctg

SEQ ID NO: 124369 - DNA, 502 bp, Arabidopsis thaliana columbia
tcgcatcgcacgcgtacgtaagcttggatcctctagagcggtcgccctttgtttttttttttttttttttttttttatttttttttcttatttttttttcttttaggggtggaactttaatgcccaatttgggccgaggtacccacaaacttgaaaccaatatttaacaccaaattaccgcgttcaaaaattaattgaaaatatgtttgaggggggtgatcttactcttttggttaaaactccaaaaaattgtttatttttttttcaaaaaaatattcattgttttgttggattttgggtcatggaacaggttttttcaccttaacagaaaattactacagagcggaacattccctttgtcttggtgatttttgatttggcctgggacaatggatcctttctagaaataaaaaattttttatttatccctctgcggttttttttgaagttgccctttgtcggaaatggaaattgcaatgagtgaatttttgtttttttttgc

SEQ ID NO: 124370 - DNA, 514 bp, Arabidopsis thaliana columbia
ctctatacgactcactatatgggaagctggtacgcctgcaggtaccggtccggaattcccgggtcgacccacgccgcccgcgggacgcgtgggcgggggaacccggttctagtccctccgcccggtatcctccctaaggacttccgtgacccacgactgcatggagacatcagaaggaaaatggcggatcacgattggttccaagctcaacaaaactggaatctcactcgtgtacgacacaatcgactttaaaacatacgaaaaacttgacacattgttgcaccgagttcccaacactggaatgtgggagtgtgttgacttttacccggtgtctaagactgcgggcaatgggcttgacacatcggtcaatggaccggatgtgaagcatatcgtgaaggctagcatggacgacacgaggttcgatcattatgctgtaggcacgtatttcgattcaaacggaacatggatccccgatgatcctactatcgatgttgggatgactgccagtttaaga

SEQ ID NO: 124371 - DNA, 522 bp, Arabidopsis thaliana columbia
aatttgaacttgcatgccccccttccttagcctggattcttttaaagcggccgcctttttttttttttttttattccaaccacttatggaacctggattttttcaaatccttagagagggaaccactattcaaaccaaactgaccgttgaaaattcaagaacccaaatgctcttataaaaaaaactgttccaggaattcagaggaaaaggaaaattcgttccaccgtatagagagattgagagctttaaacgaataggagaaacctctgattggtcaagtagcttcagaggacaagatttcgagctctgcccaccaaagaggagaggatcttggagtagctttctcaggagttatgttgataacttgtttcagttgttccgctacatctttcattgaaggtcgttgtctctgttctgttttcagacattctcgtatcacatcgcagatcacttcaagctcctcttctttgaatgtctttaacgatggatctatcatctctcccaagtcgtctttttcaaggt

SEQ ID NO: 124372 - DNA, 509 bp, Arabidopsis thaliana columbia
tttgacgtcgcatgcacccctaccttagcttggatcctttaaaacgggccgcctttttgtttttttttagttcaataaaaattttccttttagaaaaaggcccaaaggtccttttattaccggtttaccaagccaccgaaggaatattttggttttggttcccttaaagggcaaaggcaattttccttttttaataagaaaaaaaaaaaatttttggttggtattaaacctaaaaggacctccctcctaattaataaaatggaaccttacctggattaaaaaggaaggttcccatctacttttagaagttaaatgaacccccaactgatgcaataccgtaaccaaaattcctcgggtctgaccggttcccaaagtcgtaacagttcccgttgctcggaagctaatcaacattgttgaaaaatggcccgaagttaaaaagctcaaggcctctttttcccattggttgcacttcttgtggggacagtatcttaatgcaccacacgctgttc

SEQ ID NO: 124373 - DNA, 505 bp, Arabidopsis thaliana columbia
ttcagctctatacgactcactatagggaaagctggtacgcctgcaggtaccggtcccggaatttcccgggtcgaccacgcgtccgctcgattaacccagcttaatagaaaaagaaccggcccagttcttgccgtttagtaagctcgagatctgtgtttttttttttctgggcttctgagcttttggcggtggtgggtttttctggagaaacccaaacgactatcaaagtttggttttttacaattttaagtgggagttatgagtggggtggattaagtaagttacaagtatgaaggagttgaagattcgaagaagcggttttgaagtcggcgagaccaagattgcgagcttatttggctgatgatttatttcagggaagaagaaataaatctgttttttttagggtttttagatttggttggtgaatgggtgggaggtggagggaaacagttaaaaaagttatgctgttagtgtctcttcttcataattacatttgggcatcttg

SEQ ID NO: 124374 - DNA, 513 bp, Arabidopsis thaliana columbia
tcggggcatcgccgcgtacgtaagcttggatcctttagagcggtcgccctttttgttttttttttttatagaatatagttattggataccgaaattgaacaatttacaaaaaggcgcgacccacccaaggattggcccacgtttttttatacaatgatgttgactttccaaagcgttttaagagcggcttgtgagggaattcatttttcttgggggtgtggacatcctcgggaagagacggtagaaacttgactcaatgtacaggaaaaactctttttttggttagagtttaaacatgggcaggctttgataggcaaggtctgtttcactttgacacttcactttaaataaaggattgttcacggaataccccccgcttctaaacccgatgcgaaaattttagcgggggcggggatattcggttcacccgggggactaatccggaggaagggggaaaactggatggggtaaaccttgtgagagagctgcttttttttaaaaaatttgggaaaa

SEQ ID NO: 124375 - DNA, 439 bp, Arabidopsis thaliana columbia
tacgactcatatagggaaagctggtacgcctgcaggtaccggtccggaattcccgggtcgacccacgcgtccgcagccatctttttttacaaatgcggactcgaccgagaatgtggtgactgatgcatgtccagcacagctaagcatctgccatggtcacaagtatacgaccggcctaactccggtcatggatatgatgcctgcgacggcacttacgatctcatcgggcgactggatgatgctgatagctgttctagcaattcacttaccacatgctcacgatgtctaagtgctgtgcactttctctctcgaagatgatatactctgacgcgccactctcgactatgaagacaccaacgactgcatgctgacggtgcccacgtgggattatctgatgcgggcaagcttgatcagcgtccttgatagtgcctactatgct

SEQ ID NO: 124376 - DNA, 542 bp, Arabidopsis thaliana columbia
gacactatagaagagctatgacgtcgcatgcacgccgtcgttagcttggatcctctagagcgggcgccctttttttttttttttttctcaacacttctgtgatatatatacccacaaatatttgaaattaagagaagagagctgtgtgtcaccacaagagtttccttcccgagagaataaaggattcaagagacatatagccatgcgcgtataaactcggtctggaaggctgtgcaccatatttagagcctctttgtgctctctcaaggcgctcggtatagaactcaacccacaggtcccaacacaggctcttctggtgagagagataacacttggtaggtttctataagaaagattatatactctctacaagctcctatatatgagagatgtgtgaaataatcccaccatctataagaacatagcgcactctcttctcacaaggagctctaccactctcctcataagactcttccccttaaaagggggaccagggaagaggaaaaacatcttcaagcgcgtgcctttctagaagaattcga

SEQ ID NO: 124377 - DNA, 411 bp, Arabidopsis thaliana columbia
  unsure (1)..(411): unsure at all n locations
nnnnnnnnnnnnnnnnnnnnnnnnnnnnnnnnnnnnnnnnnnnnnnnnnnnnnnnnnnnnnnnnnnnngcctttttttttttttttaccgaaatataagtgttggtgactggatattagaccttacaaaagcttgagttttggtttatatgccattaattattaacacaccagagggttttagcttagttactaagaaaggtaggctgaaaaagagatatttccgaccaaaacgacgacgtgggaagacaattgaccccgagagagagaacccccgagttgttgccggtggcacaagatcagggagttggtgggtaataccaatcttctttcttggtttggtggcacactggcttctaattcacaagaaatggtgctgaagggggaattggggggggtgataaatgggggg

SEQ ID NO: 124378 - DNA, 596 bp, Arabidopsis thaliana columbia
aacgcacgcgtacgtaagcttggatcctctagagcggtcgccctttgttttttttttttttcaaattcccaaagggagccgacaggggccccattcctaggcctttttgcattggacagccccacacttagggcccgcgtttagctattgcgagagtacgaacacaggggttgaacagattcatagtgagccgaccaagggaaaaagtttttttttttgcgagggggtggcaggcgaggcatcgctgaaccatttgtggttcagaataataaacggtggcttatgggaagacccgtagcctgttttcagcacaaagggataaaccagcagaacatctcgggtccatgtaacgaaagagggtgcaaacgatttgaaggatacataaaagaacacatatttctagaagctcaatttgggtgtgggcgattaaacaacgagatggtaaatagaaaaaaaagacctgccagttaagcaccagattctgcagggtatagagaggcactacggagtacattgaagacgtagtattgacggaaaccataggtttgaaggggcaggtgtaacttttggaagtatttcgagcgcaaacccagtgg

SEQ ID NO: 124379 - DNA, 495 bp, Arabidopsis thaliana columbia
cggcaggacccgggcccggatttcccgggtttaccaacccgtccgggaaacggccaacaaagaaggctaagcgacgactagccactttggagcgtcagcgtctggtgatgggcaacaaaggcggtttttttcccttggtttctccaaagggcgatacacgttaggctgtaccaaccggcgcaatagcacgtttcttgtttcgcgcggtgtggggggtaagaaggaggaggtcattatacttaacaaccccccgcggccttaaatcctttttggcaatttaaaccatttgggcttttaaagacttaccaagatttaataaaagcggaaccacccatgccctccaacaaccggccgggtcgaagttgtgaccgacttacaatcaatttgaacgcggtttacctatcccctctgcaaaataccaggcaaataactaaaggaaatgaatttagacgagcttttccccaacgtcatttggaaccaacgccttagtgatca

SEQ ID NO: 124380 - DNA, 521 bp, Arabidopsis thaliana columbia
cgcacgcgtacgtaagcttggatcctctagagcggtcgccctttggttttttttttttttaaaaaaaaaatcataagcctcaggggacacgttggctatgaaaatggttcagcctccaaatagacgaacacaagtctactatgaaaacggagcgtcagaagggaaaaactgagaacgaaaattcctcaaaatgttttttttaggggggtgtacgccgacaaacaaacccacgccaacgcaaaaaatgactcaccattgagaaacctggcgggaacaactcataaataaagcctaggaaagggcacatcacagtatgtcaattccaagagtcccaagttggcctagaccacaatggaagcggagcccctccacttgcctaatggcaaaaagacaagtgccggcaacccggtttcagagggccccccgcgagaaggatcggcgcggtggccacagcacgcccgtgtttaaaagcaagcggcgccggtagtgcattcaagcgaccacaatgggagggggctagg

SEQ ID NO: 124381 - DNA, 416 bp, Arabidopsis thaliana columbia
accgccgcagaccggcccgattccgggcaccacgcgtcgttttgctaatagaagctcttcattgccgaacacacacaaccctctctgaatctatggacccgcgaaacaccacttcttcttttcttcggaggagcttctctcgatcgccctttagcccacacttctccaatacagtcccccacttctcatcgtaggcgactccgaagagagccgaccgatcaggagaccgctgggaaagccgttctcacgtagggttcaaggaatttattgatcccttacaaaagaccccgataggtttaaccccaaaagagcccgtgtgttggactttcctttaaaaaagaaataatggagattaccttttcttctaacaaaaagatctcccaatcgaaatactactttctgaaaaactcattccc

SEQ ID NO: 124382 - DNA, 202 bp, Arabidopsis thaliana columbia
  unsure (1)..(202): unsure at all n locations
gccngcaggtaccgggccggaaatcccgggtctanccacgcgtgccggactacgagaacaatagactattgcgataagggccctgtaaccagatatccttccagcatataacccttagaagcaagttccgccaaggacctggtgccacaatgaagacggatagggatggacccggcggtatcaagacattttcgctcaaagg

SEQ ID NO: 124383 - DNA, 352 bp, Arabidopsis thaliana columbia
tcatactatggaagctgaccctgcagtccggccgattccggtcgccaccgtcggtgtctcttagcatatttggctaaggatcgcgggacctcacgcactccactgcggaccaaactgcaagagtactcactcacgatctaacggcatggactagagatgacttgcgaagactaaactcactgaattcaactcctaaagatccgcaaacaatgctgcctatttttcctagatctacgtctgcactgtgcattcacaccgatcattgatggatcagagactatgacatatctgtaccgcagcgtactaggaatagcaccactctatgactgatcgagatctaggaagcatatat

SEQ ID NO: 124384 - DNA, 514 bp, Arabidopsis thaliana columbia
tgacgtcgctatgcacgcgtacgtaagctgggatcctttaaagcggccgccctttggtttttttttttttttttttttttttaactttttatgggtgtttttttttttttttttcaacccccttggggggcacccaattaaggaaggatacttccttaaaaaaaccaaaaatgggaaatcctaaagaggtaaacaaagagaaccctatcaaaaaggaggggtttcttggcgaaagggttttaaaaaaaacaaaaaaaaaaaaggccaaccggtctgaagaaccgggttttttgaaaggcaatttcttgagggcccccttgaattgtgaaaaaaactttttgaagacaaaagtaggaaggccaaaaactccattggtgtcaatagcccggtttcctgttgataaaagttgggggctataatatcgcgcatcagaaaagctcctgagggaaaacatttgctgtaaagacgtggaatttcaaagttgaaaatatgatagctccaaaaaatttcctaa

SEQ ID NO: 124385 - DNA, 526 bp, Arabidopsis thaliana columbia
tatagaaagagttatgacgtcgcatgcacgcgtacgtaagcttggatcctctagagcggccgccctttgttttttttttttttttttttttttttttttttttttttggaatataaatttttagttttcatataaacttctcatgaaagaacaagaatgtgcctgctaatgagacattgatgctaaaagctattaacattctacaatcttcttttactactaagagccagggatgagttgagatgagactcttctttctggcacatcacagtactactagcaaacaccttttttggtctcttccgtttttacccctgtggagcaaaactccaattcaagaatggtttctgctcaggcggatcctggaaggaagtgaaataatcagactgatacaagaactgagggacaaaagcgtcaggctgcaacaactccatggaactaccaaacattgaagtatcaaaagcttccaaagcatcctcaagctctccccatttaggctcgctctgaacctccaaaacatccggtg

SEQ ID NO: 124386 - DNA, 535 bp, Arabidopsis thaliana columbia
  unsure (1)..(535): unsure at all n locations
agggtgccctatangaagactatgacgtcgcatgcacgcgtacgtaagcttggatcctctagagcgggccgcctttttggttttttttttttttaactaaccaagatgggttattgggaattttcaagaaaggtagaaacttaccaagcccatttggcttgggaccttaaaaagaccacccttggaaaaaaaaaaaaagaaggtcaaggtccaacccttaccggaggaaggccaactttaaagccaaggccaacctttttttcctcttatttagggagacggttggggcatggcaaagcaaagttttgtatttaagggtttaagctctttggcgagatcggggaatatcttatcgaaaagctccttatttgagccatgtccctcctgcagatcaacttcgaggtcagagaggctgagtccatcctgcatcacttcttcatctaatgcttcatgtgtcggcatttgtagctgagcagcaacattattgtttgaggactctggcggactcaatggaatctcatgaggtcccacagaa

SEQ ID NO: 124387 - DNA, 499 bp, Arabidopsis thaliana columbia
tatagaagagctatgacgtcgcatgcacgcctacgttagcttggattctttagagcggtcggccttttggtttttttttttacttaagccgcggggatggcttattggcaaccctttatgaaggggtggacaataaaaattcaaattctggcaaaggccttccaacgacccaaattatgctcccggaaccaggggattattgccattctccatccaaaaaattttttaataaggggttaaaccaaccatggttggcttttaataaacaagacatgggccggccttaaagggaaaacccaaaaatttagggcctatgttatttgcggatgggaaagtccttttatcctataagggattagttggaactttggggtactggaggcgaaacttttacgggggctggctttgaaaaacatgctgtaattccacaattcattgccaattgtggaggattaataaccttggacccttgtttttttaaccagagttggtattccct

SEQ ID NO: 124388 - DNA, 486 bp, Arabidopsis thaliana columbia
  unsure (1)..(486): unsure at all n locations
ggnnnnnnnnnnnnnnnnnnnnnnnnnnnnnnnnnnnnnnnnnnnnnnnnnnnnnnnnnnnnnnnnnnccacgcgtgcgggaaaacagctatagacctactcagtggacattgggacgcgtcctcccaagttactgatactccaggcaataaatccgaggagaagggcacagaggctacatctacaactcattctttaggagaagttgctgggatgatacacatgactatattggtctatgaagcataaggagaacagacattaggcgatagagaagaatcctgcatctggcacgcattgatgaggaacgccattagcgagaaattgaatgcatgccacgctcatgtggcctaagagacaacgtccacacatgctgactatgcactgagaaacatccaggcggaaatcactaacatacatatccacaggctttgctcgtgaatgatgacctccacgcagcgaatatcaacagaggatacgtggatc

SEQ ID NO: 124389 - DNA, 361 bp, Arabidopsis thaliana columbia
tcggccttttttctttttttttaaaaaaaccggaggttaccaaagttccctccctaaaaaacacttaaaaatgggcggccccaggccaccactcgccccgaaaaccaatccaattccccaaaaagggggggctccctttaattcccacagaaaccgcgcgcgaaataaggggccactttttttttatggggggtgggacaagagaacgtcccatgcccccgagcccctaaaagaaaacaccgatagtaacactccccatggagtgcatccgaaaaacaaccccgccgacaccaccccacacctgggcgccccgtgagggcacaaagacaacctcgccccaagagcccgagtctggaccctc

SEQ ID NO: 124390 - DNA, 203 bp, Arabidopsis thaliana columbia
acgacaaacactagggagagcacgcacgcctgcaggaaccgggccggaatacccgggtcgacccacgcgtccgaagcggcagagagacagcgcgagcagacgaggaggacgcgacccacagcgcgagcacagcggcaaacagacacagcgaaaaggcgcacaaccagccaagccagagaaggaagcgccagattaaaaccgga

SEQ ID NO: 124391 - DNA, 405 bp, Arabidopsis thaliana columbia
  unsure (1)..(405): unsure at all n locations
nnnnnnnnnnnnnnnnnnnnnnnnnnnnnnnnnnnnnnnnnnnnnnnnnnnnnnnnnnnnnnnnnnnnnnncttnntttttttttttttttttttttttttttttttttttttttttttttttttttttttgggggggncaaaaattccccccccaagttaaacaaaccaaaattgccaaaagattggttccaagttccaacatttcaatttgaataaatttccccctttggaaatgcggggtaggaatgtatttttttaaacaatttaaaacttaaacccttaacttttttgaggtggttttggcaacggcagtttctttaaaggctttttttttaaaaaatgcgaaaagtccaaatccaatggttttttgttctttaaaaaacaggtttttgggagcaccaaa

SEQ ID NO: 124392 - DNA, 487 bp, Arabidopsis thaliana columbia
gtcgctggcccccgtccgtaggctgggttcctttagagcggccgccctttttttttttttttttttttttttttttttttttttttttttttttttttttttttttttttttttttttggggcaaaggtaaccccttgacttgggttttcaaaaaaacaacatttggccttggccttttctttttttcccctttttcaaccccctagggaacaaaaaaaaaaagattttttttttttttcccctttcccaaccccattttttttcgcccccagaggggaagcaaaacccttttcccacccggaaaaaaccccccccttgaaaaatttccaaaccccaaaccatttcattttcctcttcggggggggggggctccataagcatattttttggccattagaaaattcttgaaatttgactgggggttttgttgcccctcccttcaaacaaaaaattaaaagaagtctccaaaagttttttccccgaacg

SEQ ID NO: 124393 - DNA, 580 bp, Arabidopsis thaliana columbia
  unsure (1)..(580): unsure at all n locations
agaccggcccgaacccgggctacccacgcggcgacccgcaaagaacgaggaccagaccaggcgcaaacaaacgaccgcgacagcagcacgagacggaccacgacgcaccgacanaccacgccaagagcaccgaggcacacaaccccacccccaccccccccacccggtgcaccgagagcggccaccacacacagaaggcccagcaaaaaaacccaccccccccggccacccaaccccaacggaagaccgcggaccaaaaaagcaccaagggacccaaacccccacccccaaccgccgcccccacacaaaaaacacacaccaccacaccccacgcacgccacataccacaaccaaccaaccccaacgcccccaaaagaaaacccccaaaagcaaccaaacccgaacaaagaacccaacgaacacccacccaccagcagcacccccacacggaaccacaccgccgggccaccccgggcaacccaacaacaaaaaccgacagcaaccgcaccgcccccccaaaagaccacagacaccacccaccccccgccaggagcacccacccccccacaaacagcccccc

SEQ ID NO: 124394 - DNA, 338 bp, Arabidopsis thaliana columbia
aggcggcgcaacggagaggacacagacggaaaagggggaggcaagagggcacaaggcgcggggaagagattttttgggggggtgtacaagaagacgcggagagatccacaacagaccgcgaagaccgccgaaaggagtattttggagctcttcgcgatgtattttgagtcggaggggtagacagagtaaacactttgcagtggggcgattttcggggaagacagagtgtggagggggggttaaggaatacaaaaggtctctgggaggggcggtggggcagcgaacacggagcgtggagcctttcgcaagtcgatggtgtagggtatgggagaaaggaa

SEQ ID NO: 124395 - DNA, 446 bp, Arabidopsis thaliana columbia
ccttttttttttttttttttttttttttttttttttttttttttttttttggggggaaaaaaaaaattggtttgggggaaaaggattctttaaaggggagggaaaggaaaaaagcaagccccctttttttgggaggcaacccgcctttttttttagaccccccaaccccaccccctgttttaacaccctccccgccggtaccacctccccgggatgagtccccccccacgatgggtcccccccaggaaggacgggcccctgccggaggccgcccttataatgtgggggccccccccaaacaggcgggctgggtccttccgccccgacggaagaacctccccccccccagaaacccccctgcccccgtcctttctggggagaccaacccccccccccgaaaaacccccccctttttacaaaacctcccctcattgcttgcaaccccc

SEQ ID NO: 124396 - DNA, 642 bp, Arabidopsis thaliana columbia
ccccgacctcacaatacatccggcccgggggccgttttcatttttcgcgaaccagaatttaggacgtatgccggcccccgagcatatccgccggaggcctaggcagcgagcactattgcgccccccgccatttaatacgcgccccgctattgtttcggcggacggggtgcaaagaaacgaatggcgaaactacaaaactgaaaagcacaacacatgaaagagaataatgccaggatacgccatcacaagtaggtcgcaccagccgcacagaaaccacccgtagtgccgcatcattgaaatccatctcagcgcacgacccgcataagtcccgggcgcggacccccgggttacgcacaggttggataagcaccgccatcgatctactagatgaatgaagacgggggaccaccccccgacgggtgccgcgcggcgagaagagcaaaaaaagctgcgcagcgcgcgcgccagaccatcgcacccctgatgtcagggcgcgtacagcgcttggaggaaatggagggcgtaatacggagtaaaaaaaccgaccggggggcaggggaggaggggcggagggggactaaagaagaggcagtcccgtgcgagtcgaaaaggtgggtgcataacggggaaggggataggaag

SEQ ID NO: 124397 - DNA, 499 bp, Arabidopsis thaliana columbia
tgacgtcgcatgcacccctaccttagcctggattcttttgaacgggccgcctttttttttttttttggccttaaatctttttaattcggctccttttaatggaattaaaaagaagacgggggagtggtggtttttccgggaaaaaaattaaaaaccaggctcttaaatcctatgattcacttcattctctaaagttttctggggggaggacccctttctttctggaaagtttcacattaccttcctgaaccacattcaaaatcatgattccgtaaagggtcctttttggttggctcaatttcaacgtcaggtgctaatatagtatcagacagcttctgcttatacttctaaagaccgggaatggcttccaagttatacttttcttcggctttcggagtttcgccttctcggctctcctgcgttttcggtttcttcaatgcatctagggtctggagataagattaggacgaactatgagggtatttgctgctaggattgc

SEQ ID NO: 124398 - DNA, 492 bp, Arabidopsis thaliana columbia
tgacactatagaaaaagttatgacgtcgcatgcacgcgtacgtaagctgggatcctctaaagcggccgccctttttttttttttttaaaaggaaacttaaaagtaattagagggagcttaattggcatagattaataagtaatatgtacacataacgctacatacatacattatacatttttttttgtttattttttagggaaaggggtaaagggcaaaaccattttttgatctccataatacaaaaacaacacttaaggctttttcctccactttgattccaaccaaggacttttttcttagtttatgtccacagccaataattgtggatcgacctctctcatgtgtatttcctcaagttacgttgggcccgaaactaaccaatcttgtttttccactcaggggttatataatatggttctttataaacggttgtgattattttgctcaaaatatagaactttttcttataaaaacaaacctgaccatttg

SEQ ID NO: 124399 - DNA, 592 bp, Arabidopsis thaliana columbia
  unsure (1)..(592): unsure at all n locations
tgaacgaatttgacggcgaagcccacccccagcaagcccgcacgacaaaaaagcggagttgaacgaacgccgcccggccccgaaaaaagccacccacgaaaaaaaaggcgcatcccggaggaaaccacggacaaacggtccacagaggagagacgacgcagcaacgaacaagaagacccaaaaagaaaggggaaaaagaaagcgccaaacaaagacaaaaaggaagaattttttcacgagcggcaaaacaaaacccacaaaagagccgcgcagcacagccccaggcaaccaaaggagaacgacagcgccggaaaacgcagaaaaaacaacagacacgcggcgcacggcgacatgggaacgacagcgaaggaaaaaaaaaaaaaagtggcaaggcacgcgaccaaaaaacgagcaaaacccggaccaaacaagaaagcaacgaacagcgggaagtccaagagagagaacaaaagggaaccgcgagcccccgggcgggggacggcggggcgaacaacagacgacgaggggngaagcgagggcgacatacaacggagaggggaggaaaagagaaacgaaaacgagaacggaaaag

SEQ ID NO: 124400 - DNA, 671 bp, Arabidopsis thaliana columbia
  unsure (1)..(671): unsure at all n locations
aggaaaaaaagagggggcgccacaaagtttttttggggggggagggggaggctttgaggggcggaagcaaccccaaccacaaccacgccaccnaaaagacggggcccgccgnaggaggggggcgcgcccgaaacaacccccgcgacgccccgaaagcgcggccggacccgaccgaccagcaaccagcgcaaggaaacccaccagaggggacgacgagcacacggccggaccaccgaggaacaacaacgggcngagccgcgagcaccggacaacagcgacgacaagcgggagacaaagacgcctttttcgtttcacggggggaacgcaaaaagccgcgaaagggccaggcaaagagagcacgaggcagaaagaggccgaccacgaacgccgcggaggaaaccgaggagaatggaacagggcgcaagccagcaaaaccgcggacgcgacaacgcggacgagagcacacaaagaaacgaggggagcaggacaaacgcgagaaggagaaagacgcagggcaagacaaagagccgggaggcaaacgcggcgagccgccagagacgacaaacagggggcacgggaacaaccgacgagggaagagaggcgcacaaaccaaggggcgcggaagaccacgaaaagggggcgacacgaagaggggaggggaggggacaggg

SEQ ID NO: 124401 - DNA, 118 bp, Arabidopsis thaliana columbia
cctgcaggaacccggccggaataaccgggccgtcccacgcgttcgcaaaccccgacgcctagaccggatctagacacagaagccacacacgcggcaccccctgatgccacccccagaa

SEQ ID NO: 124402 - DNA, 471 bp, Arabidopsis thaliana columbia
cgccccaggcccccgtccgtaacctggaatcctttaaagcggccgcccttttttttttttttttaaaaaccttaccctttttaagttttagttgtccccttttttccggaacaggaacgaggggaaactcttacaaattttgctggcacaacataggtcgaccaaaaaaacggaaacctttcctttttttacagattttttttttataacctcaaaactcaaaacaaaatttaaaactttgtgcccaaaaaatctaaaaataaaaattgtgaaaaaagacagatttttttcatttgcggctgaaaaaaccgtgggggggcgtaaaaaaaaccccccccgagatttttttgtggggtcccccacccaacccagggccaaaagggccattttccttacaacggggaaaaaaatgggtttcaaaaattcgatttttcctaaaaaaaaaaccttccttttaccggtttcaaaaaa

SEQ ID NO: 124403 - DNA, 258 bp, Arabidopsis thaliana columbia
  unsure (1)..(258): unsure at all n locations
gggaaacccggccacagaggaaacaaaaccgggccaccccgaagggaaaaacaccccccaaccaacatggaaactactaagggcccgacaaaggactccggcaaggaacaccggatccaaaggggcgtaaacatccccacaggaaaacttcccgcacccgaaaggagggataggantggaagggccaggaacaaagccccaagcccccccccccaaaaaaacaggaaacacggccaaggggggcttaaagagtaaaac

SEQ ID NO: 124404 - DNA, 272 bp, Arabidopsis thaliana columbia
aagcacgcacgcctgcaggaaccgggccggaagaacggctggagcgcgagccactactcggcggccagcctatgaactctatgtctacaagtcttgcaagaaccgggcaaccgggaccattctaaaaaccaagcgcccgaaacaagaaacacacacacccaaaaaaaaaaactcacgccacaagaagggaacaatgcgcctactagcggggagagaatacacaacacacaaaagcactgagatcaaacgcatgatttcaagagacggagaac

SEQ ID NO: 124405 - DNA, 521 bp, Arabidopsis thaliana columbia
  unsure (1)..(521): unsure at all n locations
tgnnnnnnnnnnnnnnnnnnnnnnnnnnnnnnnnnnnnnnnnnnnnnnnnnnnnnnnnnnnnnnnnnnnnnnnnnnnncttttttttttttttttctaaagccgaatgtattggagattgtatgaaaaacgattacatgttacattttcagtatcacaatggattataatctactctctttctcttactcatgacaaattcaaatctaaaaactctaacggaatttgaagctaaactatttctcggtatgattctgttgatacaattttccggtaacagctgctgctaaagctgctgtaaagttaggatcttttgttaaggaagagccatttgctccaccaaaagtttctgaacttgnggaaaatcgattcttgacgttgggctcgtcactttcttcgattcaatcatatctacngtagtcaccggcacagtcaagctacttcttctgtttgctgcaacgggtgttgaagctgaaccaccatgagagaatgtggcggtttaaagccattgtttgaatcgat

SEQ ID NO: 124406 - DNA, 500 bp, Arabidopsis thaliana columbia
  unsure (1)..(500): unsure at all n locations
nnnnnnnnnnnnnnnnnnnnnnnnnnnnnnnnnnnnnnnnnnnnnnnnnnnnnnnnnnnnnnnnnnnnnnnncttttttttttttttttgagcacataaccctgtgaagtaataatataagagaagtttcagctctgagcatagtgcctaatgaagacggagtgagtgtacgaaatctgatacgtttaatgaagcgtcacatagaacttgatatcgcgctattaagcagtctcgtgactaccaagcctatgcctggcctgctagatgatagccagcttgatacctttacgcttgggaagagacacccaaggctttgatcctttggcaatggagaacacattacccaaccttagtgcaaactcatgcgctgtagaatattggaatggggatgatttaaagcttccattatgcctctcactgntttttataacacaaacacgcactctgaaaggaccttctgtaaccatcacacctntgactacatcaaacttgatgaactg

SEQ ID NO: 124407 - DNA, 629 bp, Arabidopsis thaliana columbia
  unsure (1)..(629): unsure at all n locations
nnnnnnnnnnnnnnnnnnnnnnnnnnnnnnnnnnnnnnnnnnnnnnnnnnnnnnnnnnnnnnnnnnnnnnnccacgcgtccggctcggagctgttctaagactacaacaggtagatcggatcggaactacgacttgcaacacttangacatgccaaggagactgaagaatcatctgaagaggcttactgcgcctaagcatcgcatgcttgcatacttggtgggcattttcacatagacatcttctggaccacatatgtgacgggagtgacttgcgctcctacttactatcangaacgaggatgaagcatagctcttacctgaccgtgaattgacttcactcttgatgcataggcatatgcaagtcgatgggcagtcaggacggacaagacctacactgctggttacatggatgtcgcgtgtatccacaagaccgatgataacgttctgaattctctatgataccaagggacgtgaccatctccactccatcactgatgatgaagcaaaggatacactatgcaaggttcgatctatccagtatgaacagaaaggcattactgacctgaacactgactatcgatcgaccatacgttaccctgactcgctcatcatgcctactgacaccatc

SEQ ID NO: 124408 - DNA, 482 bp, Arabidopsis thaliana columbia
aaacacacgcccagaaagcgacggaccccactagagcgcggcttcccaaaaagcgaacccgcccataacaagcccaccgaccgacgcaggcccgcccacccgcgcatctccccggccgccagaaaccccacacccgaagagtaccacacacgcgaacgccagaacacggggagcaccgagggaacaagaagccaacacaggaaaagaaccggcgaagttttttctccgcgggggccgcgaaggcgccccccgccgaccacaccgccgaaaacacacaccgaaaaaagccgcagaggaggagcacagagaagccgcagagttgaaagggagaggcgcggctgcgcgcgagaacgccgcaggagcgcgggcagaacaaggcgggcgggggcccgcacacacaacggacgcccagcagcgcgacacccgaacggccgcggggggcgggcgcgcgcacgccgaccggcgcaaaaccggcccgcggg

SEQ ID NO: 124409 - DNA, 375 bp, Arabidopsis thaliana columbia
  unsure (1)..(375): unsure at all n locations
ccgcaggaaccggnccggaagaaccgcggctacccacgcgccgaaacccanacacccacgcaccggacaagaagacgcgaacagagcgcaacacccgccagaacccacgacaaaagccagaccccagacaaagcgcagccaccgancgaaaaaaaccacgacaccacaacacaagaacgcaacctccctgccaagaagaaaaaaanacccaccaccaaccaaacaacaaaaaccaaacgcgcaaaccaaacacgccaccgacaccaccgcacaccccccaccacaaccaaaaccacacaaaaaaacagaccgcaacagagaaacaccccccgcagcccaacacaccaaacaacacccacacaaagagcaaaaaac

SEQ ID NO: 124410 - DNA, 444 bp, Arabidopsis thaliana columbia
ttgccgcatgcacgccccgtacgctggcacggtatatacgggattggctgacctgtgggcctgcaataaaccccccgtgagtttaggaggcccatcccaacaataacacccacctgtagtttaactatgagaatcttcacaacccgacccccgtaatccaatgatgttaccaaaaacgtgtcgggacaacaaattggatgaacatattggctttatcatttaacaggaaaaacgaacgggactaaatgcgcaaaccaaaagaacctcacaataacacagctttatgactcgccagaagcacatatcaaaactttctgttaccacgtccgcgcacctccctctagaaaacaaaaaaaaaaagacgactcgcaaacaaaaggacgcgaaccccagacggggccccacgaccggagacacctcggcagaacacgaatgaaataaggt

SEQ ID NO: 124411 - DNA, 473 bp, Arabidopsis thaliana columbia
  unsure (1)..(473): unsure at all n locations
ctacatagggaagctgtaccctgcggtccggtccgcattccggtgagcctgagcttggacacactgtcgtggagcnctgctcgctntgaaatctgtgatttgttctctagcatctatctcatctaggctaatcactgttgaactcagctacatagccctgagtcttacgaagattgaggagccgcgtggtgcatggagaccttattatctgtggactaccgttgagacctatgatcanaaacttcatgaaacannntcagcgcatatggctgtacatacaagatccnnngactatgtcacatatctcaggatgcaacatctctcttcgctattgcactactctgtagagatacacttagggatcagatcatcgtgtactgagaattgcaaggactctgagtcgtcagcgcgatacagaagaccagctcttctcaacgttagactatgagatgttggagcacgatcactcatac

SEQ ID NO: 124412 - DNA, 467 bp, Arabidopsis thaliana columbia
caggaccggcccgaatccgggcgcccaccgccgaacacaaagcaaaagcccccccgggacaagacacgacgcggagcgcgacgaccaccaagcgcacagcacaggacgccacaacacgcgtcgacaaaaatccaacaccaaaaccgctcgagcggggaaaggcagagagccacccgagccaaaccgcccccaacgaggccagaacgacgacaagcggcgcagaaccaccacaggcgcaaccgaaccacgacacggacacaaagacgcaaacaggcccacacgaagcacacacgggcccggaggagacgagcgaaaccagacgcgaaacacagcccacagagacccacaacacccccgcgcacgaccccaaccagcaagccagaaccacggagaggccatggcaagccagaccaaccaacccgacgccacaggcggcccaccacagagccccgacggccaacaaagca

SEQ ID NO: 124413 - DNA, 458 bp, Arabidopsis thaliana columbia
  unsure (1)..(458): unsure at all n locations
cgtcgcatgcacgccgtacgtagcttggatcctctagagcggcctgccctntttgttttgttttttttaaccagggggtggtgganagnggcggggcccgcgcctccaacgccccgngcacccccgagaaaaggaaacttcgacaagacccaatgggggcaaaccaaaaccgcgcaggaaaaaagacgaacacacgggacgcaccaggaccatttataatcacgggggggggnaggaaccgccccattccaggccaacaaacggcgggaaaacagaacaccaaataagggggtctctccaaacgaaaaaaaaaccctgcaaccgctcttccccctaaagcggggcggggcacccaaagtccttgacgcccagactcggtaaacgcacaagggcaacccggcctttggggaggcctgagcccagaattaaccaaatactctgggaacggggcaccccac

SEQ ID NO: 124414 - DNA, 390 bp, Arabidopsis thaliana columbia
cggaattccgggtcgaccacgcgtgcggtgcgtatcaagaagagaacaacttaaacaggctggatacaggacagatcatgggcccagacaggcagacaggtttggtagagatgggtgggattctatggagcacgtctacccacgagaccgcggatctggtactcactggtgtaggctgacgatcttggacagaacttgcaagccgctgaccgtgaagcaagcatctataggccaatctacatataggctcagtctatgtgaaggaccatccatctcatcgatctattattggttggccgcaaatacccgcaaaagataatcacctgtgggggggcttcttggcttattaaaaaaaagcctggaactccaaaactcaaggtaccttctttc

SEQ ID NO: 124415 - DNA, 319 bp, Arabidopsis thaliana columbia
  unsure (1)..(319): unsure at all n locations
acgggcgccgaacgcaacgaaaaaaaaaaaaggaaaaaacttcgagggttggcgggaaaaaaaaactttaaagggggnaacacccacccaaccaagaccccccgacaaaaaagagggcatttacgagaggggcggcccagcccaacaaaacaccgccgaccgaagacagacgggcgcggcgcgcaagacaccgacagaagagcggcaaagacacgaacaagagaagacagcgacggcagcgggggcggaagcaacaagggacgccagagaacgggcagacagacgccgagaccacaagacgcagagaaaattttttttt

SEQ ID NO: 124416 - DNA, 594 bp, Arabidopsis thaliana columbia
  unsure (1)..(594): unsure at all n locations
gggaaacgacacaagaggaacccccacanagggaaacattgttgtgccacaaaaaaaaattagaacgccgcacgcaccgcgtaccggcaagcgtggaaaactcaagaaagcggtccgccctattcttgttttttattaccgccgcgaccacaaagaggcggccaccaccccaagggaaaatcacagcctggggggaaccaaagaaaaggaagcctcaccaccacctctcgaccaacacaaaaacacaaaggacagctcacgataaacggagatgcggccctcagacgagaaacaagcgcgcaagagagcaggaacctttcttgtctttcaaccgcgggggggaaccaaaagcgccgcccacccgcgaagcgccggcgaacatctgcaggacattggtcggacagtgcgaggttgagctccgctagactagtaaagacgcgggcggccggaagacgcgcagagagagcgatgaacacaagcagcgtgagaaacacaaagaagcgcaagagcagcgcaccgggcgcacaaacacccaacacgaagcacaatgcacgcaagggacccgaccacgcgccaacagagaagacagacaca

SEQ ID NO: 124417 - DNA, 459 bp, Arabidopsis thaliana columbia
  unsure (1)..(459): unsure at all n locations
cgacaaactctagnagaaagcaacgcacgcccgcaggcaccggaccggaataccgggtcgaccacgcgcccgaaccacagaaagaaggaggacgcgaaccaaaagacgcaagcgacgccgggaagagaaggggagaggcgccgaggcgaccggagcaacgaggaccgagaggagccggcgaagaaacccacagcagcaccaagagccacgagcgcccaatgcctgcaaaggggggagcagccaagcccacgaaggggaacaaaaacagcgccaggccggacccggaaagaggccccccacccggaacaaaagaccccacgcggagggaccccgggacgcaggccgccgacggcgaggcgggacgccaccgcgagccgccagcgacgcagacccgcgcgcacaccccaggacaccggcgaacaggggacccaccccggcggcacgcggacacccgccgag

SEQ ID NO: 124418 - DNA, 349 bp, Arabidopsis thaliana columbia
aaaaccggacaccccgggggcgcgacaagccaacggcccccagggcgaacaccaggaaagcgacgcagagcccgcgcccagaggaacggcacccgggacgaagcaaaaccccccacccagaccagcgccacgccccccccgccccgtccccgcgggggggaggggagcaaccaacgccggccagcacccgcgcgaaccccggggacgccccgcccggccgccagcgcccccaccaacccggggccggccgggccccggccgcaaaaacaacaaaggccacgcgcccccgcgggaccaaacgacagaggcacgcgcgcccgcgccccccggacccgcgccgacacggggg

SEQ ID NO: 124419 - DNA, 507 bp, Arabidopsis thaliana columbia
  unsure (1)..(507): unsure at all n locations
nnnnnnnnnnnnnnnnnnnnnnnnnnnnnnnnnnnnnnnnnnnnnnnnnnnnnnnnnnnnnnnnncttttttttttttttttttttttttcaatgtttaattaataatttctattttgcttaattattgacaaagattatttcttattggagttgggatttgaaacaaagtatatcttgagacctacattacagcccagaggtaaattgatcaatttttccgtcatagatctatctgctctaacaggagtattttgagcagtaacttgattgtagtatcctttgagttcatcagtttggttagagtttatccatttgtatgcanggggttggcatattgagttggacaacatctaatccagtataagtgaatccagtgagagatggaacanaaagtttggatccatgttaagttttctgcatgagaagctacctccagcagtgttcatcaaatatcagttgattcattatgaagtgcataaaatgcttcatgaacaggttggtcatt

SEQ ID NO: 124420 - DNA, 459 bp, Arabidopsis thaliana columbia
  unsure (1)..(459): unsure at all n locations
tcactacttgggaagctggccctgggtccgccggattcgggcgccaccgtcgtctttttctgcaccatgtatgcttctgactctgcaccgattcattgcttaccagagttcaattaaggggcaaaccgtagggatggcttacgtgcttcatgctaagattatttgattattgaccatgccacctgtatgncattatcctctatgatactgatttatgacctgctgagactctatgcgaactacatngatcaaactttgtcatcttactgatcactatactgatagatgtgtcactcattccaccctgatcaatgatacttacaactgtgactaagatctcatcagtctgtcaatctctgtgacaatgactatgcgaaatgacattcctctggtgtatgagtctagattcttgtcaatcactcatagatatcttgcatattacaatgaatatataacttg

SEQ ID NO: 124421 - DNA, 304 bp, Arabidopsis thaliana columbia
cccccgccaaaacacctatcaacgctacccagccttagtccaagcgttttcaaaaagtcgagccgttcatgaggcgaccaacgcacgcgcgagacccagaaaacacccccttatcttccgcagtccttctcgaaccgtcgccgacatatgagccgttttttttacaacgggggtgggcgaacaacccagtgtacgacccgcgacctgtattgtgtgtattaacggttccagaagtcacaatcacggagtaatatgatgaaaattgcagagggtgggaagcgatgggcggctgtgtgccgccgtg

SEQ ID NO: 124422 - DNA, 395 bp, Arabidopsis thaliana columbia
  unsure (1)..(395): unsure at all n locations
ggaaccgccaccgcaaacgcacacgccgcaacgaaacaacgagcgaaacacacccgggggcgccgggaaaaacgacgccgaccanaaaaacaagcccacccggaggaagcaccggcgaggcggagacgnacggagcagacggcgggagccgccacacacgcccagcgagaagcccacgagaacnagggcaagacaacaaagggagcgcgaaacgacacagaaagagaccggccgaccaaaacaacgccgcaagacgaaggattattacacacggagcgggggcggcacacgaagacaccgcggaacggggcaaagagcgcgaagaaacagcggcgaggaaaagaaacacgagaagacagcgacaaaaaaaggaagaaggcggagagagcgcgaaa

SEQ ID NO: 124423 - DNA, 514 bp, Arabidopsis thaliana columbia
aagaaccagaccgagcacaacaggaaactacaaaacggaacaacgccccacacgcaccacaaccacaacgcgacgaaacacaaagaacaaacacgagaaggataaaacgagaccagggaagaccatatcttttggggggggaccacaaaaacaacaaacgggcgaacaggcaaagaaaaagcgcagaccaccggggccgcgcgacaaataagcaaaaaaaccaccaccgccacccaacgcaaacgcgcacaccaaaaccaaggaagcgagaccaagcacgacccaaaagagaaaaaaccagggacaaggaggacgaaaagtaagaaacccaaagaaagacaaagacacaccgcagagacaaacaaaaaagcccaaccacagaacatgaacacagaacaaggccccaacaaggagagggagccggagcgaaccagaagcaggagacacccacccaggaaaacgcgcggcagaccaccctgggacagcagcacaaaagaggcgggaagagaaaaaa

SEQ ID NO: 124424 - DNA, 136 bp, Arabidopsis thaliana columbia
tccatgtaatcccttatctctggccagggagaatatggcacggcgtattttttttttatagcgggagggggagaatcgtccccaccaacatttagccaacatgaaacttcattcctaaattccgcaaaaattaaaa

SEQ ID NO: 124425 - DNA, 408 bp, Arabidopsis thaliana columbia
  unsure (1)..(408): unsure at all n locations
tggatttaggtgcacattttagaagaactttgacgtcgcttgcacccgtccgtaagctgggtatcctttagagcggccgcccttttttttttttttttttttttttttttttttttttttttttttttttttttttttttttttnttaaaaaacatgaatttttttattttggaaagattccttggggttgttttcccgggcagggaaaaagacttttttttttgttcccagtcctttgaaatccttaaacaaagcttgaagccctttttttttgctcccattggctgcaaataaaaaaaccaattaaggggttctttccaaaccaaaaaaaaaacttttaatgctttttttcgaaaccggccttggttccaaagtttttgccccaaatctgtgaaggaaatgggcct

SEQ ID NO: 124426 - DNA, 322 bp, Arabidopsis thaliana columbia
  unsure (1)..(322): unsure at all n locations
acgtggcttgcacgcgtccgtaggctgggatcctttagagcggccgcccttttttttttttttttttttttttttttttttttttttnctttggaancttctaacgtttcaaaattttttgaagttccggatcattgggtgaaaaactttaaccgccaaaaaaattttagccttaccgacccaatggggaagtgattttttttttcaaggaaaataaatcttaaacgcgccattttaaagggggttgtttattttggggaaagaaaatttgaaacggcccttttctggaggggaataaaaaaatttgactggtggaaggggg

SEQ ID NO: 124427 - DNA, 510 bp, Arabidopsis thaliana columbia
taaagagctaggacgccgcaggcacgcgtcacgtaagctgggatcctttaaagcggccgccctttttttttttttttttttttttttcggcgtttttttccctttggaaccttttaacgcttcaaaattttttgaggttccagattattgggggagaaaccttaacgggcaaaaaaactttgaagtttccggaccaatggggaagggagggtttttttctgttttaaagggacttaaaacgcccttttcaggggggtggtgaactttcgggacaaaaaatttgaaaccccccttcctttgagaggaaaaaaaaaacttccctagggaatggggggaacaccccacaaccgttggaattttctgaagattaaaaggaagtggggggggggtttaccaccctgcgcaaagggggccagcagggagttttaaggggggggtctctaattcccaaaaagggggggaccccccgcccgcttgtggggcgggaatccgaaagccattttttggccc

SEQ ID NO: 124428 - DNA, 545 bp, Arabidopsis thaliana columbia
cgcagaccggccgaaaccgggcgcccagcgccgaaaacgccggaacggaaagaaccccaaagggcagaaagcggcccagaaagaacccacaaaccacaagggcaggcgagcccagcggaaccacgcagaacaagcaacacgaccaacccaccaccctcgagagggagagcacccacagccagccaaacaaacaaaaaaagaacgcaaacaacccacacacccaccaaacccaacgaccgcccacgaaaaaccaccgcccggccgcacggacagacgacaacagacacacccaacaagaggagacagacacccacgcccacccaggaagacaggcaaaacaccgccacgcacaaacagaccccacgaccagaccgacaaacacaaacaaaccgcgaccaccacccaagccacacccaagccaggccacaacacagggcaacacagccacaaaaacaaagaacacaaagaccaaaacggcgaacaccaaagggcgcacccggcagcccagcccaacaaacacaaccgacgaccacgcggacaccacc

SEQ ID NO: 124429 - DNA, 408 bp, Arabidopsis thaliana columbia
ggggccggcccttatgggcggcccgcccaaaagccaccccgtccggatatgcgccacgcgtcccacaagtaaatcgcgcggggggtaagatgcaacgatgacgaaaggcagcggcacaacggcaccgaaaaaggggaagagaaggcgcacggaaaaatcggcaaacgataaggggggcgcggaacaagaaggcacggtgtattcattaagcgggggggaacccgaaccctaacattcggaaggagaaagagcgcagcgagaaacccgagcttgcgaaggggggcagaaagggtacgaagagaaagataccccacggcgagggcgaaggacgcgacgcagaggagagggcgaggaacaaaatgagacgtgacgtgggagagcacgaaaaaaagaaatcgagaaaagcag

SEQ ID NO: 124430 - DNA, 612 bp, Arabidopsis thaliana columbia
  unsure (1)..(612): unsure at all n locations
gaaaaccgggtcgacccgcgggccgaaaccacacggaaacacggggcccggccccggggacaaaaaacagagaaaaagggaacagcaagggaaccacaccacacgccccggcggagagaaccgggggaaggacaccaaacagagcacccgagcaccaccaaggagagccctcgaaggggggggaaacaagcgcagaggcacgagggggaaccaaacaagcggcagagggggcgggcagaacagcccggggaccccgccgccncacacagcccagggagagccaacaaccccccggcgcgcacgccacaaacgaaaccaccgacggccacccgaacagaagcaaggcgaccccccacgcgcggggacggccaagacacaacggagagagaaagagcacaaccgcagcacacaacaacccacccacaggaaaaggcaaacaaaccccaaccaaagaccgacaaaagcgaggagacacacacaacaccgcgcaccaagaccgcggccgaccgagaggcgaagcacggcgacaacgaacccgccccccggcccaccgcagccaacacccaccccccgaaacagcgagcgcaaaggacccagagagaagaccccaag

SEQ ID NO: 124431 - DNA, 260 bp, Arabidopsis thaliana columbia
gcgcatgcaggtcgcgcccgattacttagacgcgtactacgaatacgcgcccccccgcaatatatcccccccgtcttcatatgcgggcgcgacgcgacagattgatcacggacagttgcagtccacccgcacgcaagaagattggcgcccaccggcgaagcggaatcggagagaagtttcacgcgtagtatcgtcccgccacaccgcccgcagacgccgcctatgccgtgctatataaagtatacagaacgagagagccg

SEQ ID NO: 124432 - DNA, 574 bp, Arabidopsis thaliana columbia
aacagaagaggagcagcaagggccaaaagacaacccagaacagccgcccaaacagagagagaagaacagacgaaacgcgagagaaaaagaaccaggcccaaggcaacacaaaccaagcgaaaaactcctctagggaggtggaccacaaccaaccagccccggaacaagaacgagccaacacaccacacacgacaaaaccgcagaggacgcggcgaaaaaaaaaaaaaacaaagaaaagcagggacagccggaaacaaagcgaaaagggaaggaaccccccgaccaccggaggggcgacagaggaccagcacccagcgcgagagggaaccgaggacaaccgcgaggcaacgagagaagaccccacccggcacacaggggcgaacaacaggacgggccgcgagaagcccaaccaggggacgagacgcgaccagagaaccacaacgaagaaccagcacaacgagccggccgcaacacgaaaagagcaaacgcggacaaaggcgaggagacgaagaggggcgggggcaggacgagacgacccgagagggcaacggcggggccacaaaagaagacaaca

SEQ ID NO: 124433 - DNA, 408 bp, Arabidopsis thaliana columbia
gaaaacagacttgaaagggcaaggcccgcccccgaaacataggccccaaaaaagggcttccccgttctcccgcccccgcaaaaaacccgccacccggatgagcgccccaccgcagaaaaccacaaaaacaagaacaacccggaaaaaacgcagagacacccggcgaaccccacgagagaccccgcacttgcgcaaccgcggaagcacccaccagatttttttctaggggaggcagacagacagcgagcagagaggcacgcgcgaacaggcggggaacagcgccagaaaaaaaggccgcgcagagacaaaaagcatgtgaggcaccccaagccgccaacgcaaaacaacaaacaaacaaaaaccaaaagagcaaggacggaccccgcgacccaaacaacccgacgacaa

SEQ ID NO: 124434 - DNA, 599 bp, Arabidopsis thaliana columbia
cgcaggaaccggaccggatacccggggcgcccacgcgcccggacctcccacggagaggagaagaaggggaagaccgcgcgaccagcacaggagacgacgaagcggcccgccgcgccgcgcaagagggccccggggcagagggacgacccaacgggcaaagcggcgagagagccaacccacgcctaacgagggggggaacgaaccaaaagacagagccagaacaacgacccgccccagaacacgaaacccgcgaacccgcgagggccaaaagaaaccgagaaggaccgacagcacccggaacgcgccgcccaggaggaaaaacggacaccccagacaaagagacaccaggacgagcccacacagggaagacaaggcaacgcccagagagaaaagaggaccgaaagcggcaaagagaaaaaaaaaggggacaaagaagcccgccagaaacaggccgcgggggcaacccaaacgcagagggcacacaggcaacccgggccaggaagagcaccagaacacgaggacagcaacccgccgaggggcaaaggcgcgcaccgacagaccgcaaaaggccgagacggcgcaccccaaggggcgacgcc

SEQ ID NO: 124435 - DNA, 509 bp, Arabidopsis thaliana columbia
  unsure (1)..(509): unsure at all n locations
nnnnnnnnnnnnnnnnnnnnnnnnnnnnnnnnnnnnnnnnnnnnnnnnnnnnnnnnnnnnnnnnnnnnnnnctttttttttttttttttttggtttttaggaaaggttgattttttaatattttaaaacaacgagaacaagaaccggtccagggggaaaaggcaggaagagaattaaacaactagactaagaaacttccttgaatcacaagaaaagtaaaaaccctcaaaaatctctgagggaaagcaacaaacgataaaagataaaagctggntcttgttctcattcttctccttcttcagatggaaggagggaagaaaatggctgatgaagtcctcgtggatcggaaggacttctccacctccggagccaccttaaacgctgcctgcaaaacctcaggggacaaagacttccacaccgatgtattcccggccaaatgtgtgaagatcggatcaagagtggtgacaatggagaaccaagacatgcccttagcatcaggaattttagaa

SEQ ID NO: 124436 - DNA, 526 bp, Arabidopsis thaliana columbia
taaaaaattttgacgccgcatgcacccgtacgtaagctgggaccctctagagcggcctccctttttttttttttttccaaggaacctcagaacggttaattttttacttttttagaacaaccaaaacaacaatcggtccacgggagaatggccagaaaaaaattaaatacctttactaaaaaattttctggaaacaccaaacaagtcaaaaccctcttttttttccgggggaaagccacaaccccctaaagattaaaccctcgccccggagccccccccctcaccttttccccttggaaagaacaaaacaaattgttgctaaaacccctctctctcccggaaaaaacccctcacacactcggggggcacccttaccacccaccctgagcacctcaacggagagcggactttccacctcactttttatacagtacatttagttgtaaatcccgacaaacgacagctatcatatgaatatccacacacactccctaatctctcaggattcatagcacctcaaatttaa

SEQ ID NO: 124437 - DNA, 500 bp, Arabidopsis thaliana columbia
  unsure (1)..(500): unsure at all n locations
ggaagctggccctgcagaccggccggaattccgggcgaccacgcgtcgnatgaggataaatagaacaagaacttctgcgagataagatctgaatctcaagtggaagctatatttggctntaatattgactgcttgngctctctctttctggctatcttgtgatccatagagggtgcctagtctcatggatataccaatagctntatcagaccatcttgcttctatagttgggaacgcactgacatcagggcttatgttgcataagaagctgactgcttggaggctatggtctcatcaattcatgttgcgtcatctgctgtatgatgatatggcacaatgacctacttcactttgaacgcatctgtatactgtatagagacattttctcagaggtatcgatactcaagatgagctatcttgtattgaagactgcagtcttgcacaaatctacagatgattaccgagaagctggtgactaaggctatatgacagacacatgt

SEQ ID NO: 124438 - DNA, 515 bp, Arabidopsis thaliana columbia
  unsure (1)..(515): unsure at all n locations
ggggggggagggattggacccgggggaaggcccaacagcaaaccaaagcncgcgacaccaaacaagaacgggggagtgccaaacgaccaccccgcgggccaaaaaacccgccccgcccacaaaacacacgccgacgcgccgaagaaacaaccacaaacgaaagagagacgaaacaagcagagcaaagaagcacgcacacccccagcagaaaggaagaagcaagaccacgacaagacagaacgaacgaacagggaccgggagaagcagaagaacgaccgatactattataacgccgagcggcaaaacacgccagcaaaaagacggcccagcacgaacagcgcgcgaagggaaagcgccgaacagaggcgaacgcgcggaagacgagaggaacaacagaaaaaagccggaaacgaaaaacacacaggaagaacgccgaggaaaacacaaaaaaacaaaaagggagagagagagagcgagagctagcaagacaagcacaagcgacgtgggccggacag

SEQ ID NO: 124439 - DNA, 621 bp, Arabidopsis thaliana columbia
agcaacgcacgcctgcaggcacccggccggaataaccacctggccgacgagcacaatagacggcggacgaccggacatatcagaagtgagcgaggacagcgaactagaccagaaccccggagctctgacgcaggcgacaacaaaagaatccgagaaacaaagagaggccggcaggaaaagaaaaccaccccggacagacactagctgactggagcgggcggagcacgcaccccagaaactgaacagaacgggaaacaaggaaagaataaacccacgggcacagcgacgacgcaaagcccgaggaggccggtcaagggagccgagcatccgaaaacagagcccaacgcaccacccgaaaggaccaagaaacgccccagacgcagggaagaacaggtgaagccacgaccggcaccagaggtgccactggccagaagcaccacacacgccggacgcccggagccgcggaccagcgccaagaaccggagcgacaacccgccgccaggaaacaaccaggacccccaaaaacacgggcgagccagaaagcacaccggccgcgacaaccgaggccaagggccaagcaagtgaccgacccgccccccgggcaaagggcggaacaccgac

SEQ ID NO: 124440 - DNA, 592 bp, Arabidopsis thaliana columbia
gacacacaacaacccccaacggggcagagacggccgagggcccggaaaaaacccccaccgacccgaacacaaagcaccccggaccgcgcccaataccgccggggaaacggtaacgcacgagccgagcaggaacgccagccggaacgcggccgaaagaaacgggggacaaaagacccgggaacaaaacacagcaagaccacagcgggaggcacggtaacgcaccgggcagagggaatattctaaacaacagggggacgagaagaacgcggcagccacacagcagcgacaagaggcgaccccagacacgaacgcacaaaaaaaaaaccaacaaaggcgggcagcaccgcaaaggcggcggcggggaagcgcgcgacgagggaacaaacagaaacggggaaggcccgccgccagaaaagaaaacaacgaaccagggagaacacaggagcgagggggaaagaggggcgcagaaagagacgaagaagcggacggccgcaggaaggcggcgcgggaacgagagggccaaaaaaccaaggcggaggcaggaggcgcaagagaaaaggacgcgaggagaaagcgagaagagggaggcgac

SEQ ID NO: 124441 - DNA, 359 bp, Arabidopsis thaliana columbia
  unsure (1)..(359): unsure at all n locations
gcaggaaccggnccggaaaacccgggttgaccgaggcgggcaaggccgcaaaaaaaacagatcacgccaagggggggggaaagcgagccaccaaggcagagcaggggggaaacgagaagacaccagcagcagttgaaggagatgcgagaaccagactgcaaacaacaaggcgaggccccacaaaacagctccgaaaagttggcacangacaccagaggggagaagaacaaaaacaccccccaagaggggggggagaacccccccccaaaccgaagaaccaaccaaaaaagagcnncgacgcacgagcccccgccaagaagggggaaaccaaggcgacacccaaaaaacgacgcagaagg

SEQ ID NO: 124442 - DNA, 644 bp, Arabidopsis thaliana columbia
cggggaagacgacaaggacaacggagtggagcggcgggggggcgtcaatacagattttttggaagccccgagaaggagacaatttcgggcgaagccgacgccgagaaagaccgggcagctagagagccggagctttaaataacggaccaacccgcgaaagaagcccgcgcgcggctacggaacgagaccagccaccacagacgcacggcgaacgggaacgaacagaggagagggagcgcgccgacacccacgcggaagcacgaagagacgcacgaaagaacacggcgagacagggggagggaaggcagaagggaagagatttttttttcccacagggcaggcccgccctgaagcgcagagggaaagggggcggaggaagcgacgataacaaaccgcgagcggagaaacgaggagaagtcgagcgcagcaggacccgacaggagacgacggagagggagcaaaacaacaagggggacgaggagggaggaggcagcagacggcgagaagaaaaagactcgcgcaagaggggggcgtaaagagagaaacacggacggggggaaggggaggaggcggaggcgaccagacgaagggagaggggcggggcgacaaagggaggggaggcagggggagggagaaggaacgag

SEQ ID NO: 124443 - DNA, 422 bp, Arabidopsis thaliana columbia
cagacccggccggagaacagagcgtccccgcggcccaaacccgccagcaacgaaaagaaaccccagggcgcagaaaaccagaacgcagaagaacaaccaggaccaccaggccaaagggcccgacagccacaaaccggaaaaacaaacacaaaccacaacacaacaccctgaaggagcgaagaacaaaacccacaaacccaaccaaaacaacaccgcgcagccacccccgccacccccccacaccacaaccacacaacgacggccgaccaaaacaaagcgcgaacagacacaacaaccaaagaccagaccgacacaggcacccacaacaaaacaccacacaagccaccaaccaccaccacccccccggggacaacgccaaccagagccccacgcccaaacaaaaagaccaaaacccacacacc

SEQ ID NO: 124444 - DNA, 587 bp, Arabidopsis thaliana columbia
  unsure (1)..(587): unsure at all n locations
cccgccgaccgggccgaaaacaagcgacacgcggccaaaacccccagaaaacaaagaacaggggggaggacaaccaacccacaacaggcacacggggagccagcaggcgcggcgaccgggcgccccccagcggcaagcaaggaagggacggagaccaacccgtgcgggggggggagaaaaacacacggagacacgacagagacccggaaaggccgccgccgcgacggaacccaaaacaaaacgcggccaacgaggcaccaacaagaagagagagacgcaaagggaacgaaggcagcaacggcggaggggggcaaaccacaaaccacaaaaacgaaccaggcacgcacgaccaagcacacacacaaccgagggcccccgccagccggagaggaaaacaccacacgacagccagaacaaaacgcccgaacacaaccgacgcaccccaccccncaccngaacccacgagccaaagcccacaccacgaagcggcccccaagaccgccaaggccaccgggaaggggccgagcaagaggcgagccggcaccaccgagggcccgaaccccgaacccaaggcccacgaaaacaga

SEQ ID NO: 124445 - DNA, 474 bp, Arabidopsis thaliana columbia
  unsure (1)..(474): unsure at all n locations
agggagcccccccaagccggaccaaaacggattacaggggcgcgccccgaaaaaccccgccgaaagaacaccccggacaaaaagagaaccagaacaaaccacacggagaaagccgcgcccgaccacaaagacagcggaaagggaaaaggacccagaaccgcccagacaccggaaaaccttattatcgaagggggggaggaaccgcaggccgagagaacccgccagcgaaaaagcaaaggaaacaaggcagacaacgaagccacgaaaagaaaaaaaagaagaacagcggggccgaaaacncgagagggggaaagaagagagaaaggaaagaaaaaaaaaggggggcagagagaacacgaaaaaagagcgggacaagaacagaggaggaaagcgggaaagcacgaaaacagaaaggaaggagaaaaagcgagagaaaaagagggaaaagaagaagcgggagcgcggagcagaagg

SEQ ID NO: 124446 - DNA, 533 bp, Arabidopsis thaliana columbia
caaaccacgccccacccagaaaacagacgaccgcgcggcacacaaaaacacccaacaaacaacaaaccaacagaccaaaagaaacgacgcagacccgcccaccacaaaaacaccagacaaggaacacagaagaagagggcccaccgacccccagccacgcagcccacgaaagcaccgacacattttttaccgagggggggggacgccacacaaacccgcccccgaccgcgcaaccgcgcaaaaacagggagcgcagacaacagaaggccgcaaacaaaacaaacaacaagacgaaggggggggcgcaaaccccccgaacaaggacaaaagaaacgaagagaacagaaacaaacggcgcgagaccggcccgaacccaagacacagaaaacagaaggacagacaacgagcgaggaacgcaaaccagcgcgaacacagagaaagacacaacagaaacgcaggacaaccgcagagcacggaagggcgagacagaccacaaacaaacggcgcgacgcacgcaccgccacaaacaaaac

SEQ ID NO: 124447 - DNA, 428 bp, Arabidopsis thaliana columbia
cccggaagaacccacccaccccggaaacaaacccaggccgaaccgccagccgccacaaacccgccgacaaaagaacccccgcacaccaggacgcgaaaggaaacaacaggagaagaaagcaccagcgcagcgaacgcaagacccccacaacagagacgcggcggcacccggaccaagaagacaaccaactatcaccaagggggccccacaaagacacgagccaaaaccgaacaaacaaaccaaacaaaagcgcggagaacagagaaaaagaagaacggaacgaaggaccagacgaaggacggcagcaggaaaaaaaaagggagggagccaacagcagaagaaggggggggacgcaagggggacgcaagaggcgcaacgaaaaaggaaagagcgggaggcaccgaagcggaaggcacaagacaaaacac

SEQ ID NO: 124448 - DNA, 224 bp, Arabidopsis thaliana columbia
  unsure (1)..(224): unsure at all n locations
acgcgaacgaaagcncggaaccccagagagcgccctggccggggggagccgaacccaacaanaacacccggcgacccagccagccaacgggcggggcagaagaaaaaaagcatcccgacaagggagcaaccacggagcaaagccccaacacacccgaggagggaacacaacccgcaacgaggaacaggaagacaagacaggccaaaaccgatgccgacccacca

SEQ ID NO: 124449 - DNA, 545 bp, Arabidopsis thaliana columbia
  unsure (1)..(545): unsure at all n locations
gctctatcgactcactagggagctgtacgctgcagtaccggtccgggatatnccggttcgacgagctacttgccgggggccgccttttttttttttttttttttttttttaaaaaaacccgaaaaccttaccccgcagtgggacctttccacgggtttttgagaaacttttttttttttaaagaaaatatatctttggaaatttttttttttcctctttctccaccaaaaaaacctcgtttggggaagagattttttttgaaaaccctttgggggtgggggccccttttttatgagaaacaccccgccccgaattttttttgtgggtggggccccccaaccaaaaaagaaccaccaaacccctcctttattaaaacacaccttcctccaaaaaaaaaaaggaaaaaaaccccccccccacccccccttcctcttttgggggggggggggggacaccccccccccccccccccctccctccccagtttttttgtgggggngggagacgcgccccccaaaaaaaaaaaagggggggggggggggggg

SEQ ID NO: 124450 - DNA, 643 bp, Arabidopsis thaliana columbia
  unsure (1)..(643): unsure at all n locations
atgattcttnnnnnnnnnnnnnnnnnnnnnnnnnnnnnnnnnnnnnnnnnnnnnnnnnnnnnnnnnnnnnnnnnnnnnnnnnnnnnnnnnnnnnnnnnnnnnnnnnnnncctttntttttttttttttttttttttttttttttttttttttttttttttaagagatcaaaccaagtaatacataaatctcactggagtttctgtttctccataaacaccaaaagttttgcaaaagaaaaaagtttttaaagaaataatcaaacccatcaaattttcttcagttttcacagaacaattttcagaccgatggagagaagtagccgcactgccgttgatcgtgttataggcatcatggcacttgcttcactagcatcttctgacttgatcattatcttgaatttgcaactcccaacagaaggatccctagtactgactatagagagacccgggaacttacacgcactgtcgagctgattacttacctggtaatagctattgaacgcatacgaaacattctgtgctagattcaggttaccacaagaggagccataaccaagactggtgcaatcagcatgatcacaagcgtagctcacgcttggtcccactgaggatcctgaagattagcatttggcgcaagaatac

SEQ ID NO: 124451 - DNA, 380 bp, Arabidopsis thaliana columbia
ggaagctggtcgcctgcaggtaccggccggataattgcggtcacgagtagtatggaggacgccttgtaagactgtcttcctgaagaagaatatgttttaacggacatacacgtctataacaccaaggacagcacttcacagctataaggtcacaccccattgtagacttagcctcacatattctgaaggagaacagccgttggtatcaactgaacacgacttaactatgtgacacttgtctgtaccaagaataatatccatcagcttctcaggacttcaactctaccctgatttttcgatctgcggctagcacgatgacacatgatgcacaggtgctccgaccacgactgggatccaagcaacgcgacaatgcactaccg

SEQ ID NO: 124452 - DNA, 527 bp, Arabidopsis thaliana columbia
  unsure (1)..(527): unsure at all n locations
cgcaggaccggcccgaataccgggctaccacgcgccacgacccgaaaaaacagaacaaaaacacccgccgagagaagacccgagagccccacagggagacaacaccggcgaccaaaccgaccgccccggcccccccccccccgcaccaagcccagccaccaaacaaagcctaggcggagagaaaaaccaccgccgcccacaagaccccccagcncccccccgccggaaacaacccagaccccccccgacgaccaccgcacccaacggaacaacaaagaaccacaccaccacaaagccaacaacaaccgagacccaacaaccaaccacgagcccaaaacacaaccgaacccaggaagacccaacaaacccacacccaaccaccacaagagaacacacaagcgggacaacacaccaaaagccagcgcaccccccccccaaccccgaacccccaacacaacacgaaccccaccaccaacccacaccaccaagcacgcccacaacccccaagcacccaacaccacacaaac

SEQ ID NO: 124453 - DNA, 522 bp, Arabidopsis thaliana columbia
acggggcacgcacagcgaacgccagccacggatccacccgcagcggttgacacgcgggcgcgcgaacagccccgccagcagagaacaacccgcgccgcgacaaagacccactcgaaccgacgcaacaagacggaaaaaaaagacgcaaccacaacacacgaagaccaacagaagagaccgaagaacacagacgcaacacagaccgcaacgcacgccgagagaacgcgccagccaagctttttttttcacggcggggggggagaaagaacgaacggggcaaaggagacagaaaacacggcagacacacaagccgcccacacaaaagaaaaaatgaacgcggagcaccagaggcgcgaccgggcaccgacgaagagaggaagaacaagaaaggacacgaacgacgaaaacgaccaaaacaagacacggggaaaggaacgaaagagaggcgaaacggggacacaacagagagcaacagcagacagcggggacaccggcgcgcagaagaaacgccggaacacacaa

SEQ ID NO: 124454 - DNA, 665 bp, Arabidopsis thaliana columbia
  unsure (1)..(665): unsure at all n locations
aaaaaactgtctcggnnnnnnnnnnnnnnnnnnnnnnnnnnnnnnnnnnnnnnnnnnnnnnnnnnnnnnnnnnnnnnnnnnnnnnnccacgcgtccgatgaaaagaagtacccagaggaagcttctgagttgaaatctattatcactggtgaattacctgctggctgggagaaggctctacctacatacacaccagagtctccaggtgatgccaccagaaacctgtcacagcaatgtcttaactttcttgctgaggttgtccccggcttccttggtggaagtgctgaccttgcatcatccaacatgacattgctgaaagcctttggcgacttccaaaaggccacacctgaagaaagaaatcttaggtttggtgttagggagcacggaatgggagccatctgcattgcgattgctcttcacagccgccgtcttatcccttactgtgcgacagttctatgccttcaccgactacctgagagggcgcctgagaatctcacttttcactgaacgtggtgtatcctcagtatgaccccgcaccccatagtccttggacaagatggaccaacctctcagtccattgagcacattgaatgttcccccgctatgcccatcactctcatgttctcgacactgctgtcacaatgaaacagtcgggggatttcagc

SEQ ID NO: 124455 - DNA, 276 bp, Arabidopsis thaliana columbia
  unsure (1)..(276): unsure at all n locations
caaacagggacaaccccacacnaagcaaaccaacaacaaccacaggaaaaccgggacaaaaaaaaagagaagacggcaaacaacaagaaaatncctcctttttttggggggtggacccgaaaccagaaaaacaacagaaaacaaagcccagcgacaagcggggaacgagaaagcgnaaccccgggaccaccccagcnaccaaaagcacaggaaccgccacgccaccaccaaccccaccaacaaacacaaccggagaacccaagggcggcaacaaaa

SEQ ID NO: 124456 - DNA, 515 bp, Arabidopsis thaliana columbia
  unsure (1)..(515): unsure at all n locations
ttttgaggngaaacgcacgccggcgtaagctgggacccactagagcggcctgccgacgggggagaggtcgaccaaaagaacaacggaatccggggaggaagggagacagaccgcaaacagcggcgggaggaccaaacaaagacgccaaaaaagacaccgccagcgacacagaagcgcacgacagaggccctacgcccgcgaaccaaaaaacacagcactcttcggggggggggagcacaacacnaacaacaaccgggacaaacaaggccccgccacgaaagcaaacacgaaccaaacgaggcccaaagaccggaccaacaccgaaagccacagcaagccgcgcacagcagagcacaaaagaggccacaaccaccggcagcacacacggaaaacagcccgaagccgacaccaacaacaacacccacgccacgaacggccacgaacgagaagaaagagaaagcacaccccccagacacgaccacaaaagcagccaacagggacacaaaaagccacac

SEQ ID NO: 124457 - DNA, 428 bp, Arabidopsis thaliana columbia
caagacagagcgcgaaacaacttttcccccgggcgtgggccccaccgaggaagaacacacataaaaggggaggcccgatatgcggccccaagcacccaccaggacctcagaaagattaagacacgtggatgcagcacaggaggaagagtaacggagcgaacaaccggcaaaccaaacgaagcatttttttttcgggggggggtggagcgcaacaccaacagccctccaaacgcgtcaaagtaaaacgtacaacaaagaacaacacaccactccctcgaccaactgagccgctcccgtcttcggctcgagctgcggacccacgagcgtacggacatatacccacccacacttacctacacaaatcaaacacaagtaaagagccgcaccaccagcgcacgtggagtacgagacgccagacccgcgcccac

SEQ ID NO: 124458 - DNA, 495 bp, Arabidopsis thaliana columbia
gaaggttgttccccttataggtcccggcccgaatttccgggttcaaccaagccttccaagggacccaaggatttgttccaccgaaggcagcggcccttgaagccaacccaacggttctggtgatgggattagatcagtcaataaaggcaaaaacacaaaatcaaaccgggctttttttaccgggttatcaacaaaacctattttcccgtgtagttaaagcttttaaaggtccagtcattttggtccttatgagtggtggaccaatcaatgtaaccttcgttaaaaatgatcctcgtgttgctgccatcatttgggctgggtatccgggtcaagcgggtggagctgccatcgccaatatcatctttggtgctgctaatcccggaggaaaactaccaatgacatggtatccacaagattacgtggccaaagtgccaatgacggtaatggccatgagagcatccggtaattatccaggaaggacatacagattctacc

SEQ ID NO: 124459 - DNA, 637 bp, Arabidopsis thaliana columbia
catgcacgcgtacgtgagcttggatcctatagagcggccgtcctttgtggttttgttttacacgtaactattattatactttcagactggttcgtttcaatcatgtcatcatagtccttttagaagatacccattattctatcacaaaacacccaaccatgttcctatggtacatcatcgagcacgtccctatggattatgttttttgtccggcacgtctcgaacaacttctttagagcacagatcgaagatacaccgtccaccaacgccacgtggagcttatccttatctacttaaccttcttctgagtttgttatctgtccatcgacactggatcctttgttatcttataagccgcacatgtgccggtcttcaccaaaaatcttaaggactccttttacttcgccgtaaacaagctattcccatataaacgcgtaaaccgttgctaacataaataggccagccgcctcggacaccaacaaaaactctgaaaattgagttcttcccatgtggcccaaccttctaaacaggttttcaaacattttctgtggggccaggtataatttcctttttcacctccatctaaaacctttagagaattctttaagtccgaatctccggaagaggttaatttttt

SEQ ID NO: 124460 - DNA, 510 bp, Arabidopsis thaliana columbia
cacgcctgcaggtaccggtccggaattcccggttcgacccacgcgtactgccacgcgtccgaccacgcgtccggccatatgcgagcaacaacggcgtgagcaaagcttctcgttgccagcgacaaccgcctctccgacactctcatcgtcattccttcacgagtgtccgacgacgcttcttcccccgtctatcactaactccgggggagccgctcctcctacatcctctcttccccggccggagaacaagactagctgatcatcgtgtccttacattctgacagttcaagaatgccacaagctgaggagccacccgctgtctcaaggtgtgattggagaatgattccaaccaccgatcagatctcacaggctagactggggattgtaccgagacattgttctcgctcggttcatgataggacatcgcccgaggagatgaaacctatacggcttatgtcgttttacacggcgccacagctcgttatctggaggctacagtatccacgatgc

SEQ ID NO: 124461 - DNA, 599 bp, Arabidopsis thaliana columbia
ttgacggggcaagcacgcgtgcgtgagcttggatcctatagagcggcctgtccatgcggtcggggttcttgagcagactaataccagaactaagatatttccataacaagaggggtcacaaacataaatattttgccatggggtatgcctgagaacaaccgaaccaacagaagaagatcatatgcctccacgatgctctaaacattttataggggggcctgcaagaatctcctgcggaagacccaatatacccaaaagcacctccaaactttccttaaagaccctcttagaaattggagccaagcttctacgttggaaaaaaagcgtgtttataagaaaacaacggttaatgttgaagacccccccctacatgaaaccccacaaggcatctgccaatcctaaggtacccatcgtaaacataaagccagaggtcaaccgggacgcaataacctcccccgcgccaagcaaccaactccccacccatggttgaccagaatccgaccggccctgagctgccatatccctatggggcactaagccggtccaataggcaagcgtttctccaaaggagaagcccggttccccccaacgccccgata

SEQ ID NO: 124462 - DNA, 510 bp, Arabidopsis thaliana columbia
ggggaaagatcgtacgcctgcaggtaccggtccggaattcccggttcgacccacgcgtccgggtacttgagctagctgggaacgcagcgagagataataagaagaacaggataaaccctaggcatctatgtttagcgataaggaacgatgaggaattggggagattgcttcatggagttactattgctagcggcgggggtttaactaattttaggacgggcgcttcttcctaagaaatcaacagcttcttcttctcaagcggagaaagcttctgctaccaaatttcctaaaaaggcttgataaaaaatcacatcgatgttgcttcttggttatattcagatctcctatgaagaagaataataagagaaaacaccttgttttttttttttaaaggatttgacgtacggactctgaaaacttcttctatatgctcagggatttgcttatgtgaaaactcatggtaagactattactgtccgttaactcaccttgtattgccaaataactatt

SEQ ID NO: 124463 - DNA, 495 bp, Arabidopsis thaliana columbia
agggaaagcacgcacgcctgcaggtaccggtccggaattcccgtttcgacccacgcgtccgccccaaaccaaatcaaattcagacaactacaagatgtgtatttccgagcccgaaccaagagaacagagtactggacccgaagaatgcttagaatattggcattttgctatcgtcactaaatgtcactatagaaaaagggtgttgatccttgggggggggcaatgctgcttcactggggactgaactttttgagagcttactgaagatggcaccgaccatacgaagaagagtcgcacgttgtaagcctacaatgatgatacccctgtatagcttggacatgcttgaaaattacttaaggcaatgttggacatccctaaggacttaaaaagagtggatccattgctctattttatcaactttcaatgtcgaggttgaatgcatcaagaaagttgggaaactcttgaggctcctgggaaaaactgaagaacatccga

SEQ ID NO: 124464 - DNA, 191 bp, Arabidopsis thaliana columbia
gtgcgtgagctgggatcctatagagcggccgtcctacgcgtgcgagcatctcaaatcaacattatcctctgcgtaacatttctgcattttacataaaaaggacacacttagcatcacatctatatcaacattaatgcacgtctagtaataagctaacccatgagatgatagaggctaaaaacagtgagtca

SEQ ID NO: 124465 - DNA, 514 bp, Arabidopsis thaliana columbia
aagatcgtacgcctgcaggtaccggtccggaattcccttttcgacccacgcgtacgagcagctcaagttcacttcattctatgtgaaactatactgcatataagctcactgggcgccccctggatcagatttcaatttaccaaaaatgcagcctctcgcaataagataattcattggagctttgaggctagatttgttctttttttttggagggtgtacctttatgcacgagtggaaagagcaaggaccagccctcgtcgctagccacgaacgaaccgtacgatccgtcacaaagcccattggaacattgcgatgtaggcaaccgcggatgacttcaaagtagaggatcggggaattagactgatatggttctccaactccacatcgatgtggatcgatgacaccatgcatcagctctcggcgtgtcactagaatcccgacccagaccgaagcgcaaccctcagcgcgagtcaaataggtgcagttgactgtctgcgccgcaaccaccgcccgg

SEQ ID NO: 124466 - DNA, 269 bp, Arabidopsis thaliana columbia
aagcggcgccatcgtcagcctcacacctgaagcaacgacgaggccgccaccggccacaccgaaacagcccgagaccgacaaaggacgcaccgacacaaggccttagcggggacaacgccaacgccaagagacgaaccagagcaccaccaaccgaaaccggcacagaagaaccgagaaaacaagggcgggacccaaaacggcaaggaccagaacgcaaactgcaaaagcaacaccagcacacccaaaccaaacccggaaaagcaaaagaa

SEQ ID NO: 124467 - DNA, 516 bp, Arabidopsis thaliana columbia
ggggaagctacgtacgcctgcaggtaccggtccggaattcccgggtcgacccacgcgtccgcgatcttttcgatcctacaattccaaaccctaacattttgattagtcctgactgggtgcccacagacttgagagattctgaaccaatgatgatgcgtgctgctgtgaggagagctgccactaatggctcttgtccttcggtatttttttttttggctggggggttctcgtgttgctgcatcttcccctagcttgctatcaggttcacaaacagggcactttctcaatcggggaaatcatgctcatagcttacctaacctggcttatccagggaactcgggcatcttgaggtcggggagtttagaatttttacccctgcaaaaatgggtcaagtctttttcatttgaaactggaaataccttggaagcaaaagggactcatttgggggaatcaattactgatggtaccttggccacctttttaaagaaaccttgttgagatgaatccagcctgatg

SEQ ID NO: 124468 - DNA, 449 bp, Arabidopsis thaliana columbia
ttacgacttacttttaagggaagcttggacgcctgcaagtacccggcccgaatttccgggtcggcccaagccttccgattacttacctaggtaaaagaagaaaaaaaaaaatttagaattgggagggcctttggaggtggaactttgggggtggggccttgtaatgcccgtccatggctccaaggagcatctctccggccataaccgcagtttaggtatgctttactactggaccgaaggcggtttatttcttagagggtgtggttctggggttcaaaggctcacaagttgggctcgtaccacccgtaaccgccaacaagctggtcgttgtatccagggagcagcgagagccttgggttttcaacttaacgctggtcgtgctgctcgtttccttggggctggccctgttaggatctcttacccaatcagtgccagaaccaactgtaaca

SEQ ID NO: 124469 - DNA, 511 bp, Arabidopsis thaliana columbia
cattttccccccaggggacgaggacacgcaacacaaacacaaaaaggaacccagggggacccatttcacgacccccacaacccgcaccacgccaacaccaccacctcacccccgcacggaaaagcacacaaagcagagagagcagcgcgcctggtccactacacaagaacaaactttttttttctgggggtgacaccccaccatcatttatatcaataataatcccaaatgattatataaaagacctctcctactaacatattataataatagaaaccaccatattaacaactcagatccgtacttgtaaacattgcccccgtcctgaagaattcaaaatatccaaaatatcacggcacctcgactaccatcgctaaatcccattcataattaacccccctcctctcgctagacataccaatatgtaatacctaccatacctctcccactcctccccctactctacctacttatacctccagatcagatcccgtaccctttcacataataa

SEQ ID NO: 124470 - DNA, 577 bp, Arabidopsis thaliana columbia
gaaccgcacccccggaagaaagcttttcccgcggaagaggaaagcgcagaacgaagacaacaggagagaagcgagggcagggggcgacaaaaccacacacagaaacaaaccgcgcacgcacacggaaccgggagaaacgagccgcgcggcggcgaaagcaagggaacgacgggaagacgaccagaccgcgcacccgaagcaaaagcaacacgagctttttttacaggaggggcaccacacacacaaaacgcggcaacgggaggaagcgcacggaagacgacacaagaacgaccaacgaccgacagagacgcgacgaccgaagccgcgagacaacgcaccgacgcccgcaccgcgcgcgtaaacaccgcgacggccgcgcgacccacgggcgaaacgcacgagcagcacacccggcccccacgaaagaccagcgacgcggacgcccgccccggccacaaggtggcggaacaggccccacgggcgggcgagcaacgacagacgccggaaaaaagacgaaaacggaccgccggccgagggcgagccaaggtacccgcgccgaaacaggcggacgcagaga

SEQ ID NO: 124471 - DNA, 610 bp, Arabidopsis thaliana columbia
cgcgtacgtaagctcggaatccagatagagcatgaacgacaggggccgagtcctcagacctaaagctccttgcctcacggagaaggatactgcgggacgatgctctgggacaagggcgcccagaagaagacttctacaccacggatgaccagtgcagcactgccaaggatccaacaagcaaagcagagaacctccttgagcggcgcagcaagaacctccgatgcccatccccacccgtaaaaaacaacacctggcatgagccacaccgagaaagagctgaactcgcccgaggaacaccgtcaggccacgaaaaagagaccactgctgaaaccaacggcacagggccagcagcccagacaccacgccccgaccaaaccgagaagcccaaggagagggactccgagagagggcacgctccccacaccccgccaaaggcacaccagaaccaaggaacccagcaacccacgtccgaccccaacaggaacgccccaggacagacccccccccccggcacacggacaacccacagcccgcacaacgccagcgcccccgcaccaacagaacgcaccccgacacgcgcacgccccacccccaccggacaaagcagggc

SEQ ID NO: 124472 - DNA, 338 bp, Arabidopsis thaliana columbia
ggggaaagacgcgcacgcctgcagggaccggaccggaattaccgttcttagcggcggctaaacaaagccgaggacccacacccgcaggagcatgcgggggcaccacatacatacatgcccgcccatacagcgttatcccctactcgaaaaatctccccagagaaatacagagaaatgaagagcactcacggaaaactaagggattttttttttggggagagaccgacaaacccgagcgtcctacccaccgcactcgcgatagcaacgagcccaataatgagcactagactgtaacaaaccccaaagaagatacaccctctagaaagaggaatctaaca

SEQ ID NO: 124473 - DNA, 614 bp, Arabidopsis thaliana columbia
  unsure (1)..(614): unsure at all n locations
gaagcacggaaggcagctagagccagataccaccgactgcgagacatncagaacaccaacaaccaaacacccaagaggaaaagaggaaaacaaagaagaggagccgaaaaaacgacngccgataaggacacgctagccatggccacacacagacactctggatagaagaggacagcaccaccacacttcgtcacgcggggagagaagcaaagggcaagcgcaggagaacaactacacgcaaaagacacacaacaggccaacacccgcaagagaagcggcgccctgcaacactaaccacgacaaggcaagacgcacgagccaaaccaacgggccgcccgcaacccaacggacaagcgagaaacacccgccaggcaccaccaccgcaagcgggtaacaatccaacacagcccagaccagccccaacgagacccgacccaacaggccaaaccacccacacccccacgcaggcgcccccgaagcgcaaaacaacagaaggccaagccaaagccccaaaaagcaaaaccagagcgccggagcccccccagcacaaacaaaggaacaccgcggccccacccacacccaacaccagccgcccctcacgccaaccaaagaga

SEQ ID NO: 124474 - DNA, 526 bp, Arabidopsis thaliana columbia
gccagcagggaccgggccggaaaaagatgtaggaggggcggggaagcccgacgaggggaggccacagcgaagacacaaggggacaaaaaagcgcaacacggaaccagagcagaagaaggcgagagaaaaacacgagcacgcacgagaaccacaagagaaccaacacagacacacacgccgccgacaccgaccggatatttttcggaagggggggggagaagaacagaaacgagaaaccggagagacagccaagaccccgaacaacgcgcggggagagggcgaagagggagagaggagcgagcgacacgcggcaaaagggacgccggacgagccacaaggccggcaacgacgcaggcgcaagaggaccgaggggagcagaaggcgaaaggccgctcaaacaacgcgcgaagcggagagagagaagaggagggaaaggcggcgcgacgagcgggaggagagaccgagaaggacaaacgaagccaaggacaacccgagcagcaccaacacaggcaggaccgagagaggc

SEQ ID NO: 124475 - DNA, 182 bp, Arabidopsis thaliana columbia
  unsure (1)..(182): unsure at all n locations
cgcgtacgtaagctgggattctatagagagatttaactgtgtgattctgatctgaccaaaacaaccttcactttaagtgcatgttggttgttcatncggtgactcaagagtgtcagcaccataaatggaatgtagcgatagagtgtgacatgcaggagacagaaatgtggtgacctgagctt

SEQ ID NO: 124476 - DNA, 630 bp, Arabidopsis thaliana columbia
  unsure (1)..(630): unsure at all n locations
nnnnnnnnnnnnnnnnnnnnnnnnnnnnnnnnnnnnnnnnnnnnnnnnnnnnnnnnnnnnnnnacctttcttttctgtcttgttttatatgttgtcacacgaaacgcattcatattattattgcacaattataggaaacatcgctttaaaggttcgtatacgacaactctccccaccaagatttactatgtttaacaaaaattagaaaacattcatattgtgcccccagccaaaaaaaaaaaactactcatatactattagttataaaatgagatgaaatgtgttttttttctttctttttaatagttcacaagcaacacatgcatgtatgagaagatcaatatacaaattacaacttttttttgtataatctncgctctttcaatctaaattgtgaaatctttctttaacaagcagagccagcttctaccagcttgcttaattagttgatccttaatctttcttgagaaacttcacttccgtgcatctcattctcatacctaattgacatatatagtattagactataagttgcattaaacaatgaatcacaagatagaattaaacaagaaactgtacctcggtggcataggaatcaaaggagacaaactctccactagcttgagagct

SEQ ID NO: 124477 - DNA, 339 bp, Arabidopsis thaliana columbia
gtaagcttggatcctctagagcggtctgcccttggggttgaggcctcatcttgaacactagcgttaggcaatatagggtgcttctaaaatgacagaatgtgggatccacaaaccgtacttagcaggcaccctcaagacgttcttcaccctacaaagagatcctaagcttagtgtaaatgcacacgcagacacgaaccaacgcttgctacttcgggggagtacagcacctcgggccaaaacaagaaaggaacaccaccctttaaagcaggacaaaagccaatggcccaaaatgggaggccccaccccccaaatggaatcctctagtccgacccgtcattc

SEQ ID NO: 124478 - DNA, 478 bp, Arabidopsis thaliana columbia
aacccccaaggacccggccaccaacaacccgggtttaccaaggggggcggaaccccccacaaacaaccgggacaaaacgcggagggggaaccacacgccagaaacgccagcccgccccgcaacacagacgaacgcagagggccaaagccccaccccccccccaggacaccacacgcgaacccacagcaccacccaaaacacaccaaaaaacgttttttttggggagggggggaaacagcacgaacaccacgcaacaacgacccgaaaacgagagcccgaccgaagacgccgacgaaccggaggagaacaacaaacagagaaccagagacagacacccccaggggcgacccccccgcccgccacgccgcgggcgcgcaagagccagaacccccagccagccggaagcgaagcacacacgaccgcacccgcacccccaagcccacgaacccagacgagacggaaggacaagaagcaaagc

SEQ ID NO: 124479 - DNA, 616 bp, Arabidopsis thaliana columbia
  unsure (1)..(616): unsure at all n locations
cacgcgtacgtgagcttggatcctatagagcggtcgacctacgcgttcgttctctttttcaataagacgactgactcgtgatgagtagtttcataacctcctgcggggaaccgttacagagcacgagggtcacagattctgacaaacctctccctttgcatggatggtgaggataactgaaggtaagcaattttttttaagaggtggacantcngaggctcagacatgctcgatgccatgcttcttgatctcccgggctatggcatatatgtataagcagcttgcccatcgctacacgataagcctcttaatatcaggaggtgacgtcgttagagcgaatccgccaacgacactacctagactgactaccgagtctgcgcagaatcacacttaatagcatccccaaacaaatctgctttatgttctattaagaacagtgaaagggagccaagcattctttccattaacttcaatcttgcaaaagatggaatcatacttcgaaaaatggcaacaggctccttatattcaagtgctcgcctgcttcactaccaaatggctgcaaggaacccaacaccttaaacccttagtaagcccgggatccaaatgttaattcctg

SEQ ID NO: 124480 - DNA, 337 bp, Arabidopsis thaliana columbia
  unsure (1)..(337): unsure at all n locations
cgcctgcaggtaccggnccggaattcccgggtctgacccacgcgtccgcccacgcgtncgaaagaaaactaacagcgtttatagactctttcgtccgtgcctcaaacaggcacatggcttattaaaagctgtacctgtaagactaacctattttgcctcttgtgaggcagcggtcgagtgatacctcagactttttttttgaggtcgantcaccagcggaacaaggatgcacaccccacaccaacatgtccagaaaggatattcacggtaaaaatgctaactatacctagatcacgcgagatagacctgggtataatcaatgtaacctataaagtgg

SEQ ID NO: 124481 - DNA, 616 bp, Arabidopsis thaliana columbia
  unsure (1)..(616): unsure at all n locations
ttatacgatccgataggacttttagactcgggtcgagtcgattccctccgagccgactcaccggaccacctaattgggtggttctccgcccgcaggaaaaccgctaaccggccatcaatgagagagttagccgacacgtcgtctctctcgtctgaatttcactcaccaagcgaggatttttttttctctagggggangaacatggcttcatccgtgttctttcttcctactatgccattgacggatcagcgcattcacacgcacgagtaccgtgcgcaccagttccgatcctcagaacaacagatcgaacctagatcccgtggtaaacgcaacattggaccagcgtctccagacccttactgctccgctaagaccgaactcggactccaaccgtcgatcacccaaccagagtactcaaccatgatcgcccaatgccataacagcaccttgccacccaaaaaagcaccccccgacagatcagaaggagatccatcctgcacaccaggggttacaggcaccatgccccaccctattccgtaccacctcacctcccatctcacccgggggtccgctaaccgtacccaccacccggccaccatgggcgtcggccgccccc

SEQ ID NO: 124482 - DNA, 395 bp, Arabidopsis thaliana columbia
ggggggaaaaccgcaggccccgacggcgcacggccacgaagataaaattaagcgggaagcagggggggagcacggggagggggacaggcggacggaggaggggacagccgcatacacccgcaacagcacaacgacgcgcggcgcgcgcgcggagcagcgcgagggtcacggcgcgcacacacgagagacccacgatcgcgacgacgtgatagctagaataataccaagccgcgcacgacacgccctccacacaagggattttttttttacggcgggcgcgcgcgcaaaacaaacatcaagccacataacaaacacaacacaacagcaacaaacaaaaccaacacaaacgactcaccaccacaccccaccacgaacacaaacccgacgcagcccag

SEQ ID NO: 124483 - DNA, 480 bp, Arabidopsis thaliana columbia
  unsure (1)..(480): unsure at all n locations
gcagcgaccgaaagcaaagcacaaaccacggacaccaaacacccgaaccgaaagcaagcaccaccaccacatcgtcacaaggaggccgganccccggacgaacaagaccagacccgaccagccacacaacaaaaaccgaagcaacccaacagaacccaagagaaaccacggcaaccaaggcaggcaaaagggaacaaggcgcaacgaggacacaccccccccgccccccgacaccaaggcaccccaccgcccccccccgacgcggaacacacaagcaacccacccccaaccacggaaaaagcaacaggaacccagcagccccaacacaagaaaccgccaccggagagaaggaaaccacacaacacaaccgccgaccacaaaaaccacacccccgaacaacaacacgcacaacaaacacaaacacagaggacaccaccaacaacacccccccccccggaccacaaggccggccacaccacc

SEQ ID NO: 124484 - DNA, 522 bp, Arabidopsis thaliana columbia
aggggaagacgggcgcctgcaggtccggtccggaattcccgggtcgacccagcgtccggtccatgcttgagccatatctgaatgaggacgatcgagagcgaggatgaggactcaggcgcggaggagcacgaatgcgacgccgagagaggaggatgatggagggcgagattgcagaggcggttcccgggagaggaaggagagattttttaacgtgggaggagggtcacgaaataaggagatatcggacgagataaccgtacttccccaaaacgaaccaccacgcccgcggtcttctcttgaatctcgacaataacgggcgacgaaaggactcgagctcgtgacgcggcatagaagagggtgaaagaaagtagtacgggcgccgccggcgcggaccccgcggtgctacatggtgcccgccgccctttcgatctggtggaggaattatagaaaaggaacccacccccttccacccgacacacatcgggaggagcggaccgcgtgtcgacgggcccgggagcgcga

SEQ ID NO: 124485 - DNA, 547 bp, Arabidopsis thaliana columbia
gcaacacaggcacggcaaaccagaaagcaccgtgacgcgcggagcaacccacacgacgcaagaaacaaaccacggcacaaaaggccgggcgagcccaaggaaccccaacctctcaacgggggagggcaccaaaagcgccaccaaccacaagaagcaaaccccaaccagacacccgcaggggccccaccacaacgcaagggaaccgccgccccaccccgggcccacaagggggccacacccgacccaggccgcccccccacggacaacacccaaaaacgaacaaagaaaccacccacaaaccccccccccaagcccgcggaaaccaaaaaggacacgcccgcccaaaacccacacagcccaaacccccgaaacggaaaaccacaccaaaaaacaccagcacacaaaaaaaagaaaaagccggacccacaccacccccgcgcaacccgcgccaaaagaccgcgggaccacccagagacgacaccacaaacaaacgaccccaacccacccacaaacacccgccacaacccacgaccgcccagaaaaaaag

SEQ ID NO: 124486 - DNA, 555 bp, Arabidopsis thaliana columbia
acatctctggtgtgatcacggctacgggaccttatttttgttcaagcccgcactgaccatacgaagggactgcactcgccaacgaaccactttctaacggcagccggacgcgcttatattactccgcgcatgatccatcccacccacaacataagcggtgacacgtctcacaacccaccgccacgggccaggaacacaaaggggctgactgcacaatattcttgagacatacgcaccgcacccgaacatcaagttattttttttttgggcgggggggagggacgccccactgggacctaagaacttgaacacgctttgcgtcaatgctcccgggccccatgcgtagagatgagactacatcatcatttgagcaacggagagtcaccgctcttatggcaaatcgcgcggtggagagccggtgggagtaggacgctaaccccagaggcaatacgcccagcgagcggaggatagaagatcggcacgccactgagagattcatataaagtggggatgcacagccgcccgccctccgccctcacggcgccacacaattaa

SEQ ID NO: 124487 - DNA, 191 bp, Arabidopsis thaliana columbia
acgcgtgcgtgagcttggatcctctagagcggtcttcctacgcgtgctctaatgtgaatgatgaactgcactgagaccatctgagctgattttcgactaggtagatggacaactatagtcactcacattcaatatacgtactgaagctgcgactgaataacaaaaagaggttggactatgggctaaacagc

SEQ ID NO: 124488 - DNA, 479 bp, Arabidopsis thaliana columbia
  unsure (1)..(479): unsure at all n locations
aggggaagatcgnacgcctgcaggtaccgggccggcatttccgttttgacccacgcgtccgctaaaatgaccactcgaccggccttgaggaacatgggctactcacgacttgcccaccgagaagcccccacgatgggaactatcgcggtaccactctgactggccacagacacgaacgctgtaaaaaacaaacgcgccaacgcaaaacacagacaacttttttttttaacggcgagaggagggtctcagacgcactgagaatgattaggatacgacgattcggcgcggagcacgagcacacacgaaggtagtgatgcggcatgaacaggccacacgttaacagacaaggctgagggagcgagaggacacagaataacccagacgagaaccgaggatatggatggagagaaaaaggagaccgcaccagcctggtacaagaaacaatacgatagacgattcacgcccacctcacccatcga

SEQ ID NO: 124489 - DNA, 564 bp, Arabidopsis thaliana columbia
aaacaaggaacccaaacacacgaaaaggactaaggccgatcagagcaaggggggaaaaaaggaaccacaagaaaacagcggggaaacaaaagcaccataaaggagtgcaacccaagaggcgaaaccgcccacaaaaagaccataaacaggggcgaaaacagcccaccagcggaaagccacagcaaggaaaaagaaccacccggctcctggagacgagccaaaagagcaagaacagaagcggccggaaaacccggaggcccaaacaaaacaacggaagagcacggggagagaacagacagaaccccacaaccggcacgcacaactgcaagccaccggagcgaaacccgcgccccccccaccggacaaacaaacgcacccccctccaggaccccgacaaccaccggaacagcagcaggggcgaggagagactaggaggcaaaaccaagacccgaaaaggcatccacccaagcgaaagcggccccgcacacaacggacccgaaaaagagaccgcccccccacgccaggcgcaaccgggaaaacacgcacgcgaaacagaagaggccc

SEQ ID NO: 124490 - DNA, 350 bp, Arabidopsis thaliana columbia
cgcggggaccgcccggattcaggccgacagacggcgcccccgagagacccactcagaaaaggccgcacgagaaaaggccccaaacccgccgcgagaaaaccagaggcgcccacaaccggggggcgggcaaccgacgctcccaccccacaaacttttttcccggggaaaaccaagaaggaagcagcacaaagcccgacgccacaaacacgacacggaaaacaaaaaaaaaataagcccagcagcgcaacacaacaaaccccaccgccccagaccccaccccggagcgcacaacgccacagacaccgacccaacaaaacaagaaaaaaagagagacaccccacccgacaaga

SEQ ID NO: 124491 - DNA, 401 bp, Arabidopsis thaliana columbia
  unsure (1)..(401): unsure at all n locations
nnnnnnnnnnnnnnnnnnnnnnnnnnnnnnnnnnnnnnnnnnnnnnnnnnnnnnnnnnnnnnnacctacgcgtncgggtttttgaaatttctatcttccatttccatctgatgaatctctgacgatgtctttgagaactccacacttttatgagtctaattttcgacaccggcggagccctataccaccaaactgtacaaggatctctactctatatccctctttgttcaggaacccaaaccaaaacccgaactactactaataaaactggtgaaaggatagcgaactcttaacttctttatttttccccaacagcgtaaaaatctttcgctctgtgagcacaaaacacgctgctaaactaaagccaaaacttatacttcaacctgaactcaacaaatacc

SEQ ID NO: 124492 - DNA, 656 bp, Arabidopsis thaliana columbia
  unsure (1)..(656): unsure at all n locations
nnnnnnnnnnnnnnnnnnnnnnnnnnnnnnnnnnnnnnnnnnnnnnnnnnnnnnnnnnnnnnnacctttttttttttttttttttaaataaaactttgctctttattgatgtttcataagcatttttggggttctgcacagaaaatgaggttcacagattcagacaagcatcttcttttccatggatggttttggataaacatgaaaggtaaagaatcagtatagaaagtggttctcattctcagtctcagacatgtttgatgcgatgctttatgctctcctgtcctttgacatatatgttcaagcagatgccaatagcttgacgatatccttctcaatatcaagaggtgatgtagttggagcatatcggtcaacgacatttccttgtctgtctaccagaaactgtgcgaaattccacttaatagcatccccaaacaatcctcctttttgttcttttaagaaattgtaaaggggacaagtgttctttccatttacttcaatcttgtcaaagattgcgaattctgctttgaagatattagcaacggnttccttgatctccatgttgctgcctggctcttgactaccaaattggttgcaaggaaatgctaagatctcaaacccctgagttttgtacttgacatacagaatgttcattt

SEQ ID NO: 124493 - DNA, 454 bp, Arabidopsis thaliana columbia
gacaaacaaagcacacgagaccaggaaggaggaaagacagagagaggagggacaccaaacaacgacagatctcagggaggaggaacaaggaaacggcgcaggccaacaagcccccacaagacaacaacaaaccacgccacaaaaagacacaaacacgcaccgacgcgacggggaaaaaacaaacgcacgccaagcgaacacccgaacagcaggggaaccccacacaacacacacaaccaaaccccgaaccagagagagcagcaacgcccaaacagcaaaaaaaaccaccacaaaaaaggacacagacaaccgaaagacacccggcgagacggagcagcgagcccacgccacagcaacaacaccagccacccagggccgcgcccgcacacacgaacgaacgacaagacgagacccaccgcagaccaagccagaaacccaacccacaaggacgcag

SEQ ID NO: 124494 - DNA, 531 bp, Arabidopsis thaliana columbia
caagaagcacaacggccgcagaagaacgacggtaaccagaccacacgacaccgacgcgcgcccgaccagcagcggcgaacgcggaggcagacgccgcgcgccgcgccagaagaaagccgccagccgccacgagccacccagaggagacacaaagaggcagcgagggccgcacaacgaggggagcggacacacacgaggcgcccagcaggggccgcgcgaaagcactttttctcgccggccgcggccgccccccgcacgggggccgcccgcgggaagaaagaaaaggacgagccaagaaacacgcacggagagaacgagccacagccgccaccagccccggaacaccaccgccccccgccgggcgcgggcaccaccacgcgagcccccgcagagccaggaagcaaagcacagcaaccggccacgcggggcaccaggcgcgaggaaaggcagacacaagccggcccgacgcccacaccaccggaaaggccacaccaaggggggagagaggggcgagccgaaggggcaggaagg

SEQ ID NO: 124495 - DNA, 517 bp, Arabidopsis thaliana columbia
gaagccgggacccaatagagcggccgtccacgcggacggcaaccgacaaacacgacgaagaacccaaacgcacaaagcacacgagaaggagcagaggcgaaaaaggaacccgaccaaagagggcaaaacaacgaaagcacaacaacgccgaggacacagcagaaacaagcaaactgttgacgggaaccaccacagaccccaaaacaaacaacgacatgacaaacaagggaaccagaacacggcacaccaccccaagacgcacaaacaacgcaaccaaaccaaaaaaaaaaaaggccgaacgggaaccaccgccaaaacagccaaccaggagagcaaaccaccagacgcgcccacgagaacaccccaacggaaaagcccccacccccccaacccccgaagaaacgccaccccacccaacaaccgacacccaaaaacgccacccccccacccccaaacaaccacaccccccccaccgaacaagcccagcccaatgaaaaaccacgccccaacacgaccc

SEQ ID NO: 124496 - DNA, 601 bp, Arabidopsis thaliana columbia
acccaagcgcggccacgcggccacccccccgcacgatattcggggacaacccgccccatttaagggaaaaaccgaacgcctgcaggaaccggccccgaataaaaggttcgacccacgcgtacgaccaaacacagtgacgacatccgagaacacccccaacacacacagaaccaaccgaagctgccaacacacaacaacgaacgacgcagaccccagacgaactccaggcccacacccggaggaaagcaacaccccgagcgcaaccgacaaagaagtttttttctcaaggggggagacaacagaaaaacaaacacaaaacgcaaaacgcccgcgcaccaacccaaccaacgaaaaccaactccaaggacagaccaccccaaccccaaaaaacaaccagaaagcgagacggcgcagaaaaaacacaaaaaccaagacgacagagaacacaaaaaccaccaacgacagacgccaaaagggggacaacataaaaacacaacccaacagcccacaaccaacaaaaaacaaagaggaccgagacaacaagcccggacaccagaaccacaagacccaaaacgcaaacagacggccacgcaacaacaca

SEQ ID NO: 124497 - DNA, 535 bp, Arabidopsis thaliana columbia
tgtcgacccacgcgtaacggcctatggtatgaatacatcctctctcgactctcaactgtccgtcatcggagtttcgacaatactatccgcgctcggaatgtaacatgcctcagccacaaagtttatcaggttccggcacaacagcgcacagagaatttccagcccgaccgaaacccaacacagacactttttttttttgcggggggcgtaacggccacatgctgcgttggcatgtagctgatgacagaccgccacaccccacaccgcaagacgagatgcgtgtagtgtgtgagagctccgcttgacttcctccccactctcagcgctccagctattaactatggttctttaggccctctacttaattcccatccccctcctcaactccccccttctgacaccttgtatatgctagctaacttaagacttgcatactttcgttattgtcttatgttctccggtggtaccggtatcgctcacgtttaccgccagctatgattatgaatccgttagcagagtgcgtgcaacaaaatat

SEQ ID NO: 124498 - DNA, 521 bp, Arabidopsis thaliana columbia
cctggggcaccggcccgaatcccggtttaccagcgtccgaacctcccaggaccgcaagggcgaaaagcacggtggcacaaagccgcggaccacgagctcaccgcggggcataacacacagagcagctccgccgcccacgagcagacgagcaccgcagggcgagggacaccgaacacaaccatgtttttttttcccggcggggagaccaccgacgcggcgggagcaagcgaacgcggcaccaactcaacgaagagatacgaggcccggccacgagttgatgcgcgcatccccggagccaagccaacaaaaccaccacacaccagacacgccaaacgaaggagcgaaagagcaacggacgaataccacgcgaaaacccgcgatgtcggacacaaggcccccgcaactccgcgtgcgcgcagagggacagatcggcgccccacgccgcgcagcggagggggaaccacacagaggcacggcaaaaaacgcaacccccaccaaccaacggcaccgcacccggagtg

SEQ ID NO: 124499 - DNA, 471 bp, Arabidopsis thaliana columbia
ccctgcaggacccggcccggatttcccggttcgacccaggcgtccgcggacccttgggtaaaatcactagggaaaggtttgttgatctgaattggacaccttcttggaggtagaaggaaattttcgaaagaacagcgatgtcatggaagctctggaaacaccgcaactttaagtccctatcgtcggggttattccgataatgtactcgagcggggaaagccttcttgggtccttaacttctttccaccaaaatcactgagaccaatgtccatgaaaagctttttgaaaagattcaaaggggtatcggctaatttaacttttgtactaaaaagggcaacagatcctgctaaatccctgaggaactacgaagatttgaactcatttatgaccacttcctaatcttatgatttagaaagcttgaatgaaagggatatccaattttggaaaaaaaaagcctttgataatcaccgg

SEQ ID NO: 124500 - DNA, 558 bp, Arabidopsis thaliana columbia
gacacgcacgcgtacatgtgcttggatcctctagagcggtttgacctttctgtatgagcattaaaacagatcaaaccactactctggagtggctgcgcatgcatctaggacgaaaagagtgttgactcgctatgaccaaacatccggatggccgggctttgggttccccaccgtactgcagaacgcataacagtctccaccgtttttttttgggggggagccaaacaggttaacaagacaacgcctccactccataggctacgggcccaaatcagtgtgaccggatgactacaactcggaatatattacctcctctgaaatgcgcgtcatgtttatgccaataaaaaccacactgaaatcgtgaattttcactcacccaaacccacccctacatgaatgtgcaattcagatagcctcgctcactctccaccctggtgttatgatgcccccccttgtcccacagagcttgtgttgcccgaaagagcaccgcggcgtccttttagacctgacccacgggccgccttctacctgcaccatccacacctatacggtccacaa

SEQ ID NO: 124501 - DNA, 502 bp, Arabidopsis thaliana columbia
  unsure (1)..(502): unsure at all n locations
tacgactcacttanaggaaagctggtacgcctgcaggtaccggtccggaattcccgggtcgacccacgcgttcggcagcattgaagaaccagctcattatctcaactggtattatgactggtggtattgctattgggtcatgggttggcttaccgaccttctttaccatttttaactttggaacacaaaaagttgtcaagaactggcagctattcctttgtggttggggtgggctttgggctggacttaataatggtttcgtcactgaatactacacttgtaacccctaccaccctgggccagaaggtgcaaaatcattccaaactggtgccactaccaatggtattttcgggcttggttttgggtaccaaatccgcattaattccaactttggtattggtattagtataatccgtaggttcaactttggtggtattgatgggggtggtggtggttgttttgggatgcttacaaccaatggcaattgtttggccaatggagg

SEQ ID NO: 124502 - DNA, 337 bp, Arabidopsis thaliana columbia
agcttgacgccatgcccgtcgtagctgatcttaagcgcgccttttttttacttctaaagaatatatatatattgacttaatctcatggcatgaaaaatatagctctcgaattgatctatatcttcttctgacttatttttgatagttgtatatagaagagattagactttcgtcaattgcatctattacatagaaatatattatgtcacattagatgtctcctatacgtatagtactatgacagatgtatcatcgtcatttctttcagatagctaacaaataaattacttcatcacttatgataccttatttggaagactcataaaaagattgccgc

SEQ ID NO: 124503 - DNA, 622 bp, Arabidopsis thaliana columbia
  unsure (1)..(622): unsure at all n locations
ccccnggagcnnggacccaaagcacgggcttcccggggggcggaaaccccaacaaaaangacagcaaaagagggggaaggtaagaacaagggggggggggccaagcaaaaacgggaagaaccgggagacgccaccccggacgaggcggccaaggcgaggacaggccgacaggaaccgccgcaaaaacctcgaaggaagaggggacccccagggaccggaaangggacagggaacaaccaagcaaccccggggggcccgccaccgccagaaagagaaaaagcaggaccaacccgcaggaaaagaggagagagaaggggaaaacagcaggaggagaagcaaacggacagccaccacgaggcgccggcacgggcaggagccaccacgcggcccgacaaaggaggcggagacagcggcaaagagacccagagaccccgcgaccaagagcggaccagacgggcacggaggaccagcgggccggcccacggcccgacggccgcacccccagcggggccacgagaaccgggaccggaccgccccaccacgaaggcaccgggaccaccccggaagcggggggaccaccccggcgcggcgcccgaacaagcgggcgacacgccgcccgacg

SEQ ID NO: 124504 - DNA, 504 bp, Arabidopsis thaliana columbia
  unsure (1)..(504): unsure at all n locations
cgtgcatgcccgtacgtagctgatcattaacggcgccttttttttttttaacaattaatcttatattattgataggatatgaatataaacttgacctttagatgttatttggtgggaggaaagcaaaaggataataaccttacttgtcatcaagactttntcagcnaacagtaatcanatatcgtttacaattcagttgtgatacacttagatcaattacatttacattctcccacattcggttctagacattattagaccttctatctcacacagacttcttcngntattaccatctgtgagactcgtgaaaagaactgcagctctataaatacgaagatancatcaatctttgaagtatcatacccttctgagaaaatgctctcatacaggatgacactcgcgttcaaagctgaagtaagtcatctgtgaccatatccatcataccaccagatggaccgaacatgaatctgatcgagacccatgccctccaagacaatcagc

SEQ ID NO: 124505 - DNA, 330 bp, Arabidopsis thaliana columbia
acgcctgaaagcaccggaccggaattcccgggttgacccacggccgtccgaggtacacgcaggcatcgactccccgccgtctgctcgaggtgattcgttcaggagactgacagaacccgagcccgcaagccagattagagccgagcgcctgcacgcccgcgcggaaggacgccggactcgttaagaagagtagtcgggcctacgagattttttttttacaggcgggacttgattaagacctcagactaggcgtcctagtgcgcaactcatatgcatagtagcagaaaagccgtttcgcggagacattgtcctgaaggtacgcgccctttc

SEQ ID NO: 124506 - DNA, 429 bp, Arabidopsis thaliana columbia
acgccagcaggaaccggcccggaataacggggtctacccaggcgtccgaggacaccgaagacggacgcagagggcgaggatgcggcataacgccaacggaacaagcgcacacacaggaagagaccagtgaaaagaagcgcccccaaccgcccacgaagacacacgagcgagagcgtagaggaccagcaaaagaaagatcgggcctttttttaagagggggggagccacctagagggacagagagcgaacccatggggagcagaggagggggacgggcggacggaaggacacgtacgaaggagcaagagaacctgcgcaaagggcaaccgcacggaaccacacaagatccagcgagacacgccaagagggaaaacggaagaactgaggggaactcaggagaagacgccggaacgcgagaccaggagagat

SEQ ID NO: 124507 - DNA, 436 bp, Arabidopsis thaliana columbia
gaagcgggaacaggaagagctgccacgagaagggccaaaaaacaccaaccgcaccaggggacataaaaaagcaagagcgggacagcgaaaccaacaacgaggcccaccagggagacacaagccaaaagaccccccacgaagccaatttttagaggagggcccaaaaaaaccacaaccaacaaacaccccccaagccgcgaaccccgacccaaggaaagcaacacaacgaaaagaacaccaaaagaaaccaaacggcgcccaacaacccacccagaagggagaaccacaccaaacacacaagccggcagaaggacaaacaaacagaacccccacaccacacgaccaccagcacgaaccacaaccgcccgcaaccagagacccgcgcgccaacggaccagacgcccccgccaaacgccagaccaccagccccacaaga

SEQ ID NO: 124508 - DNA, 474 bp, Arabidopsis thaliana columbia
  unsure (1)..(474): unsure at all n locations
ctatagagactgcgtcctccctcgtaagctcgattcggtgagtgctatcttgcagctcatgagaggaaggtgattcattctgcactctagcacaaccnatgtgacttgatgactggtcttactaaattgttgccagctcgagtccttagaaaaggaaaaccgttaagtggtttttcgggccgggacttttgcagccattcttgaatccgggagggggttcccccggattttaaccttaaggtaacccttgagacccccttccatttttgagggggaaaaaattttgggggaaaaaaactcttttttttttttttttgtggcccgcccccccccccttttttttagagagtgtgtgttcccccaaaagtgtgggtggggcccccaccttttttataaaaaaaaaaagacccccttttttggggggtttttaccaacttttggaaaaaagttttaacaaatttttttttttaaaaa

SEQ ID NO: 124509 - DNA, 517 bp, Arabidopsis thaliana columbia
  unsure (1)..(517): unsure at all n locations
cnnnnnnnnnnnnnnnnnnnnnnnnnnnnnnnnnnnnnnnnnnnnnnnnnnnnnnnnnnnnnnnnnnnnnnnnnnnnnnnnnnnnnnnnnnngccgcccttttttttttttttttttttttttttttttttttttttgggcgaaattcaagcctttagcctttccccaatgatcctgggaggtttaccttggctttttaaattggttcttttttcaaacccaaaacctttttttgccttgagttccaaaaaccaaaaccaaaaagaaaggggaaggctttggggcttggtgccctttattttcaaaatttaaaccatgttgggaattacctttgtttccaattaagttttaaaccaaacccccttaaaaaaaaagggcccatctttaattttttaaaaaaaagacttgggccgattaaccaccagtttaacggggaatcccaacttcttttaaaataaaggggcttgggcccttgcttccaaataatttattcccatgggcttttcttttgcttcca

SEQ ID NO: 124510 - DNA, 665 bp, Arabidopsis thaliana columbia
  unsure (1)..(665): unsure at all n locations
ggtgacactatagaagagctatgacgtcgcatgcacgcgtacgtaagctcggaattcggctcgagctcgaggagctcaagaaggtgggtgaccctgttaagtgcgttcaaggagtcattggaaagagggtcggtcatttgatcagcttggttactgtattaacagctacagagaggcagctatgtctactgatcccaagtttgatcacattgaattggcagagaagcaaaaggttttgaacgagtgtgtggaagcagaagcatggctgcggggaaagcagcagcagcaggacacacttcccaagtatgccacaccggctctcttgtcagctgacgttaaaagcaaggcagaggcattggacaagttttgcaggcctataatgaccaaaccaaagccggtggctaaagcagaggcaccacaagccaagggaggtgagcacgcggatgagggcaagagtgagccagagcaaccagcttctgccgaaccaatggagactgagaatcccgcggaaggtagtacctanatgaatgacgagagagagatgggtgngtatcgattttgttcttaactctttntgatttaccctagtgaaccntctttttctnggttcgctattattcccggaaaaaatctatattgttattcttncttttcgaaaacatttt

SEQ ID NO: 124511 - DNA, 486 bp, Arabidopsis thaliana columbia
cgggggccgggacggaaaaatttaaggggggggagagccagaggcgagggaagaagaaaacgggggcggaaggaagcaccgacaggacaccccgacggcgaaagaacaaacggggcgcggggcggcagcggagcaaaggcagagaacggggcgccacaggaggaaaatttttttttcgggggggggcgacccaagagcacaagagcagggcccagcaagaaaaggccgacggaagacgcgcacacccagacaccaaagagagaagagccgggaagaggcgggagggcgggagggagagcaacggcgcggcgcgggggaacggtgagccaagcaaagggcgcggcacaccagcgcaagcaggaccgagcggcgcgcacgcggaggcgacgggcggacaaaacgcgccggcagaagcaggcgcgcagtagcgggaagagagccgaaggcggagaaggcacaatggaaacacggggaacgaggggagag

SEQ ID NO: 124512 - DNA, 581 bp, Arabidopsis thaliana columbia
  unsure (1)..(581): unsure at all n locations
acgtggcatgcacgcgtacgtaagcttggatcctctagagcggccgacctttttttttttttttataaaacaaatctacactctttaatattctcatattgaaagtggcatcatatgtacattagcagaacttgcaaccactctaaaatgttgattgacggtgggtagggaaagcctcaacggaactatataagccttacattgtctgacaaagactgtcattcagacaaacatattcatcacataatactgtctagattatatcggcgtcgagataccacttgagaatcagattcacatgttcacatatattccactcgatgtgtgttacttatatcatatagtaacaccctttgatgctacaaccagactctgcctccggttgatatgccaccttggggaggagctacatatacaaagaaactcgtagcctctatgacactacatagaatcgagatcacttctttgaagaattcgatgacccttactggagtagatatgctactactataacattgatgaacaccttcgccgtgtgagaacgctcgaagntaacgtccatctgttgacccatcatccat

SEQ ID NO: 124513 - DNA, 529 bp, Arabidopsis thaliana columbia
  unsure (1)..(529): unsure at all n locations
atgatatgccnnnnnnnnnnnnnnnnnnnnnnnnnnnnnnnnnnnnnnnnnnnnnnnnnnnnnnnnnnnnnnnnnnnnnnccacgcgtccgcgatgacgaatcaaatcaaatctatgaaacttctgccgaagatgaagatcctgagatctccaagggggaagctatcattgaggcttacaatattgactgattgggcatatcttctttatggctatctcgttgatgccatagagggtgcctcattctcatggaatataccactatctctaataagtaccatctagcttgctatagatgggaacgcagctgatcatgcaggggctatgatcgtagccatgaaagacaaactgcatcatgtctttgggagtggatattgagttctcgatccacattatcatggatgcgatcccattctgcgaaggggatagtatgaatgatggttaaacagatggaccttatcttacagctttttaagacggcgatgctgctaatcactgatatagtaatagcatgttgtatccatgacgg

SEQ ID NO: 124514 - DNA, 356 bp, Arabidopsis thaliana columbia
  unsure (1)..(356): unsure at all n locations
cccaaggaaccaggaacccgccaaaagacgggaccccacccaggcccggaagcccggacaaaagcaaaaccccggcccaaaccacgccaaagaccccaaagagacaaaacaacacccagcacccaaccgcgaccacgacgaagagacaagcccaccaccccccacccgggcccgacacaagaaagccccgggaccacagccacccggcaccagccacncaccaagccacaccaagacagacccacgaaacaggcccccaacacccacgagagcaaacccccacaaccgcgccacgcacgcaaggaaccacccacagaacgccgccacaaacaccaaaaggcacacccgccacccac

SEQ ID NO: 124515 - DNA, 544 bp, Arabidopsis thaliana columbia
acgcctgacggtggccgggccggaataaccgggttgagcgacgcgtccgctaatttggcaaagagcccctcagatttcgtcgcggcaacggcacatcgagattcggcgcccggacagaggagccggtaattcacccgcaagccgaggacccagcaggaggcgaacaaaccgctcgcaattggatgccacgcgatgcattttttttgagagggcggcgggcgcgacggacagttaaaagtcaactagaccccgatcagcagacgcctgaccgcgcaccgacgctcagagcgtctgatagtagggagatcgcgcgcgaagacccgccagaggatgcggagggtgagcgttaactccgcaaacgaagatgggaggcgatactagaacccagggcgcccggagccgggatcggtgcccttcgcgtatctccgcacaacaaacaccaaacaattagaagggagcaactgagaatgaaagaagacgggccggcaagacgagcagaatagaggaggtcagacggaggggacagagaggaagcgaagaaatt

SEQ ID NO: 124516 - DNA, 510 bp, Arabidopsis thaliana columbia
caaaagcaccaagagggggcctaagaacaacgggccaaccaaaagaagagacaacagcgacaaagacacggggccagcccaaaaaccagacaaccaaacgccgccctcctcctgagggtggccacaacaaccaacgacaaccacagaaaccacgcacgcgaggggggcgccgcgcggaccggacaacaccacggaaagcccgaccaaccagacacaaaagaacagaacaaccaaacaacaaccggaaaggggaaggcggaccacccacgaccacgccaggaaacagacacaaagaaaaaaacccgacccaccccacacagacaacgaccagacgaacaaagaagacgcacccacaccacgaccccccaagaccaacagaggaaaacccggccaaaaaagacagacccgggcgaggaaaacacaccccgccggcaccacacgcccggagaaacaaaaacaaaccaccgcagaaccaaaggcgaggcacacaacccccaagggaacaccgga

SEQ ID NO: 124517 - DNA, 464 bp, Arabidopsis thaliana columbia
ccccctccggcccggacggaatccagttttacccgggttgagcccctacgattactctcacaatgcggccattttacttaccataggtatgggctgagcatttgacgtagactatcgtaccagctagcaaaggtgtaaattaccctgaccccgaaccacacattttttttttggcgggggacagccgcccaacacggagcctcccacctcaccccacgccaaacaaggaagacgcggtatgcttgccccgcccttcagaaaactccttctacccggtagaagttgtttcccctaacgtcgctgccaggcgaatttccagcaaatccacgaaccactaatatttgtactttttccccccctcctcctctagctatattaacaacaccacccattaaccacgccacctcacctcccaacgagcacgaataataaacctaatacaaacaccaccccaccacaatttt

SEQ ID NO: 124518 - DNA, 494 bp, Arabidopsis thaliana columbia
  unsure (1)..(494): unsure at all n locations
annnnnnnnnnnnnnnnnnnnnnnnnnnnnnnnnnnnnnnnnnnnnnnnnnnnnnnnnnnnnnnnnnnnnnnnnnnnnnnnnnnnnnnnnnnnncctttttttttttttttttttttttagtaactaatataaattgctatgttttggcgaaaacacacagagaagggatctttgttacgtgaaaatataaacctcgtcgtcaccgctccctttgtatccggagtacttaggcttgtagttgtagatgagattgctcaacactttctcagaagaaggtctgttcattgactttctggcttcactgactagataatttgcagcatgttgagtcacctgaattgcgttctcagagtgtgggatttcagatgaaccccattcgaatgcatttttctttggatgccattggaaggcgggcacagggtatcgttttgatcgaatatgtgaaaccaaactctagcccaattccgagcttacctacgcgtgcatgccacgt

SEQ ID NO: 124519 - DNA, 613 bp, Arabidopsis thaliana columbia
ccgaaccgaacccgggaccaaaaaaaggggctgaccaaggggggcggggcctcaaccccagaacccacccccaaacggaggcccgcgaaagagagacacccccaaaaacgcgggcaacccagagaccaccaaaaaaccgaaagagcccatcacagagagcaacaccgagcgcaaagaacccaagacaaagttttctcaggcggggcaccccagacaaaccacagcccaagcacaaccaaaacggacccctcagggagaaaccaccaccgccccggagacacccgagaaaaaccacgcacacaaaagcggccacacccaaccacaagggcccaaagccacaaaacagcaccaaccgcgcggccacacccccacaaacccccacacggcagcccccaaaccacaaaaaaaaaaccacccaccagcggcgaaaccacacacccacccgaccccacaacccgcgacgaacaaccaaacacacccgccgacaaagaaccgaaacacaaccccagacgcccccgacaccccacaaagaaaggcgaccacccaaacgcgaaacaaacaacaccgccacaaccaacccacagacaccacgcaggcaaaccaaccaccaaaa

SEQ ID NO: 124520 - DNA, 481 bp, Arabidopsis thaliana columbia
  unsure (1)..(481): unsure at all n locations
nnnnnnnnnnnnnnnnnnnnnnnnnnnnnnnnnnnnnnnnnnnnnnnnnnnnnnnnnnnnnnnnnnnnnnnnnnnnnnnnnnnnnnnnnnnnnnncctttnttttttttttttttttttttttttttttttttttttttttttttttttttttttttttttttttttttttttttttnnaatttaaaattaatggtatttttnccccccccccccccaaaacctttgtaaccgtcccagtgaaccattaaaaaaattccttttcccaaaaaaaatttggggaaaaaaaaaaaagccnaaaattaaaatggcttaaactttttcccaggggtttgactttgaactttcccaagggaatttttcccttaagggcaaaaattttttttttttgcgaaacccctcccgggaaaattttttttaccctatttttaccttttccccatttaacctaactttttttccaagggccccaatggtttttt

SEQ ID NO: 124521 - DNA, 523 bp, Arabidopsis thaliana columbia
  unsure (1)..(523): unsure at all n locations
nnnnnnnnnnnnnnnnnnnnnnnnnnnnnnnnnnnnnnnnnnnnnnnnnnnnnnnnnnnnnnnnnnnnnnnnnnnnnnnnnnnnnnnnnnnnnnnnnnnccttttttttttttttttttttttttttttttttttttttttttttttttttttttgggctccacatacaatttttttcggccccagataaaatgaatttactccccaggttttaaaaactgataacgcctgaagaacaacccaaacctgagggcaaaaaaaatttaacctaaatgcacctgtcttttaccgcgctttggccaagggtcctccagatctaccccgatggaaatataaaaaagccctttttaaaaaaaccggattacattcttgaaaaacccgctttaaataatttttcaacccccaaccgaaaatttccttttcccgaacatgggatgtcattgtttcgtggatggcggggttgggcaccacgataatggccaccctccaatcccaaatttggcaacctgcattacaacttttg

SEQ ID NO: 124522 - DNA, 565 bp, Arabidopsis thaliana columbia
  unsure (1)..(565): unsure at all n locations
acagcggttcgccgggggggaaaggccgcacaacacaaaacagaggcgacagggggggancagtggagcaggcgaggggacgagacgaaaaccaggaccaacagcagggaaaagcagagcccacggaggaaaagccgaacgaaggagagcagcccaaagcgaacccgtgagagcaagtacgcaanagaaccgcgcacaaagacagaaccgaaacaccaccgaagggggggcgggggagggaggcgacccaaacacgacaccaaaaccacagggcgaacagaagagacgacgacaaccccgaacaccagcagaacagagaaaccccgagccggccggcaaccgaacaggcaccaaaagcagcgcggacggacgcaccgggagcgcccaaccagaccagaaggaagagccccccacaagagcaaaggaggcgggccacgacacgaagaacccaggaaacgcaaaaaggacgacaaagcgaaggggagcccgacaaaaaagagaccacaaccaacggcggaccaaccccgcaccacaacgcggcgcggaaaccaaagcgacagcacca

SEQ ID NO: 124523 - DNA, 506 bp, Arabidopsis thaliana columbia
atcacttttagggaaggtggtacccctggcgggacccgtcccgaattaaattccgggtcgaccaggctacttatccgggggccgccttttttttttttttttaatgaaagggccttttatttatggaaccaaaaaaaaaacctcaaaaaatggtcctcctaatccaccattgttaataaataacccggggattttaaaaccaaaggcaaaacccttacccggccattgaaaaagtcctgatgataaaaactactcaaatgtgtaaaaaaagcaaaaaaggttcgtaaaatcagaattttaaaagtaccgataatttgagctaaaaataaccaaaactttgggggctttttcttttgggctcatactgctctcaagctttgccactggctgctggtgggttaagctcatcccaagcttcaatccatgtaaccatggcatctgcaagcttgtcaaagtacgggtctaaggagctcaacttctccttgaccatctttgagagctcaatg

SEQ ID NO: 124524 - DNA, 237 bp, Arabidopsis thaliana columbia
tgacgtccatgccctcgtagctcggatcggtcagtctcttacgtaccctacaagcaaatcttgtatctttatcatcatctctttcaaagccttaacacgagggaatacagcattttttaagaattgttgcatgttcagtaaagcctttcagcactactttgatctaaaatcttggacactcactgacgcacccgtgggatcagcatctactagactttaacggggtgtcccccatct

SEQ ID NO: 124525 - DNA, 517 bp, Arabidopsis thaliana columbia
  unsure (1)..(517): unsure at all n locations
nnnnnnnnnnnnnnnnnnnnnnnnnnnnnnnnnnnnnnnnnnnnnnnnnnnnnnnnnnnnnnnnnnnnnnnnnnnnnnnnnnnnnnnnnnnnnnncctttttttttttttttttttttttttttttttttttttttttttttttttttttttttttttttttttttttttttttttttaaatttaaaaataagaggttttttcccacccccccccccaaaaccgtgggaaccctccccgggacccatgaaaaaaattccctttcccaaaaaaaattgggggaaaaaaaaaaaaccccaaaattcaaatgccctacccttttcccccggggtttgccttttccctttccccggggaaattttcccttaggggccaaattttttgttttagcccaaccccctccgcggaaaatttttttaacccttttttacccctttccccattgacccgacctttttcccagggcccccatggttttttttctcccccaaaattaataaggggtgttttttttagga

SEQ ID NO: 124526 - DNA, 527 bp, Arabidopsis thaliana columbia
gctggtacgcctgcaggtaccggtccggaataatacctgggtcgacgagctcactagtcggcggccgccctttttatgtgggtgaggatgttctgactttcgggcgaccacaagctggagagaaaaaccagatatttggcgaatgtcccagctaccgcgggcgggccaagcgtggaacgaagcggaactgccgggagtatttttctttttgccgcgcggccggcaacgcctcgaacgcaggggcccgcttagagaacaatgcctcagcacgctcctccacacacggcgaccagcggaggcaacccaccgggaggccccgacctacgtcaccggggacgccaatgccactctcccccaactccggcaaaaaaaggaaaacgcccccacgccaacgcgctggccactgttgggtgtgcccacgtctcggcaaagggagaggcgccatgtggcgccggcgataaccgggcgcgaacgggggagcgagacagccacgagcagatcaaaacaaatgccaaggaccaataccg

SEQ ID NO: 124527 - DNA, 442 bp, Arabidopsis thaliana columbia
ccagaatgtgctttttcatagccagatcgatcagctccaagatgtcgttgttgcgcaatgcaaacttaccggcgttaatcccccttgcgcaaagaactggtgggttattgtttctatgttttttggtatctaaagttcgtgttttattggggtatcgtgatatgggcaaagctgaaagggacatgtcattctgatttttgaataattctttgacggtattgagtctagcaaaattagaggtgtttttggtttaaatcatatagctcgacctcttcgtttcttctgtgaactgtactggtgatgcttcaactgtttatatgtcatttctttgatcaggtcatcatctctgttaaagacattaatctgttaaatttttttgttgtttcacgctgctggtgctttgccctttaaaaattgcgaagcattttaggattcgtgaaat

SEQ ID NO: 124528 - DNA, 468 bp, Arabidopsis thaliana columbia
  unsure (1)..(468): unsure at all n locations
cacacgcctgcgtaagcncggaccccatagagcggttgacacggggggaagatccccatatcaaacaacccaaaagccacgagggcagagcttttcgacagacaccgggaggcaaacgacaacgccaacgaccagagagggcaagaagacaacagcagaacacatattgggccaggcaaaccacacaaccaaccattggtgatagggggtggggagaccacccccagacaaacccncaaaaacccgggaaaaaagcggcgacgcggggcagcaaaacgaagaaaaacggaccaanccaaaaaaaccaagacagcacaggacgggccgacaaacacaaaaaggcgcgaggcgcacgggaaggaccgcaaggcgcaaaccaccccagggcacggagaggagaaggaaaaacacaacgcacccgcaggagacgacccaagcacgaacccaacagaccagaaaccgcagaaa

SEQ ID NO: 124529 - DNA, 543 bp, Arabidopsis thaliana columbia
cgcgaggggggggggcggccactcctggtggacactcatgaggaagattatgacgaggcatgcacgcgtacgcaagcttggatcctctagagaggccgccctactgttgctcttttttaaaaaaaaaacgggcacaaagaaactgtcagcattgacgaaacctctttgagcaggcaaaaggaccaggacatggagtttgaacgaaagcatccacaggagataacacgaaagagccactacctctgacaaaggcttttttgaggcagccaacacccgggagtagaggaccggggcctgcaggtaaaccaaaggggcctacaccgagcagaaagaaggcccggtgaaatctcgagaatgaactcccgacgggacgaaaaacacatcatctctcggggagcgccgacagcaaacagggaaagccaaagactacaagaccaccatgcccaaggagataacgaggaccaatgcccaagcttgcccccaccacccggtgtcaacgtatcaagaaacttcacgcaccgagcggccccgagtctggtaacg

SEQ ID NO: 124530 - DNA, 155 bp, Arabidopsis thaliana columbia
gcccgcgagggaccgggcccgaaatcccgggtcgagccacagcgggcgagcgccgctaccggcaaaagacgaggcacgagaacaggagcccagagagagagagacccagggccaccacaagacacaaaccaggcgagagcttacaggaagaacac

SEQ ID NO: 124531 - DNA, 495 bp, Arabidopsis thaliana columbia
  unsure (1)..(495): unsure at all n locations
ccactcactatgagggaagctgggacccctgcgggtaccgggcccgaattcccgggatttggtttcggcttcacttgcaattaccaaagaacggtggttcttgaacacctttccttaaggttctcttcctcctcctccacgaattcttgagggtgggggcctcggttggaacctttaatggtaaaaatttttatatgtacacaaattttttttttaaaaaatttaaaaaaaaagggcnnnnnnnnnnnnnnnnnnnnnnnnnnnnnnnnnnnnnnnnnnnnnnnnnnnnnnnnnnnnnnnnnnnnnnnnnnnnnnnnnnnnnnnnnnnnnnnnnnnnnnnnnnnnnnnnnnnnnnnnnnnnnnnnnnnnnnnnnnnnnnnnnnnnnnnnnnnnnnnnnnnnnnnnnnnnnnnnnnnnnnnnnnnnnnnnnnnnnnnnnnnnnnnnnnnnnnnnnnnnnnnnnnnnnnnnnnnnnnnnnnnnnnnnnnnnnnnnnn

SEQ ID NO: 124532 - DNA, 494 bp, Arabidopsis thaliana columbia
gcgcatggccgcctaccgtagcttggatccttttgagcgggcggcctttttttttttttttaaaatggaccgttcggggataaaaattaacccggggcttatttacctggcttttgaacggaaacccctggctggggtttaatttttaaatggatttttattaggtattggtattattaaggcaagggacctttaaggaagggatttatttaaaggagaatgaaagaacttagcaatttttttaaaggttaaacacccaaccaatttttttctttcaatccattacttttaattggttcggtttttcttcctcctgtccaatttttatgaattggggtaggaaatgtggagtggaagtggccttcaatccttcctaagttctaaaactctttagccaatgttgagttacaaggtagatgcaaaatcgaaatacagccagggatgttaggagccgtgatatgacaagcggagggaagatgaccggttagggttgc

SEQ ID NO: 124533 - DNA, 352 bp, Arabidopsis thaliana columbia
  unsure (1)..(352): unsure at all n locations
actatagaagagctatgacgncgcacgcacgcgtacgtaagcttggatcctctagagcggtcgcccttttttttttttttttaaatcacaggacacatgcgatgcagagaagaaccgtggacgacaaaagcaactgaacaacggcggcacagcaccagatgcgagtcaatacgaccagaaaggaacgccgaaaggaagaaagcacaccagtgtgcacctaacattgagcgccggaggaagaggcatcgtctcacccaccttcatgaagagcccaactcaaatgatcatccagccaaagcagcacacacacgtttacgcagcacaacccacgacggactaagaccgagaccga

SEQ ID NO: 124534 - DNA, 437 bp, Arabidopsis thaliana columbia
cgcctgcagggaccgggccggaattcccgggttgacccacgcgttcggaatcgacgagcatcaagacctttgagaacttgctactattgaacactatttgaagaacttcattatctaaatatggtcctctactgcacctacaatttattaacagtgcccgaatggtaagatccgaagcctaagctgacaattacatcataaacggctaaaacgaaaacgtatactcttgagcaaccgattctctatccgattctctgattcaaaggggttagcattaactatccactgccctaacgtgcatagcaggatgaaatgaacaacctaatggggcaaagagcttgctttggccatgagaaatcccaaggccccaaaatctaagtccagattgaatggtaccgatctaaactacccatgattggacacgggatatgaaaaaa

SEQ ID NO: 124535 - DNA, 534 bp, Arabidopsis thaliana columbia
  unsure (1)..(534): unsure at all n locations
atgnnnnnnnnnnnnnnnnnnnnnnnnnnnnnnnnnnnnnnnnnnnnnnnnnnnnnnnnnnnnnnnnnnnnnnnnnnnnctttttttttttttttatattaatttttcatggttataattatataagaacaacatgaaacttactccaagccgtgtaaaagtcgccataaaaacaaacacccaattgaaatagctcaagtacaatgatacataaacacaataaaccacaaaaacagagaaataaaaaagtgagcagataattggtttgtggaatgaagacagaaacagagtaggtaaaatttaagcttgaggtttgtcccacttgagtggcttgacgacttcccaggtgaagtcagggtcgtctcttccaaagtgtccgtaagccgcagttttcaagaaccttccgtttcctcctctctttaggtcaaggttaattgtcatcattcctggtctgaagtcgaagctctccttcacaatctttagtatctccttgtctggaatcaatccagtctcataagtgtccacaaagacaga

SEQ ID NO: 124536 - DNA, 511 bp, Arabidopsis thaliana columbia
  unsure (1)..(511): unsure at all n locations
nnnnnnnnnnnnnnnnnnnnnnnnnnnnnnnnnnnnnnnnnnnnnnnnnnnnnnnnnnnnnnnnnnnnnnnncttttttttttttttttttttctttttttttttttttttttttttttttttttttttttttttttttttttttttttttaacaaaaaaaaaggacgggctttttttttttttttttgttgggcgaaacgaacacaccccagttacctaaactaaaccccaaccggaccgtttcttcctccccaaacaaaattcacttaacaaagaaacgatcccttttttatacaaaactggtttggtggggggggggggcccccccccataaaggaactttccaaccgggcgggtgggggcaaggccaagctttgaagtgttttatataaaagggatcttccctgtaaggtaaccaaacccccccacaaattttttggttgggatccgcgccgaacaaaaaaaaaaaatcatttcctttagggtttggttctcaagcaaaaaaaccac

SEQ ID NO: 124537 - DNA, 500 bp, Arabidopsis thaliana columbia
  unsure (1)..(500): unsure at all n locations
nnnnnnnnnnnnnnnnnnnnnnnnnnnnnnnnnnnnnnnnnnnnnnnnnnnnnnnnnnnnnnccacgcgtccgcccacgcgtccggccaattttagaaaacttctgacggaaaataaaaagagaggatttatttttatctttctgtgttaccggagaataaagacggtaccttttcactgttgacttaacggagaagatggcgactgttccggagataaatataatgagaagcgagagcttaggtcatcggagtgacgtgtcgagcccggaagctaagctagggatgcgtgtggaagatctctgggatgagcagaaaccacagctcagtcctaacgagaagctcaacgcttgctttgagagcatccctgtctctgctttccctctctcttctgattcacaagatattgagataagatcagacacaagtttggctgaagctgttcagacactatcgaaattcaaggtcttgagcgcgcctgttgtagatgttgatgcgcct

SEQ ID NO: 124538 - DNA, 350 bp, Arabidopsis thaliana columbia
  unsure (1)..(350): unsure at all n locations
gcccgcaggaagcgggccggaagaccgggncgcccgggcgggcgaggcgaagaagaagcgggagagagaaaacccgaggggcacaagcgncagcaaggcacgcggcggacccccccaaaacccggngggaaccgggcgcaacaaggacgccgcggcgaacggaacaagaaccaagggcgagcaacgccgggaaaacctcccagggggggggaaacgaccccaaccggaccaaaacagggaccccggccagggacaggggcggggcgggggaaaaagggagccgnagcggggcgcgcggggcagcaaccacagccgcgcccaccaagcggagaagacacacggccgaccgc

SEQ ID NO: 124539 - DNA, 427 bp, Arabidopsis thaliana columbia
  unsure (1)..(427): unsure at all n locations
gaagccaggacccgaaagagcggccggcccgaaaacacccaaaaaaaagccccagccgacccgaccgagggaggcaacaccncacgagaaagccgagaacaaaaaagggaccaccaggcgaagcaaaaacaagacagccccgcggcccaaacacacacgacacggacccagccggcacacgccagaacatttcttttagggggaggcagaaaacacccaaacacaaaaaagagaaaaagaaaaaaagagcaaacaccggaacagccgcaagcaagaccaccacaggcccaacaccccgagaccaagaaccgagcaagcagaccgcaccacaacacacccacccgcacaaacaacaaccaaacaagccaagaaaggagaaagacacaaagcccaccagcacacccacagcccccccaggagccaagag

SEQ ID NO: 124540 - DNA, 384 bp, Arabidopsis thaliana columbia
  unsure (1)..(384): unsure at all n locations
gcccgggggaaccgggncggagangccgggtccagcgangggggaaacccgaagaagggggcgacaggaaaaccacaagggggcagaccagggaagagcgaagggcaaggcgcacaaacaaaaaggacaagaggggcagaacgaggaacaaagagaagggcccccaagccaaggaaggaacaaccccaaaaacccctttttcaaaagggggggggacggacaacaaagaaagcaaaaagacccccaacaaagggacaaacacagggaggccgcaccaaacaaaacgcgggaacagacaacaccggcagcaaaaaaacaggagccaacgaggaaccgacgcaaccaagaggcgaacgcgagagcgggagagggcggggacaaaca

SEQ ID NO: 124541 - DNA, 454 bp, Arabidopsis thaliana columbia
  unsure (1)..(454): unsure at all n locations
nnnnnnnnnnnnnnnnnnnnnnnnnnnnnnnnnnnnnnnnnnnnnnnnnnnnnnnnnnnnnnnnnnnnnnncttttttttttttttttagattgtgtggctctgattcaccttatcttttttcaccatctggggataacttaatccgttttctattaccaacttattttgacaagggggaattaacaagggaatggcaaccaattacttatttgagcttacccctttttttttttgattccacccttccccagccttaaaggtgaaccattcccttctttaccagccttttattaacttcatccaatttgggtggatccattttgaaaagggttttttccttccaatttttcggtacctttcctttggatttcttaagggaccttacttggtggcttttgagaataacccggggaacccacttggacttgcttgaaaaaccctttttcgaattc

SEQ ID NO: 124542 - DNA, 508 bp, Arabidopsis thaliana columbia
  unsure (1)..(508): unsure at all n locations
nnnnnnnnnnnnnnnnnnnnnnnnnnnnnnnnnnnnnnnnnnnnnnnnnnnnnnnnnnnnnnnnnnnnnccacgcgttcggaagaaaactggttccaccttggtaaacaactttttggttgagctgagttattaccaccagaaaagaaaagaggttgaccctggatttgacaatgatgcttaaccacttttggcggaaaaggaagtcaaagaaaaccattcttctttataacctgaaccggagctggctggggtggggatttattcaaaaagggttggagaagaggaaccttgaaaaggatttcttattggaaggaaacttgtggaccccaattcctttggaaaaggacttgtttaaggaggagaaagtccattgccgacgttggaacgtttttatgcgtttcattcaaaagaggaccacgacgagctactccgtaatgttgtaggcgagtaccgaatggtgaaacggttcaaagatctcaaggaagctcaagtggcagggtgtcgtt

SEQ ID NO: 124543 - DNA, 520 bp, Arabidopsis thaliana columbia
  unsure (1)..(520): unsure at all n locations
nnnnnnnnnnnnnnnnnnnnnnnnnnnnnnnnnnnnnnnnnnnnnnnnnnnnnnnnnnnnnnnnnnnnnnnnncttttttttttttttttttaaggttagtgaaattttattaccggtttctttcgtatctgaaatgaaaagaatcaacttgtccatacattccctatcttaccaattcaaatgaatttcatcttcgactcgtcgttagaaatggcttgaatgtcagagctactccgaccactactatcacattcaagacgaagaataccatatgcgatcctggtagaaatgcagcgtttagtcgcctctcactccaagaaaataagatgccagcaccagctggtccaactgtcttaaatagagacatcgcagtcatagctattccattagccgcccctctttggctctgatccactgctctattttgaaggatcaacaggccggttatggcagacacacttaagacatttatgaggattgatgcacaatttaacatcaagcttagactgagacctgaca

SEQ ID NO: 124544 - DNA, 394 bp, Arabidopsis thaliana columbia
ggggagagaacacacccgcagaacccggccccaagaccgggttgacccacgcgggcgagcggcaggaagagaccagcctaactgaggcagacacgcctcacacagcggaagaacacgctctcacggcaacagcgagaggatccatgcgagggcccaacgaggaggcccaaaacccccgccgcagagagcagcagaagaccattctgattaagggaggagaacaagcgaacacgagggctgcataccgaaccaacaaacgacacaaccggcggggccctccagcccaaaccaccaacgcaagacaaatgaccacgaaccagaagctgcacagaaaaggaggcacccctcaccgcgaacgcaaggatcaagatccagaccaacccacccccgccgc

SEQ ID NO: 124545 - DNA, 523 bp, Arabidopsis thaliana columbia
  unsure (1)..(523): unsure at all n locations
nnnnnnnnnnnnnnnnnnnnnnnnnnnnnnnnnnnnnnnnnnnnnnnnnnnnnnnnnnnnnnnnnnnnnnnnnnnnnnnncttttttttttttttttttttttttttttttttttttttttttttttttttttttttttttttttttttttttttttttttaaaaaaaaatgggggatttttttttaaaaaaacggggagctgaattgatttaccttcaaaaacttaagctaaaacaaaaaccccttaaattttgatcacaaggggtttttctgaaaacaaagccacaaagaccccacagggcactttctaaccccaatttgccaatttacccaacgaccatttttttttgggcttttccccctcccaaagactaaagaaatttttctaatcccccttccctggaattttcaaaggatctttcattcctttctttttaaatagcaacagtagggggagtaccatttttcacacctagaccatacaagactccagggtttttttcagttgatcccgggaaataa

SEQ ID NO: 124546 - DNA, 453 bp, Arabidopsis thaliana columbia
  unsure (1)..(453): unsure at all n locations
gcccccgccccggcccggagaccccaaagcagtcggcgccccgagcaactagaagcgaaaaccancaggcccaaaaaagaggcgccgcaanaacccaaccaaccacggggcagcccggccaacaaccagaaacacccaaacccgacccacccgcaaaaacaaaaaaaaaagcgcgcccccccaaaagaaatttttttaaaagggggggacaaacacaccgacgaaggaagaccaacgaggcgacaaacaaaaggagaagcagtccccaaaagaaacagcacagcaccacaaacagcagaaaactccatggccgcaaacgaccccccgacacacacccgaacacccgcacaacccccgacaaagggagagagctccccccccccgacccatgcacagacagaaaacaccataaccgagccaacacccaaaaaggacggagaacaaagaccagaa

SEQ ID NO: 124547 - DNA, 170 bp, Arabidopsis thaliana columbia
ccccgcgggacccggcccggaacccgggttgacccagccggccaaacccaccaaagggcaaaaccgacccaggagaacgggccgtcggagaaggaccaagggccccccaagaccaaaccagcgggacccaggccagaaaaccacgccaccggaagacaccccgggccacc

SEQ ID NO: 124548 - DNA, 501 bp, Arabidopsis thaliana columbia
gaacgccgaaggcccccgtccgtagcctggaatcctttaaagcggccgccctttttttttttttttaatgtaaaagagctcaaacttcaaataaattccaccgttatcatccaccacggatcattaagtgtggggcaagctttattaacacaaagtctaagggactttagcggaggatgcgtttgaatccatacctagggacactccacacattttgcaccaatggttatgcagcccgtagagttcttactcgaataacctaaagggcctgaaaatccggataaccaatcacttggaacatgcaagaatcagccacactacggctggcttataacaaattcctgaaggggacatgatctcaggagggagcagacaacattttgcactaaaacttcctatgcattaacaaatatcataggcccatattaaaccaccaacgtcttgcactccttcaggcattgctagaacgatttgcatcccttgatcagcagttaaacgata

SEQ ID NO: 124549 - DNA, 421 bp, Arabidopsis thaliana columbia
  unsure (1)..(421): unsure at all n locations
nnnnnnnnnnnnnnnnnnnnnnnnnnnnnnnnnnnnnnnnnnnnnnnnnnnnnnnnnnnnnnnnnnnnnccacgcgtccgatcacgagacatgttactgattgagtatctgatatagagtgctatgacacagacaccacattttacccatcatgttgctagaaaagggattatggggactaaaggctggaacctatgtgcttctcttgcaggtattgatcttggactctgactctagatgttacgttgactgcaccatatgatagaactttcacaacatggatgacgtttgtactctgagtgatgaattagttactgatgctctcatgtaccttgtgataaatgatgcacatgaggctgacatccatgatcttgatgatcggcgtggccaattgcgcggatattaccatcagtgcatacgt

SEQ ID NO: 124550 - DNA, 110 bp, Arabidopsis thaliana columbia
cctgccgggagtcggcacaaagcttgggcacgcacagaaacgaaattagaaaagcgggacaacaacaagacgaagcgagcgcgagaacgacgagcggagagacggagacg

SEQ ID NO: 124551 - DNA, 523 bp, Arabidopsis thaliana columbia
  unsure (1)..(523): unsure at all n locations
nnnnnnnnnnnnnnnnnnnnnnnnnnnnnnnnnnnnnnnnnnnnnnnnnnnnnnnnnnnnnnnnnnnnnnnnnnnctttttttttttttttttttttttttttttttttttttttttggaaaaaatgcccattggctatttcaattttttctcaattacaaaaacattatcaatgaatgaacaaaaaaaagggacacaattatagagtcgaaacataaagaaagagttattgtactatttcatactggagaatgcttgtctaatttcttggcttcatgatggttctcattttcttgtcccaaaagcggcgtcgtatctctatctttcccaagaaaagtggaatcggaggaggcttgtttggatttagaagcaactgagcagaagtaggagtagagaagcatcccgaggacagcgatgagtattcctgcgatattacgaggagtgaagggatcgtgaaggagagtgtaaccaaatgcgagcaccaaacacgttttgagatgtcccaagacttggtatgtcaccg

SEQ ID NO: 124552 - DNA, 516 bp, Arabidopsis thaliana columbia
  unsure (1)..(516): unsure at all n locations
ttgtnnnnnnnnnnnnnnnnnnnnnnnnnnnnnnnnnnnnnnnnnnnnnnnnnnnnnnnnnnnnnnnnnnnnnnnnnnnctttttttttttttttttttttttttttttttctcttttttttttttggtttttttttttgtctgaaggacagggaattttttttggaatgcaaaaaaataatgaaagggtggttactaaaaatagaaattttaaaaaattcttgccaaatttcaaaaagtatcccagcgttaaaaaaaaaaagaccatggttgaaacccccccctcctttggtcacattttttaagggaattgcataaaccactttttttttctaccagtaacataatattgtataaaaattgcatcaacattgaagttttgaacactttcaattttcctttttaagaaggggtttcttgattaaagaaaaatggtttttttttttaaaattcgaattcagtttcctggggccatccgcttttgcggatttggatttcctcgaactttcaggcact

SEQ ID NO: 124553 - DNA, 405 bp, Arabidopsis thaliana columbia
  unsure (1)..(405): unsure at all n locations
nnnnnnnnnnnnnnnnnnnnnnnnnnnnnnnnnnnnnnnnnnnnnnnnnnnnnnnnnnnnnnnnnnnnnnnccacgcgtccgattcccctctgtggtctctctctcacgagcatcgattcttcatcgatctcatagttaccggcgttgttttgaggccactaccgtcgtctctctccgtaatcgtctccaacatcatcatcttctcaatttcgaagcattttattctctaatacgtaaagttatgtaattntcgtttacaaacaatgttgaaattgtagaagttggatttagaaactgctttttatcaattcattagcttttgtagtatagncaatggtggattcattagcttttgactcaagatataaagcttattatatattgcataccaagtgttcgatgat

SEQ ID NO: 124554 - DNA, 440 bp, Arabidopsis thaliana columbia
  unsure (1)..(440): unsure at all n locations
gtgacactatagnaagattatgacgtcgcatgcacgcgtacgtaagcttgggatccctctagagcggcgcgccctnnntttttttttttttttttttttttttttttttttttttttttttttttttttttttaaaaaaactggaccccttatttggcttaaggacttattttttaaccaaaatttttccaaataccggaaacccctttccttattttagggggtcctggcctttcttttttaaggtcaaaaaaaaaacccccaatggattttcctttacaagatttacccgtttttttgaaggaattaggcccaaacataccctttaacttccttattacggttttgggttccttggttaaattttggccctcctttccttgtttctttttttacaattnggggggtttttgttcggtttggggcttcattgtttcttc

SEQ ID NO: 124555 - DNA, 430 bp, Arabidopsis thaliana columbia
  unsure (1)..(430): unsure at all n locations
nnnnnnnnnnnnnnnnnnnnnnnnnnnnnnnnnnnnnnnnnnnnnnnnnnnnnnnnnnnnnnnnnnnnnnnnnctttnttttttttttttttttttttttttttttttttttttttttttttttttttttttttttttttttttttttttttttnggggccaaaacaaattttgggagggattaaacttttttggggtttttattttggggcttacttcccctttaaggttaacccagaaataattgttgttaagggatttccccagggggatctttaacaaaagatcaaagtttcccaccgcaaaagatttaaggatttcccttccttgtaagaagcccctttgccaaatttgggcaaaggtgccggaaccctccccagttttgccttttcgacttggaaattaaaaaaacaaatttggtttaaaaaac

SEQ ID NO: 124556 - DNA, 500 bp, Arabidopsis thaliana columbia
  unsure (1)..(500): unsure at all n locations
aaagcccagaaccccccaaaggggggcgaccccaaagcacgcggaagcacaaggggacgcccgccagcggcgaaggaaaaaccaacttcgcccccggccgccgaggaagagacaacggcaggacggaggccgccacaaacaaaagaaaaaaaacctccctggaagcaaaggaagacacacgccaggaggggcccaaagaagacagagcccagccggaggagggaggggcgggccgcaagagagaaaacgcgagaacaacaggaagagaaacaggagcagcacgacggggagaaaaaagaacaccacggcaaagcancaaaccaaagaaacaaacccacacagcgaccaaacacacgcgacagccacccaacncccccccccaccaacaacacgacaaaagaacaacccaacacacagccccaccaccccgagggcaccagggagcgcgcggacacccccacaccaccccgccccagcgagacaaacgaaagaaaagacag

SEQ ID NO: 124557 - DNA, 523 bp, Arabidopsis thaliana columbia
  unsure (1)..(523): unsure at all n locations
aagaaaccctaggttttctccaactcatatgagggaagagctgcgccgccggcaggtcccggcccggatttcccgggtcgacccacgcgtccgttctggagcgtgacgtaggctgccattttgaattcattagcccaccaactgttggagacttgttggaatcgtcagcagaccaagtggtggccactctaaatggtgttcaccctgactccataaagtttttctcagcaactgctcattactatatgaggagaaaggaacagatgctttagctgcagctctagctcacctgagtggtttctctcagccgccttcatcaagatctctcctcagccatgagaagggatgggtgactttgcaattgatccgagatccaacgaacgctagaggctttctgtctgcgaggtctgttactggttntctttccgatctttaccgtacagctgcagatgaagttggaaaaatcttcttgatcgccgatgacaggatccaaggagctgtatttgatctaccagaggagatc

SEQ ID NO: 124558 - DNA, 376 bp, Arabidopsis thaliana columbia
  unsure (1)..(376): unsure at all n locations
accccgaccgaaaganggaagcccccaaagggtccgccctccgnacaatattcaaaaaaaaaccacgggcggcgggaagcgggaccattccccccgacgacccaagaaagaaccacaagacgcccgagagggcaccgaccacccaaaacggcaccccaaacgccccacaacccggaacgcgcccaccacggcaaagaaatttttttttttaaagaaggaacccaccccgccgccgcgaaacccacacaaacaaaaaacacaaaaaacaggaccccaagccgnccgcaccggaccacagaccgacacaagaagagacaaaaacacgaccacaaaaagaaaccaggagccacagccacaccaaccccacaaaccccac

SEQ ID NO: 124559 - DNA, 420 bp, Arabidopsis thaliana columbia
ccccgggggccggccggaaaccggtcgcccaccgccagccagaaaaaagacaaacaaacacaggagccgcgaaaagggcgcgaccccaacccgaggcgccaacccacccagcgaagaagacaggagccaccaggacaggaggaaaggaacaagagacatgcttcctcgcggggaggacaaccacaagcaacaaagccaccggacggccaccacggaaagaacgacacaccacgaacgcgaaggcacacagccccggacgacaccacaggaccacccgccgcgagcgcgccgggccacacgaaccagaagcgagcaaaaagaggaacgcgcccacagggaccaaaaggagaccgacccgaggaaccgcacacacgcagggcagcggaccccgggcacggaggaagcagggggaccccagag

SEQ ID NO: 124560 - DNA, 507 bp, Arabidopsis thaliana columbia
ggggaggaaaccccccccggcgggacccggcccgaaaaacccgggtggaccacaccgcccgaccaccaagcggggaaaacggccagaagcgcaacccggaaaagccggaggggccagccgaccacccacggggacaaaacgcgcggaaaacacccaacacccggcggggggggccccgggaacccgaggggaggagagaggcaaaacagtttttaaggaggggggagacggggcaacggagcagccccccaaacgaaaggacgcacgccggaaggacaccagcagatggccggggcccaagccgacagggacacgcagaaccggagccccaaccggacagcggcgatgcgacgccgacgccgggagcgggaggacggaccaagaagaaaccacagaggcgcgggcaccgaagccgacggaaccaggccacgggccgggggaagccaaacacgacagaccgaaccagaaagaccggaccccgcacaggagaaccacccgcccagggag

SEQ ID NO: 124561 - DNA, 524 bp, Arabidopsis thaliana columbia
  unsure (1)..(524): unsure at all n locations
nnnnnnnnnnnnnnnnnnnnnnnnnnnnnnnnnnnnnnnnnnnnnnnnnnnnnnnnnnnnnnnnnnnnncttttttttttttttttaacaaataaaactttccttcttacatgtctggaatacattggactctactaaccgcgatcatacaagttagttgctacgacaccaaactattcacacacagacacattgcttctttaaaacttctggaaagcatacaaattactaaaaataaattcaaaactttactgaaaatgttacatgtttgcgatcgttgtgacanaaggtaccaatcttctgtaatctcttcttcctagagcgcaattatcaagaacccgacccaacattagccttgtgttctgtaaagccacatctctcggaggtatccctgactctgccgcagctgcaccaagagggaaaaggttgcgacattgttgcagccatcattgcgtactgaagaagtncgcttcgggctttaaatgaagtctgaggtacaggcgttttctcatcagtcccgtttt

SEQ ID NO: 124562 - DNA, 457 bp, Arabidopsis thaliana columbia
  unsure (1)..(457): unsure at all n locations
actcactattgnggagagctaggcacgcctgcaggaccggtccggcataccgggtcgacccacgcgtcgccacgcgtncagagacgcgtggggataaaagagtgatatctcttgatgtgctctctctgtctgcacaatgggtccgaacactagcttagcttcggtcacttgtaagactgctaaaaaggacagtgtattccacgagcatatactatgctcaaggattgctccacacactcccatggatgcttcgcagagtcccacatgtacacaattgttcacagctagtcgaaacactctgtgcttggagggcattgagtgttctcgaagctcttcttcagagctggcagcccggaccatgggggcacctggtggatcccaccctcaggattcgagtactctgaaaacggactgatgagaaaacgctngtacctcagacttcattaaaagcccgaag

SEQ ID NO: 124563 - DNA, 489 bp, Arabidopsis thaliana columbia
gacactatcagagagctatgacgtcgcatgcacgcgtacgtaagcttggatcctctagagcggccgccctttttttttttttttagtgtcaaagatataactgcactaaacgcaacatcgattcggcttttcacataagatgtgctggtgaagaagagtgaatagtaaacgtctataaaacaaccagattgtacattgataagactgatggtaaatgcacgaattctatatttcagaccacatatgaaacagaagtctaacatattgagagagatacagagacaagcagagatggttgcattcctatggtatatgtaagcaccgatcaggaacagagaacgagatcggagatatcattagcaacccataagcatggagcagatcacgtgcattatcagacatgatggctgaaacatcgctttcccgtgccgttgcggaaagggtgcaaaatctgatatacctgatcaaagattggccgatcgaggaccg

SEQ ID NO: 124564 - DNA, 562 bp, Arabidopsis thaliana columbia
  unsure (1)..(562): unsure at all n locations
gggnccggggcccgggaacagcccgggtttgagccgggagcgcgcaaaaacccaccaaaacagagacagaagnagngagaaaaaagaggcagggaacaccaggaaagcgcggacgaacgacccaagaaagcaccagcaaagaccgaagccaacagggaggccaagaacaaggacccccaagggacaagggggggcagaggcaaaccgagaagcacagccttttttttttgaaagcggggggcaaacaaagaagcaacaaggaagcgagcaagcgcgaagagcagcaaagcacccagaagagagcagggcagccagacaaggaaagaccgcaggccaagcagcaggacggaaaaggcgaagcagaggcaacggaaaacccaaagaggcacccaacccgaagagccagggacagagccacaacagacacaggaaggaagccagggccaagagaagcaggaaaagagggggacgagcaaacaaaagcgaagcgcggcggaccagacagcggacagggaaggacnagggggaaacagaaagaggcagagcacacagggccaggaga

SEQ ID NO: 124565 - DNA, 515 bp, Arabidopsis thaliana columbia
  unsure (1)..(515): unsure at all n locations
nnnnnnnnnnnnnnnnnnnnnnnnnnnnnnnnnnnnnnnnnnnnnnnnnnnnnnnnnnnnnnnnnnnnnnnnncttttttttttttttttttttttttcaccaaaataaagatatttatcaagcaaacaccgtcacatttttagatttctcaccaaacctcgaccatcactttttaccgtccgacggaagtcatcgcttccgtgatggtcaagtgtcctttctgactcctttgtcatcaatcgaaaacataaaatatttacaaacaaacatgtcatatatcatttcacgaccgaactcagcatcacgtctcagcgtccccgggaggtaaaaggttccgttaacgtcaaggtaccaatggacccttgtgatgtcaaaacaccaagtacactctcagatgtctcagaccacattctgaccttctctgctttgactatatcgagtagattatctggaagctgcagatcaccacccaagatctggaccaccttagacatgtctggcctaattgctacag

SEQ ID NO: 124566 - DNA, 480 bp, Arabidopsis thaliana columbia
tgacgtcgcatgcacgcgtacgtaagcttggattctttagagcggtcggccctttttttttttttttttttttttttttttttttttttttttttttgggaccaaggggaggggagtaaattccacccaaaaaaggttggggaaaaggtttccgggtggtgttggtttggacccccccttgatttttattttaaaaaaacaatttattttcccaaatggggagaaaaaaaaaaaaaaaagaggtagaaggttgaggggccaaaaggcccccttggaaaattttttttggtcctttaaataaaaaaataaccctggaagaacttccttttaaatggaattggtttctttttttttccggttaactttttttagagcccttggaggttttggaaaaccctctttccaaacaatttggacccagggagcccaacagttcgcgaagggtttccagggccaaaacaaaacttaagggggtttcca

SEQ ID NO: 124567 - DNA, 497 bp, Arabidopsis thaliana columbia
  unsure (1)..(497): unsure at all n locations
gaaagcagggaacccccaaaagggtccgcccttctttttttttttttaacgccggaaagacccgcaggaatccgaaacgaaaataaccaccaggcttggagagaaccagggaagaaaaaggccacccaacacccacagggccgtccgcccagtagaaataagaaaggcgtgtcaaccaacacaccggggacagtatttttttttaggcgggggccccccccaggggccnagccgcggggagagcagcaagaaaggaaaccccagacgaacgcaaccccgcaagccaaagccgggaaggcaaggaagaaacaggaccccaagccgaccacaaccaaggcccccccgcccgaaacacaagaacaaagcagaggcacggggagggaggaaacacaggacacaagcgccacaccaaaagaccaaaacggcaaaccaaggaaccaacgcggcaccaaagaccccaacncgggaaagaaacgagaccgaaacacccacaccac

SEQ ID NO: 124568 - DNA, 509 bp, Arabidopsis thaliana columbia
gcccgcagggaccgggccggaaaaccgggttgacccacgcgggcgaaccccagcaaaaggacggacccaaagccccaggagcccggttcgaagggaccagacgcggcaccgcaagccaagaaaaccgcaaagaagggaaagccccgaggacaccccccagaggcgaggcccagaaccccaaccacaggttcttcttggggggagggaaaggaccaacgaaggcaagaaaaaaggaaaacacacgcgaccggggcaggggccaacaaagaacaccaaaaggggccaagccccacggcaaaaagacacacccccaaaacacaaccggcccaaaacagaggccccaacccccgaagaacacgccggacaacacacaagcggcccccccaacacagacaggccaaaaaggacgcgggcccccccccccacgagcgcgaagcacccacccaacacaccaccacgcaagaccggggcggccaaagaaagccacaccacccccggaagcgcaacaa

SEQ ID NO: 124569 - DNA, 504 bp, Arabidopsis thaliana columbia
gaacgcacgcggacgcaagctgggatcctctagagcggtcgcccttcgtgtttttttctttatctaaaaccactactcccggatttagacggtacctcagcgaaacccagtgttatgttccaaccatcacgagcaactcaaccccacgaacaatgagcgaaaaaataggtaacaccaacaagatgcaccccacgacacggactactgctttgggggggggagacgaggacccatcgccagaaccaaccacggaccaaggtgtcaagtgcttatgagcacttacggctacaagtgaaaatagacttcaggggaaagggcgcctgcgaagacggatggagccgctgatgactaaaaaacgcttggcgccatgccggagaaacgacattctagatccggaccgctacctaggccggcaccaacccggggccaggaacaacaatagcacctcgaaggctaagcgggtgtgtttggagagagataaccgtagctggccccagcagacga

SEQ ID NO: 124570 - DNA, 458 bp, Arabidopsis thaliana columbia
  unsure (1)..(458): unsure at all n locations
ggggccgggcccgaaaaccgggttggccgggcggcgaaccagggaaaaacccagaccggagncagggggcccccccagccggcggaggccccaaaccgcagaaaggcacccggcggaagggaaaggcagagaaggagaaaggccacaaaagacacacaagggcaggagcttcgtctacgggggggggaagcaaacaggcggcccccccaaaaaccggagccaccaaacaggggagggcacgcgaggcggcgaagagggcacacaaagaaggagggcccgccggcaaccacacgggggggaacgccagaccccaaggagaggaagacaaggcggaaccagagcgaacagacggccgagaaaaaaaaagaaaagggggggacacgccggggcagggcgggcccagcgaaaaaagggccaacccggagacacacagcagnaaacaaaacaagggggcgaga

SEQ ID NO: 124571 - DNA, 516 bp, Arabidopsis thaliana columbia
  unsure (1)..(516): unsure at all n locations
nnnnnnnnnnnnnnnnnnnnnnnnnnnnnnnnnnnnnnnnnnnnnnnnnnnnnnnnnnnnnnnnnnnnnnnctttttttttttttttgttttttttttttattctcttttttttttaaggaaaatcaaattgtctgaagaacagagaagcatatcatacttgagaaaatcggagaagaaccctgggggacttatcaaatgatagccaggggtttgacacattttttttaatctgtgatggaaagagacttgcagcgaatgactacttcatatttcacggggttcctttccaatggaatcatatttaaacttggtagactaaaaaacacatgagtcttggatcaaaaaaaaaaacgcattgccgtccctgtgttagctaatgaacaacacaaaagccgcttgccgtaaaattctttttgaaagatcatacttgcagggctgtgtcatatgggctgtgtgaataccagaaccaaagcatcgagtgaacctgaaaatggttcttaatagggaaccttct

SEQ ID NO: 124572 - DNA, 506 bp, Arabidopsis thaliana columbia
tacgactcactatttggaaagctggcacgcctgcaggtaccggtccggaattcccgggtcgacccacgcgtccgaaaaaactcttgctcctgtgttgagagcctaatccaagattctcttccatggcttctattttcagaccttcttcagcttcacttgatctacgaccaaaggttatttgcacgaatctctctacgaaagagcggcttgagtttcacattttgagtgtgaggaaagaaaggatcaatgttaggttctatagcttgaaggctaaggcacaaggatcgtcaattgaagggattagtgttgtacaagagaaagagcttaacagcaaaaccgattatggagttcgctgggctcatcatgtcggtctgctctgcgagaacctaggacggtcactcgagttttaccagagcattttaggccttgagatcaacgaagcaaggcctcacgacaagcttccatatagaggagcatggctatgggtaggctcagagatgattcat

SEQ ID NO: 124573 - DNA, 559 bp, Arabidopsis thaliana columbia
  unsure (1)..(559): unsure at all n locations
agaaaaaacgaaaacaaaaaaaaaaaaaaacgcacccctcntgttacgacaaaaaaattaagggggnaaagcacccgaaccggaacccgggaccccaaaagagggcagcgcccgggcaccaccaccgaaaccccggacccccaagaacggggcagcccaagggccccgaacccaacaaagagcgccccccaacggcaaaagaaaaaaccgcgcgacgacccgcgaaccaaagaaagacacgacgccacaagaaaagaaaaaattttttttaaggggggaaccacacaaagcagaagaacaccccaaaaaaggaacaacaaacaaggggcgacgcgacaaaaaaaagagcaagagacaacaagagcaacagccaccgcccaccggggcacacccccccgccccccgcccaaccacccggaggcgccccaggaaagagcaaggaaaaaaaccacccccaacaaagaccgggaaggaaaaaacagagcaggaaaacacaccccgaaaagcaaaaaaggaaaacaagcaccacccaccacacaagagaggcgaacaaaaacaa

SEQ ID NO: 124574 - DNA, 407 bp, Arabidopsis thaliana columbia
  unsure (1)..(407): unsure at all n locations
cccgcagaccgacggatccggtgaccagcggcgtctttctttttaaaactttctcatatggaaagcaggttcttttcgagcataagaaatgtatctcttctaggttcctcttaccggggagccgtttggaaaataggaatcgagacttctcctttgcagagccngcggacattgacgttttagaaataggtttgacctttcgggtcctcacttcccgagatttcttgcctcaccgtaaggctttggggttttgttgaaccctcaccgttcacctttttttttaggccctcggcttttcaggctgaaacaggggaacggtatcaatgtcaacctttcttttccatccccgacattggggtacgagaataggcgttcaacatcaaaatgttccctcttcatcattaggg

SEQ ID NO: 124575 - DNA, 509 bp, Arabidopsis thaliana columbia
  unsure (1)..(509): unsure at all n locations
nnnnnnnnnnnnnnnnnnnnnnnnnnnnnnnnnnnnnnnnnnnnnnnnnnnnnnnnnnnnnnnnnnnnnnccacgcgtccggcttctcattgttcctttgttagacttatccatttcacattccatttaaactaagagattggattaaattttcagaggaatgggtccgaagcaagcgacaacaacagactgtaccctgcttcacagggagacattcttaggcacagactaagaagaaaagattcttcaaatcgacaagaaacacatcagtttttaccccagacgccaccaaaccgacctggtctaattattccaacttattctaaaacatggttggctggcttaaccaagtttcggcaccccttttaacccggtcttggcgcatgaagaaaataccaggcaagtttggaattgaaaaaaccagtcttaagttttactaagttccttttgaaagcaaccgcagggctttcaccgttggttctatagcaccaagcgattgcacaaaaagt

SEQ ID NO: 124576 - DNA, 347 bp, Arabidopsis thaliana columbia
  unsure (1)..(347): unsure at all n locations
acgccngcggnaccggnccggaaacccgggtcgacccacgcggcgtccggagcggacgnaagcgccaccgagaagcagagcccaccaacggcgggagacaagccgcaatcgccagcagaccaagcggtggccacactacaaggagcggacccagacaccacaaagaaacagccaccaccggctctctccttatagggggggaaaggaacagacgcccaaagcagcagcccaacccacaccacaagagagggcacaacaccccgcccccaccaagagccaggccacaaccagaagaaaggacgggcgacaccgcacaggagcaccagagcccacacacacccgaggca

SEQ ID NO: 124577 - DNA, 502 bp, Arabidopsis thaliana columbia
gacggcgcaaggcccccggccgtagcctggattcttttaaagcggccggcccttttttttttttttttttttttttttttttttttttttttgaaaggcaaagccaacccaaccaaatttttttttaatcaaggacctttttttggttaaggggtaataaggaaattttttaagccaaaaaaaacctttttaagctaacaaaattttttttttttgaaaacataaggttaaaactgggaaccgttctcatcaccggaaattagctccggcaaaggcccgaaaacttgaccagggttaaattccacaaaacccggccacgaaattttggttttctccttatccattttcgccctatgctcacacacttttatccttcccatggctcattctaaaaaattgatcgccgatgatgacaataatcccggaaggggtttactccgggccgacccatgggttatttttgaatgctggaagccctaaagcttcattagcgactaggagt

SEQ ID NO: 124578 - DNA, 452 bp, Arabidopsis thaliana columbia
  unsure (1)..(452): unsure at all n locations
gaaggcgggcacgccgccgggacccggcccgaattaccggggttgcccaagccgtccgaccacgcgtccggagggaagccactagacttgagtgaccgatcatcctcactaggcgggccgacgttcttccttccgccggcgcaatgtaaatgtataatccacgatcgctgttgctgttgctgcttcatcgngacttttatggctggtggattggggaacttctcagccttctaagctgtatggcaatctatatctgcatatccctcagctcaggatctccagatggcaaatgccgagcgaaggattgattaaagctcacatatcgggaaggccttcttgactctcagggttgaaaatattggcaaagatcctgctgcagaaatgcttattgctaatccacctacccagatcaagattttgggtatgagacaggccctgccagctactggcaa

SEQ ID NO: 124579 - DNA, 166 bp, Arabidopsis thaliana columbia
  unsure (1)..(166): unsure at all n locations
ccggnccggaanncccgggttgaccgaggcgggcgaggcaacncnagcnccngngnngagagccnaagccaagannctcnngcanggcngcgannnncagaccngcnncagcgncacnggannnacgaccaaaggggannngcacgaancncncnacgaaagagcg

SEQ ID NO: 124580 - DNA, 481 bp, Arabidopsis thaliana columbia
  unsure (1)..(481): unsure at all n locations
nnnnnnnnnnnnnnnnnnnnnnnnnnnnnnnnnnnnnnnnnnnnnnnnnnnnnnnnnnnnnnnnnnnncttttttttttttttttttttgccggatgaagcaaaatgcattggagagcccccaagatggctgtctaagtacttgcaccttttgtttgtagattatttgagcaaagagcccaatgaatattgacagtaactaatacaaccgcccaagccaggacatttttttgtgtgattgagatattgcaagcctgttcaccaacgttataacagaactactgccatgaagggttaacatatttgacatgaacgaatgcactgcagactaagcaatacttaccttttggacccttccatgggaaccatggggaaccttgaggacaatactagcagtcctaggacccctagggacactattgggttaagatgtacctagggagggacgttgcttacccccaaatttggattgggaggaggaa

SEQ ID NO: 124581 - DNA, 505 bp, Arabidopsis thaliana columbia
  unsure (1)..(505): unsure at all n locations
tacgacttcacttttagggaaggctgggcacgcctgcaggtcccggcccggaattcccgggtcgacccacgcgtccgggcattttaagaacgaaactaatcataacctttgccctcagacaacaaaagaagctctgcactctcatctccacccttgtctctctccttcagaaagaccctctctttgccgtagatagcctctacctacactaggggctgctanttttctaatcctacgataaacatttcatcctctcactcatagtgtgaaatcatcgagcttttacggggctgctgctgtttgacgccgtaaaattcgatccttatcaatacctgtgaccttgatcttatcgatgagtattgcgagatcgatgactaagggtttcgagttagccgctaacttgacggttggatagaatgacaataaggtgttatgggacttgagtcaattgggatccgctccctaatgatcgacaatgcctgatttctcagctcttcagaaggat

SEQ ID NO: 124582 - DNA, 477 bp, Arabidopsis thaliana columbia
ctgcaggtaccggcccggaattcccgggtcgacccacgcgtccggtatgataaagacgcgggagaaagaaaaccgatgctaacagcgtttgcaagctacgcgcgtgctcacgatatcgcgtttgaaaccgctctaacaatcacgcgccgcctccgtataaatatcttacaccaatcacctgtgtgcttcgttcttatcctaaacgaaaccttctctagtcgacccaagtctgttttctcggctctgttattgttcgagctctgccataatgggtactttaggtgttagatgagcaatcacagtatcctgcgactcgacgagatgatttctgtgtcgatgactataatggtgctcatatcggagatccggaccgatggttataggatcctgatgctgaagaagtgacggactttgtgcagatccgattgaaaatgacagatttctgactttgaagagtgtgaaacaaaggaaaagctt

SEQ ID NO: 124583 - DNA, 514 bp, Arabidopsis thaliana columbia
tgacactatagaaagatcttgacgtcgcatgcacgcgtacgtaagcttggatcctctagagcggccgccctttttttttttttttatttaaatagtagtattaatcttcattctttaactacaagtgtttactagccccaacaaaaagttacattgtcgaaaatttagcgattagtttttccgaaatagtgttctatctgaagacaaccttgagaggacgagccacttgttttagttccaagcttgaatctcttaccacttcctgagcttgcattggttttagaaatttggggtttagatctcagcactttgattctaccacctttaccatcaggtccaatagagatgagatcatcttttcttggaacagaacctcctagtgatggagttgcttcgtttctctctccatgtttgctccatctaccaaggtttctatttgttccacttgactgccaaatgtttccactaccattgctgtaaggtgacactgatgatgtcgggtcttttctgatgt

SEQ ID NO: 124584 - DNA, 369 bp, Arabidopsis thaliana columbia
  unsure (1)..(369): unsure at all n locations
gcacgcgtacgtaagcttggatcctctagagcggtcgccctttttttttttttttcaaaatcaaagccccactgatcttcgctgaaaaacatctagccaatactcaactcaagagatacccgaacctgaccaaaggacacagactaaaaataccaaagtcggggtaaaaaaaaaagacagccccaaaaggataagccttttgncaattaggcaacaccgtgattaatcctaccacttagcagagcttggcccatggtttggaacttccgtagctgcaggccaaagggcttacgaaaatccacccccaacattgggtccataaaaagaaagggcgaagaaagggtgaaaaggactggaaagtggggaaaa

SEQ ID NO: 124585 - DNA, 491 bp, Arabidopsis thaliana columbia
  unsure (1)..(491): unsure at all n locations
cgccggcaggnaccggnccggaatacccgggtcgacccacgcgtccggtctaggagganacgaagaagaatgctagaggcccaatgacgctcgcgagaggtctaaccaaacgggcgccaaactgcacgcgaggcgctgcaaggcaacacaggtttacgaggagtcgaagcaagacaacgaaaaagtatgccttcctcgtaatgagagagacaaggccgcaactgacaagcgcgagggaggaaacaaagcacaaacgccaacactacactcagcctcatgggactcataccgggctctacggcgctttgctgggggcacgtgggatatgcccaagatccatccaacaatgctatggagcattctagtctgatgcggggggaaggaagcggaatgttacagttggctgtggggcatggcatagcgacccaagttaaccctctgaggaatccatcggcgacgtcagccatggagggaagataccttacaggggc

SEQ ID NO: 124586 - DNA, 252 bp, Arabidopsis thaliana columbia
  unsure (1)..(252): unsure at all n locations
tgcactatanagagtatgacgtcgcatgcacgcgtacgtaagcttggatcctctagagcgggcgccctttttttttttttttttttcttagccacgcaatatacttctttacaccacaggacatcatatatttagcatattgttagcagactgccatgcattggaaaaaaaatctaaatcacctagtccatacctaattagattgaacttggcattgaaaacagatttcttatttggtgacctagttttttt

SEQ ID NO: 124587 - DNA, 444 bp, Arabidopsis thaliana columbia
  unsure (1)..(444): unsure at all n locations
ccgccgggacccggcccgaaatcccggggccgaccaagccgtccgaccacccggccgaccaagaagagacccgtggaagccgaacaccaggacaggcggcccacccagaaggggaccaaggacgaccactgaacccagagacaagcagaccaaaagagaaagggcacggaaagagcgacgcagcccctcgattgacacagagggaggcggccggcccgagcccccacgaggaagagggacacgcncagggcgaaaccagcggacgaaccccgaaaagcaaagggggaacaaggccaaagtgccacgggaacgaggaaaaaagcccggcaacacacacagggaaaaaggagcaaccccacgccagaccagaaaaagggcacggggggaacggaaggcgcacagcccaggggcacgcaaaccccaaagggagccgaacacaacggc

SEQ ID NO: 124588 - DNA, 466 bp, Arabidopsis thaliana columbia
  unsure (1)..(466): unsure at all n locations
actcactatttggagagctggcacgcctgcaggtacccggccggaattcccgggtcgacccacgcgtccgaaaggcacaccaccatagcattgagctaccctcagacgcaagtaccacaccttctctctctctctctctatgatctgtctactttttctctcatcgccttgacgctgtgagaagtagagagaagctccgatctgataggaactgttatanttcttgagtctccggagacagaagncgccgatttgctactgataatcttagtctcaacatcacaacgactgtatgcgagtgctactactggaataaaggtttctccgagttggaatcggaatcggccgagtcaaagcccttgtagcttgcatctgctcttactcaatgccacaatgcatagggtctgctactgcaaggatgagtctggtagaaaccaagcgacgaagtcaccgagttccatagaga

SEQ ID NO: 124589 - DNA, 518 bp, Arabidopsis thaliana columbia
  unsure (1)..(518): unsure at all n locations
nnnnnnnnnnnnnnnnnnnnnnnnnnnnnnnnnnnnnnnnnnnnnnnnnnnnnnnnnnnnnnnnnnnnnnnnncttttttttttttttttttttttttttttttttttttttttttttttttttttttttttttttttttttgggaaaacaaacctgttgtttttttaattttagaaaccaaattccaatttctttttcatttatttttattggcgcctaaaacttttttttttttactaaaactcgaaatccatgcttaggtaaaacaattaccatccaaagcccattaaccattttaactgttttccactaaatttgcaaaggttggcaggactttgttaataaaatgctgtccataaacaacttttttggcaacttgagatgttttttttcggggatgcttttttttaaagatatcaaggggctttacctccgcctcgaagttagtctcgtaaaaaaatgcaacacatacccggtttttaggagagttattgattactttatggaggggggattg

SEQ ID NO: 124590 - DNA, 522 bp, Arabidopsis thaliana columbia
cgtcgcatagcacgcgtacgtaagcttggatcctctagagcggccgcccttttttttttttttttttttacaaaaaaattctccttgtggaggccattggagtttatagacttgtagtacatatcacagaaccagacgttctggattacacaccaacaaaagtgaaaatatcttagacaagggacacacgcatttctcatcaataaaactaatctggtgttcacacaaatcttacaaacaacaacataggggttgatgttaatgtttgagaaacctctgatctggaagtctgtctttcaggtagttcaacacagcttttgttcctttttctagaattggcctcctgatacttcttaatgggttcccagcaagttgagaaccctaagtgtaggctcaagcaaaccccattctggaggaagacttgaaatgacgccgctggatttgtctagatgctgagtgaaggcccggggctccccacggggggaaaacaaaactcgggtggaaactaccgattatacagcc

SEQ ID NO: 124591 - DNA, 445 bp, Arabidopsis thaliana columbia
  unsure (1)..(445): unsure at all n locations
cctgcaggtcccggtccggaattccgcggtcgacccccgccgtccgcagacttccagatcagtagcttctacaacattaacatcaacacctatgttgttgtttgtaagaatttgtgtgacgnncnnnctngnnttncncaccaccaaangcgaaantntcttanacaagggacacacccatttctcatcattttatcaatctggngtccacacaaancttacacaccacaacataagtctcgatgttaatgtcgtaaaagctactgatctggaagtctgcctttcaggtggctcaccccaccttttgtccctctttctaaactcggcctcccgacccttcttaatgggtccccgccaagccgtaaaccctcaagtgtacgcccaaccacacccagttcctggaggaaaacccgaaacgttgcccgtgggatatgcctagatgttc

SEQ ID NO: 124592 - DNA, 433 bp, Arabidopsis thaliana columbia
  unsure (1)..(433): unsure at all n locations
cgcctgcaggtaccgggccggaatacccgggttagaccgggcgtccaaaccancgcacagcagaagaaaccagggaagaagcgagaaacccaccggagcgccaagagagaacagacaccgaggccgggcaccggtaaacccaagaagaaggccagcgaacgcacagccgaggcaccggggaagccaacggtcttctcctttccggggggggcgagcacccaagccagacaccagacagcagaaagcggacggccgaagaacacggaggggcgggagagcccagcaccagacgccggccgcaccaaaggaaagcaacccgcagggagggacaaaaaaagacgggacgcngcgcccgacccggacaaacagaagagggggaagggaagcacgccccgcacgaacaaagaaaaaggggacccaagaagccaagaaa

SEQ ID NO: 124593 - DNA, 536 bp, Arabidopsis thaliana columbia
  unsure (1)..(536): unsure at all n locations
acggcgcatagcacgcgtacgtaagcttggatcctctagagcggcctctcctttgtgtttttttttttttttagcccataaaaagccgaacatgctactctagtattctacgttgcacaatgactcacagacacangaccggacaatggatcacatgttggaactgaagataccaaagagactggacccaacaatgaaacgaacaatatcttataaggggtacacgcgaaatccacaaaatacgaagtgaaacccaacttaaaatccaccggaatctggactttaatgaatcataacacagggactcgtttaggaacccgagaacctgattgaaaatagctggggcctttggaactccctaacctgctcttccgcaaaattccggaatcaccatcctttgctccacaaacctcattttaaaagctcactttaaagtttgctcctaatttggcttacagacctttgaacacaaacttgcctccgaaacccactggggaaaaccaagttttttcccacaaaaaccaggagatggaact

SEQ ID NO: 124594 - DNA, 389 bp, Arabidopsis thaliana columbia
  unsure (1)..(389): unsure at all n locations
nnnnnnnnnnnnnnnnnnnnnnnnnnnnnnnnnnnnnnnnnnnnnnnnnnnnnnnnnnnnnnnnccacgcgttcgccagaccgtgcatcagacaagacatcacatttagctcaaatactattctgagagctgtgagtgcccttcatgagatcctttgagagcttcttcccacgattatcggcgattcaggatatttcatcttctataagacaacgttcattttttcctcgaggcttacatagagttggctgatgatcagtgttcaagcgctgactgtatatacaaacgtgaggggttaactcactattaggatccaatcaatgtatcgaatcttctgaagagagaactagagttgacggttccacttgcctgccttctactaagtctat

SEQ ID NO: 124595 - DNA, 275 bp, Arabidopsis thaliana columbia
  unsure (1)..(275): unsure at all n locations
nnnnnnnnnnnnnnnnnnnnnnnnnnnnnnnnnnnnnnnnnnnnnnnnnnnnnnnnnnnnnnnnnnntcctttttttttttttttttttttagacgagaaaaagtttactcttctcgtctagtagacgacgatgcacaaagacgcttgaacgtgttctatggtctatggattagagtgtggaagcgtgagatgccagacctggttcacatctaacactgaagctactactcttctgctagaggcgtgcaagtgatatacaccaacgtcggagagg

SEQ ID NO: 124596 - DNA, 298 bp, Arabidopsis thaliana columbia
  unsure (1)..(298): unsure at all n locations
nnnnnnnnnnnnnnnnnnnnnnnnnnnnnnnnnnnnnnnnnnnnnnnnnnnnnnnnnnnnnnnnnnnnnnncttgctcttttttttcttttgttgacgacaaaaaattctctattctcgtctggtagacgacgattcacacagaacgcttgactgatctataatctacgatttagagcgtttacgtgtaagatccatacctgttcacaactaacactcaagctactactctctagaagaagcgtgcaatggacacaaacccacgtcggagatcatgcatgatttcacttacccgtgac

SEQ ID NO: 124597 - DNA, 313 bp, Arabidopsis thaliana columbia
gacactatagaagactttgacgtcgcatgcacgcgtacgtaagcttggattctctatagcggccgcccatgctcttttttttcatttgttgacggcgaaaaattctcttttctcgtctggtggaagacgtatctcacagcaagcttgacgtgttcaatatctacgactaagaacgttacgtggtagatccataccagttcaccactaacactcaagccaatacaccctgtaagaagcctgaaaagaaatcaaacccacgtcggagattatgaatgatttctactacccgtggcagggattttaaaattcttgc

SEQ ID NO: 124598 - DNA, 536 bp, Arabidopsis thaliana columbia
  unsure (1)..(536): unsure at all n locations
tatagaagagctttgacgtcgcatgcacgcgtacgtaagctcggatcctgtatagcggccgcccatgctctcttctttctttagtagaggagaagaatctctctattctcgtctgatgtacgatgatactcacagacgcttgccgtgatctatactctacaattatgagtgtgacgtgagagatccataccacttcaacacagacacacaggctactactactttgtatgatgcgtgagatgaacacaaaccaacgtcggagatcatgatggatttctcttaccggtgacaggaatatataaatactgcggtgaacattcacgtagctggaggctgattaaatataggctggcggtggtccacggaacgagcacacctggctttgngttgccgctctatcgcccccaccgctatataacatacacgctatttctgatgaagctagagcatcacctgccgtgttttctcttcgacgtttaatctactatatcccagctctgctgcacacggtagagataacacgtggttggaggctg

SEQ ID NO: 124599 - DNA, 377 bp, Arabidopsis thaliana columbia
ggaaggtgtgccccctgccggtgccgggcccgaatttccgggttgagccacacggtgcgcgccacgcttccgcccacacttcggcacaccgtccaaacctgtaatggttctgtggaatttatttattaccggccaacaaaaaactggcaaaatgaaaaaggcttcccttcaacaaatctttttctaatggggattcctttttttaaatctttttttttttaaatggccatacactcattaatggatcttatgagagacgacctcctgtggttctttcttccttcaaacaggaaaagggtcttcttttaataatcagaatccacccaatgagatttttcgtgttttccggcttttataataggtctatttttttaaac

SEQ ID NO: 124600 - DNA, 519 bp, Arabidopsis thaliana columbia
aagcatctacgcctgcaggtaccggtccggaattcccggtgtcgacccacgcgtccgcttcacaaagatagtctagttcggatcttgaaacgagcgatgatgacgtgtgttgtaacgtatggatttgattatgatgaatctgaagatgactataacgaggtggcgttgttgcatcaaagacaccaagggaagatagattcctcttctactggacaagacaaaagctatggagaagcatcacaagtttcccatctgcagttgttgttgctgacaaatcaggatccggaatttacattaacgggacactaatctgggcagccagttactgattatcgtcatggacgatcatatccaatgatatagtaaagcgacgagtccaaggaacttccctgggccagattagctgggacataggatagtttacaatgacactttgatattaaaaaggataattttcaaagggtgtgttctttgaaaggcactcatgcaaatgcaatggtgaggaaagaactttgtaaa

SEQ ID NO: 124601 - DNA, 517 bp, Arabidopsis thaliana columbia
acggcgcatgcacgcgtacgtaagcttggatcctctaaagcgggcttcctttttggtttttttttataaaaaaaccctgggatcccactttacggacaattttttgttttctaaaagccttttggaggaaccatttggtatgaaaaaaacctttggttggaaggccaccaaataggcctggaggaaacgggacatgaaaccctcccttttttaagggggggggggccaaagcggatcctcacttcctgtaaggcaattaaacggcttgaaagccagccggggcgaaacaagtggggtcaaccaaaaaaccgttagaatcttttccccaggattatctctttcaaacatactgggtagacaaaccatctcgataacccccttgcgtataacaacccttccaagaggagtctcttttaaatcgccagacttatggtgaaaacttctcttgccagcaacattgtggccttgggaggctatgtgaacttaactcggggtttcccatacggaatggagcgcc

SEQ ID NO: 124602 - DNA, 560 bp, Arabidopsis thaliana columbia
  unsure (1)..(560): unsure at all n locations
ccgnnnnnnnnnnnnnnnnnnnnnnnnnnnnnnnnnnnnnnnnnnnnnnnnnnnnnnnnnnnnnnnnnnnnnnnnnnnnnnnnctttttgtttttttttttttttttttttttttttttttttttttttttttttttttttttttttttnntnnnccacaaaagccccttaaattttttattttaccaccattgccgttttgatggtttattggaggaattcaaaattttgaaagtttaaactttaaagggaagggggcccccagcttaaaagtttttttgaaactttcccaaaaaaaaatcaagatttttatcattaacccattcccgttttggggcctttttccaaatttttacccaattttcttttgcctttttaagaccaaaaaaaaatttattcttggccggttccaggtttggggaaaagcttccgtccccaatcccaagagccgacaaaccaaaggtgccgagtggggtcaattttggaacccaaaaaggcccgtcccaaacttttttatccttaaaaactttgagtactttaaaaatcgccactcccaagcc

SEQ ID NO: 124603 - DNA, 500 bp, Arabidopsis thaliana columbia
cacgcctgcaggtaccggtccggaattcccggttcgacccacgcgtccgtgtaatcactatcggcggccttcacagcaatcatggtcgtgctacagccactgcatctaactatctcaatctgaatactcatcttattctccggacttacaagcttcttgttgatgaagatcctgaataggccgggaatcttcctgcttggcggggggggggagcaaacgtccatgtaatgtctaaagaagagcatactaccattgggagtgagggtcgactaatgctctgaagagaaaccggaagaccgatggaaagaaacccttggtatccccgtcaggggatcgaccccactgggaactggggggagctaagaaccacttgggaccttgaggcgcccctttaattatacaccccacgacccgacaatagatgcaccttgggggtagatgcgagcatcggcggacctagcggcgggattctaatagcggcttggggtgcaagaagtaaa

SEQ ID NO: 124604 - DNA, 532 bp, Arabidopsis thaliana columbia
tatagaagagcttgacggcgcatgcacgcgtacgtaagcttggatcctctagagcggcctccccttgaggggggggtttttggtaagagcagacaaagagagggggggcacaccatttatttatcgtgatctgcccaagcctatgaacatgatacatcagaatagaaaacagagatgggtttattcactggccaatgcacaaatgggtcaaactgacctatactgtcaggggggtgaacaaacagattttggtgggcttgaacattttcccaacaaccttcttttcttggaacggaatcctgaaacattcattcgggaccaagtacccaacaaaaatgccctttgaataaacctatcatacaacccaagaagcccaccagtgtggatgaacaatatttttcttccctcccaacatttgggatacttggagaacctaattaataaaacaaacgcgagttttccaatggaaacccggtaaagaaaaaccccgggtgaacctcggtaacttctttaccaactaaagctgctttga

SEQ ID NO: 124605 - DNA, 463 bp, Arabidopsis thaliana columbia
  unsure (1)..(463): unsure at all n locations
gacccgagaagaggacgggggcccaaccgaacccgcgaaaagggaccgaaagacgcggaccagagagcacaagaggcaggagaaaagggcaggagaggcaggaacaaagaacagacaaacccagcgaagtttcttttttaggaggggaggaccgccccgaggaaagaacaggagcgaaaaagcgaaacagccgggcggaaaagcaacgacgagggagcgcaagagcgccaccgaagcgacaaggcaggcccagccgccagcgcagaagaacggagacaggacacaaacgccgccaagagggagcgggaggaacagagcacgacgcaagagcanacaaggaacgaacagcaaagcaaaagaaagaacgaccaacaaacgacgaaaaagacccccccacgcaaaaagcaagaaacgccacgacaaagacgaccgagcaggaaagaccaaaaagccgaaaaaaaga

SEQ ID NO: 124606 - DNA, 560 bp, Arabidopsis thaliana columbia
  unsure (1)..(560): unsure at all n locations
ccccaaacccgggacccccaaagaggggttccaccggggggaggaacccccccaaaacaccaaaaaccacaacaaacggagcgaattagccacggcagagagggagaagaacacccggacagcggcgagcaggcggaagagccacccacgaaagcagcgggcaaccccagagagacccccanccagcaaacacccgggcccctttttttttggggagcggggagaaaaagggcccccgcacgcccgaaaaacaagaccgcccccacgcaaaaggcaaccgcggagccgagaggaagcagacacccccggcaagaacccacggaaagagaaaggggncaagaaccaccaagagcaccaccagacggacgcgcacgggccaccggagagccgccaccagcaaggcgcgaaccccccaacgcgcgcgcgacccagcgagagcaggagacgaacacggcgacaggagacagccccacgggaaaacgcaggaagcagcccgcgggccacgcacagagaagagcccacgcgaggagccacgcacagcagcccgcagaccccgcaca

SEQ ID NO: 124607 - DNA, 501 bp, Arabidopsis thaliana columbia
cgcctgcggtaccgggccggaaacccgggtcgacccacgcggccagacacagcacgacaaaaccgacctgggaatgagggcaacaacaaggcgacgtgaggacccaaaggaagcatagaccgggaaagcggggaaagaaaaacagcggagaaggcacaaaagtgaagaccctgaagcagcaccggacgttcctgtttagggggggggcccaaggaggcaccacagaaagaaggaggagatgccgacaaaaaaccaccaagaaaagggaaaaagaccccaaagacaaagaagacgccacacacacgcaaagaaggaagggggacccatacggaccgggacgggggggagaagcaaagacaaggacaaagggaaaaagctgcaagggacacggaaaggggggcaacgcgcacaggagaagaacaaaacgcgccacccagagagcagagaggacacaggagccaagccaccgggggaaatacccccgagggaacgacaggcagg

SEQ ID NO: 124608 - DNA, 517 bp, Arabidopsis thaliana columbia
ccccgcggaaccggaccggaaacccgggtcgaccgggcggacaaaccccaacacaggcccccgggcggccagccggcgaccgagcgagagaaacgagggcggccgacgcaaaaacgagcggcggcaggcccgccgcggaccccgggcagccccacgcgggcaagcggcaacgccggaggcggctgttcaaacagggggggggggacaggaaacgaagaaccaagcgagaacgagccgagcccggaacagcccgcggaggccacgcgccccggacccggagcggggccaggcaccaggccacacgagggaccgccccaacacaccaccaggcacacaagcgaacccacccggagggaaaaacgaagaccgcccgccacacacagaagacgaacaacgaagacaaacagcacgcacagcaacgccacagaagcaccgggagccccgacacccggcagccgaggcgaggaaagaggccaaacgaaaaaggcgccgagacaccaccaccaggggaaacgga

SEQ ID NO: 124609 - DNA, 345 bp, Arabidopsis thaliana columbia
  unsure (1)..(345): unsure at all n locations
aaacaacaaacgaggaccccaacctggcccacagcacggggaagggggaccaggacaacaagtaaggacgtttttttagggggaggcacaacacaaaaccaaggccagcaaccgaagccaaggaaagcataaaaagccggcccgaacagccccacgaacacaacggggggacagaaagcngaaccaccgacgcccaaaagaccgaaggaggggaaacccccaaagcccacaaggcactcgcgcgaaggcaaaaccccaaccccaaaggggacccaccaacagagaagagggagacctggacaaggagggaaaaaccaaaaaacagggcatcccccagcgcggcca

SEQ ID NO: 124610 - DNA, 497 bp, Arabidopsis thaliana columbia
  unsure (1)..(497): unsure at all n locations
gcctgcaggtaccggtccggaatacccgggtcgacccacgcgtccagacgccagaggaaaaaacaaaataacagagacgtacgaatatggcgatgatagcgcgcagaaccgtccaacaaatcccttgacagctgcaatcccagagtgccggcgacgcaggataggtcgtctaccaaaggacaacccttttcgtccttttggggggggacaagaccgaacgccgaacaaccagagcggaagcgccgacgagcgncccgaaaactggaggggaagactaaaggggacgaacgcgtgaatccccaaggaatgatgtggcaaagagaacctggaccgaacgggatcccacggcgggtaagaaactaagggctccggaagggggcgcagaccaacggaagaaaaaaggaggcggcccccctaaaagttgaaaccgaacgggggaccgcttatcgggcttagccgcaccgactattaggcgcaaggaggagggtccccggtaa

SEQ ID NO: 124611 - DNA, 498 bp, Arabidopsis thaliana columbia
gccgtaggctgggatccttaaaagcggctttccttgcttttttttttttttgctggagggaaaaaattttgcttttgtgaacttttggacgatgatcggcaaagacgctaagacgcgatctatggtgaaaaaataagagggggggctgaaaaagcaaaaccggttaacattaaacacggaagcaaatacattacataatataggggtgcaaaaaacaccacccaactccgagggttacgctgggttaactctcccgatcaccggaaaaacacaatctgtggcaaggattcgggctcctgggggagatgcaatttaactttcggaggtcagaaaacgacactttggttatagggtgcgctcaaggcccccccgctatggaaaaagagcgttattgttgaccgaattaaaaagcaactactgcttgtccttggagagttattcagaatatggccaaagccttgaaccaacccccaggggtaaaccaccaccctggaacat

SEQ ID NO: 124612 - DNA, 176 bp, Arabidopsis thaliana columbia
ccccgcgcaggacccggcccggaatcccggttcacccaggcgccaaccggctggcagagcagcgaagcaaaaaggacggagtcacacgaaccgtatcttctggtggacactgcaattgataaatatgtccccgacaaggttgtggaccataccatcagcgtacttacacgagacgg

SEQ ID NO: 124613 - DNA, 487 bp, Arabidopsis thaliana columbia
cgtagcctgggtcctttagagggggctgcccttgtttgtttgttttttttttgttttttcgttttgggaaaagggggaggggtttgcttttttgctaacgtggaatgggcaacccgattttccccgaaaaaaacaccggggacctcatccagtgcccaccgagatttttttctgtttgaaaggaaaattttttattgggggtgaaaaacaaaagagggggggtcctaaacctcgcacctataaggggcaaggcccttttgcggccaaaaataaatgggccggggctgcagggggattcttacacctttgtttttggagggggccctgggtcggggtataagccaaaagacactgtggagcccccctcgtttcaggaaaaccggggtggcccacgtttttgtttttgggctggacagctcgcggggaattatccacatttttatacccttggcaaaggggagggggccacctaaaatttataccgggt

SEQ ID NO: 124614 - DNA, 501 bp, Arabidopsis thaliana columbia
ggggaaggtggtacgcctgccgggaccgggccggaattaacgggtcggaccaagcggtcggtagaccggagtcgaaccagaaaaacctttgttcgagagttattttgggagctggctgggcccctcaagaaatccaaagaaaagttctttcccccaatttcttggaattaagaattttttttttttattaggaaaacttttttttttcatggaggttaaaggaggcttggtggcgactcggggttaagggccggacggattccgcaaacttgaaggttaaaccttaattggtggatccaatcattctctcgattgttgtgaaaaaagtcttaaagttaagggttccccaggcctgtttactactaaatctatggatggtaggaaaacctaggaagagaaacgccggaccaccccgatgtggatgatgaagaggaaccgctcatccattcggtggaatgccgaatatgccaagaggaggatacccttaggaacctcgagtcc

SEQ ID NO: 124615 - DNA, 482 bp, Arabidopsis thaliana columbia
accacttacatatagggaaggtgtggcccctggcagtgcccggtccggatttccggtgttaacccagcgggtcggcgccaccgtcccccaccttcccccaccttccaaaatctgtaattgattgtgtcagaatattatttatattaacggaccacacaaaaaaactcttgcagaagagtgaaagaaaagcgcttccccctccacaccaaattctatttttctaagagggggaatattccctttcttttaattccctttttttttttttaaatgcgccattcactcattattgatcttatgtgagaccccctcctgtgtatcttcttttcctcgacacattaaaggggctttcttttaaattagatataccaatctgtctcttctgggttttgcttctatatggagttatcttatacacgatgtgaaaattaaactctgggtgggttgttaacatattaaatcccctttgaatccatttcatc

SEQ ID NO: 124616 - DNA, 538 bp, Arabidopsis thaliana columbia
  unsure (1)..(538): unsure at all n locations
cggattgatcnagggtgcactatagnnagactatgacgtcgcatgcacgcgtacgtaagcttggatcctctagagcggccgcccttttttttttttttttttttttttttttttttttttttttgttccctaaaaaaatcaatctattttctttaaagagatagattttatgcccatcattgtctaataacaaaaatacaaatatgggaaacttgatttttttcgaatctattatttaataaaatccaagaaaaattatgttctttatcaaaaaaaaatatcccgtggttgttaccacaaaatagaaaacaagggtcccccccaacttaattccaaatttttgaaacatttttagaattcactggctttttgggtcccaaaaacaaagctttggtctctgccttttttttctttccctaattaacttttatctttttaaatttaccagggtctaccaccttgagaactcccgctttttttgggaaaaattcacctttcttagggttaggaatgggatgaagggccctcaactggttag

SEQ ID NO: 124617 - DNA, 462 bp, Arabidopsis thaliana columbia
  unsure (1)..(462): unsure at all n locations
ggcagggacgcggccccgaagaaaaccgttggacccagcaggcgaggagcccaaangcagaaaccagggccggcccaagcgccccccacccaccgaaagccaagaggccaacaacgggacgcccaaacgacgcgcaaaggaagaacgacgaggacaaaacgagcaccagggagaggcaccggatttttttttgggggggggcaccacgcaggcaaaggcgaagcgacacaaaagagaggaacaccaacggagccaaacacaaacccaccaaaacgagccagaagagagacaccgagacaaaaaggagcccgccgagcggaaaagagacaaagcagaagagccccgcaaaaaacgggacgccaacccccagaagcccagcgcaaccacaccagacgagagaaacaagcccccacggccaaagccggacccggagagagcccccgcggcaaacagcagcaacac

SEQ ID NO: 124618 - DNA, 495 bp, Arabidopsis thaliana columbia
  unsure (1)..(495): unsure at all n locations
cgcatgcacgcgtacgtaagcttggatcctctagagcggtcgccctttgtggtttgttttttttttttttttctnagccccgacatggggggggagcacacctataaaacaaccttattttttagaaaaacggccgatgccacatctgaatcagatggtgattataccgagcagacaataaacaaaggacggcgtcacatttttatgtgggggggggacacgaacattcgtttttttaaaactaacgtggctcttggaaagaattgataagaccctaaacgagacgcgatgagtgtgaggccccctataatcgtacccgaaataagtgttctttgatctttatagaggcgggacaggccttaaggtggattttgtctggatgacttacccactgaatattttccatttgcacaaggggcattttgaactattcttggagggcctacttacttgggggtatgctccatactcagccatgggccttggtcctttcat

SEQ ID NO: 124619 - DNA, 459 bp, Arabidopsis thaliana columbia
  unsure (1)..(459): unsure at all n locations
caccggcaagaggaggggaaccgggggagacaagtagccgcccgccaaggagcaaccacgacccgggaacgacacgaaccgacaaagcagagagagcccgagggggcgagcgagcgggaggaaagccgaggcgagggaggcagcagaaagcagaaaggccctctttttttttgaggagaggggaagaccccagagaagagcgcacagcccacccagcaccggcgccgagaacacacgcggacacccacgcgacacggaacacaaggaggccaagcacccaggcagcggcccgaaggggacaggcaggcaaggaggccccacancgcagcaagaggcaagggagcaggaacgaaaggaggcacgagagacggcagcaccaaggacgccgaaagacggaaaggagaagcagcccacacaacggcgcgcagacagacagcagccgggagcagcggacacgaa

SEQ ID NO: 124620 - DNA, 140 bp, Arabidopsis thaliana columbia
ctccaggaaccgggccggaatacccgggttgacccacgcgagcgcgccacagacaggaccaccacggacgacacccgagggaggagacagacgaccggggggaacaggcaggacaaagagcacaggccgagccacccacc

SEQ ID NO: 124621 - DNA, 522 bp, Arabidopsis thaliana columbia
tatagaagagcttgacggcgcatgcacgcgtacgtaagcttggatcctctagagcggcctccctttttttttttttttaagtaaaaactgctgtgtcaccacaaagcagaaaaattttattccttcatcgtcttcctaaggctgtcttttcatacacaagagtgcgctcatagaaagctcacccaacaagcgagagttaactaacctaaatgcaagccccatttttaatagggcggcccccccaagcttcactacctcctctagggattctacttgcttttagaacaacgctctttccttgaaactagctccacaaaaaacaacatcactactaacactccgccgtgcctacattatcataggcggatggcacaatttcctattcccccccgacttttaaaaatacctccttgcttccaaaacacccaacaacaactcattgtcctatccccagagagagttttcctttctttaattggcctgcctaaacgcttaagtatcggtctaccctcccgggaagga

SEQ ID NO: 124622 - DNA, 291 bp, Arabidopsis thaliana columbia
cctgcaggaaccggaccggaatacaccgttttcgacgcgacgaggagcagatccctaaataagcggggcccgataccgatctgcgagcgatcgaatccgtccaaataaaaaggggagaagcgaagctaagacaagcatcgcatggacggtacttctctggcccgtacgaagactaataagatggggcctggggctccagagcgagagagacagcagaggaaattttcctcctttttgggggggggggagcggggagcggcacccgagggccggagagaggggggcagcaga

SEQ ID NO: 124623 - DNA, 543 bp, Arabidopsis thaliana columbia
  unsure (1)..(543): unsure at all n locations
cgcccgcaggaaccgggccggaaacccgggtcaagcgggagggcaaccccccgcacaaacacacacgaatccgaggggggcaaacaccaagccaccgaagaaggaggagcacaaaacgaagcgcgacacccgtggggccgaacaacagcgaacggccacgggaacgcgcggcgacagaaacacagaacttcttctaaaggggggggcaacaggaagggaggcccaagaaccgcaggagacacggcgccgaaaagaaggaggagaggggcggcaccagcccaaccaagacaaagaagcaacgacaaccccggaggggaaggaaaacacgagaagcaaggccgcaggcggagagcagacagaagaaaagaagggagagcccagccgcacacgggaggaggcacgccgcggggccaggaagcagggnacacgcgcaaagcgcaacgaaccgaacggcaaaacgcgaaagagggccaacgaccgcgcccagcaaaaagcacgccgaccaagcaacggccggaaagagccgcacacaacggccacgaa

SEQ ID NO: 124624 - DNA, 493 bp, Arabidopsis thaliana columbia
gcccgcagtaccgggccggaataccgggtcgacccacgcgtccgaaccgcgaccccaacacgaaccgccaagcggggggccacgccgccggaaacaccgaaagcccacaggcggaccacgaggaacagggaaagaccaagaacaccaggagcagaaaaacgaccagaacaaaaccgaacccgcggccctcgctggtatgggggggggggacagagaacccacacaccggaagaaggggagccggcaccgacagaaggcgccaggagggacggggccaccgcaacacgaggaggaccgcgaccccgcgccagagacggaacggaggagaacacagaagacaccacacaaaagggccaggcgaacggaccgccagacgcgcggaggcggcgccagcgaaggccaacaaagcacgaaacggcagagcgcgaagacacaccccgcaaaaccaaaaacacgccgcacggcaaccccacaacgcgcgaaaaaacaccgc

SEQ ID NO: 124625 - DNA, 496 bp, Arabidopsis thaliana columbia
cctgcaggtaccgggccggaattcccgggtcgacccacgcgtccggaccgaatcaaaaatcacaatgtctcctcctacggcgactaaggacgacgtctctctgagtctcagaggactcgacactctgccgcatcttcatcaggcgtccctacaacgaacccgttccaagaaaaattcgaacccgcaatttcctcctggggcgggggaagggccggaggatgcccccggagcccaaacgcgccacccaggagccaaaaaccgccggccccgcggcccctgagaactaccccgcgcaaacctgcgcgcccaaagagccagggaagcagagggagccggcaagaaaggggggcacccgcgcggaggccaccacacgacggcgcggagcacatgtaattcgagccggcgcaccgcgacatccgccccactcgcttacgacggacgcggcgcgggaaagagacccccccaaatacgcccgggggggcccgccgtcgccccg

SEQ ID NO: 124626 - DNA, 612 bp, Arabidopsis thaliana columbia
ccgaccgaaggctggaacccgcaaaaccggcctccctcgccgggaagcaccccaggtaccccccaaaccagcaggggaaacccggggaattgggacggccagggcccaccaggattgaaaagaccggagccggagaccaagagaacaaaaaggggacaaccacacaccgccacagattcaaacaaccaaagagagggggcacacccggcaccacaatattttattagagaggcggggaacaccaacccacgcccgaaaacccgaggacagagacgggcggcgaaaaaccgaaccccgacgagaagagcgcggaccaaaacaacggagagggcctagtcggcccacaagggccaccacaccagcctcaagaaagctggggagaacggaaccacaaaaaccacaaaacggtttcgggaaacagaagctcacaacgcggggtggcaccacaaccccacacaccagggcccccgacacacacaggccaaacccgtcggcaaaccgagtccaacaaaaattccacgcaaacccgccgcgcccaccgaagagccaccaccaccaacaacccagcacaccaccgaacccactacagagaaacaacagccgcccgggaaa

SEQ ID NO: 124627 - DNA, 527 bp, Arabidopsis thaliana columbia
  unsure (1)..(527): unsure at all n locations
cgcctgcaggtaccgggccggaattcccggttcgacccaggcgtcaaaccatatacgatctgaagaagaataaaaggctattcctaattgccctggaagaaactggctagaaaccagaaaattccgggacaggtaatcctgtatcaatcgcgggttccacctccccataaagacctcgttctatctcacggccccgccaagaggacatttttttttttatccggggggtgganggacaaacacaaagcctttcatcatatcaaggagggggtgagaatcgaacaagggccacgattacctagaaaaaaagcaaggcgttttaggatgaaagtattaatggggcctatgatatgcgaccggaatgggcatccggtgagacagcaatattgatagctagcggatatgaagaaataattatagcgacgcggaagagggatttgtccgcctaggccggttgcgagaacaggaaacgatcgcccgcattctgaggggtatgattagtgcccgcaacccggtgtttaccttaa

SEQ ID NO: 124628 - DNA, 307 bp, Arabidopsis thaliana columbia
  unsure (1)..(307): unsure at all n locations
gcacgaagcaaggcaccgagacagcaggacgtcccggggggagggaacccaaaacgaaacgacaacgaccgagcggggggaaggacaaagcgagaaccggaccaaagacaagcagaccgaccgcgaccggaaaaaggagaaggggaggcaccacacaggaaccccggcaaaggcccggcaaagacccccccttaaaaggntgaaggggaaacgaaacggaggggaggagccaaacagaggaggcccgaagggccagcgggacaaagaaacccgacaagaagacccgcgacgggcgagagaagacggg

SEQ ID NO: 124629 - DNA, 504 bp, Arabidopsis thaliana columbia
  unsure (1)..(504): unsure at all n locations
agctacccccctgcagtaccgggcccgaataccgggttaccccgcgggcgatccacagangccaaagccaanacaaccccaggggccctatttcgtccaaggccggggaaaccgggacaaatataccccccttataacttttagtcaagtcaagagttgagccccatggaagttttccaaccccacaagatttttgtttgaggggaggaaaccacccccggcgaccgaaacccaaaagcgcccagaacaccgagagaagnaaaaaaaaaaggacgggaacccacaaacggccccggaaacggaaaaaggcggccnggaaaaagccaaaaaccgcaaagaaaaacacagccaaaaaacacggcccgcaaaaacccgcccccgccgaaaaggcccgcggcccacccggggccccccccacacaaaccggaaagaaccccagaagcacagacaccccccggccagacgcgaggggggaaaagagaagcccccacccacccccaaaaa

SEQ ID NO: 124630 - DNA, 533 bp, Arabidopsis thaliana columbia
acgtcgcatgcacgcgtacgtaagcttggatcctctatagcggtcgccctttaatgtttagtctatatattacatgaggcaaggcttttctggggtggacggcgggccgattagcatttcagtgacgagatagatcaccctggtccgataatatctataaaccgattatttcggaatctggggatcaattccgaaggtaggcaatcaatttgtcattcaggaggagaccaagcgaaccacaccgtgtggtaggtatcttaagaaacttgcgacttgatctaaatcagaagcttctaactcaccactacggggtaattgttcttttacaacatgggacatagttggaccaaaaccttggcgtaattgaagaagatttattcgaagggtcagccgtataaggcctaagttttccccactgtaacaattaaggacggagtcttcacctcagaaaacctcacaaacttaagttcccctgactccattaaaaaaactctacgggtactcccgtgaaagtcactgaatcattaaaaagc

SEQ ID NO: 124631 - DNA, 507 bp, Arabidopsis thaliana columbia
cccccgcaaggacccggcccgaaaaccgggttgccccgcgggcaagaaaaaaaagagaaagcagggcccgccgaacaccaaagccccagggaaaaagagggagaaaaacacgagggggcatactaggcggggggacgacagacagacagagggagccaagggcggcgggagaaaagacacaccactttttgtggggggagaaaccacaggccgccaaggacggcacagcacacaccacgggaggaagcgggcgcaaaggacgcgggggcaacacagggtgctaacaaaggcgggaaaaacacacacaggggggggaaaaccgggcagaaaaagacaagaaagacgggggagccacaaaaaacacacacacccgcgaacgggcgacagagagagagcagagagaagacgacgaagaacagcggcccgcacgacacaggaacgagccacaacacggcggaggaccccagagaaaaagagcccgcgaacaccccagaaaaagaaaaaaac

SEQ ID NO: 124632 - DNA, 530 bp, Arabidopsis thaliana columbia
  unsure (1)..(530): unsure at all n locations
gacgacgcatccacgcctccgtacggctgggagcctctatagcgagtctgccctcctttgttttttttctctctttccgttgagncggaccattcattattggtcagccatcctatgtaccttatcatattttttatacgagacctaattacatgctactacactaatagatgtgcaaatgtaacggacgcggacgatgaaaaagaaaccaacgcttacttgtttttgcggggggccacgcacaattaatttttttatgcaaagacataggcttgtgccctcatatccttgtgtatttgaaattcacaaccgaaacccgaagaggtcctccctcttcttctttgcccaagaaaatatcatgataattttattcctgatctatgacccagagatcggaagatagaggtatagtgatgagccttgcctctacctttttattttataatacctaatagtagtcggtgcaaaaattctctacatggctcaggggccttaaagggttcagttagcacctgtatcataaagctttt

SEQ ID NO: 124633 - DNA, 397 bp, Arabidopsis thaliana columbia
cgaagcacggaaaacggcaagagaggtcgccgagcggggcggagaccgaaaccaaccggcacgccccaggacaacaagaacggatgagcaacggagcaaacacagggcacaaaccaacacgcaaagaccagctacggcaccgcgaccaaacacccagcaagaacgccagagacacacgccaaagacaaacttttttttgggggggggaacgacaaccaacgaacccccaccggaacgcccgaaggcacacacacacacaccaaacaacccgcacacccgcacgagcaccaccacacacaggcgaacacagcccagagacacacgcacgggcaacaccacaaaacccgcaccacagggccaaggcaaacgccccaccgaccaggccaaaaaacgaggc

SEQ ID NO: 124634 - DNA, 185 bp, Arabidopsis thaliana columbia
  unsure (1)..(185): unsure at all n locations
gcctgcaggtaccggnccggaatncccgtttcgacccacgcgtacgtccaagtgtacggatgcccttaccctgagagcgggggggttctaaaggtttcaatgatgaaaataatgtagatacttgctgctgatttctcacgtagatattttgaccttttgataacggcgtgagcctcaatggaggt

SEQ ID NO: 124635 - DNA, 589 bp, Arabidopsis thaliana columbia
  unsure (1)..(589): unsure at all n locations
acccccagagcgggctgtcncggggggggggtacccgaaagacacggcacccaccaaaaaagggagcaactttaactcgaacagggggggccacacagggggagacccacaccagacgagaggaccatcagagggaaaacgccaacgccacacgcccggagaggcccgcacagcacgaacgcgaaaaaccattttctataggacgttggggccccacaaacgcggcgaccacccccagcaaaaagaggaacgcccangagaccgagagacaccgcgacccacaccgcggaaagcagccgccccgcccgagcacacccccccgcccgcaagaaaagcgcgcggggcgggccgcacaaacgccaaacgcaaggcagaacggggcaacagaggccaacccaacccaccgccgcgcacaccaagaacaccagcaccccgggaagcagcagccggacacacaaccgccgccggcacggggacgcaccaccngnagacgggggagggcgcccccagacccgggcggacagcacgacaccaacacgcggcgcgcccccccgcgaggaccagggcgaacacccgcgaacaccgggag

SEQ ID NO: 124636 - DNA, 562 bp, Arabidopsis thaliana columbia
cgcctgcaggaaccggaccggaatacccgggtcgacccacgcgtccgaacacacaaaaacaaccgccagaaccaagccccacaacccaaaacaccccatatactagacacacacaagaaggggcagccaagccccacgccgagaccaacagggccacaacccaactaagaacccgcgacaaaacccgggccggcttttttttggagcggggaggacgagcccgcccaaacccaaaacaaaggccacgggaacgaaaaagcgagcgaccacagacgcgacggggggaacacacccagagcggggcgaaaaggagagccagaggaagccccgacgcaagcacaaagacgaggagacgcaaaggggaaggccgcccaaaccggaaagcacgcaagcgcccacaccaggggggggacgaggacgccgcggaaaaaagaacagaagagagcaaggaggaacacgaagcccgacacccgcggcgaagaaaaggggagagaccaccccggggcgaggagggcccgggacgggagaagcccgcggaacgaggcggggggaaaagaaggaa

SEQ ID NO: 124637 - DNA, 300 bp, Arabidopsis thaliana columbia
  unsure (1)..(300): unsure at all n locations
aagcagagccgggaccggatggaagcaccacgccggagggggaacgcgagggccaaggaccaattttttttgggggggggggcccccgcccccacccggacgaagggcgagcacccaagaagaacgccaggcaacccgaagcgcacaccaagcgagacggaaagcgagccagngcaaccaacccgaaacgaggaacggcccacgagcccgagcgggacgccgggcaacaaggacaaacgacccaagccgcccgcgccgaaggggcaggccgccccagcggcaacacagagcaaagggccc

SEQ ID NO: 124638 - DNA, 544 bp, Arabidopsis thaliana columbia
aaggaaggaagccaccaaagggagcgtgccgcccggggagagaacacccagcacgacaacacggagagaaaaaaagagggccacttcacccacaaaacggagcgagcaaaaacacaaacccggaaccccccaaagcaaacgcgggacccgcaagaaaccccgggcggagagaagaacggcaaaaaaaaaagaacacttttctttaggggggggagcacgaggccccaagacaaacagacaaaggagaagccgggccacccccaagcgccgcgagacagaaccgagccaagaccagggaccaacagagccagacacccgacaaggggacgaagaacaaagaacaggcgcacacggaccccgagcaaccaacaaacgcgccgacacccggggagcaaccagccaaacacacaaaccccccagcaaaaagaagacagcacagacgcagcgaaagcggcgcacgaggaggaaccaccgaaacccaccaaacgaccacaacggacagaggacacacgaccgcccggggaacggcgaccacaagagcaag

SEQ ID NO: 124639 - DNA, 514 bp, Arabidopsis thaliana columbia
  unsure (1)..(514): unsure at all n locations
cccaaacnggaacccaaaagagtttacaggggggggaaacccagaggaccaacccaccgaagcggggcaccagcccagacagagaagacgaacccccaccacaccaacccgcggacgaaacaacccgaagcaagcagaaccacgaaaagagaaaaccagaaaacagggacacatttctttttgggggggggaaaaccaaagccaccccgaaaccacagaacaaaagaaacaaccaaagcaaagcgcaaaaaaaagaaccacaaagaggaccccaccacaaagacaggaaccagaaagaagaacaaccacccagacgaaagcccacagaacaaagccaaacagacagacggaaagagacccgcaaagaagaaaaaaagacaggaaaaccgaaggaaagaaagacaagaggagaaacagcccacagagcacaacccagacacaacacacacaagaaaccaagagccaaccggaaaccccacacgacgcaggcacacacaagaccaaaacaacacaa

SEQ ID NO: 124640 - DNA, 427 bp, Arabidopsis thaliana columbia
accgccgaacaggcggcaaaccgcgacacagaacgacgacaacagaaacgcgcccccaacaacggctttttttaataaaaagagggggggcggggagagaccaggcccaacaagccgaaccgcccggcacgccggccccccacagcccgcggcggcagcacgagccgacagggacgaagggcggagcgagcccgcccgcaaaagagcgcaccgcgcaaaaccagacacccccaacccggggaccggcgcccgcgaggaagaacaaaaacacaaacggcggccaaaaaccccgacgagcggcggagaggaaagcgacacgcacgacccagacacaacggaacgcgccgcccaaaccacaaagaaccagagacagacgggaacggaagcgcccgaggccaaagacacaccagaaggcaacagagagaac

SEQ ID NO: 124641 - DNA, 459 bp, Arabidopsis thaliana columbia
tcgattaatagggaggtgggcccctgcggccgggcggatatggtggcagggtcgttgcggggggccaataacctttggccgattaatctgggaggtggcaaagccctaaaaaactcggggaaagttgcttcccacgattttcggcgattaagaattttttttttcctataggaaaacgtttttttttcatcgaggttaaaggagggttggtggcgaatcggggtgtatgggcggacggattcccgaaacctgaaggttaaaacttaattggtggatccaatcgttctctcgaatgttgtggagagagtcctgaagttaagggttccccaagcctgtctactactaagtctatggatggtacgaaaacctaggataaggagagagcggaccaccgctgatgtggatgatgaagaggaacggctcatccattcggtagaatgccttatatgccaggaggag

SEQ ID NO: 124642 - DNA, 447 bp, Arabidopsis thaliana columbia
taggtgacactatagaagagcttgacgtcgcatgcacgcgtacgtaagctcggattctggatagcgcccacacatgctctactctttctttagtagacgacaaaagattcactattctcagtcagataaacgactatactcacagccgctagaactgacctatcctctacaactaacagcgtaacgtgtgcgatccatactacttcaacacatacactcatgcgacttctaccctgtaagatgcctgcaaggaactcaacccgacgtcggagatcacgaaggatttcacttcccggtgacacggatgtgaaaatactgccggcaacattcacggagcttgaggctgattgaatatcggctggccgaggccacggaacgaacaccgcggctttaagtagcgctctatccaacaacggatatacatcagacacgctatttgtgatgaag

SEQ ID NO: 124643 - DNA, 314 bp, Arabidopsis thaliana columbia
ggcgcatgcccgcctacgttagcttggatcctatcaaggggttccccataagggggtggtttttttttaaataaaccaatcctcactagagagggagtttcagttcactaactaacccttctgggttgaatatatgggctgccacccctttttactgtattcaccctccaaagaacctttggcaacgcctgctaaacaacaacgcaccgtcttttttttttagggaggggggaacgcacaccgctcctaaccccaatgaaaggcccttgttccgcgttggcgtcataacttatgttcccctttgcgccatgtcc

SEQ ID NO: 124644 - DNA, 553 bp, Arabidopsis thaliana columbia
  unsure (1)..(553): unsure at all n locations
cccccgcgcgagggnggggaccctccagagggttcgccccgggggggggtccctnagcaaagactgctctgccacgaagagggcaattctttctaccgctggagcgccgacccgggcatgtccacaaaaacgagagtccataagaaggagagtcgccacgaccgaagccacgaagcaaccaaaccgggaggcattttcctccttgggggggggggcggcgccccagcgccagccgcccccccccaccacgaagcggcgccggccggccgcgaagggccgacgaacaggcggaggaacccgccccccacaggacgcgcgacggggaccgggcccgcaggcgagggagcagcagacgaggaaagaagcaagcaccagaagcagccgcgggcggcgccgagcccacacgaggagggacggaacaccagagcaacaggacagccgcgaacaacgccagagagggcccgcccaaacaacggggagcgcgcggggcgcgagggaggcagggaacggagccgaaccccacgccgccggcgccgggaaccagcaggcggac

SEQ ID NO: 124645 - DNA, 197 bp, Arabidopsis thaliana columbia
cacgcctgcagggaccgggccggaattaacgttttgaccgacgcggccagtcaagggtggccgtcctaagccccttgattgccatgcttagaggaccgcaatggaatgcaactttctaataggagacgaatacgtttatgaggctcaaccagatagctgtctcgtcttgatttaaaagctaggcacaccccccattt

SEQ ID NO: 124646 - DNA, 299 bp, Arabidopsis thaliana columbia
  unsure (1)..(299): unsure at all n locations
acgcgtacgnaagctcggaacccgcgcagagacatcccacgggggcgacgaggcgccnaacgcggaaagcacgccaccgcagccgggccacctccgncaccgaccgagccagagagcggcacggcgaagagcnggccaagacagcgaacacaaacgcgacccccggacgcggaaaccaggcgacggacgagccaaatttttacggcggggaacgcacggacccgacagggcgagagagcacngaggcaacccgcaagccagccagacgccgcagggcaacgcaccgggacccgggcaag

SEQ ID NO: 124647 - DNA, 531 bp, Arabidopsis thaliana columbia
  unsure (1)..(531): unsure at all n locations
ccggnccggaaaaaaagcttgtgggggggcgcaaaacccggcggcggcccagngaagagcgcaggggcccgaaagaacccgccgcggagagacggcacaccaaggggaggcgaccgcaacgaaggcagagaaaaaagggaccgggcggcgacaaaaaacaagggaaaccccagaacgttcctataaaaggggagggagcaaacccccaagcaggaccaagcaaagcagcaccacacaggggaaccaggggacgaagaaaaccccccgagagcaagaaagagacgaagacgaaacagggagcgagagaaagggcggacacgaaagcaaaggaacgccgcgcgaggggccgggggaagagaaacgaaaggaacgaaacgggcgagagagaggcgaccgagccggggagcaagaacccaacgcgagacgcggccagggcgcggggagacgcgaaaaccggaggaaaagaaaacagcacaccggaagagaagagcgacgaaaccaaagcagccggcagaggaggcacgacaaaga

SEQ ID NO: 124648 - DNA, 472 bp, Arabidopsis thaliana columbia
  unsure (1)..(472): unsure at all n locations
gaaagccggaaacccggacgagaaattgcgccgggggggggagagcccnaaacggagaccggagggcccccgaaacggggccactgccccaacgggcggggcggagccccccacaccccaagaacccggcaaaaacaccgaaaaacaaagggcgccccccgggacggggaaacccgggcaaagggccaaaacaattttttataggggggggaacgcaggaaaccccacggggccacgaaaacacgggaggccaaacggcccaagcggcgcggaaccagcgagggacacaggaccacgggacccggaaccaggcccccgcccagggcaaaagacaaaagggaggagagacccggggccaccgcggccacccaaaggcgcggaaaaagggggggagacgccccccagaaaaacaaaaaaganagccccaggggaaaaaaaggcccaaagagggaggcgagccccccaccggggg

SEQ ID NO: 124649 - DNA, 498 bp, Arabidopsis thaliana columbia
  unsure (1)..(498): unsure at all n locations
caggaaccggccggaaaaccgggtcgaccaggcgccaaaccagcggaaanccccacaccacaagagggcccaaaaaggcagcgacggagacacacaaacaaccgggcgagagagccaaaacccaaaacaagcgccagaagcgcggaaccgacgagancgggagaaccaaatcctccaaaggggggggagaagcgccgaggcgaaggaacagaacaaagaccaccaaccgaaccaagaaggaggccaacacggccaacaggagccgagacacccggcggcaaagggaggggggaggaaaagcccgacaccaacacagcaacccggggaagacaaaacaggccgacaccagagcacccagccgaaaacgggggaggccaaggaacaaagaaggggcgaagacagagagccaggacgggcggaccgacaaggacagaaaaggggcccgcgcaggcncaacgggacaaaaaacccaaagaaggcggcgcaaaagacagagag

SEQ ID NO: 124650 - DNA, 506 bp, Arabidopsis thaliana columbia
  unsure (1)..(506): unsure at all n locations
ccgcaggaaccgggcccgaaaacaccggctgacccacgcggccaagccacaccanaccaaaacacagaccgagaccgcggaaccacccgaccacgaaaaacccacaaccacacaaccgaagccgcaacaccccaccccacaacacccaggcacggagacaccacacagcaccgcaccccccacccccacgccacnctaaaacaagggggggcccacgagaagccacgccaaacacgacgcacaccaaacaaacgccaggcacgacacgcgcgagcacacccaccagcgccaaacacaacccgcacccgccaacgaaacacccccaggaccacaacacccgccgaacaaccccccaaaaaccaaacccaccacacacccaacgcacacaaaccaacgaaaccaaccccaccaacccccaacacaccaaaacacacccaacgcacaacaccaaaacaacagccacacaaaccaccagccaagcccccaagaacccccaacaaacaaca

SEQ ID NO: 124651 - DNA, 468 bp, Arabidopsis thaliana columbia
gccgcgaagaagcagcaccaaaggctgcccgggggagagcccccaaaggagaaagagcccagggggaaaattagcagcagcgcgccaggacaccagggcccacccccgaaaggaaagggggcgcgaaggccacgcaccaaggaagggacgcccaaagccggcaattttttggccgagggagaaaaaaaaacgaggggaccacaccaaagggggaacgaggccagcaccccaaaaagccaaagaccggacgcggcacggggaaggaagggcgacgaaccccaaggaaaaggcgcgacaccacggagaaaaagggccgcaacgaccgcaaaacaaaccgaaccgccaaaaacaaaccacccggccaaccccaccagccacccaccagacaagagcacacaacagaacacgcgcgggaagacacacacccgacgacagcccccgaggaaccgcggggcagccacgaccggc

SEQ ID NO: 124652 - DNA, 269 bp, Arabidopsis thaliana columbia
ggtacatcgactcaccatagggaaagctggtacgcctgcaggtaccggtccggaattaactggttgatccacagaggtcaattgtctgaggccaccctttttgttgaagtttccggagaataagttgagatacaccaggaacatcctgtgggaattcaactttgaatgaaccccaataattggaatagccaaacattttcaagaactctttctcttggggtcaaaaggtgttttgagatgaattgcattccggtcttgcgcgaaagtct

SEQ ID NO: 124653 - DNA, 528 bp, Arabidopsis thaliana columbia
  unsure (1)..(528): unsure at all n locations
ctatagaagagctangacgtcgcatcgcacgcgtacgtaagctcggaattcggctcgaggattaatcgaaatgtattgtctatctcctcaatttggattggattttctgcatatcatcgctctagctttcgcgggttttggattcgattccttacccttctccaatcgaagtttttggctttgaattggatttgggtttcgttccaaaatcagctcttttttgtaatcagcagatatgcaggaccagctggtgtgtcatggttgtaggaatttattgatgtatcctagaggagcatctaatgtgcgttgtgcgttatgtaacactatcaacatggttcctcctcctcctccacctcacgacatggcacacattatatgtggtggttgtagaacaatgcttatgtatacgcgtggggctagtagcgtaagatgctcttgctgtcaaactacgaaccttgggccagcgcacttcaatcaggttgcccatgctccttccagtcaggttgcgcaaatcaattgtgggcattg

SEQ ID NO: 124654 - DNA, 520 bp, Arabidopsis thaliana columbia
  unsure (1)..(520): unsure at all n locations
ccccgcaggaccgggcccgaaaaccgggttgcccacgggggcgagcccccnacgcanaccaccaacacggcggcggaagacttaaaccgcacagggggggaaacgcaagggcgcgcaaccggaccgggggccggccggaccaccacaaccccgaccacggcggacacccggccgggcaaacctttctctcttgggggggggccccccgacgcccgaggggggaaccccgggacccggaggacccacggcccgggggcaaaacaaacccggccgggaggggaaccaaggcgcggnagaaaccaagggcgcgggaaggaccgggagacaccacccaaaggggggacccccacccaaagagagcaagagaccaacccggacaggaagaccccaacacaacaccgaagccgaggccccggaaacgccgacccaagagccaaccgaggcccgccgagagagcgccaaaaagaagagaggccggaaaaagcgggggggacggagccacaagaagaggccccccggc

SEQ ID NO: 124655 - DNA, 554 bp, Arabidopsis thaliana columbia
  unsure (1)..(554): unsure at all n locations
acggcgcaagcacgccaacgaaagcaacggaggcagcgacagaggcctgcccacaggggggggagtgcccaagcacagcccaacaccgaccagggggggggggcacgngccatacgcagcacactcggggacgggaggaacaccacaccaccccaaaccacaacacatcagcggcaggacgcggcccgccggcagcaaacaagagaaccgcattgcttacacaggagggggcgacgctcccagacacacagcccccgaggggagacccaagaccaaacgcccagcgtccgagagaaacccgaaaccgagcctacaacccagagccacggggcaatggaggtcgcaccccggcgccgggcaacggcatagaggaaagcgccaccggcgcaaacgaccgaacgcaagagacccgaactagaccagcccgagccaggcaacgcagcagggcccaaacaccggcgccgcagagccacccccccgaacacgcgccgacgcacaggccccccgaaagcccaaagcgcgggcagccaaacccagcccaacgaaccgcgccc

SEQ ID NO: 124656 - DNA, 543 bp, Arabidopsis thaliana columbia
taggtgacctatagaagagcttgacgtcgcatgcacgcgtacgtaagctcggaattcggctcgaggacctttaaccattttctgagggtaagaaccagagattggttggatcaacttactattttattttattcaggttggtggtccttaaactctggactaggaccggcttcttatgaatcatgacttcttcaatacctgaactttttgattaccatgaaaggcattccaagaaaggaccgtcaaaattccaaacccgacccccaggttctttaagaccaaagtccgaattttatggttccaaccttgtgttattaaaagccaatggaccatgaattatcccgcgttccaaatccttactacagaaccgtttttgcccagaaggcgtatcttccacatccttatcctggggtccaatggcagttaatgggattgcaccagccagaagttccatggcattgtgatgcagccaaggaacctgtttttgttaccgcaaagcattaccatggtatactcaggcgcaggcattcccggccaaaactg

SEQ ID NO: 124657 - DNA, 416 bp, Arabidopsis thaliana columbia
ccgccagccggaccgagaggctcccggggcgggaaaacacgaccccgaagggccaaaccacccggcgccaagccggcaccccaagacaaacgcccaggaagccccccaccacacgggggccaccagacaaactttttaagggggggaaaccggagccacgccccgcacagagggaccagaaccgccacaccgaccaaacaggagacgccaaccgagagaaccaagcacccccgcccaccacagaccggcggaaaacaaccgacaacggccagagaccccgcacaaccaagagaaagcaaaaagggagaacagcggcgaaacaaccgaggaggccaacgcgccagacaagaagacgaagaggaagagagaagacacaaaccaaagaaaacaaagaaaaaagaaaacacacaaaagaa

SEQ ID NO: 124658 - DNA, 285 bp, Arabidopsis thaliana columbia
  unsure (1)..(285): unsure at all n locations
gcctgcaggtaccgggccggaattaaacgtttggacgacgagctcactacccggagaaccccctttctttccgatccgcaggggccgtaaacccccgtagagcaggggaccagaagagaggggggagaagggcgcttagacgcgagacataacaagcgaactagaacggcacaccagcgcagaaacacaaccgcaaaaacctttttttttttgggggggggaggaaggacccacgccaaagacccgaaacgacgcngaccgccagagccgagagaagcggcgcgc

SEQ ID NO: 124659 - DNA, 542 bp, Arabidopsis thaliana columbia
  unsure (1)..(542): unsure at all n locations
cagctcatccnnnnnnnnnnnnnnnnnnnnnnnnnnnnnnnnnnnnnnnnnnnnnnnnnnnnnnnnnnnnnnnnnnnnnnnnnnnnnnnnnnnnngcggcctttttttttttttttgagtaactaatttactttctgaaaaggattttcacactggaaggtgaaaaccaaagggtgaatattatctttgggggaccaccccacttaacatttattccttttaaccttttttaatcttggaatcaatttcaaggttcctcttaacatcttccggtttcccccccaaatttctccttttggttccaaaattctccacttttaggaaatgctccacacacacacacctaaggtctcataacttcatatttccctgggtgttgagaaggagaaggccaaaactaggggtagacactgttttatacatggtcattgggccttgtttatagtatgtggctttcagtctctcaatctttgctccatttctacaccagtcttgatctcaatggtgaattcggtgtttgagtcctgaaactagatggttcc

SEQ ID NO: 124660 - DNA, 224 bp, Arabidopsis thaliana columbia
gccgggaccaggataaaaccgtttttgcccccggcaggacaagcacccggaagagcaccacacaaatcgcaaagccacggaaacccaacgaggccccaaaaaaaaggcaggcccgaagcgagggaaccgcaaagagagcaagtggacagagaacggaacaaccggacggagaccgcacgcagggcgacgagccaagaagccggatgcggcagattttttttttt

SEQ ID NO: 124661 - DNA, 301 bp, Arabidopsis thaliana columbia
tccaagggagggggaggaagcgcaaaacgaacgggagagtttagggaaaggagcgacgacaaccagggcaggcagggcgaaaaaaactaagaaaaaagggaacacaccaccagcccgaagcacaagaggatacacgagaagtgccccagacggacaagaagaggcgtttttttttaagggggtggagaagaaacaaacgcaagaaagggaggaagccaaaggaaaagacaaactaacaaacagcggagcgtacgaataatagcggaacgagtggagagagcgggggagagcgggagaaggg

SEQ ID NO: 124662 - DNA, 526 bp, Arabidopsis thaliana columbia
agcaaggagccaacagagtttgccggcgggaaaaaacccaaaaaacacggcgacgaaacaagacagcgagcaccgacggacaacccgggcaacaaaagggacacgcaccgccccccaacgcaaagacaaggacaagacgccacaaaccaaagggagcccacaaaaaaccccgcccccagaagaacagaatttttttcgcgggggggacaccaccaacaacaaagcaggaaggcccgagcaccacccgaccgaaaaacagcgaaggacccaagaaaagcgccaagaaaggaaccagcccgggcaggaagaagaccgaaggaaaagaaacaccaccgaaacgaagaggcacgagccaagagaacccagcgaaacaagaaaaaagagagaaaacgagagaaagcacggccagacgggaagacaccgaacaccgaagcgaggggaaacacgcaaaacccacagaggacacggcgagacgcaggaggagaagcacccagagaacacacaaagaacccacacgaagcacccc

SEQ ID NO: 124663 - DNA, 476 bp, Arabidopsis thaliana columbia
  unsure (1)..(476): unsure at all n locations
ccccccgcggcccggccggaaaaaaggttgggccgggcgaaaagccaggcagacgcctgaacatgagcgagagaaagacccgaaaggaaaaacccgccccacaaacgaggccagggaacacacgaaacaagaggcgagcgccggaaaagacacaacagccaggagaacaggcggccttttttgtaagaggggggggacacacaaaagnaccaaacagggccggagaagggcacggaacaccggaaggacgcagccggacagcacccacaccaacacgaggcaacaagcccgacagagaccaacgggagcgagcaaacaggccgcacaagagcgacgaagcgagcaaggcccacgcgaggggcgaaccgaaaaaaccaacacggcgccgggccaacacaaacaccgggacggccacacccaacgcaaggcccgaggccaacaaccgagagaccccgccagaccgacagaagggagaa

SEQ ID NO: 124664 - DNA, 446 bp, Arabidopsis thaliana columbia
  unsure (1)..(446): unsure at all n locations
ccctaccgaagcttgggaatccggcagaggattgccccgccggaataccgaacctctagactaaaatccgggtcgggtcttaggacggagcttcctcagatgcctgggcaaaccaaaagacttcctctggtctgcaaataggaatccgttggaccccaccttattgtgttggggggggcaagaacccaaaaacacgtttttttccacggtacgaccaccngcttctacaattttacgtccaaaaaggtgcctggggggcaaccatgctcgaaagcacaaggggagctcctttctgatgcacttccgaccacagcccaatcggagctggttagagcctggacacaaccaagaaaaaagaagcgctcacgtaagtctacggagggtgaaaagccagacgacaagtcgaggcgcttggccgggggcggtaggggcaacgaaaccagtgc

SEQ ID NO: 124665 - DNA, 385 bp, Arabidopsis thaliana columbia
ggaggtgggcccctgggggaccgggccgggattattggctggtccaaggggtccgttggccgggggcgcgccttgaatttcctttgtgtcggggttatatctggtaggtggccaaagcctctaaaagaacctgggtttagttgcggcccaggatttctggagatttagaatttttttttttttataggaaaacataattatgttcctcgaggtcaacggaggcttgctggcgactcggggtgtttgggcggacggactcccgcaacctagaggttaaaactttgttgttggatccaaacgctctctcgattgttgtggagagagtcctgaagttaagggttgaccacgccggtcttctactaagtccatgaatggtgcgagaacc

SEQ ID NO: 124666 - DNA, 507 bp, Arabidopsis thaliana columbia
ctatagaagagctatgacgtcgcatgcacgcgtacgtaagctcggaatctggatagagcccacacatgctcatccctttctttagtagacgacaaaagattcactattctcagcagatgatctacgatactcacagccgcaagaactgacctatcctcaacaacaaacaccgtaacgtgatcgctccataatacttcaacactggcaatgatcgcagtccactctgtatgatgcctacaaggaactcaagccgactacggagatcacgaaggagttcacttaccggtgaacggcatctaaacatactgccggaaccatgcgcgtagcttgaggctgattgaatatcggatagccgaggccacggaacgaacactgcggctttaagtgccgctctatccaacaacggatttacgtcaggcgcgtgatatctgatgaagagtgaccatgacctgactagttgtctcgtggcagccatgaccgacatatctccaaagttgttgccaccta

SEQ ID NO: 124667 - DNA, 533 bp, Arabidopsis thaliana columbia
  unsure (1)..(533): unsure at all n locations
acgcctgcaggtaccgggccggaattcccgggtttgacccacgcgtccgaactcttgtggccaagctgcctgtctggtttcttcccatacttcagggttcttccggacagacatcccggagagaaacttctggcattggccgagcatatgcaaacgccacgtgctagggggggatatgcggcggagaacgaaaatgtgtcttttgcagaggggngggcaagacccgctggaggcaccggcagggacttcaacacctccatcgaggaccagggaccacgccttcctgttggacccctaaaaatgaaatcgcgtcgcttaaagctttcccgtcctaatccgggaatcctccaccctaaggggccccaaaaactccggcaaggcccgcgttgacccctggcccctaggagatcccgttcctcaatttgcaaggaatacaaaagccccctttgcgcaagaaatcgtcccacaggaatggccaaaagggaaatcattcgggtccagggaaagccccaacatttgactttatcaaaaga

SEQ ID NO: 124668 - DNA, 499 bp, Arabidopsis thaliana columbia
acgtcgcatgcacgcgtacgtaagcttggattctttagagcggtcggcctttttttttttgttttttttcttaagatgacaaccttttttttgcacaacgaaatggtatcatctttggggcttggagaaaaaaaactcccctggttgacttaaaattttcggagccgaattattacccgggataatttacaatatgccctcttgttttttttcaaggggtgcaaaaatcctacaatggccccgtttaacccccggtttgtttaaagaatttattggaagggcctaaaggccgtaacccaaatgaaattttgcgaactttttggcagaagaatccaagcttgccttgaggttgaacctgtaccagaatttttggcttctgttatttaccacagctttttttttcctcttcaaaaaaacttgatccaacctatcaatggcttactacggcttaatttcaggtttgttggcgtttgtaatcttcaagcttcttccttttttt

SEQ ID NO: 124669 - DNA, 556 bp, Arabidopsis thaliana columbia
  unsure (1)..(556): unsure at all n locations
ccccccgcaagaccgggcccaaaaaccccttttagcccagggggcagggcccccaaaaccaaaacccgggacgnccgcccagaacgtgcagacacccaggagagggacccacccacacaaaccccacgncacaaacacccagcccaacgaaacacccacaccccgcaaccccaccaccgggacaanacgcggattttcctcctttggggggggggggagcgagccgaccgccagcggcaagagaagccaccagagaacacacacgagggggcggacacaccacagcgcacccggcgaacacacgggccagacacgggcccgcgagaagcagcgccgcccagaacgaccacacccacaccgacaagagcgacacggttagggaggagccaactagccctctgccgcataggctgtgtgactaacttgacagaatgatagaatatcacaacagcttaatataaagcaccccaagctgcatatacttcgagaatgcactcccactaagtataacccacgccaaaaaccaccctaaccccccggaaataaaaatagaaat

SEQ ID NO: 124670 - DNA, 407 bp, Arabidopsis thaliana columbia
  unsure (1)..(407): unsure at all n locations
tgaggacaccacgcgacttactggacctctaagaggttgcccaggggaggtacttaatacacccaccgcaagggcgactcccttcatgtgtcccctcgggcaaaacaaggcacactctaatgatacgctcgatcaccacctgacccatcgaacacccaaattattgttgggggggacaccaaaccttgctactctaagaaacatctgttagcgcagtcactctttcaaacatgtcagacctancacaccgcccactcttcaaggaggcaatatccaacgcataaagcaccgcataagcggacataaccaattattcttatcccaaccgcgcccaggattccctgactaagagactaaatcccaaacacctacaatactctaacatatctctcagaacaatcaacatt

SEQ ID NO: 124671 - DNA, 538 bp, Arabidopsis thaliana columbia
  unsure (1)..(538): unsure at all n locations
cnnnnnnnnnnnnnnnnnnnnnnnnnnnnnnnnnnnnnnnnnnnnnnnnnnnnnnnnnnnnnnnnnnnnnnccacgcgttcgggtttcgcaaggattaacgggaattgcaaagaagcagaagaccatgtgccgagacccttccaactggaatgaagataaatattaaaaattaattttgaaagaaccaaaaaataaaaccacccaccggtttaaaacccgctgggcttcttccggcaagattctttattcaaaacccattggtgtgaccctccaccgatggacctttagctttccattcactgaactcgctggtgtctaaatcggcaagttttggttactcgaaaggtcaaaatgttatggtggctgaacctgagagagtggttagggcacacgaaggtcctgcttatgatgttaagttctatggtgaagacaaagatgctttgctacttagttgtggtgatgatggtagagttaggggatggaaatggagaagaatttgctgaatcagatgtgtctcttcatttgaaagagaatcat

SEQ ID NO: 124672 - DNA, 497 bp, Arabidopsis thaliana columbia
  unsure (1)..(497): unsure at all n locations
cccgcaggaaccgggccggaatacccgggtcgacccacgcggagcgcagccccgcaaggancacgcgggaancgcaaagaagcagaggaccacgaacggagacgccacaaaccggaaagaagacgagcagagagaaccaacncccgaaggagcgagagacagacacacgcaccgggcgcagacccggcagagctttttcggcggagaggcgccaagccagacgcanggggcggagcccaccagcgagggaacccgagcgccccatacaccgaccgcgccggcgagccaaacgggaagaacaggccacacgaaaggccaggaagacaggggggccgaaaccgcgagagcggaagggcacacgaaggccccgccaaagaagcacgcacaaagggcaaaccaagacgccgccgccaccaagagggggcaccacggcacacaagggcgagaaagggacaaaagcgcccacccgagggcccccacaacgaaaagaaaccacg

SEQ ID NO: 124673 - DNA, 517 bp, Arabidopsis thaliana columbia
gcatagcacgcgtacgtaagcttggatcctctagagcggcctgccttgatggtatttttttttattagcggacacgccattcgttgaatggacagactaaaccggtcaaatgatatttctacggggaaatttgattgcaactccggaaccccgaaccagtttcacttaaccaaacaactaattggccttagtcaggacttgtccttagagggacaaaaaaaaggttttttaacctttgtaataatcggacagacacattccggaccccttttagggtattgaccctaaacaagaaactggcaggagttttacaaagaacgggtacgtaatgtgcaaaaatgcgttccaaattgagagatcacatccacaaatccttcttaacctcccacatcactatttctggtgggtggcaagggaaatggaaaaacttaacaaggggccccgggattttgaaaaatcaagcctctttttaacccaaaccgctaaaaaagtggttttgcttctcccaccaaaattt

SEQ ID NO: 124674 - DNA, 489 bp, Arabidopsis thaliana columbia
acgcccgcagaccgggccggaaaaaaggtcgaccaggcagaacgaaaccagagacgacacagaacaaaccgggggcggaccaccccgaagcgacaagccagaaaaaaggggggggagaggcaagaaagagcacaaaaaaaaaagagcagcagcgagaaaccgcccgaaaacgcgacgtttttttgaagggggggggcccaggacagaccagggaagagaaaaacgccaaaaagagggcccaaggaagaaaggaggaagcacgcaaagaaggagcggcgaaccgcaaagggacacccgaggaccaacacacagcgaaagagccgaaggagaaaaaaaagaagccaaaccgggacgagaaagagaaagcgggagcggaggagaagaaaaacgaaagcagacaggacagcacgcccgccgcaaagagaagagcaagcgcgcgaggaagaggcacgaacggagaaccccaagggagacgaaaaagcaaaaaag

SEQ ID NO: 124675 - DNA, 509 bp, Arabidopsis thaliana columbia
ccggcccggaaaaaaagcctggggggggagagaaacccacggcggcgcgccagaagacaaacgggggcgcggcagcgaacgcccccgagagcgagcgccacaaaaaggagggcgcaccgcaccaaaagccgggaaggcaaggcgccgggcgcgagccagagcgcgcaaacgccaaagcctcctcccaagggggggaggggggcacgcgaggcgagagacaggaggagacaagcaccccccaaggggcgcgggcggcagaaaaagccgcagaaagaacccgcaggggggagcacaccaaaccgcggaaaagagcgacgagcggaacgaaaggcgggggcaagggggcgacgagaaaagggagcgagagccgagcccccgacgaagagaaaaaaggaggcaagccggagaagaaaggcgaacgggacggcagaaaacgacgaccacccgcacgacgagacgacgaccaaaccgagggccgcccaggcgggcccgggccaacaaagcgggca

SEQ ID NO: 124676 - DNA, 496 bp, Arabidopsis thaliana columbia
  unsure (1)..(496): unsure at all n locations
cccgcggaaccggnccggaaaaaaggtggaccgcgggcaaaaccgcggagacacacacgcgacacagacgcgaaagcaaaccggggcagaaaagaacacgcacaacacgagagacaaacccacaggaccacaaaaagccaacggggagaccagagccggacagcaaaacccacacaaaatatttattttagaggggggagacgcagcgggccccagaaaaccgcagaggaaggccaccaagagcgcccccgggggacgacaggcagacgaaaggggaagggcccaccgccccagagcagagagcaggacacccagcccggcgaaggagcagagacaggaagaagacagacaagacggcccaggcacaaaagagaggaccagggaggacggccacgcgagcgggcaaacaggcgcgcccggcaggagacgcgaacacaccgacgggaagagcgcacagacgaaagacaccgcacaagccagcagaaaaaaagagaag

SEQ ID NO: 124677 - DNA, 501 bp, Arabidopsis thaliana columbia
  unsure (1)..(501): unsure at all n locations
aagcccggaaccccgccagagggctaccccagggcgaggaaccccaaagaaaccaccgcaaagaaagagaggggaacagccccgcngagggggggggacccccccacaaaacgaagggaggggggacacccgggggaacccagggaacccccggaggcggcaccgccgcgcaacgggaaaggacttttttttagggggaggaaaaaaggaacccccccaccccagccagagacaacacccgaagccaaccccagacaagaacacacaagcaagaacccacgcgggaaccaacaacggcgcaaccggcagccaacaggaagcaaaccgaggaccaaacacacccggggcgccaaagggcgcgggggagaccaaacccaagagccacgccaccccaaaaagcccaaaaaagagcccccaaaggcggaaacaaacaaaaaaagcccacggccccacggaccggggccgccgggagacgacccccaacaccccaccgaggaagga

SEQ ID NO: 124678 - DNA, 555 bp, Arabidopsis thaliana columbia
  unsure (1)..(555): unsure at all n locations
gaaggctgggacccccaaaaggggcgtccctaggggggggagaaacctctccaacagacaccccaaccgcggaggggggcgaaattggaagggggaaggcggacggggcggccggaacagggcagggcggcccccccaaacggcaaaataccggggcccaaaaagaaaaccgacccaaaggggggggccccctttattgtgggggggggagaaaaaacacccccgggccccccaggagggggcacggaanccaccaaagggcaccgcccggggaaaacccagaggggacgccgggggcccagggggggcaaaaaagaaggagggccgcccgggggggggggcgggccgggcccccggggggaggggaagaggacacccacaacagcgacaaggggagggggggaaccccgcgggccgggagggaaaagaagngacacacccccccccccaagggaaagggcggggcagagggggcccccccaccgggaagggcgcgccacccggaaccccacaacgaagaaagggggcacaggggcaacccccccgggggcgccc

SEQ ID NO: 124679 - DNA, 592 bp, Arabidopsis thaliana columbia
  unsure (1)..(592): unsure at all n locations
cgcgcgcgaaagcaaggaaccgcaaaagcggtctgtccagggggacacaaaacccaaaagccggaaccacagacggcaaagcggggcaaaaaggcgaggaagaacgcggcagcggcacagcaggagaccaaagagcaagcgaagcaagaaaaacacggaaggggggccgacccccacgaacgcccggagcgcagaggacggcggacacgggagacagagcaggaaaagcatttttatttcttgggggcgggggggagaacagacaggccgccagggcggcgccgaagaggacccacccaacgcggagaaggacgaacaggcccagganacaaagacaggaccccggaggacagggaaccgcgcagccaagagcgaccccaggcgccacgcaagaccaaggcacgaagaaaggaccccagggggcaccgggcccacgagccaaaagaaaccccgagaggcggaacaagaggaccggcgacaccgccccaggcaaggacaacgggggcgaaaccagcaaacaccaggcagcgggaggaaagagaaaaacaagacgaagaaacgggagaaccaacccaagcgggagaggacggaa

SEQ ID NO: 124680 - DNA, 459 bp, Arabidopsis thaliana columbia
cccgcgggaccggcccggaatacccggttcgacccacgcgaacaaacacgccgggagagcaggaacacaccacacgggagggaggcacacggaaccagggagacacgcgggccaaagcaagagaaaagaacgcacaagaaaaagggcggcacgcaaacaaaaggagaggcaccccccgaaggggaattttttgtgaggggggagagagagccacgccagagcccaccgaaagaggggagaaggacaaggagggaggaacacacggcaaggcgacgacgcagaggggacgaccacccgcgacaggacacaggagagcaagccacaagcacacggaaacgccaagaaaggacgcaagccgacaaacaccaggcagcaaggaaacggggaccaagaaaggaaagaccccccaccaccgcagaaaagaaccacgagcgccgagacgcaagaggcgcggagggc

SEQ ID NO: 124681 - DNA, 474 bp, Arabidopsis thaliana columbia
acgccgcaccaaagcaaggaagccccaagagcgggcgtcccagggggggagggaccccaaaaggggcaccacaaccgacaaggggacgaaatggaccgggacgcgcacccggggcaggggcacaagccagccgcagaaaacaaaaacgggcccccccccaggcccccaccccagaagccggaccggcacagagggaaagaatttttttgggggggggaaccgaaagcacaggggcgcaaggcccaaacaggaaaaaggcgcaggccacgcgaggggcaaacaaaaaaaaaggaagggggcgaagagcccgcccaggccacagcacgagaggaacacgaccagcggccgccgggccacgggcgccaagggagaaggaaaagcgggcacccgcggcgcggaacgcgggacggagaggagggagggcaacgggggaaaacgaagccgaaccgaagcacggggaggaggaggaaccca

SEQ ID NO: 124682 - DNA, 428 bp, Arabidopsis thaliana columbia
atcatatagggagctggcccctgcggtaccggccggataatggcggccacggttcactagcggggcgcctgaacacatttgccggtaattcgagagctgcgacccttaagaatcaggaactctgcagattttggactagattttttttatagaactattttccacgggtaagagagtggtgcaatcgagtatggctgacgatcccgaatctagaggattagacttttatggtggatccaaacgctctcttgaatgttgtggagagaggtctagaggtcagggttccacacgcctgtctactactaagtccatgcatggtgagaacacctatgaagaagaaagctccgaacatctcgatgttgatgatgaagaggaaccgctcatccagtcggtagaatgtcgtatctgccaagaggaggataccctta

SEQ ID NO: 124683 - DNA, 250 bp, Arabidopsis thaliana columbia
ctatagaagagctttgacgtccatgccgcgtacgtagctggatccgataggccaactgcctccttcattgtgacgcaaaatcactttctgcgtaacccatctccaccgaagactacctatctcacaacaacgacgaacgtgtcgctccaactactcacactgcacgctgtcagtctaccctgttgatgcgtcaaggaactcaagccgacgacggagatcacgatggagtacacttcccgtgaacggatgt

SEQ ID NO: 124684 - DNA, 403 bp, Arabidopsis thaliana columbia
  unsure (1)..(403): unsure at all n locations
ccagctctatacgactcactatangnaaagctgtcgccctgcagtacggtccgaattccccggtcgaccacgcgtcggctttttttccagttgctttttgggttttcccattttccgggttttccgaattgcgactttggaacaaaattttaaattagggggccaaaaaaaaccacttttttgggggggtattttcgcggaaaaaaaaagggttgttttctccaaacgggtttcccccccccggaaaaccctttttttttttttttttttttggggaggggggttttttctctcttttaaccaaaaaaaaaaattttgtttttttttttttttcttttgaaaaagaccgccctctataaaaaaaaaaaaacgccggtggtttgttttttcttttttttttttt

SEQ ID NO: 124685 - DNA, 473 bp, Arabidopsis thaliana columbia
  unsure (1)..(473): unsure at all n locations
ccccgcgcaggacccggcccgaaatacccggtccgacccacgcgtccgaaaggctacaacacaccacacggaacacgcggccgcggaggcgctatatcccatcatcggaccgcctaaccggaggcagacggccggcgctgcacccccccgaaacctccatcaaccaccatccgaccacacagagcacaaacctttttcttcgagagagggggcagagagcgagctgnggaggtcaaccgaagcacggaacaccccccgctgcacaaagcagaccaagcaccactaacccgcgcgcgacgcagacggagccaagactgcagaacaaaccacgccgacgaagcgcaaaaggtactaaccgacgcagcggggacgggccaaacagagaaaaacaagtgcgcgccggaacgagggaccaccccgatgggccgaaacgcaccagccaggcccggagcggcggcggaaagcaaggaaaa

SEQ ID NO: 124686 - DNA, 524 bp, Arabidopsis thaliana columbia
atcacaagagcttgacggcgcatgcacgcgtacgtaagcttggatcctctagagcggcctcccttttgttttttttttttgaaacctagaaccacggtccaatatgttgtgatgtttacccttaaaaagcttgaaaaaaaaattacggggccccctttgatatcaacggccccaataatgccaccaccaaacttttgtggccaagcttacataaaaaaacttctatttgtggggttacacacctccccaaatcttttgtcttatatcaaatactaccccttgaacaaaagaatacacatagatccatgtatatattctacctccgcaaaatttactcccccttttttttttatggctcccccttccgccaaaaagttccttaaaaagggatacgttcccttaaatatttggtgggccataaacttttctttggggttggaaaccttacaaagaccacgggcgggtttacccgcgcaaaggacccattgttgatggccccttagagcggttgtttttttccacaa

SEQ ID NO: 124687 - DNA, 547 bp, Arabidopsis thaliana columbia
  unsure (1)..(547): unsure at all n locations
nnnnnnnnnnnnnnnnnnnnnnnnnnnnnnnnnnnnnnnnnnnnnnnnnnnnnnnnnnnnnnnnnnnnnnnnnctttttttttttttttttttttttttttttttttttttttttttttttttttttttttttttttttttttttttaaaaaattatgggtttccctttcttttcaaggcccccaatttttccccccccaaacatttttggcccaactttatcaaagaaacaacattttcttgctttacacacctccccacatttttttccttatttaaatcttcctcccttaaacaaaagatctaacataaattccttttttttttatacattctcacaatttcatcccctcattttttttattgctcccccatgccccaaaatgtcccttaaaacggaatcgacccctcacaattttggtttggccatcaacttgttttcgggtgggatccttcccgagccacgggcggttttcctaccgaatgatccaatagttgatagtcccatgaagctgttgtttttttcgccaaggtttattgatctttt

SEQ ID NO: 124688 - DNA, 505 bp, Arabidopsis thaliana columbia
gcacgcctaccgaagcctggaacccctagagcgggcctccctggggggtatttttcttttttctacttctttaagatcatttgggggtactttttaatttctttggggtttacaaaaaaatagggggtcccccttccaaatcagggacccaaatattcccaccaccaaccatttggggcccaacctaaacaaaaaaacctctcatttgggggaggacccccccccccaaaagttttcccttattaaaatctcccccccttaaacaaaagacccacccaaaatccccctaattctgaaccacccccacaattccctccccccatctttttaatggccccccgagccccaaaaagggccctaaaaagggaatcggccccccacaaagggggttggcccacaagcgccgtgtccgggggggaaccccccccgacccaggggcggatttcctcccgagagacccaaagggggggagccccgggaagcgggggcttttttcccaagggtt

SEQ ID NO: 124689 - DNA, 500 bp, Arabidopsis thaliana columbia
  unsure (1)..(500): unsure at all n locations
gcaggaaccggccggaaacccgggtcgacccagcgcggcaacctcggcggaaaagccccggttgttttgcgggagccggcgaagctctaggaagcgggaccccggcggggacacgcgacccaagcgaaacagacagccgagagcgaacaaacaacgcagcgggcaggctcctcacaattcctcgagagagaggggcgcggacggggaccaaaacaaccnccgagcaccgccacggaggaacccagggagagcccaagagacccagcaccaaacagaggaaggaaccggcccgccgcaagcacagaagcagccccgccgccggaggggcgagcacagagggccaacccaagaggagggacacaagaaggcccaggaagggaaacagggcccagacacagggagccggaaggcaaacaccgggaacccgaggccacggaccccccccgccaagagacccacacaggcacgcacagggagagagggcggggcccacaaggaca

SEQ ID NO: 124690 - DNA, 512 bp, Arabidopsis thaliana columbia
cccgaccgaagcccggaaccccgaaagggggccgtccccagggcgcggagaaccaaagaaacaaaccgcccacaacgaagaggccccaagcccacgtgcgaggaggaggacccaccgccccaacccaccaagagagagggaaccaaggggacacccgacgaagccaaagaaagccagggagaaacccacggggggcaacgctttttaaaagggggggaaaaggggccccacacccccagggaaaggcaaaaacgggccggggagggcgcaaaagaacacacaaaacggggaaagaaaagaaggcccaccagcggaaagagaaacaaaagcagcgaaacagagaaagcaaacaacacgggcagagacccacgggggaagcaagaggggaaaaccccggggaccccgcccccggcgagccgaaaaaccaacccagggagggggagcaaagcaaaaagaagcgccccggggggacggcacacggggggaaaaaagaaacaggcgacggggcacaa

SEQ ID NO: 124691 - DNA, 494 bp, Arabidopsis thaliana columbia
aagctacccgcctgcaggtaccggtccggaatcccgggttgacccacgcgtccgaagaaggagataggactatctgtacccttttgcacttctatggagttctgagagatgaagaagaagagagacctctgtctgctgttactgcaacaacagacagatgcccggcttgggacaagagagtagacgccattgacttgtagtcattggagggaatgccgcaaaacgagcgaggcgtagggcacaccgattgcaaaggccctctactgatgcggaagtactcatacacgaaggtagcgtctgatcgaaagacccatgtagaacagggggttacaggatgatggaatattgagcaagatagtccaagcctatgccatgaccaggacagctatggaatgaagatagagatccaaacgggttatcttcctcgtatagcggaaataagaggattagaccggcctgtacaaattggatttttccccatgagatcctcacca

SEQ ID NO: 124692 - DNA, 567 bp, Arabidopsis thaliana columbia
  unsure (1)..(567): unsure at all n locations
acgcgtacgtaagcttggatcctctagagcggccgtccttggggggattatttcctttttagaattatattattgtttaggggggataatttttattaaagatgttgaatggggtggccaaaacccgggaaaaaactgcccttcacacaagggaaaaaggggcgagggcccaaaaaaaagaacccaccaaaaaaaagggaggcccactccccataaaatagcggtgagaaaaagggcccccccaaaaaacaacagcattttttttcttttnnccccccaacggagacttggggggttttttttatagatgaaaaaaaggcccccaagaggccacaataaaaaaggatcattttttttttttggggacagaaaaaaatatttctgtgggtttagaggtttgtgcttctcaacaagcgggaaaaactaaaaaagggtgttaatcccggggattggggcaactgttttttaattctttctttttcaaaaggaaaaaactccctggaggtcggacccataaaaaaagaagtgggccatatgaaaaggtctatttataaaaaatttgtttaa

SEQ ID NO: 124693 - DNA, 507 bp, Arabidopsis thaliana columbia
agggggcaggcacgcgtccgtaggctgggatcctttagagcggccgccctttttttttttttttttttttttttattcttttttttttttttgttttttttttttggttgggccccagggaatgggacaccccattttccggaaggagtcaacgggaaccttttccaggttaaaccaagaattttttccttttgggtgggaaaccttttttttgggggggattaaaaaagaggggggggccttagcttttttacttataaggccaggggccttttgcgccccattataaacgggctgggggggaagcaagcttttaacaaccctgaaatttatagacaggtccatggctcccggaacaggaattaagacttcttgtgtcccctttttggttttatttttaacggaagagggcacatttttttcctttttcgcatcaagaggtgggaggggacatatacaacctttcaaaggcttttggtatttttgggggggagccaacgaaacttt

SEQ ID NO: 124694 - DNA, 541 bp, Arabidopsis thaliana columbia
  unsure (1)..(541): unsure at all n locations
gttgcnnnnnnnnnnnnnnnnnnnnnnnnnnnnnnnnnnnnnnnnnnnnnnnnnnnnnnnnnnnnnnnnnnnnnnnnnnctttttttttttttttttttttttttttttttttttttttttttttttttttttttttttttnttcacaaggaattggacaacacattttcccgaaagaatcaacagcaaccttatccaagttcaaccaagaattttttcctttttgatgggaaatcttttttttggggttcattttaaaagaggggggggccttagctttttcacttataaggccaagtacctttttcggcccattataatctggctggtggtgaagcaagcttgtaacaaccctgaaatatttagacagatccatgggtcccgtaacagtcattaagacattatgtttaccccttctgatttcatttctaactgaagaagtcacattttttttctttttcgcatcaatagcttggaggagacatatacaacacttcataagcttttgtagtttttggtggatgccaacagaaacattatt

SEQ ID NO: 124695 - DNA, 498 bp, Arabidopsis thaliana columbia
ggaaggcagcgcccctgccaggaccgggcccgaatttccgggttgacccaagccttccaaaatggcgggtggagtgggttaatccttaaaaggagggagaccacggacccttatctcctcctggtccactgcattggtaaaattggtccttgataaggtttggaaccatataataagcatacttacactggtgggggaatttatgttgacacagatggatagccactcaaagcctatctttgaggggtttatatcaatggccattccatttgggctgtctaaaactaaaagtgaggagcagttgttacagattttggtgaaagtcttacctgatattgtggagcatagaaggcgttcaattgtagctcacttgctgggagttatcggtgaacgaaatggctggcctgcttggcttgtcctcttatttaagtctttgatttcaagaaaagactcagctgggcttggtaatgccaacgtttctgaaagttttgcttccat

SEQ ID NO: 124696 - DNA, 532 bp, Arabidopsis thaliana columbia
tatagaagagctttgacgtcgcatgcacgcgttcgttagcttggattcttttgagcgggcggcctttttttttttttttttttttttttttttttttttttttttttttttttttttttttttttttttaccttggaattggcaacccatttttccgaaagaattaaaaggaacctttttccaggttaacccaaaatttttttctttttggatgggaaatttttttttggggtttaatttaaaaaaagggggggcctttacttttttacttttaaggcccaagcccttttttggcccaattttaattgggtggtgggggaagcaggttgttaccacccttgaattttttggacggatcctgggttccggtaccagtatttaaaacttctggtttccccttttggttttcttttttaccggaaaaggccacttttttttcttttttcgttaattggttggcggggaacttttccaccctttattaacctttgggggtttttggtggaggccaacaaaaactttttttttgggt

SEQ ID NO: 124697 - DNA, 498 bp, Arabidopsis thaliana columbia
gggaaggtgggacccctggcgggaccgggccgggatttacgggtgggaccaaggggtcggttgaccgggggtggaccttaaaatttctttggtccgagtttaatttgggaggtggccgaggcccttaaaaaaacctatgttattttggggaccccgatttttgggaatttggaattttttttttttaataggaaaacaggttttttttcatggaggttaaaggaggctgggtggcgactcggggttatggggcggacggagtcccaaaacttgaaggttaaggctttgttgttggatccaatcgttccctcgaaggttgggaagagagacttgaagttaagggggccccaagccggttttctacaagatctatggatggtaggaaaaccttggaagagaaaggagcggaccaccccgatgtggatgttgaggaggaacggttcatccgttcggtggaatgcctaactggccaggaggaggctacctttaggaacctcg

SEQ ID NO: 124698 - DNA, 468 bp, Arabidopsis thaliana columbia
acgtcgcatgcacgcctacctaagcttggaatctgggtaggggccacccatgcccttttctttcatttggtgaaggcaaagaattcacttttcttggccaggtgaacccctattctccaaaccggtttgactgatcccttctccacaaaaaacaacggtacgtggtagattcataacagttcaacattgccacgaaggcaactctaccttgaatgagccttccaaggaatccaagccaactccggggataacgatggatgtcccttcaccgttgaagggatggtaaaattcctccgggaaaatgggggtacgttgaggcgatgaaaattaggctggcgggggccagggaacgacaacgctggtttgagtggcggttctatccaccaccggcttaacatcagacgcgtgatttttgctgaagttggaccacaacctgcctggttttctctgggcagccttaacggacta

SEQ ID NO: 124699 - DNA, 503 bp, Arabidopsis thaliana columbia
  unsure (1)..(503): unsure at all n locations
cgcctgcaagtaccaagtccggaattcccgggctgacccacgcgtncaaccacgcgtncgcccacgcgtccggagacgcgtggagaagcgcccgcatgagccctggagccgaggcccatgcagatatcccgcgctcaaagaggcagaccctcgcatgagcgatccacaaaagatgaaagaaagcaaacaagcccgtaccctttccgagaggggaangccaaganagccaactccgtgaaccccagacccccgaagcacgggaaaccgacacccccgtgcaaaacgaaggcctgacccctgctgacaaacaccacacacaaacaagcctaaactccccgaaccccgcacgatagaaggaacccagaacccacacaaggcccgaaagaagacccagaaacggccccgacaagaacaagaaccaaacggaaaacccgaacccggaacaccaccacacccccccacgcaccacaagcccaacaacgggaaccaaggacccccgcaaa

SEQ ID NO: 124700 - DNA, 421 bp, Arabidopsis thaliana columbia
  unsure (1)..(421): unsure at all n locations
tatcgaagagctttgacgtcgcataccacgcgtacgtaagcttggatcctctagagcggccgccctttttgtttttttttttttgtttttttttttaagggaatccaagaaacatacctctggaaatgggtgtgagatgaaacctttgccatcaaacaaggaaaggctttacaagccctgaatccacgaatgagaggattcgggccttctaaaagatgcaatccctcaatcgnggtggccngcacccgacaacatcgacacacatgaaaaaaactagatgcgaaccctaaagcacctgtgatgaaataggaaatacattcactgtgttgcacccctattggaggtctgcaacaatcgggacctagctttaagccagactcaatggaggtcctaacaaccggggactggaccactgtgccaa

SEQ ID NO: 124701 - DNA, 501 bp, Arabidopsis thaliana columbia
tacgactcacactagggagaagctagtacgcctgcaggtaccggtccggaattcccgggtcgacccacgcgtccgaagcaatcgccgcaagtatcaacagacgacagctagtgtccggcggtgaatccgtcgctcacggcaggagcaaccaccagcaccacaaccctagacgacactgcattcgcgaatccaatgtagatcgaaatcaaaactctctagaacttcctatgctgaatgcacgaagacaaccagagctattcggaatcaaaatcggctctgacgtcatcaccagattcattctcaccaccgtgttctgacgattagataatacgcctaaaggacttcaagatcggttagggttcttcgccttcgcgatgtcgacaatgttctacacttgcgccgaagcgttaccagtttgtctccaggaacgttatatcttcatgagagaaactgcttacaacgctgaccgaagatcctgatacgttctctctcacgccatcg

SEQ ID NO: 124702 - DNA, 466 bp, Arabidopsis thaliana columbia
  unsure (1)..(466): unsure at all n locations
ccgcgccgtaagctaggatcctctagagcggctgcccggggggggaaaggcccaacaccaaaaaaatagcaaaaacgcgggggggaggtggcacaaaacagaaaaccggcgcaagaaaagaggagtgcggggcaccacgaggacgagaggagaagaggcccggcccggcggcacaccaacagacagcannncnttccctacaagagagtagggaacacaaacccgagacccnccgggaacgcgggaggaaaaaaagagggggggggggggaggccaacaggcaaacaggccccancaggagaaccaaaccagaacgcgacgaaacgaaacccggaggcggacggcaaacacaggaagcccacaaaggaacaccaccaaagngccgcgcgggggaccaacaccgagcggggcgcgagccaaggaacagggacacggcggcgacccggaccccgaagaaaaccgagag

SEQ ID NO: 124703 - DNA, 508 bp, Arabidopsis thaliana columbia
cgccccgaaagcaaggagccgcaagagcggcctgcccaggaggggagagaccccgccacccaaactaacaaaaaaaaaaagggcacacaagcgaaaaaacgccgcccgacgcccaaaaaaacaaacagagcgaccccaggatacggacacccacacaaaccaacacacacgccaccagaagcccggcgagaaaacaaacacccctgagagggagatgaaggaaaacccgggaccacggccccggagcaagaaacgcacccacaaccgagagagcacaaaaaacccccccccacaacacaaaacaaaaaagcggaacacccaacgcccgcccaccgcgggcaaaggcaccccgcgcacagaccccccgggcacagcccaacccgcacaaggcaaggaaccacggaaacgaccgaacccaaaacgggaacaggaacaccaccaccagaccccggggaacccaaaagagccgaccccaccccccccccccggccaaccaacaccccccccc

SEQ ID NO: 124704 - DNA, 562 bp, Arabidopsis thaliana columbia
  unsure (1)..(562): unsure at all n locations
cgccccgcagaccgggccggaagcccggggttcgcggggcggcgaaagcccggagcccaggcccacacagagagacggcacgcacccgccggcggaagaacaaaccggcggaaagagcgacgnacccgcgcacccagaacaacgacggccgaccgagggaaccccagaagcgagccggggacggcgagacccttcttttcaaagcgggggcagnacaaccagaccgggagccgcgccacgaaccaaacagaccgccccaaggggcgccggcgcgaccagcccagccgcacgagcacaacagcgcgagccaacgcgcgaaaggagaacgggggcccaccgagcccaggcgccgagagcaacaccgcaaaggagaaagccgggagaaagggggcgggaagacagccgaaaacccaaagacaacgagacacccgcggaagggcggcgcaccaccggagaggacacaccgcgacagacccagaaagcacgaggcgaacgccaaccgaagacccggcacaggcgaaccacacaagcgcgacagccgcagcgcgggcccgcaaggcac

SEQ ID NO: 124705 - DNA, 369 bp, Arabidopsis thaliana columbia
  unsure (1)..(369): unsure at all n locations
cgcgtacgtaagctcggatcctctagagcggctgccctgggggggttagttcctcgatacgcggttcgccaataaaacaaaggagcggtttagtaataaatgcgtaatgagcaccaataaactacttacaacaaaaaagttttccgacctaagataaagatctttgacaaaagaaaacccgaagagaaagaaatatgtgagtgggggggcgaaaaccggcgcgccgaaggggaacagagggccncaacggggcgaggaaggggacacccccaaccagcccacccaaagccccgagcacgcgcggcggaaagggacaggccccccgagcccaagacccgaaggagggccgaagccaccgaaacgggcacg

SEQ ID NO: 124706 - DNA, 321 bp, Arabidopsis thaliana columbia
ggccgccagccgggaccacagagagggggcaggccgaagaagaacgcgggaaggagacccccaaaaacgacccccaggcgccgagcgacggacgaagcgggaaccgaacgaagcaaagacgacccgcagacagagaggaaagaagagcctgccttctaagagaggcagggggagaaagacaagagagagagaccgacgcaaaacggagacgacccgacggcgaagggagggggaccaccgcggacgcagcacgagcagacggaacagaaacagcagcgcggggaggagcgggagacgaagcagacaagggcgggagagggc

SEQ ID NO: 124707 - DNA, 470 bp, Arabidopsis thaliana columbia
  unsure (1)..(470): unsure at all n locations
cgcctacgtaagctaggaattcggctcgagattaaatggncgcagaagagacaaaccccatcaacatgaactctatgtctgcaagccttgcaagaaccggtcaatgggttttttctcaagatatatcgaccgatgctgtggttgaagtcggagaaaccaattcctctcttcataagttcatgggaggggcttggctgcttctggtaaggaagcnaanaagggaagccaaaagaaacgacgngacaagaancaaccgctcggatatacccggaaggcctgagacactcgagaaagccggcaaagccaggaacggaganaaccccaaaaacaccgaccagaaccgggcggctcttcattgcccaccccagtttcttcagatgaccaaatagtactgcgaacacaaccttggtgggcggacacaataatttcctctctcaagaaagctctctataggctattttggacctatc

SEQ ID NO: 124708 - DNA, 487 bp, Arabidopsis thaliana columbia
  unsure (1)..(487): unsure at all n locations
cacgcctgcaggtaccgggccggaattaattccctggtcgaggagctcactactcggcggccgcccttngaactctatgtctgctagtcttgcaagaacccgggaacgagctcattctaaaaaccaagcttcttaagcagttaacacacacaccccaaaaaaaaaactctcgccacaagaagggatcaagaatctttttttaggggggggaggaanacaccacacacaaacacacttagagcaaacagccgattttaaaagatggaaataccttcgcctcctcggcttaataaaagaaacaccccctagaacttcatctatgtcccaaagatccctagacccaacttaaaccgaattaacttcccaaaactcttggaaccagcaaaaaacaaaggcagttaggtcttgctaccactcaccaacaacgacatattcaaaaaaaaactccgcaccctgcttttttttttgcatatcccaaaatacatgt

SEQ ID NO: 124709 - DNA, 433 bp, Arabidopsis thaliana columbia
cgcctgcaggtaccgggccggaattcccgggttcgcccacgcggccggggacgcgtgggtgatttatctctcgacgcctggcggtctgtttctaacacaagagcccagcagacagaataacaaactcgtcggactctaaccacccgaaaagaaactgagaaccacgtccggtcacaacgcaacaatgggatcaaatagcaactgttcttttcttaaggggggggaggacacaagatacactaccgtataacccctcaggaggggacttgctccactaacagacaccgtcgcgtcaacaagcccacccaatggtgtaaaaggtggtcctgagcgattaaaaataatgacctcaacgaacagggataggagttgcttctaaccgcgtaggccgcacgtggccgatcaaatctaccatgaacactcccagcccacg

SEQ ID NO: 124710 - DNA, 483 bp, Arabidopsis thaliana columbia
  unsure (1)..(483): unsure at all n locations
gcccggaagaggggggngggggagaaagcctctagggggggggaaaaccaagacgccaggacacccgaaagaggcagagatttttggacgaaaaggaaggaaggcaaacaaaactagagcagaaggaattgagcagacagaacgaatcagacagagggagagagagaagggaggcagaggcttcctcttagggggggggaggaaaggaggggcagagaggcaagacaagaggcgaaggcgggcgacggaagacggaacgaagccgagaaagaggaaagacaagcaggggggagccacagaagaggagacagagacgagaacagagcggacggagaaaagcgccgaaaacacaacaagagcaggaagaggcggcaggagcgagaggaggaagggcgggaaccggggggcggggaggaagctacgcgagcggaaaaccacggcggccgaacaagaaaaagaggaagaaagagaactaagaagaac

SEQ ID NO: 124711 - DNA, 501 bp, Arabidopsis thaliana columbia
acgcctgcaggtaccggtccggaattaattcccttgtcgacgagctcactagtcggaggccgcccttttttttttttttttttataaattactagatggactggttaatacataacagttcatttgataaaccatacacattaggcattccattaaccattagttgaaatggcagtacaaaaacaagggtgtagataacatcttttccttttgagggccaataaacccaagaaccttattccaaaaaccatgactttggacagctgaaccaagctcaacaacagtggagctacaagcaggaacagtccaatacccttccaagaactctggttttaactgctctttttcccaaccacaattcccattaaaaaatctaagcttacttgttccaaccaaattcctttttaccatgctttgaaccaatcctacacttctttttgttccataatacaatcctttaataaattggtagaatactccggtcttaccaaccttgttgga

SEQ ID NO: 124712 - DNA, 512 bp, Arabidopsis thaliana columbia
  unsure (1)..(512): unsure at all n locations
acgccccgaaagaaggaggggacaagacgttgacaggggggggaaaccccaccagggcgaagacgaccgcaaagcggcgcgcgttggccgccaaaggcggagggggcagcacngaaaanaacaaagcccaccacaacagaggncgggacgngacacagagcaacgaccgcggngccccganccggggacaacacaggaagcctgccgtccgagtaagtagggaaaagaaaaaccggggaggacaaaggagaaagagccgcaccgaacgggaggggacggccaacgccccccaagggaaaaggacaacgggcccgggcagccacgccgaaggagaacaggaccacgcccaacaccgcaagaacagcaaccgaaagcaaaaaggccaccgcgaagcaacacgagcaccacggacaaagagagaaagcccgacaaggaccaccaaaaaccgaaaaacaaaagcaacaccccgcacgggaccgccagcgaaaagaccagcggaaacccaccccccg

SEQ ID NO: 124713 - DNA, 486 bp, Arabidopsis thaliana columbia
  unsure (1)..(486): unsure at all n locations
accccccgaaagcaaggaaacccaaaacccgtttcccccgagggagaggccgccaaaaaaaaaaccacaaaaccccacggggaccacttcccacccgcacgggcaccgacacccaaggaagcgaacaccggcaacacaactgaaccggaacaccaacaacaacgacccggggcgcgaccaaaaaaaaaaaaacaattctacaaagaggtggcgacacaacccgcgccacccacaaggaaaaaaccacccaaagagggcgggcgccgcgaacacccccccaagaaaggacaacccccaggcacaacccagcaacaaaagacaccccccccaacaaaacaaaacccccaccgggcaaaagcaaaagccacacccgaagnagagaccaaacccgacaccaaagacggccgcgacagcaccaaaacccagaaaaaacaaacaccccccccaccccccccccccaagganaggaccacaaacacccccccc

SEQ ID NO: 124714 - DNA, 450 bp, Arabidopsis thaliana columbia
  unsure (1)..(450): unsure at all n locations
gagcggttttgccggggggggggaggggcccgccccacacaaacaaaacaanaaaccccacaaagaacaaagcccacccacagggagaggggaaaaaacgaggcacaccaaccaaaaagccctgncaaagaccccaaagcacgaaacagagcacccggggccgacaaaaaccagcatttttttaagggggggacaaaaaaccgccccccaccccaaccngaaaaaagaaaaaccgaaaccaaagagagccaccgaccccatcagaagcaaaaacccgggggccccaaaccccacaaaaacaacgagccccagggggaaggaggacccggggaacaaaacggggacccggggccgcaaggaagggaccacagaaaaaaaagggagcagcgggcagaccccagacccggagaaacaagaaccggccccgcgcgcacccgaggaggggggaaa

SEQ ID NO: 124715 - DNA, 487 bp, Arabidopsis thaliana columbia
  unsure (1)..(487): unsure at all n locations
acgcacgccaacgcaagctcggaaacggagccgcggttaccaaagggggagcgggcaaccaagcccagnaccacaaacgcaaagcggaccagcaggccgagcacaagcgccccgcacccagaaanaaaggacgaccagaccgcacacagccgcccgcaccgacgaccccccagccagaaagcagagacacaaaaaggaccctgagagggggtaggaancaccaacccgggacaaaaaggaacacgcccgacagagccccagggcacgccaacccacgacccgggacggaaagagagcgacacaaccagacgcacgaggaagagggcccgccgagaccaccacccgcaaggaggaccggccaaaaccaccccacccaacgggcccccaacaacgggacaggacagaaccccacacaccaacccaagacccgcagagccagagcacccccacccccgccacggacagcaaagagaaacgacccaaagcc

SEQ ID NO: 124716 - DNA, 341 bp, Arabidopsis thaliana columbia
  unsure (1)..(341): unsure at all n locations
ggaaccnggaaagacccttacgggggggggtaagaactcccaaacccaaaaacaaactaaaaaaggggggccctttacacaccggcgcgggacggtcccaaaaaaagacaggagaacggcctactctatccgacaccgtccgcgcacccgcgaacgacgacaccgccccccgcccaaagaccacaacccctccctaaaagtttagaaaaaacacaaaaggggaagacgagagaaaaacaacacccccccaaaaaaagggggagggggggccccccgccaagaaaagccgcaaaaggcagacggcccccgagcgcgccaccgcccgccgaacaaacaccccc

SEQ ID NO: 124717 - DNA, 404 bp, Arabidopsis thaliana columbia
  unsure (1)..(404): unsure at all n locations
agaaagcgaggaagnaagcgccttcccggagcgggaaaaaccccncccaacaaaaaagaaaaggcacaacgcggaccgggcgaagacacaggcgggagggacangaaaaaccccagccgccggaccaagggccggcaaacgcaaacaacaaccgcacccagccacccagcaacaaaaaaaaaccaacgttccgtaaaaaaaagtaaggaacaaaaaccacgcccgcccccacgagcaaaaaaaaacggcccgagaaaagacgagaaagacgcgcgaacaacacccccacaagaacacccgacaaccgcgacggcaaagaagaccgaaaaagcgcacaaggaacaaggcagccgcacaacaccgcaaaaccgagcccaccgcccgccgacgacaacaccgaaccc

SEQ ID NO: 124718 - DNA, 511 bp, Arabidopsis thaliana columbia
  unsure (1)..(511): unsure at all n locations
actatagaagagctatgacgtcgcatccacgcgtacgtaagctcggaattcggtcgagcaactacgacgagccatggcttcaactttcagcggcgatgaaactgctcctttcttcggattccttggcgctgccgccgctctcgttttctcctgtatgggagcagcgtacgggacagcgaagagcggggttggtgtagcgtcgatgggtgtgaagagaccagtgcttgtgaggaagtcganngnncctgnngccatggctggagttttaggtatttatggtttgatcattgctgttatcatcagtaccggaatcaccctaaggccaagtcttactatctattcgatggctatgctcatctctctttcagtcttgcttgtggtctcgctgggctttccgccggtatggctattggaattgtcggcgatgccggtgttagagccaatgcacaacaacctaagtttgttggtgggaatgattccgattcctatctttgctgaaacccttgccctg

SEQ ID NO: 124719 - DNA, 527 bp, Arabidopsis thaliana columbia
  unsure (1)..(527): unsure at all n locations
nnnnnnnnnnnnnnnnnnnnnnnnnnnnnnnnnnnnnnnnnnnnnnnnnnnnnnnnnnnnnnnnnnnnnnnnnnnnnnnnnnnnnnnnnnnnccttttttttttttttttcattgaatcgtcatattttattacttattgatgtatccatatatagtgtgcaaatgaaaaagaaaagaaatgggttttgaaacaaaagtcaaataaatttcacccatgttgctttctttgaggagaaactcaaaaacataccacaaaagaaaacagagttaaatataccaaaacattacaaggactgtttcctgttagagagagagatcctttggatttcactcagctctagactgaccagctcgagaagagaggttgcatccaacattgagaccgtacaaggcaagtgcttaagtaaagaatgagaatctgattcattccccacaaacaacttaggttgtttgtgcatctccttttaaccctgggctacgccactaatttcaatatccattactggaggattataccatttaaaac

SEQ ID NO: 124720 - DNA, 490 bp, Arabidopsis thaliana columbia
  unsure (1)..(490): unsure at all n locations
cacgcgcacgcaagcgcggagactctatagcgcttgcgccgagacnacaaccccagagaagangggcanggcaangaagccaggcccgaaccacggaacaggaggcagccacaaaaggagcgcggaagaaaggaaaaaaaaacaacggacaggaagcgaaaagaaaaaaagaaccgaccgaggcgcgggaaaatttttttgttggggggtggacagcccacccacgggacacacacaaaaaaaaagaagcagcggcgctctaggcgcaaaccacgaaaagagtagagtgtttgcagcaacttccacccagaacaggaagaatagctccacacaaagaaagaggaaaagtgaccgacctcgacgaagtgccgggacaaacaggagagaccaacggttatgtagcaatccactccgcaacagaaaaaacacgcatcagacaacaacccccggcggcccccctgctgtcaaatgggggaaccacccaacaaac

SEQ ID NO: 124721 - DNA, 200 bp, Arabidopsis thaliana columbia
aggaacagctcctgcaggttccgggtcccgattcgtaatctgccgacgagctcctactcgatgacaacctagaactgcagcacaacaagttctcagactacacctcttgccccgaacgagtaggacttgatgaagctgtttaaaccacccaagaatcactatcttttctccatctcagaaccaacttacaaaggcatttt

SEQ ID NO: 124722 - DNA, 478 bp, Arabidopsis thaliana columbia
  unsure (1)..(478): unsure at all n locations
ccgcgtacgtaagctcggaatncggctcgagattgctgggctgggtcagtgcctaccttgcctctcgagctcccaatcttaagtagaggattgagcttaaggcaagatggtaagaatcagtgttcttaacgatgctctcaagagcatgtacaatgctgagaaacgaggcaagaggcaggtcatgagcaggccttcctccttaatgttgacaaganaccgaccgccatgcaaaagcacggccacattggtgagtttgagtatggctatgaccacagatctggcaagatcgtccttgaattgaacggaaaggtgaacaagtgcggtgttatcagcccacgttttgatgttggtgtccaagaaattcgaaggttggactgcccggttgctaccttctaaaaacggcaggatacatagccgctgaattaatttggcggcctcatgcgcccctgaagaagctataaagaaaaattgtctcacc

SEQ ID NO: 124723 - DNA, 502 bp, Arabidopsis thaliana columbia
  unsure (1)..(502): unsure at all n locations
acgcggacgaaagcagggcaaccggacagcggctggccgggggggtagaggcgcaaaagangaaaaaccaaaaaaccacggggcagtttcccccgggacacgaaaaggaaccccagaaaagaacaaaagccccaactgtgagggaggaaaaaggaacaggcgccccccccgacggagaacacgccagagcaaaaaaaatccctcctaggagttgggaaacaaaacacccggcccgcaggaacaaaacagcaccagtaaaggcagggaaggcgggcaccaaggccaacaaaaacacaggcaacccgcgaagacagcgcggcgcggaaagataacagggccaacacacccggggaacgaggcgaacgcagagaaaaaacggggcgaggagacagccgggggcggcggaaaaaggaggcaacaagcagccgccagaccccaggaaaaagagcagcgcccgcccccccgcccccccgcggaaaaaaaaggggaaacgagacacccc

SEQ ID NO: 124724 - DNA, 306 bp, Arabidopsis thaliana columbia
aaggggggaagaaaaaaaaaacgccaaggaaggacgagaaacggaagacaaaagacacaaaggacggccgcaacgccgcaacgagcacggacaccacggcacgaaggaaaaagcacgcacccgagcacgcaaaaaacaaccaagcacgacacaaccgcaaagacacaagaacaagagcgccccaaccgcgacgccacacaggacgccgcccagcaaaacacagaggaacccagaaagaagagcggccgccccgggcgaaaaagaggcgaaggaggaacagagagcgcacaaacgggcaggacaaga

SEQ ID NO: 124725 - DNA, 456 bp, Arabidopsis thaliana columbia
  unsure (1)..(456): unsure at all n locations
cacagacaaaaaagacacggggcgcccggcccaccacacgggggaccgaacaaaaaaaaaacagagaaacccccggcgcagcggaacgcagagcagccaagcgcacagccccccagcacccccacccacacaacacaaaaccctccataaaagataggnaacaacaaacccccccagccacggaagcaaaaaacgccgccgaaacacagggagagagcgcccagaacccacacaacgagaggacacacgccgcccccgcccacccgccgcgcaaaacaacacacgccaccgagcgcacgaggccgcgcgaacgaaccagacacaacacgccggcaaaccacccgacccgagaaaaaaccaaagcacaacgaccacgacgcaaaacccgaaagaaaagcaaccgccccccccccccccgcccccccgccggagaagaaacgacagcaaaaaacaccc

SEQ ID NO: 124726 - DNA, 445 bp, Arabidopsis thaliana columbia
  unsure (1)..(445): unsure at all n locations
cctagagcggctcccgggggggaaaaacccccgccccagcnaggngaaaaaacaagagaggaggntanaaaaaaaccggggacgaaacccacaaaacacccgacaccaaaaaagggtccccaacaaaaaaaagacccgggcaaagaaaaaccagaaaagaatatcgtggatgagaagaaaaaancagcgcgaaccaaagggaacaaagaggcccaaagggggggggaaggggacacccccaaggggggcaacccaaagcccaaaaccggacccggcaaaaacaccccaggcngcccgagcccaaggaccggagggaagaccggaacccaccaaaccgggcccggccgaaggagggaaccccaagcccagcggcgggcaccaagaccgggaacaaaggagcncccccccccgcaccccccccaccgaagcccggcaaggggaaaac

SEQ ID NO: 124727 - DNA, 465 bp, Arabidopsis thaliana columbia
  unsure (1)..(465): unsure at all n locations
cgaagcaaggaancggancgagagttgaagagcgagaaacccagnggcggcncnncagancangacggcgcgaccgcccagcangaanaaggcggccgacgcacaaaaaggccccggagaccgcaacgacggnagcnccaccgcccgcagccaacgcgacccgagaaagacagcccgangcccctgcaagaagtcgaaacgaagnggaccagaagccgccagggaaagaggccaccggagacaaacgaagaacccaccaagagccaggcacccggaaccaaagaggcccgaaccgcagaaaaaaaccgaccacaggaaaacaaacacagacaccgaaacgcaccaaacgaaaccaaaaaaaaaaccacagccaccagagcggaaacaagcaccccaacgcaggcccggaaacaaaaaaaacacccccccccccccccacacaaaacaaacaaagggccgcccccc

SEQ ID NO: 124728 - DNA, 481 bp, Arabidopsis thaliana columbia
aaggaccgggccggaaagaaaaccctggaaggagagcccaaaccacagcgggcggccccgaccaaaaacaagggccgaagacgaagacagaaaaagggggaaaaacaaaacaagcgcgaggggacaaaaagaccacaggggaacccgccaacgagaaaagggcgacaaccaacacaaaaaaaggacgttttttgggggggggggaaacgagggaaaaaaaccccaaccgaaagcaagccaaagccgggaacgcggcaaaaaaaaagagagaaacacccaccccaaaggcccggggggcaaggggaaccaaacgaacggggaccgagcgaacgggacgggagacaaccaaaaggggaaacgagaacaccaggcagagagcaaagcgggaaacaatacccggaggccaaagagaggcacgcgacacacgggaacccgggaacaaacagcacgacaaagacaaagaggccgaaccagaaaagac

SEQ ID NO: 124729 - DNA, 528 bp, Arabidopsis thaliana columbia
  unsure (1)..(528): unsure at all n locations
ggcgcccgcaggaacccggcccgaattaaaacctcgggcgacgagctgcacacntcggcggccgcccttcttttttttttttgtgctctttataagggcctaacgaacagaagcactaaaaccgtagcattataccaattcaaaacaggaaaactgcctaagctaggcgcaccactcaccttaacaagaaacaactctttttcttataagagggaaaaacgcgcccaaaaaaaccagacggcaccaccaggtctacaagactcagtagtcccagctgattagaaatacactctcaaacgcctgggaaaactgagggggctctgacaaagcattgctataagccctagtccacattttgaacgtaaacaaactctcgccctcaaataaaataaaaaaaccttcaccattataagaagccaaaactacgttatctggcctcgacctcatcaacaggagccctgtctccatgcctcgtacgcaaatcggatatgagacaccacccacctagaaccgctctctcgaggggac

SEQ ID NO: 124730 - DNA, 478 bp, Arabidopsis thaliana columbia
acgcgtacgtaagctcggaattcggctcgagcttgagccgatctccagacgctagatcttacagatccggacgacgtaatctggaaccactttccaacggaatgctttcgtcgggaagtagagccgacggtgctcctgcggcggctgcatctatggaaggagtgatgacggaggccatgaaactgattcaatttgtgctttggggggtgaaaccaaccaggggctaacaattaattgcattttggtcctcggttaaccgattattgttacccggattgtccgcttttggaaccgccgcccggtttttggctggtcccttaacttggaacaccttatggttctgctgttttcccccttaattcgctggctaacttggccataagaacacccggcgcccaagggttaaaatgtagccacactcaacccatatgccgttatccaaaaagacacacggcccccccacgcccccccctttttt

SEQ ID NO: 124731 - DNA, 518 bp, Arabidopsis thaliana columbia
  unsure (1)..(518): unsure at all n locations
nnnnnnnnnnnnnnnnnnnnnnnnnnnnnnnnnnnnnnnnnnnnnnnnnnnnnnnnnnnnnnnnnnnagcctttttttttttttttcacataaatatcatccaataattgctagacaatggtcccagaagttttttcccctcattgatgttggactactatttgtacacaacagagtataatttataacaccactgaattctttttgctgaggttaacaatataaaaaaagaatctatcctcactgagaattcatgaacttccggggcaggttttacttgacccagtttctggaatattaacctgttggtttaaaatcggcactatgctttccaagcttttatggatcaccgtgacttcattaatgtttaacccatttgaatccttatttgatttggaaaaaaagcaccttattaagtttttttcaagtattgccaatttgggaaagctagaatcaattacaattggctcccggaagagtttattcgttccaataaaccttcaacaatatcaaaaaaa

SEQ ID NO: 124732 - DNA, 536 bp, Arabidopsis thaliana columbia
  unsure (1)..(536): unsure at all n locations
nnnnnnnnnnnnnnnnnnnnnnnnnnnnnnnnnnnnnnnnnnnnnnnnnnnnnnnnnnnnnnnnnnnnnnnnnnnnnnnnnnnnnnnnnccttttttttgtcgcttcggcccttttttcacagccaaagaaaatgtgggtggaaccttataggaacttacacaagtcttggccaaaagaaaggttgaaattctaaaaaaaccaaaagggggttagaagggttctcttgatggggattgtaggaaccaaattcgtttcccttctggggccatatattaacacacttttgtgtggatatttggctcgcggtggccctgtttctccaattcttccgtcttgatattgatctctattaacctccctcagtaagtcatttggtttataccacaccggcttcccctgtccttggttcactaatcgcataattacgcttctgttttttcggatcctaaccgcctggagcaacgctaaccgtagttccggctgccccccagcttcacaaaatcacgtgcggcttattgaacatcatttacgaat

SEQ ID NO: 124733 - DNA, 416 bp, Arabidopsis thaliana columbia
  unsure (1)..(416): unsure at all n locations
agcaacccaaccgggcccagcgaaacgcgccccgacgacgcaaccccggaaaaggaaaacagccggcgaggacgcncgccaacgaggccgcccaggcccccccgcacccgccacaagaacccaaaacccctcaaggaagttgggaaaaaacccccgcgcccaccaccccaaaaaacgcaccaaaaaaagggggcgcggaaacaaccaccccacacccgccgcgaggcacagacaacacccgcaccagaaaagccccccccgcaaaccgccacacccccacgccccaaagaacacgccccgaacccaagaggggccgaccccgagaagacaacccacccgccacgaccaaaaccccaaaaaaacagcagccccccccccgcccccccccggaagaaagaagcacaacacaacccccc

SEQ ID NO: 124734 - DNA, 407 bp, Arabidopsis thaliana columbia
  unsure (1)..(407): unsure at all n locations
ccgaggtgaaggggagaaaaanaatcttcagggaggaaaaacccaaacccgccccaccggagacaccggggagtctccgaaacgaggagagagccaaagcacgacgccgccgcgggcaaaaaccgaagcacgaagccgccagagcggaggaggaagacttttttaggggggaaaaaaacgcgaacggcgcaagcagcctacagccggagagcagggggacagtctacaatgcagtgatcacaacacacgcacacgggacgcgcagacgaataagacggccggcaaacgcggacacgcaaaccaacgaaattggccagaatgtgggagtggaaaaaagaggggccgtgcttacaaatacggcaacacaaaaagacaagggaagaactcatgccggccacggacaaacc

SEQ ID NO: 124735 - DNA, 487 bp, Arabidopsis thaliana columbia
  unsure (1)..(487): unsure at all n locations
acgcgtacgtaagcncggaactcggcccgcgtttgaagaggaaaagcaaagcccaccngaacgnnnncnaganagagacggcagggaaataagaggacgcccgagngggagctaacaaagacccaggagaggcanaccgataggcacanacggcnccagacggacaaagaccacaagcgagccaccaaccagcaccatttcgctgtttggggctgagccgagaaagcgggccttctacagagccggaatcgccgattacatagccacctccctgtttctatacataacagcatcgaccacgtcgggagtgaatacaacatcaaacatgccatcctctgttggaatcccacgcatcgtttgggcttttccgtcggctaaccctccgccctcggctactagaactgactgcacctcctgcatgcccctaaaaccccatgggtgccactccccccccccttggctctatagcttgttttcgccaacaccc

SEQ ID NO: 124736 - DNA, 190 bp, Arabidopsis thaliana columbia
acgcctgcaggtaccgggccggaataattcccgtgtcgacgagctcactagtcggtggccggccttttttttttttttgaggaaaagacaagggctgtatgaaagtaaacaacagtccagacctcggaatcttttcaagctcaattgcgaaccaggatgcgacctatggaggcgttataacagaaaggaa

SEQ ID NO: 124737 - DNA, 457 bp, Arabidopsis thaliana columbia
  unsure (1)..(457): unsure at all n locations
ggcgcggtggggggggggggggggggtttctggggggggggaaaaccccgagcggcggacgcggggagggcgggcggcgggggggcctttctggcgancatttggggtggctgtgatggtggcatccgcgccgtctggcgggccgttgatgggcgaggggtggcggcggtaggtgtcgtggggggtgcgagcgagcccgtgggcgtttgggtgttttttttttttgggggggggtggcgggaggggggagaggcgcagtgagtgcgtggcgagtgggacgccggtgtgggatgcgcggacgcgttctgagttgcttccgtgtgggcggcgctgtgtggcttcgacgtgaacgtgtaatgtgcggtcgtcggttgggggggggcatgatggggcggacggtggtcttgggtgtgtgcgctgtgttgtttttgcttttaatagcacttgtgagcatgcg

SEQ ID NO: 124738 - DNA, 488 bp, Arabidopsis thaliana columbia
  unsure (1)..(488): unsure at all n locations
cgcgtacgtaagctcggaatnnggntcgagctttacagggaggctaagaaccctcccaccctgagtaaaaggcgaaactaccgccctcgcttacaaagccacggggggtccaataatggacaaaccgaaaaacaccatctttgcagagctggtacacaccattcggagaagaacgacaccgaacccaaaaccaatttcttcttgggggggcgacaaaaacaagccccccaaccgaaagaaaaacccgcctgacgacttgaaatcccccaacaaaggaataactggaccactttcatccacacttatccaccggaacataaaaacccacatcacagccaaactacacccccaacaaaaaagacaccccacccccgcgaacctagggcgtgccccccataaacttatcaacgacatgcaaccaccacaaccccgaagaacatagaataatcgcgcccaccccgccccccaccctcggcctcacagaacac

SEQ ID NO: 124739 - DNA, 513 bp, Arabidopsis thaliana columbia
  unsure (1)..(513): unsure at all n locations
atnnnnnnnnnnnnnnnnnnnnnnnnnnnnnnnnnnnnnnnnnnnnnnnnnnnnnnnnnnnnnnnnnnnnnnnnnnnnnnnnnnnnnnncctttttttttttttttttttcccaatcatacgaagcaaattttataactccaatgccatacattagaagatctctggttccaagattccacaaagctgagttccttttcatgaaataaattacaaagatattttattgaaaaaaaaaactgagcagcgaaaaccacagcaccaccagcttgcttaatcttgttatcagcagccttagagataaacttagccctgacaacgaaagggttgttcttaggcaaatgacctttccccaaaaccttgaaaaaaccatggctgcgtacattgatcaacggaacattattcttgctggaattcaccttcacgtcttgaggaacaagtgacccttggttgggcagggtcaccaatgggcgaaagaacctgttacgaagcttggagaaataccttataccag

SEQ ID NO: 124740 - DNA, 425 bp, Arabidopsis thaliana columbia
  unsure (1)..(425): unsure at all n locations
cgaagcaggaagnggcaaagcttaccgggggaaaaccgccacacaaaaaaacaagaacccggaccttaccacccgcggcggcgccaaaaaaaaagccgaaaagcaaggcaaggccgcacaccgcagagagacgacggcgccccccacaaaaaaaaaagctcctggggtgggaaaaaaacaaacccacagcacacaaaaaaaaacccaaaaaaaaacaaaacgcgacaccaaagaccaacacggacaacaccccaccccaccacacaccaaaagaaccaacccaaaaacaccaccaccccggcgccaaaaaaggaaccaacccaaaaaggagccaaccagagagaaaccacgaaacaccccgacccaaccccaaaaaaaaagacgccccaccccccccacgcgccgcaacgccacaaccaacaccc

SEQ ID NO: 124741 - DNA, 491 bp, Arabidopsis thaliana columbia
  unsure (1)..(491): unsure at all n locations
cgcgcacgtaagctcggaancggcccgagggtaacgaaggccagaaccaggacgggacggccccnaggagcgagacagacaatgagctagatcgccacagccacacagacggaaacacaacgcatgacccccagataggacgccggaagaagcccacgggcccggaaggaccgcccgagcaagcaagtcctcctcgggtgggaccagcgganaaaggagcgaagacggcgggaccgcggcaccgggaaccaccaccggccaccacaacaaggagaccccgcgcgcggaaaccaccacccgaaaagcccccccaagaaaaccaccgccgggaggcgccaagggagcccgccgaccgggccaacagaacccgagccccaagcaaaccgagcggcgccacaaaccaccaaagcacgcacaccccaaaacaccaaaaggaggcgcaccccccccccccccccgccccccacacagaagaacaccccgccaaaaca

SEQ ID NO: 124742 - DNA, 495 bp, Arabidopsis thaliana columbia
  unsure (1)..(495): unsure at all n locations
cgaaagcanggaanccggnaagagcctagaagggggacgaagacacacaggacccaccaccacagaaagagaggcaagagcgcngcacgcagaggaggaacccccacaaacaaaaacaaaaagcgggacaccacagacgcaggagaagaaaccggcggagcccccaaccgccccacccagaaaaaaaacccctgcctggacgtagaagaaaaaagaaccacgcgaaccacagccaaaagacaaccccccccgagagaaggcagaagaggacacccccccaagccagagaccaccccccggaacccccaccaggaaccccggggaaaaaaaccacggaccaaaaagaaacaaaagacacaaccgaggaaacaaaagccgagcaagcggaaaagaaacgcacgggggacaaaacaaccaaagcggcgccaccgagacccgagaaaagaaaaagaaacccccccgcaccaccgaaaaaaaggaaacaacaacccaacc

SEQ ID NO: 124743 - DNA, 457 bp, Arabidopsis thaliana columbia
  unsure (1)..(457): unsure at all n locations
aacccccccccccngccaaaggaaacaagccccacccacgagacccccggcacagccccaagaaaagccgaaacggcccgaggcaggcaaccacgaagcggccggggcagccgagccagccggcagaaacacaaaaatttttttcggggggggcacaaaaacacccgcgcgcccccccgccgaaaaaacccccccaaaaacgaaacccgacggccccgacccgcgccaaaacgnacaaccanacagggcccagggacccacgccgccggcgaaaagaaaaccgcccccaacccaccgaaaaccccccaccccgacacaaccagacgccgaggacgaccacacggacaagacagacccgaagaaaaaaagacccacaacgcccacgcgccaaacccccgaaaaagagggagacgggcccccccacgcccccagggcggaaaacagaaccaaaccaacc

SEQ ID NO: 124744 - DNA, 443 bp, Arabidopsis thaliana columbia
  unsure (1)..(443): unsure at all n locations
gagctttctctgggggcaacaaagccaaaaaaagccnngcaacagaaaaacaaggcgggagaatcggccacagaaacaaaaaacggaaaggaaaacccacaacgcaccaggacagaggaggcacagcacggacccncaaggaacaangggaaggccgaagcaaagattcctgcttgagggtgtagactcatcaacaggtcggctccccgaagtaaaacccaccacggagccaagcacccatggaggctcgacctataattcgttcaaaagacaaggccgctggagaatctcatcggatctcaaccgctcgctttaaaccgaaccctcctcctctctccgaatggaatccggaaaagcctgctcggaattctttcccttttgcatgcaaagacagagttcccacagctcatcccgatttaaacccacccgaacttcaggatccc

SEQ ID NO: 124745 - DNA, 488 bp, Arabidopsis thaliana columbia
acgcctgcaggtaccggtccggaataattgcctggtcgacgagctcactagtcggaggccgccctttttttttttttttttcatgtgaaaaataactgcaatctaagcaagtagcgtccaaagaagaacagaatcactatcagcatcacaaagagaagatgacacttctacactcttggagtttctttttttctcctgatcaagagggataaatagagaaaaacaaacacaaaacaaaaaatccaaacatgaatcattcatcatattcagacaaacatgtgcaagatcaaagagaatcaagactctcagttgtgcttctcacaatcgatggaaaaactctcttactttactgtaaaacggatccaaaccattttttaaagcttcacgaacttgaacaggctcatcaactctctgtttcaccttaacttacctgtcatcattcaacgggaaatgaatcgaatcgatcaattcattcatcaaccttgaac

SEQ ID NO: 124746 - DNA, 416 bp, Arabidopsis thaliana columbia
  unsure (1)..(416): unsure at all n locations
cccaanattttgagggcgaaccacgcgtacgtaagctcggaatncggctcgagcttcaacggcgagggaaaagcccacaaacagaaagaagagaggncacgccagcgccggacatggacattatcggnaagcacccgaagcatccaggaggacgaggaaacgcaggaggtatgcatcaccacaggaacctctgcgacaagnaccagccaggagacttttgtanaaggggtaagaggaaccnccacaagccacagaacaagggcaccngcccaancgagaaccnggacaagccagggacacacggaccngaagacgngaaggcgaaagcgagcaaggaaaacgccccgnngagcgacgagacgcagcgggagcccgncaagggaccggggaaaggccaacagccngagaacacaacc

SEQ ID NO: 124747 - DNA, 501 bp, Arabidopsis thaliana columbia
ggcgcccgcgcgggcaccggccggattatacctttgggcgacgagagcactctactgagggggcgctcttttttttttttttttttcccataatacgaaacacagattataatccccaaccccaaataaaaaaagatctgacgacaaaaaccaacacagccgtgagctcaaccacgaagaaaaaaaaaaaattttttttttgggagaaaaacaaaacccagacaacaacaacaccaccaccagcccgcctcatcttattacaatcagttcaaaagaaacgtatcccccctcaacaacaagaggcttgctccgaaagaaaaacctcctccccaaaacccgcgtaaaaaacccatactcgttacaaaagattacaaaagcacatcccctcggcaaaaaagcaccctaaatggctagagaaaaaatgacaccatccctttgtaccattccaacatgcggaaaaaaaacacttgaacagaactggataaaaaccccatacccaac

SEQ ID NO: 124748 - DNA, 446 bp, Arabidopsis thaliana columbia
  unsure (1)..(446): unsure at all n locations
aaaaaaaacaaccaacccaccagggggcgccgagtttgggcccgcgcacgagggacacgcccccaaaaaaaaaaaccaagcccaaactcctgaaggggcaccacatccgagcacgacacgggacgcgggccaaaaaacaagaaaaaaccgtgcggggagtggggaaaaaaacccccgcccgcagaaaaaaaaaccccaccaaagaggggggaggggagcaccccaccggggaacggaacancgacacaggggcacgccagagcggaggaggggcggcgcgccccgagagagagcgcacaggacagcaacgcggaccaagccacagggcaacagcccaacggcagaccacgccggacacaacgaacgggacagcacgaccgagaccgcaggaaaacccacccccccccccccccccccggccacaaaagagaaaaacacacaccccc

SEQ ID NO: 124749 - DNA, 501 bp, Arabidopsis thaliana columbia
  unsure (1)..(501): unsure at all n locations
agcaaggagccncaaaagcggttgcccggggggggagagacggcnaaaaacnananaccaaannaaagggggacaaactaaccccgcgccagggcccagcgcacaggaaaaaaacnaagcccaaaaaccgaaacacggaacccgacccgcccaagacagaggagcccgacgcgacaaaaacacaaaaccctcctgcagagagtagagaaaaaaaaaccccccgacaaccgaaggaaaaaacgggccctaaacagggggggcggccaccacccccacatcggaaaggacacaaggccagcgggacggcagcaaaaaaaggaaacgcgcccgaaaaggcccaaagacgcgcccccgaaaaaagaaacggccccccgcgcagaggcgcccacgaccccccgcacacaaaccaaccccacgaccacgccccagaaacccagaaaaaaacagacaccccgcaccccccccgcccccaggccaaaacacaagcccggccacaccccc

SEQ ID NO: 124750 - DNA, 371 bp, Arabidopsis thaliana columbia
  unsure (1)..(371): unsure at all n locations
cacgcctacgaaagctaggagcctggacagcggtttccccggggggggagggccgncgaaacaaaaatcacaccccacccgggggggaatttccgggcaaacaacaacccccgtaaggaaaaacaggagcgccagccccacgaaagcagctaactccacaaagccgggcgccgcgcgccacgaagaaaanagcacgcggctcctgaatgcaagttggagaaaaaccccccaacccnnccccaaggcggccacaacaaccaacagcgggccggggagaagccccccgccgcgggcgacggccaaaaaaaaaccacgccggcaaaaacacccgcccgcggaagaagaaacccagcccggagcgacccaaccgg

SEQ ID NO: 124751 - DNA, 458 bp, Arabidopsis thaliana columbia
  unsure (1)..(458): unsure at all n locations
agggggacgattttggaaacacaagggggccgcgcccccgaaaaaaaagaacggaaccgccgacataacaggggaggcaacagacgcaccacgcggggaagcggggcgcggcaggatttaanctctcctgcaaaaaagttagaaaaaacaacccaggcccgcgcgaagcgaaaaaaaaccccccccaaggggagggggagggagagccgccccaccaaggcaaaccaaaggcgcccaagagcacccccagacccaacgaaccgccggaaacagaccccgcggcagaagagggaaggcaaaggacccgcacngggccggcgcgcgaaggggcgccaaccgacacgcggaggccgcgaggagaaaaagaccaacaacacccacccaccagaaacccggagaggaaagggggccgcccgcccccccacgccccaagaaagagagaaaacaaaaaagaaccc

SEQ ID NO: 124752 - DNA, 410 bp, Arabidopsis thaliana columbia
  unsure (1)..(410): unsure at all n locations
gaggggcaggagaaaagcctcaggggggggaaaaccagcagggacaagcgcaggggaggggaaccggggcaaggggagaagcgacagaacaggcgggagaagagcggacgggggagaaaaaaacgcgaaagagcaagcagggcggggagggagacccgcttaaaaaggggggaaanaacagcgcggagcccgggcaagggaggggaggggggaggggaggggagcacagacaaagagaaggacgacagagcggcgcgaagagccgggcgggcgccgaggaggcggaggaagagaggcggcaggaacggcggaagcagaagagaccaacgcgggaccgcaggcgacgacacgcggagcaggcgacaggagaaggagcgggcgaacgaagcgaagacagggcgggacgcacc

SEQ ID NO: 124753 - DNA, 492 bp, Arabidopsis thaliana columbia
  unsure (1)..(492): unsure at all n locations
cgcgcaagcacggaagcncgaaagagccctgacagggcgagcaaaaaccagcgagcgcgagcgacncagaggaaacccggggcaacctgcagcgccccacgcggggacacacaggacaaagacaaacgacagccccgcacaaggacgagcaaacaccaacggacgcgggacgcgcaccccaccacaaagacactgccttcgtgaagaaggaaganaaccccacggcgacacagacaagaacaggcgcccaaaaggacgccggcaagcagagacacaagaaaagaaggacgccacggcaccccgcaaaggaacaggggccaacacacccgccgcagaagcaggcgccaggcgcgcacaaccgggcacccacaaaccgccgcccgacaggagccggacagaaggaccgaacacagaggcacccaaaacaccaagaccaacagaacaccgccccacccccaccccgccacaaaggccccgcaagaaacaaccccc

SEQ ID NO: 124754 - DNA, 221 bp, Arabidopsis thaliana columbia
cgcccgcccgcaagagcgaagaacgcggcgcgctttctagcgaggggaaacccccgcatagaccaaaaaacgggggaaaccacagcccaagtggaacaccaacactagagggaaacaaagcccccaatcgcccggaccaggggtggcacttgcagacacatccgcatttgcaagcatcattctaggcaacaaaagtttttttttaccctgagggcaagcaa

SEQ ID NO: 124755 - DNA, 497 bp, Arabidopsis thaliana columbia
acgcctgccaggaccgggccggaaataacggctttgacggcgaggccaattcgccgggggcggccttttgttttttttctgggtgggaaggaggcaacctgaaggcgaaacccctaagttgtcttaggattaaatgaaggttccaaaaggcaaaccgttggcggggagatcttaaggagcctagccacagaaaaacgaatttttttttttgaggggggggcaaacgcaggccggcaaaaccggccggagaaagccggcgcacagatcgcccggggggggaggcgcggacccaagcaggcaggagaaagcaaccagagcctcggagggacgggaaaggaagcacaggcaaaacgcgggccctcggcaggaaagacaaacccacggggaccagggaaaaagaaggaagacgcgaagaagggagagaggggggaaggggagcccaaagaggcggggggggagcgcccaaacggaacgacaaaacaagcgcgcgacccgag

SEQ ID NO: 124756 - DNA, 455 bp, Arabidopsis thaliana columbia
  unsure (1)..(455): unsure at all n locations
cgcctcacgtaagctcggatcctgtagagcggttgtcccgtgggtagaagtcttatcaaaatctaaactcatctatactgccgataaacatcgctgcaaagtgactttcagactgttagctcttacaactatttaagtctaaatctgcaaacatatattaaaaagggtgatattccgtcgccggaaaagcagatttctgctagggtgggggccacgagngaaaccggcccaaaccgngcaaacacagaaccnggacggcccaggaacgccccacgcaaacacccggcncgcggaaagacaacaccngagaacccgaggaagcnacaagcccacccacgcgcagaggccccaccccaagcccagccccgcgaggcaacgggcccaccaacgcaggagccggacccgagcccgggcccaagaggacaacccccgcgaccaagccccgggaagagaga

SEQ ID NO: 124757 - DNA, 342 bp, Arabidopsis thaliana columbia
  unsure (1)..(342): unsure at all n locations
agcnngganccacgagagcggttgcccggggggagaaagcccanncgaggaggngacaacgcnggacgggacaacgaaaggaaacacgcaggggagcncacagaaaaaaaaagccgagggaggacaaagacnagacgaagcagaggaggacacgngaggaaannagagaggcccccngtgttctcttgaagttggcaacaancncaggagggaccgggagaacacccgggcgccnacaagaagacaagggccgggccccaaggcgggcaccgaaacgcaacncgcggaacccacagagagaagaacccaagcgggccncgagggggaacagcagccacaacg

SEQ ID NO: 124758 - DNA, 189 bp, Arabidopsis thaliana columbia
  unsure (1)..(189): unsure at all n locations
cgcctgcaagtaccggggcggaatnnccgggttgacccacgcgggagacgccttctacccaaacggacacaccggcaagaggcccacttacctgagnactccggattgcgagcttggtaactagatcttggagttagggtgccaatcaaatcgcagctgctaggggggggtacaaggcggaaaaaaaaa

SEQ ID NO: 124759 - DNA, 496 bp, Arabidopsis thaliana columbia
  unsure (1)..(496): unsure at all n locations
cccccacgnaagcnnggaacctcnaaagcggctcnccggggggggtgaggcccccaaacacaccanannannnnannaaccgcgcccattaacggccccgaggagcgccgcccacaaaaaacatcggcagaccgagaaccttttgngccgngaggaagagaaacccgcacccgacagcgacccacccccaccaagccccaccccccctccaaggcagtntggaccaaaaaagcgccnnaccacagcccaagaaaaaaccccaaagagcagccgcggcaggccanccgccagcccccgagagccccaacccccaggcaagaccccagcccgcggccagaaggcagaaagcccccggcgcaacaaacccgcccccgccggggcgccacccgggcgggacccccaacggcacacgcacaaccccgccccaccggggcgagcccccgaacgcccgccacccagacccgagaaaccccggcccacacaccacccccgcccc

SEQ ID NO: 124760 - DNA, 472 bp, Arabidopsis thaliana columbia
  unsure (1)..(472): unsure at all n locations
ccgcccacggaagagccgagagacaagaccgggtgcccaggagggcaaagacagacgcaacacgcccaaccancccggagggcgcaagctatcctcagaagacggcggccgccggcacacagatagccgaagcaaataccccagataccggcactgcgcccgacgccgggaaaagaagnacaagacccncacgcccctgcacaagagtgggaaaaagccccgccaggccnccacccaaagcggaaaacacaccagagcggccgcccgcacgacccagggacaggacacagacccagggaggcngaccaaacagcagggcccccaacggaacaacgccccggcaaagcaaggcccacaccaacacccaaacaggacccaagccccccacaagggcggagaccggccaccggcacaccccgccacaggagaacacccacccgccacccagcggcagaaacgcaaaacaagggca

SEQ ID NO: 124761 - DNA, 269 bp, Arabidopsis thaliana columbia
gggggggggaaggtagggccggtttgcgcgtttacggaatagggagtgccatgaaggcgttcgactgaagcgccagggaacaggacacgaggtgggctgatggacgcatggaagcagtgatgtctgggttttctctctgtatatctacgcatcggtgagaagattgaggtgcacgaaatattatgtggcctttagatgtgcgagactgtctctgatttacatgacaagctctaaacaacaagttacgatagatggtcagattaaagact

SEQ ID NO: 124762 - DNA, 372 bp, Arabidopsis thaliana columbia
  unsure (1)..(372): unsure at all n locations
acgcgcacgtaagctaggatcctctagagcggcctccncggggggggagagaccctagaaaaccaacancttatgataacggagggccaccaagattaaaaagacgacccacccatgaaaaaaggccgaatcgcgccacattatacagaagacgagggaaggcccccgatgaccacaagaacaaaacaagacaatccctcccgggtgtggggaacccaaaacacagcaccgaggcccgaaaacaccacaccccggcaggggcggagagaaccccccccgcccgggcccccnaaaaagcaaaagccgccaagcgggaagcgggccgganacaccangggacccccgccaaaccccggaccggagcgagcccgg

SEQ ID NO: 124763 - DNA, 427 bp, Arabidopsis thaliana columbia
  unsure (1)..(427): unsure at all n locations
gaaaccgcctaacaggggggggaaaccacaccacacgcgggggcgccggcacaaggaacactctaggacacaggaagaccaccgccccgaacaaaccggaaagagagcccggaccgagcgagaaagaaaagagaacgaacgcagcaggaaaaaggaaagacaaaaaaaactgcttcctgggagggggggagggaanaacagagaagcccgcgaaacccaaagcaccagcgcgcgggggcgagggggaagaggacccgacccgggacgcacaccaaaagcagacgacggcggagaaagcgccagcgaacaggagcaaccggcacgcagcgccgggcggacaaccgaacaacaaaagggaagcgcaccagacacaccgggagcaccaccccgcaggcgcgagcagagagcgaaggccagcccggaggga

SEQ ID NO: 124764 - DNA, 307 bp, Arabidopsis thaliana columbia
  unsure (1)..(307): unsure at all n locations
cgcgtacgtaagctcggaacccggatagcgctctgagccggtcgagcggatccagcggctcgagtgactctgtgaagcctgttctcctcactggtgacttacaggacagtttcttcgctagtttcgctcttggatgggttattaccaatggtgcgggtcttgcatcctaccccatcgacactgnccgaagaagacctcctatangagtcgggngaagccgccaagcacaagaaagcccnggacgccnacaagcagagcctcaagaaggaacgagccaagncaccctgcaagggagcnggcgccaacc

SEQ ID NO: 124765 - DNA, 500 bp, Arabidopsis thaliana columbia
gcctgcaggtccgggccggaataacggctggaccacgaggccacacacccggggccggacaggagtaaggagaaaaaggggaatttagggggtccagcaagcaggaacaagtcgccatcttacagcaagctacgcgaccgagactaaaaagaatttgactagaccgcgactcaccattcccaaacgggaagacttttctcttctgagggggcgaaggccaaggacaagggaaggcccgtaacacggacggccaaaaccccaaaacaagcgggggaaagcaactcgaaacagaagctgacggcaccgagaggagcgacacgcaaaacaaggacactggaaggcgaccagccaccggggcagacagactacaccccagcaaataggtacaaacaaatgtgaagccactatgcttcctctgttagaaagggctggggcgagtaaccatgctcggaggatctggggacaacgcgcgtcacgaagacaccctgggacctctcggc

SEQ ID NO: 124766 - DNA, 417 bp, Arabidopsis thaliana columbia
  unsure (1)..(417): unsure at all n locations
acgtcgcatccacgcgtacgtaagcttggatcctctagagcggcctcccttttttttttttttttcagaaaacattaattcccatatataaaacacattcaccacttaaacatacaacaacatgaacaaaatatttcgtatagtgaataatcaagtttctaagacattatataaagactatatatatatatatatatatatttatttttttttacgtatcanncacgcaggggccaatggtccaacattgttggccacagntggctccatagctttcatggcttcaaaccttggtttctttggctgaaacttgacagcagagtagagtttcatgttattcttaaacacaaatcttcgggataggctctttcttttccctctctggttcttttccgatcaactccggggccggaaaaa

SEQ ID NO: 124767 - DNA, 468 bp, Arabidopsis thaliana columbia
  unsure (1)..(468): unsure at all n locations
gattagtgtgacactatagaaagactatgacgtcgcatgccacccgttcgttagcttggattcttttaagccgcccgcccttnttttttttttttttttttttttttttttaggggattcntgttaaaacccaattcaaacccactggaacaacaaacaaattcctccttttttttaaaggaaaacctacttcttgcaaagggataacaagtttcaggaccaagaaattttcattatttttccgggaacccggggggtttcaaactgccaacattttggttttttttttcttttaaaaaaaattcctgtttaatggtcaaaaaaatttttgaaatcgttttgtcaaaaatttttaacctttaattttttaaaccactcgcagaaattattgaacctctaaaccttctcatgggggactttgaccctaaccatggattttacaaacccacaacttgctttcacaagcat

SEQ ID NO: 124768 - DNA, 306 bp, Arabidopsis thaliana columbia
  unsure (1)..(306): unsure at all n locations
nnnnnnnnnnnnnnnnnnnnnnnnnnnnnnnnnnnnnnnnnnnnnnnnnnnnnnnnnnnnnnnnnnnnnnnnnccacgcgtccgcccacgcgtccgcccacgcgtccgcggacgcgtgggttgcgccgtcatggctttggagcgtgttcctgctgatatccgcgctcaaggaggcgtcgctcgtatgagcgatccacaaatgattaaagaaatcaaacaagccgtttcgattccggtgatggctaaggctaggattggtcatttcgttgaagctcagatccttgaagcaattggaatcgattacat

SEQ ID NO: 124769 - DNA, 513 bp, Arabidopsis thaliana columbia
  unsure (1)..(513): unsure at all n locations
nnnnnnnnnnnnnnnnnnnnnnnnnnnnnnnnnnnnnnnnnnnnnnnnnnnnnnnnnnnnnnnnnnnnnnnnncttnnnnnnnnnnnnnnnnnnnnnntttttttaagggaatccaggagacatacctctttttatatatatgaaaagaaaccattttcattaaacaatttcaggaatttacaacagaaaatacaagttatgttttgatttggggtcttctaagtggtttcacctccgcctggtcttgcttcctagtaacaaagtgaagtagaacaaaatcctaaaaaagaacccaaaagcaactgtgatgaacaagcaattccatttactcagctgaaccacaccttgctgcctcagaatatctgaaccagtagttaaacaagtcgtgctcgatatcgttaccccgagggacttgctcactgtaccaagaagcttcagcttcatcacttccggtagttcccctaatggcgtgttgtcgaaaatctgaactcctctcacaaaacacttggtcg

SEQ ID NO: 124770 - DNA, 476 bp, Arabidopsis thaliana columbia
  unsure (1)..(476): unsure at all n locations
cgaaagctgggatcctcaaaaggggcctgccctggattttgaaataccctttccagaggacaaaaaggagaatccaggaaacttacctctttttatatatttagaaaagaaaccattttcattaaacaattgagggatttacaaccggaaatttcaaagatggtttggattgggggccttcatagaggcgcctatcctctttgggggggggctaccaagnaacaaaagggagggaaacaaaaatcctaaaaagaaacccaaaacgcgactggtaataaacaaagcatttgcatttgacctcagcttgaccccaccctttgctggccttaaaaaaagttggaacccagttattgaacaaagcgagagcctccaaatgcatgtcctcctaagggactttccccactgtaccaaaaaagcttcattttgtcatcacttccagggaaatactccctataggaccaaaataaaaaatctcc

SEQ ID NO: 124771 - DNA, 292 bp, Arabidopsis thaliana columbia
  unsure (1)..(292): unsure at all n locations
acgcccgcaggaaccggaccggaaaacaggcccgaccgacgcggaaacccaancgagcaacgaaaaaaaaaggaaaacaaaaaaaccgaggaaaaaacaaacaaaacagcccaccaaccaccagcaccgagaccacccgaggaaggccgagcgcgaccaccagcgcgcgacgccaaaaaaaaagccgagcccatttctaacaaggggggggagaaccaacaagacacccccaaaaaccacagaaacacaccaccgagaaaaccagacaaccagcacaaaaaagaaacacaca

SEQ ID NO: 124772 - DNA, 267 bp, Arabidopsis thaliana columbia
  unsure (1)..(267): unsure at all n locations
acgcccgcggaccggccggaataacgctgggccgacgagccaccgacggaggccgccngaaaaggcagnacggagggacacacaacacaaagcggacccacaacaaaacagcaggaaaccacggaccnacagggcaaacacccagacaaagcacaagacgaagaaaaaggagggcttcttcctaaaggggggggagnacaanaaaggcccggagaagaaacaaaaccacccccagcaagcgccggcccccagggcccaacaaacaaa

SEQ ID NO: 124773 - DNA, 270 bp, Arabidopsis thaliana columbia
  unsure (1)..(270): unsure at all n locations
acgcctgcaggtaccgggccggaatnaacggttgggccgacgagcaaacccggcggaggccacccaacaanagaaaanaggcgaagaacgcgcangaangacaggcagggaaaacagagcaagagcccaccggatgcnggcacaagggacaaaacaaccacagaaagagcggcaaaacacaaaaagggattcttctcagggggggcggacagnacagaanccacggaaagaaagaaaacaaccgccaagaaggaaggcgcaaaggaccaa

SEQ ID NO: 124774 - DNA, 482 bp, Arabidopsis thaliana columbia
  unsure (1)..(482): unsure at all n locations
gcgtacgtaagctgggatcctctagagcggctgccctgtgtttttttttctctttttcagcaaacaaaaacttatctaagactattgaatcgaacaagagtctgaagagctacagagaaacaaacatgtgcccgcggttcccaggagggcgggtactaagaacaagcacaccgcctggagagaaacatcctangaacgaggggtcaaacaccgcggaaacgggcggttactgtatgcgccattgcttgtgcccacagcagacgaatcagcgacggtaactaaaaggggggcagcaaccatcagcccggctttcatgtgcaacgggtttaggcccaccttgcccagtatcaaacgtgaaggccgggaaccacgttaacccattgtacccaaaacgggcaacctgtaggaccaaagtcggaccccttggactccccactacagcaaatggcaatccactacttgctttgagcattgccacccgt

SEQ ID NO: 124775 - DNA, 292 bp, Arabidopsis thaliana columbia
aagcagccacgcctgcaggtaccggtccggaattcccgggtcgacccacgcgtccagcacgaccttatccacagaccatacacagttgagactctattcactcgcgggcggaagaacaaaatgccaggaaaagcgaccatctcagtatctcgctaatcaactccgaacctgtgtatgagctcttcaactgcgccagggaccttctcctaatcgaggtggcgcgcgcaccagcccgatgacagccggaaccaacagatatgctaggagtcacagatctaagactgctaacgac

SEQ ID NO: 124776 - DNA, 449 bp, Arabidopsis thaliana columbia
cgatcggccaggtgaaccacaggtgtcaaaccggagatcagccaggggatgaagggatggtcttatggaccaagagaaagtgtaggattgcctgcaaagatggggaagaggatttgggttggaagaagtgacctaaaatcctttgatgggtatggtggtgggttaatgatcagtgaaaagcagagatcttgggagggtatggaactgttgctgcttgaacctccactgttgttgaccttggttcagctgcccaaagccatgggctttgggatgaggttctggggcttattgggcctcaaacgggctctgttatctaacccttgttttggactggtttccactaatggtttatgggatgactttgtgtctgggttatcaatgtactgtatgttttaaactccctccctatttaataaaaaaaaaaaaaaaaaggccggccgccgcctagt

SEQ ID NO: 124777 - DNA, 276 bp, Arabidopsis thaliana columbia
  unsure (1)..(276): unsure at all n locations
acgcctgcaggtaccggnccggaatnaatnccttggtcgacgagctaactcctcggcggccgccctttntttttttttttatgataaattagcgatggatgtagaatacatacagtgcattgataaaccatacacatagtcataccataaaccattagggaaatgcagtacaaaaacaagggtgagaaaactttttttgggggaggcccaanaagcccaagaacctgatcccaaagaccatgactccggacagctgaaccaagctcaacaccagag

SEQ ID NO: 124778 - DNA, 443 bp, Arabidopsis thaliana columbia
ccccgcacgagccggaaccggcgaggtgagccacgaggaagcccacgggggccagacggggaggaagggggcccagggacaagaacagggacgaagggagcaaaaggggaagaggaaacgggcgggaaaagaacccacacccaggacggggacgcggcggggaattttacagggagaggcaaaaccggggagggaacggacggggcagcgggggccccaaggagaagaccgggaccagcggaacagagacaggggcgccgggagaggaccagggccgagggggccacaacgggccagggaaccaaaacccgggacgggacggcagaaaacgaggggcacagcgagagacgaagcggccggaaaaaaaaggccccgggcgcaaccaaaccagcccccacgcgacagacaaaaaaacaaaaaaagaaagggcaggcggcccgcca

SEQ ID NO: 124779 - DNA, 282 bp, Arabidopsis thaliana columbia
  unsure (1)..(282): unsure at all n locations
gnnnnnnnnnnnnnnnnnnnnnnnnnnnnnnnnnnnnnnnnnnnnnnnnnnnnnnnnnnnnnnnnnnnnnnnnncgcctttttttttttttttttttttttaaaactaaagggtaaaaatatcctcttcaaaaaaaattggatggtaaagattttggttaccacagattcttttcaaaaagagctttaaaactttacaagaatttaccagaagaaaccaccacaatttgtatttatttattcattaaacagaaacgcctataaaaacttcaaacttgagaac

SEQ ID NO: 124780 - DNA, 300 bp, Arabidopsis thaliana columbia
cgaactcacttataggggaaggctggtacgcctgcaggtaccggtccggaattcccgggtcgacccacgcgtccgcagaaaggcgagcttttcagcttattagagcttggggacaatcccaagatcttacttatcttcctgttttccaccagacttatatgagcttggaaggcgaaaatggattacacgctcgaggtgaagagaattcaatgccgggacaaagttctctggagtctcttatgcaacggcctgttccagtgcctccacctggtagctatccggttcctaatcaagaacagg

SEQ ID NO: 124781 - DNA, 512 bp, Arabidopsis thaliana columbia
gaaccggggaggggtttccaggggggggaaaaccccccccgcccgccgaagcagcgccgggccggccgggtcacgccgggccgccgcccaagcccacaaacaaaacacgaagccggctcggacaagactcgcgggggcaggagcaccggagggcaagaacggcggggaagacccctttcctccctagggggggggcccaaagaacccacgaaggggcccccgccacggcccgggccgagccgccgggcaccgggcggagaggggcgccggagaacgggcaaccagcggaacggagcaggcacgggcgcgaaagggggcagcgagggcgcccacaggcgggagggcgaagcggccccccgcaccggggcggcgcggagacacagggccagacgagaggggaagagaggcgcgaggcacggcccgggggaagcgagcccggcaccacagaggacacaacaccccacgcgcagggacagaagggccccgaagacacaacccaggacgaggcagac

SEQ ID NO: 124782 - DNA, 273 bp, Arabidopsis thaliana columbia
  unsure (1)..(273): unsure at all n locations
acgcctgcagtaccggtccggaataatngttttttgggccgacgagctcaatcctcggcagccgcccttaaaattgaagatagggggacatttcccaaactataagaaccaggaaaactaaccacgaaaaggacccacaaaactcgaaacccaacagaaaagccccccacacataacaggggagagacccctcccatgagaacacccacagaaaacgtgcccgccccataacatagaaacccaagcagaaaaagccattgaacccagccacca

SEQ ID NO: 124783 - DNA, 536 bp, Arabidopsis thaliana columbia
  unsure (1)..(536): unsure at all n locations
agggcgaaacgcacgcgaacgaaagcncggaacccggccagagattcacccacgctgctgaaacatccacaaagcccagccccacaaaaccaaatcccaaactcaagaacacattcgatgcagagacaaagatgtctgagtattctgcgaacttggaggaaacaggtctgcatctgctgctctacatgcatggaaatcgactggctacgaacctcgtttctttttttgagcggagacaaacaaagcccggaaaaccccatcggtgattggaaagataaaggggtggaacttttttatgggtgaatttccaaggggaccaaaaccaggagggcttaacggatttctggccagagctgattccaatcggtgaagaaagggaacgtatttggcacagacaaccaactgagatggcgcgttaggctcgaaagtacttccaacacctgcgttgtttcccggttttttgttccccacgaggactcctacacatttcaaggacgcattttgggccgcccccctatgaacaacggggtacaacc

SEQ ID NO: 124784 - DNA, 279 bp, Arabidopsis thaliana columbia
  unsure (1)..(279): unsure at all n locations
acgcctgcaggtaccgggccggaattaatggctgggccgacgagctcactcgtcggcggccgcccttttttttttttttttgatgatcaacaccagcttatcgaatgtatactcgaggcagaaattaaaaaccagttcctacttggcaagagtccaatacattgaaatcgatccattaatcgacaatcccctttttgataagggatacacngagagcagaccctccttctgaaaactgatgatgcaatcatcaaacatctcaggtagtgacttgaaggc

SEQ ID NO: 124785 - DNA, 529 bp, Arabidopsis thaliana columbia
  unsure (1)..(529): unsure at all n locations
nnnnnnnnnnnnnnnnnnnnnnnnnnnnnnnnnnnnnnnnnnnnnnnnnnnnnnnnnnnnnnnnnnnnnnnnnnnnnnnnnttttttttttttttttttttttaagtttaaaaatattttttccaattaataagtggcaccagaattcggaatgcctaaaaagaattatttaccggctggtaatgcttcaggggggggggttttatgcccaaaccattccttattgaaaagaaaaaaattattgattgggcacccaagttttgctgcaaagggttgttcctctccttgtcctttagtttcctgaatgcaaatgactctatctggctaactctctccctgctcactcccatcatctctcctatctcttgcaacgtcttcattctcccatcctccatcccaaatctccaacgtatcacttgtttctcccttgtacccaacgagtccaacactttgtccaagtcctgcctcatgaattcctttatcagtatatcttctgacgttactgcttctggatctgctatcacttccg

SEQ ID NO: 124786 - DNA, 263 bp, Arabidopsis thaliana columbia
  unsure (1)..(263): unsure at all n locations
gaccgaaagccccggaaacccgcgagaaggagctacccaaagggggaaaaaagaccccaggcggcggcgggaagaagcggagacaaaaagaggggacggcagaacgccgaggagaacaggggccggcagaagccgcaaacgaaaaaggaaaaaggggagcccccgaaacggaagagcaacgcgagagacaaagagaaagacacncaggagaggagaagcgcggaccngggagagacacaaagaaagacctttttttttaacgg

SEQ ID NO: 124787 - DNA, 677 bp, Arabidopsis thaliana columbia
caacgaaaagcagaagccagacaacgcaccccgtcgaggcaccagagaagcaagagcgaggagccgccacacagccacaagacaaaaacccgcagtacgccccccccagaaccgccgaagaggcagaccgcccagacccgcgaggggaccacctccccgaggggggaaccgaagccgcgcgaaaacactcacacagggcggcgcgccacaccccaaagccacccgaaggcgcagaccacacgcaaagccagggtcgcgaccccaacgagccgaagccgcggcgcccgcccgcagagagccgcggcacaacacgcgacggaagccgcacacacgaaaaggccagagagaggaggaaggacaacggccgacccgacgggagaaacacggcaggcgcgcccgcacagcgggagggcgggagagagacacgcaacagaaggcgcgagcgccaccgagagcggccgcagtacggcgacccacacgaggagagagggagcgcccccacgcgaagggcaccgccacagccagagcacgagcaccgccgccgaacgaagagagaagcacaaacacagaaacaacaggaacagcaacgcgataacacacgtcgaacgagtgacaggcaacagccgacatcccgccccccaagacccccgccccacgacgaagagaaaagcacggcg

SEQ ID NO: 124788 - DNA, 366 bp, Arabidopsis thaliana columbia
  unsure (1)..(366): unsure at all n locations
agccgggancccggagagcgggcgcccacagcaagggagagacccaacgggggcaagagaaaagaagacaagggacaaagcccggaaaaccaagagaaagggggaaaacagacagagaccacaagggagagccgcgaaacgggggcgggaaaacgaagacccggaaaccaacaaagaaggagaaagcgcgcacagagaaaattatttcgaggggggggggaggacgaaccacggggaagggaaacgcgaaacgcgaagaggaagagaagacccacgcgaggaaggaaaagacggacaagcagaaccaaancgaacaaagcccaagcgaagagaaggcgccgaggggacaagaaaagcgcaaaaaaa

SEQ ID NO: 124789 - DNA, 155 bp, Arabidopsis thaliana columbia
  unsure (1)..(155): unsure at all n locations
gatgattagtgaccttgagacttgacgtcctgccctctagctcgatcgctcaggtgagacacgagtgtagagcgagtatcagacagtgatgaaagattgtctatgnacgagagaagtgtaggatggctgcaagatggtgaaaaggatttggttgg

SEQ ID NO: 124790 - DNA, 206 bp, Arabidopsis thaliana columbia
aaccggtggatgccggccccgacgattgacagcgatcaagggcacctcctccccgggcgggggcccccacaagccgccagaaatgatcacatcagaggggggaaagccccaggagccgcgaccccaaagaaagagcgagacccctgcaccgccggtcgcacaccgcaccccaagcagtaatcagagcactagcgagagagacatca

SEQ ID NO: 124791 - DNA, 516 bp, Arabidopsis thaliana columbia
  unsure (1)..(516): unsure at all n locations
cgattgatttaggtgacactantagagagctatgacgtcgcatgcacgcgtacgtaagctcggaattcggctcgagagaatagtttgatcatcttgtgagaaaaataatggctgcttcagtgatgctatcttcggtgacattgaaaccagctggtttcacggtggagaagacggcggctagaggattaccgtcgctcacaagagctcgtccctccttcaaaattgtcgccagtggcgtcaagaagatcaagaccgacaagcccttcggaattaacggcagcatggacttgagggacggcgtcgacgcctccggcagaaagggcaagggatacggtgtttacaagtacgtcgacaagtatggagctaacgtcgatggatacagtcctatttacaacgagaacgagtggtcagcgagtggtgacgtgtacaagggaggagtcaccggattggcaatttgggcggtaactctcgccggaattcttgccggaggtgctcttcttgtgtacaacacaagtg

SEQ ID NO: 124792 - DNA, 211 bp, Arabidopsis thaliana columbia
acggagaaaccgccgcgctaatcgaaaactcccccccaatcccaccacctatatatacaaacaataccacccaacgtaaagccgatgccgggaaggtctctttcagcggaggagcaagacaaaacgcgccgcgaaaggagagtttaaggagggtctggcgcccggagcctcacagcacaagacaggcgcccgccacagataggaggggaaa

SEQ ID NO: 124793 - DNA, 491 bp, Arabidopsis thaliana columbia
  unsure (1)..(491): unsure at all n locations
ttgacgtcgcatgcacgcgtacgtaagcttggatcctctagagcggccgccctttttttttttttttttttttttaaaactaaaggttaaaaatatcctcttcaaaaaaaattggatgttaaagattttgtttacaacagattctctccaaaaagagctttaaaactttacaagagtttacaagaagaaacaacaacaatttgtatttatatattcattaaacagaaacgcatataaaaacttcaaacttgagaactgataagatcattcctccacgacattttcaagactcaacgaccggctcangctcctcttctcctgcagcttcaggggcagcgtcatcttcttttgcttcnggaattgagggcggtgtctcaggtttgtgatcatcagaaagaggagaagcgccaccaaaaaagcggatcgacggttgttagcaccggcttgatggacgtgattgtactgcctttctcgagaaagagctgattgag

SEQ ID NO: 124794 - DNA, 469 bp, Arabidopsis thaliana columbia
cgcgtacgtaagcctggatcctcgagagcggtcgcccctttgttaaagcttctttgtctttgggccggagggaatccaggggaccttcctttttttatatttatgaaaaaaaaccctgttcatttaacaattggagggattgccaaccgaaaaagccagggttcggtgggagtgggtctaccagatggattccctcctctgggggggggtggcgcccaggaaccaaggggaggtaaacaaaattcttaaaaaggaccccaaagccggtgggacgaacaagccaattcctttacctaactgaaccaaaccttggttgcttaaaaaatctcgacccagaggtaaaccagttcggcctgaaaacccgaaccccaaggacttggtcacaggacccaaaaggttaaccctactccacttcggggactcccctaaagggggggtgggccaaaatctgaaccgctctacaaaaaac

SEQ ID NO: 124795 - DNA, 450 bp, Arabidopsis thaliana columbia
  unsure (1)..(450): unsure at all n locations
gttccgaagggggaaaaaaacccccgggcctcgaacaagaccgcctcccgccncaggtaacagcagcaagggcccctccacccgacggaaagggagaactcgaccgttacctctccttctccttctgaaatttccgccagaaaagcgggaccccaaaaggtttctccctccgggggaggaacacacaggcggaancagaatacgccccgccaaacaaagccccggcgctggagagaccacgaccccgggacccaaacaaacagggcaaaaacacgaaccacgcggggagggaggaggagcacgaagaaccggaaacgaacaccgagacgacgacccccgaaacggcaacgaacaaggggcccggacccggcaagcacgccagaggaaggccccacgcgacccacaaaaaaaacagcccccacaagaacaaaaaggccccagaaccaaacc

SEQ ID NO: 124796 - DNA, 197 bp, Arabidopsis thaliana columbia
  unsure (1)..(197): unsure at all n locations
agctaccacgcctgcaggtaccgggccggaataattctttggtcgacgagctcactacgtcggcggccgccgcttaagnncgnntncctnctctcttagcagcagtaatggctccctcacgcgtggaaaggagttactcataccgttacctcaccttctccgtatgaaaacaacgacaagaaagttcgggactcaaa

SEQ ID NO: 124797 - DNA, 542 bp, Arabidopsis thaliana columbia
aggggacgaggggttacccagggggacaaaaaccccaagccaggcgcaaacaccaggacgaaacgagggggggcagaggaggcgaaaagaagaaccgaaaagggagcaaaggggagacccaagaaaggcaccccagaaaacagacacaaagacggaacccggaggagggggaaagaaagggaacgaaaaggattttttttttggggggggggggacacgcaacaacgagaaggggcacacagccaaggagaagagaaagcaccggcagccgaaaggagaaaaccacccccaccggggggagcggaaaaccaaggaggcagcaaaacggcagcgggcccgcaaccaaaaaacgaagaaggagaaaaggcaacgggggcgaaaaagaaagagggcggacacccagagcaaggggcgcaagagggggagcaagagaaaaacgcacagccaaaggcgacacagagagccacgcgaaaacgccacgaaaaagagacgccgccccgccaaaagaacaaaggggcccaaaaacgcgcaaagagggaaac

SEQ ID NO: 124798 - DNA, 307 bp, Arabidopsis thaliana columbia
gccggtcccacaggccgcgcgtgacccccgcgtataattagcgcgccagcccgccccagggatcggtcagacacgcagcgggtggggggggcggcgcctaccgggggggaaccacggcggcggaaaacctttataggcgagtcaccactccgtgacacagaagcgcgggcaccacggggcacgacaccccacagagaaaaactactgcggaacactaccgcgcacccgagaaaccagggcgcgatatgagaaaacagagagggaggaggccgagaggacgaccgcgagatatatcggacacacgccg

SEQ ID NO: 124799 - DNA, 431 bp, Arabidopsis thaliana columbia
cgaagcagggaacagcacgggattcaagaaggggaagccacgggcaaagagaagaacacacaggcgccccggaagcccgacgcagggccaaggcaaaccgggggacgcaagcaaaagaggaaaccgcgcgccagagaaaggaagaaagacaagaacgggacacattttaggggggggggtatagcaaaggggggcagcaagaagaggcgagacagaagaagagagggcgaaaacacagaccggacgaaaaaaaagaaaaaacggagcggagccgcaaaagaaaacacgaaagaaccccgaccccccacgaaggcgccccgggcgccacgagagcacacaaacgcgccagcagcagccgagggaggggacacccaccagaggaacaacgccgccgcgcgacgaagacgcaaagaccagccagaagcaccgga

SEQ ID NO: 124800 - DNA, 281 bp, Arabidopsis thaliana columbia
acgcccgcaggaaccgggccggaattaataccctggacgacgagctcaaccctcggcggccgcccttagatatgttttgtgaggcaacccaaagacgagacggaaacaccaccagcccaagggaaaaccagccacatcgccacaccagaaaccagaagcgaaaagcagtccacaaacagggccaaaaaaactttctcctgtggggaggggcaaaaaacccaagaaaccgaaccgcaagacaacgaccccggaaagccgaaccaagcacaaccccagcggaa

SEQ ID NO: 124801 - DNA, 342 bp, Arabidopsis thaliana columbia
atgccgcgtcgtagctcggattcgctcgagagatagttgatcatctgggaaatatgctgtcaggtcttctcggctgaaccctgttccggtggaagaggcgctgagataccgcctacagactgcctctcaatgcgcggctattaacaaccacctcgatacgactgctgagacggcacctcgcgaaggcagatcggttcagtctcacagttgactacgcatgatacagctttacacagacagtgtcacagtgtgactgtcagggagagcaccgattggcatttggcggtactctcgccggattcttgcccgagtgctcttcttggtacacacaggtgctttgct

SEQ ID NO: 124802 - DNA, 528 bp, Arabidopsis thaliana columbia
  unsure (1)..(528): unsure at all n locations
nnnnnnnnnnnnnnnnnnnnnnnnnnnnnnnnnnnnnnnnnnnnnnnnnnnnnnnnnnnnnnnnnggtcgagcaacgacgacgagccatggctncaactttcagcggcgatgaaactgctcctttcttcggattccttggcgctgccgccgctctcgttttctcctgtatgggagcagcgtacgggacagcgaagagcggggttggtgtagcgtcgatgggtgtgatgagaccagagcttgtgatgaaatcgattgttcctgttgttatgggctgggagtttaggtatttatggtttgatcattgctgttatcatcagtaccggaatcaaccctaaggccaagtcttactatctattcgatggctatgctcatctctcttccggtcttgcttgtggtctcgctggtctctccgccggtatggctattggaattgtcggcgatgccggtgttagagcgaatgcacaacaacctaagttgtttgtgggaatgattctgattctcatctttgctgaagcacttgccctgta

SEQ ID NO: 124803 - DNA, 308 bp, Arabidopsis thaliana columbia
  unsure (1)..(308): unsure at all n locations
ccnnnnnnnnnnnnnnnnnnnnnnnnnnnnnnnnnnnnnnnnnnnnnnnnnnnnnnnnnnnnnnnnnnnnnnnnnnnnnnnnnnnnnnnnnnnnnnnnnccttttttttttttttttcattgaatcgtcatattttattacttattgatgtatccatatatagtgtgcaaatgaaaaagaaaagaaatgggttttgaaacaaaagtcaaataaatttcacccatgttgcttgttttcatgagaaactcaaaaacataccacaaaagaaaacagagtaaaatataccaaaacattacaaggactgtagc

SEQ ID NO: 124804 - DNA, 514 bp, Arabidopsis thaliana columbia
aggtgaactatagaagaactatgacgtcgcatgcacgccgtacgtaagctcggaattcggctcgagagaagattagagactacagagacagagaagatgggcatggcaatgaagtcagtttttacttcgcatctttttatcctctttttgtcacctctgaatatctgagatagaagcgaagataaggatgtctaaaaggatacattgatgcgcctttaagctattgtatggctaggatttatccgtcgttgtgttatcgaaattgtcgtttttacaagggcgcgaaaggtggaaaatgcgacggtcttaagtgcttctgcgacttctgcagcgacaagcctttttagtcagtttctgatgagaaatgtttgaatcttggcatgtataatggtttgtgtaatgattaaaggtaaacgaacaagtaatagtcaataagtaaaataaaaaaaaaaaaaaaaaaaagggcggccgccgactagtgagctcgtcgacccgggaattaattccggaccgg

SEQ ID NO: 124805 - DNA, 161 bp, Arabidopsis thaliana columbia
  unsure (1)..(161): unsure at all n locations
gccgggccggaaaaacncctttggncgacgagcgcactccccggcggccgcccannngaagaggagacgggcgcacatgcgacgaaggggggacgcgcccggagaacacgaacggcggccgacttcccgaggcganacccggcgaccgcgagggggaccgg

SEQ ID NO: 124806 - DNA, 436 bp, Arabidopsis thaliana columbia
  unsure (1)..(436): unsure at all n locations
ggctttcccgggggggnaaaaaaaccccnnaggaggaggaaaaaaaaaaanacgaagggcgcagtttgccccagaaaacaagaccggccgcgcaaaaggataaaccagaacggtcttgccaggcgcaggggggggggggcccacacaccaaaccaccccagagcgaggggaaattcttaaatgggggggcgaaccaagaaaagcaggaagaggggggacaccccgccccgggcaccaaagcaccgaaaggcaaagaaccaaaaaacggccagacaacgcacgcggggcacacaccagcgggcccccacaaccacacaggcgaccgagagagaagcgcaagccgcgcaccacaagagaggcacacaggagcaaagggaaccagcccggggcccaacggcgaggcaacaccacacggggaacaacggccacagccacc

SEQ ID NO: 124807 - DNA, 224 bp, Arabidopsis thaliana columbia
  unsure (1)..(224): unsure at all n locations
ccggaccggaaacccggttcgaccacgcgtcaatcggtcagcacacttagctttcgaatataggctaagaacgagcatgtcttcttgacttcttcctcagttcaagtgcccacctgattctttctctattcactaacgaacctctttctgggcccctaaacacaacagggggttttttcttttggggggggaaggggcaanacccacaacaccggcggaaaaaa

SEQ ID NO: 124808 - DNA, 567 bp, Arabidopsis thaliana columbia
gccccgcggcgagactcaatggggggggattaatcccccccaacacccgggcccttttgcggccgggggggcgtttggccggccgcccggcgccgcaggggcccccacggagaggaacccccgcgggggcctgtgaacaagcgccgcggcgaagcacgacgccacgggcgccgagaggcacgcggcgggcggggagcgcggcccttttttttgaagggggtgatacaccccccccccccagagggggggcggccgagaacaaaaaaccgcgcccgcgggggcccagagggaggggggggggcccccccaaacagacacaccgcgcaggcagccggggggccggcgcgagcgcggacgacagccagggcacgggaccggccgccgcccgccgcacgacgaagcacagcgcccgccgggagacggcgcgccccgacgcgcccgcgacgcgggcggacaacggcacggcgccgcgcgacgaccgcgcgccgcccccggggaggggcgcgcaggggaccgcacgcaggaacagaggcccccccgcccgacggacagaggaggaccagagag

SEQ ID NO: 124809 - DNA, 491 bp, Arabidopsis thaliana columbia
cttgacgtcgcatgcacccctacgttagcttggaattccgcttgagggtggcgtggggattcctgggaagaatgggtattggattaacctcctattattcaccaaaattttaaattttcaaaccttcttcttaattgaaattaccaaacccaaggtggttgattccggtttggcagaataacttccaaatcctgattcaggagccacccttgtttcaccacaggtcaaaggacccgttggttccttgaacccgaagtccttaccaacgtatcacctcacagagaaaagtgacgtctactcttttggtgtactgctcgtcgagctttcacaggtcggcgtcccatcgagcttagcagaggacaaaaagaacgcatcaccattagatgggcgatcaagaagttcacgagtggagatacgatatcggtattggacccgaagctagaacagaattcagcgaacaacttagcattagagaaggttttggagatggc

SEQ ID NO: 124810 - DNA, 496 bp, Arabidopsis thaliana columbia
  unsure (1)..(496): unsure at all n locations
cggggaaacacgcgtacgtaagctcggaattcggctcgagggtggctgtgtatacatgtgacgataggttatggcatgagctacctatcatccacagagatatcaaatcttcaaacattctcctcactgagaattacagagccaaggttgctgatttcgggtttgcaagattagctccagatactgattcaggagccacgcatgngtcatcacaagtcaaaggaaccgntggttacttagacccagagtacttaacaacggattaactcacagagaaaagtgacgtctactcttttggtgtactgttccgcaagcttttaccaggcggcgttccatcgagcttaccatagggcaaaaagaacccattacctttaatgggccatccagaagttcccgatgggggatcccattctcgctttgaccccgacctgaacaaaattaaccgaccaacttacctttgaaaagggtctcgagatggggcctttatgcccacctt

SEQ ID NO: 124811 - DNA, 279 bp, Arabidopsis thaliana columbia
  unsure (1)..(279): unsure at all n locations
agctactacgcctgcaggtaccggtccggaattaattccttggtcgacgagctcactagtcggcggccgcccttttttttttttttttttactacaaatttcaaaatcaattacaaatcaacaattctcgtacaagaatgcatcgtgtgtgacaaattaatattcaaacaaataatatataattgtgtattcaaaaccatctcttataagcgtggagaanaanaccaccaaagacttgggccgagcaactctccgaaatctccacgaacgccccacaaa

SEQ ID NO: 124812 - DNA, 385 bp, Arabidopsis thaliana columbia
  unsure (1)..(385): unsure at all n locations
ataacgcccatagcgccccttccttaacctcgaatttcggttcgagctcgagccgttctctattcgttagatctcacagattgggacagacgtaatctggaaccactttccaacggaatgctttcgtcgggaagtaaagccgacggtgctacggcggcggctgcatcaatggaaggagtgatgacggaggcgatgaaactgattcaatcttgcgtcaccaactttggaatcagctgtggctaacaaatttattgattttgttctcggttcaccgcttcttgttaccggattgtccgcttctgggatcgccgccgcgttnttgcttggtactttaacttggagagnctatggctctgctggtttcctcttagtcgctgcttactcc

SEQ ID NO: 124813 - DNA, 473 bp, Arabidopsis thaliana columbia
  unsure (1)..(473): unsure at all n locations
ccgccgcaagacggagtacggcggagagtagatagagactcacaccgcagagatgagcgtggggtgaaacggttgtctaactactcatcttttaatactcttttggtgcccacctaaaatcttctatgatagaaacgaatgatgagtaatgactaagatgatacattgaggcccctatccctcgtttgcggggaggaatcatccgccgnggtgttatcaaaatcgtcgttcctacaagggcgcgaaaaggtggaaaatgcgacggtcttaagtgcttctgcgacttctgcagcgacaagcctttttagtcagtttctgatgagaaatgtttgaatcttggcatgtataatggtttgcgtaatgattaaaggtcaactaacaagtaataaccactaagtaaaataaaaaaaaacccattataaagggcggccgccgactaggtagcttccctacccgggaataattcccgaccg

SEQ ID NO: 124814 - DNA, 276 bp, Arabidopsis thaliana columbia
  unsure (1)..(276): unsure at all n locations
cgcccgcagagaaccggaccggaaaaaaancctgggacgacgagcacactccacggcggccagccaaaaaaaaaaaaacagaacaacttaggccacacacccaacaaagcaacgacacaacaccacccaacgcacgcccgcgcaccaccccagagcgagacaaaggggcccgcacgggaaagggaaagctcttcctaaggagttgggacccgacccacccccaccgccgccgggacaccaccccaagaggccgacaccccggccaccaaaagcgca

SEQ ID NO: 124815 - DNA, 414 bp, Arabidopsis thaliana columbia
  unsure (1)..(414): unsure at all n locations
agcacggaanncggctcgagattgcgcgacgccgacaccgaggaccnagcctctcgagctcccaaacaaaagcagaggatagagcngaaggcaagaaggcaagaatcagcgaactcaacgatgctcgtaagagcatggacaatgctcagaagcgaggcaggaggcgcgtcatgaacaggcctttttcctaagggatggtcagcgaaccgagggactgcggaaagccggggtcatcggtgacacagactaggaagaagcccccgaatctgccagaaagtggaccaaaatgggacggatagcccaaccactgaggggggatcaacgcaccgtaaggatggaccgcccgaaggacacctgaaagccggcacggccccctggggctgactcgaccagctggccctatgccccatggcc

SEQ ID NO: 124816 - DNA, 301 bp, Arabidopsis thaliana columbia
  unsure (1)..(301): unsure at all n locations
nnnnnnnnnnnnnnnnnnnnnnnnnnnnnnnnnnnnnnnnnnnnnnnnnnnnnnnnnnnnnnnnnnnnnnnnnnnnnnnnnnnncctttttttttttttttagcctaaaataagggctccaaaccaaaaaaagtgatttcagaacactatccatcaaagttatcacaaaattcgaaagaaagagaaaggtattttcagagaaaatggaggacttctctttaaagggggtcaaagaaaaactgttcccccataaaataaaacttcaatagaaaaacccgaaacccttgcctccacacatttt

SEQ ID NO: 124817 - DNA, 530 bp, Arabidopsis thaliana columbia
gatttggtgaactatagaagagctatgacgtcgcatgcacgcgttcgtaagcttcgaattccgcttgagggaaaagtgaattatttggatttaagaagggtattgggttccttggtgcgctgaataaatatgggcctgattggtaccagtattttaaccggattcaattggtttaattttaaaatagaatcttggagaaacttaaggggttggaaaggattgcctaagttggctggttattctaatgtaagataagcggataatggtgggaaaatggcggttttgtggaacaggttacctactactggcaataataacatggtgatttggtgtgcggtatcacacttgaaaagcgccacaatgaaaacttttgggggagggttgagtggtttgatgctgtgcttacagtccctgagccttatgaattcgtgtgtgctcgttccgctaatgtttgatgaattgttgactcggttggggtgttcacattcgtagcagggacggtaaaaagatgtgtactctggaagagagtt

SEQ ID NO: 124818 - DNA, 229 bp, Arabidopsis thaliana columbia
  unsure (1)..(229): unsure at all n locations
cgcaggaaccggccggataatcctggcgacgagccacactcggcggccgcctantttaaaagaggaaagacagcaagaggaaagccaccccacaagagaaacacctgaccaggccgaccaggacgaccaaagcagacccgagaacaagaaaacctctctgggggggggaaaagaaaaagaccccgcaccacgagaacaccccacacccaacgacgccagccccccggag

SEQ ID NO: 124819 - DNA, 491 bp, Arabidopsis thaliana columbia
atgattagtgcactatagagacttgagcctgccgcgtcgtagctcggatcgctggctttctatcacaagaaaaaaaagtcttctcttttttacagtctgagatttctacagaacaaaatctgattgtttttcccactttgcatctgttttgaggatgccagctacgggattttcaaggatcatttggaaggtcgttgctaagtttactggcgagaccaagttgactcatcaacagtcgtctccggaagtagtagccaccacgagccaagcaccatggaggttgagctagattcgtttcaaagacaagtcgctgagaaattcatcgatctcaacgcttcttcaaacgaccttctctctttcgaatggatcggaaagcttcttgattctttcctctgttgtcaagaagagtttcgagctatcgtattcaaccaccgatctcagatctctaaatctccgatggaccgtttgatttcagattacttcgaacggag

SEQ ID NO: 124820 - DNA, 284 bp, Arabidopsis thaliana columbia
cccccgagcgaaggcggataccaagaagcggcgcggaccgaaggcctttccagcaagaacgggggaagctggaagcgaaaggccgcgcacagccgaacaccggccaccgttttttggggggcaggcccaaaacacacgcccgcccgcgaacagagcacccggaaacggacccccccccacaggcgcccgcacgcccccagaggagaagggaaccaaaacaccagcgagcccgggcgacggccagaaccccgcccacaggccccccaacaaggccaaagaccccc

SEQ ID NO: 124821 - DNA, 313 bp, Arabidopsis thaliana columbia
tgcgggacccgcgaaccgaccgccagaaggagaggaaccaaaagcgcgaaaggggacccgaggcacggccccacgcgccccacaggggaacaggcccacccggaacaggcccaccgcagcgaggggttttacgggaggccgcggcagggacccccccaaagaagaaaggacccccgccaagacaccgccaggaaaacaagaggccccaggagcccccgacccagaagggcccggacaggccacgaaacccgccaaccgcaacacgccgcccaacccaaaacccccccaccaaccacgccaagagagaccgaag

SEQ ID NO: 124822 - DNA, 300 bp, Arabidopsis thaliana columbia
cccgagcatcaattaattatatgcagccgtcggcgaaccccccgcgaagattaccatcggagcggatctgcggacgcggccgtgtagccgcgggagcgagagggaaccccttcgacggagagtatcgtatagtgcgcgccattattctggctttaagtttgagttcttggcgcgaggggcagtacgcgatgtagtaggcaccgcggtaatatcttgaagaggagtgatgaagagcgcctgatggtctcagcgcgacatctgaggagggtgagcagcacatgcagtgacgccacgcagggg

SEQ ID NO: 124823 - DNA, 251 bp, Arabidopsis thaliana columbia
ggggaaaaaccagcgccgggagaaacaaaaccgcccccagaaaggaaaaccaaccccccggccgaaaggccaagagcaccggggagaaagcggaaccggcccccacggaaggcacgccaccccaggacccgcccaccaacggccaggagcgcaccacggccaaggccccccacccgccgccacccagaaacccccgcagccacgaaagagggcgcacccaccgcacagggaccccaaaacaacgccaacac

SEQ ID NO: 124824 - DNA, 275 bp, Arabidopsis thaliana columbia
aaagaaacctgacgtcaaaaaaggaggaaaagggccagggacacaaaccggaggacatggacagggcgacgaagaccaggacccccacctttttttaggttgaccgggcccaaaaccgaagcgagaagccccgcgccaccgacaacgaaagaggaggaagacccaccggcccacgagaacaagaagccggcaagggagaaacgcccgaacgacgggaaaccgcgggaaaaccacaggacgagacgcccgccaacgagcccaaaaccgcacccacc

SEQ ID NO: 124825 - DNA, 333 bp, Arabidopsis thaliana columbia
aaggggaggacagaaaaaccccaggggacccgcggagccggaacaggagaagagccgacgaaagcggggggaggcaaaagcccgcccaggccccacaaaaaaacggaaagacgaagaagcccgagaaaccggaagccacagcgagccacaaagcacgggggccgcgggggcggggcaagaagggagccgccaatcttttttttttggagggggggggacggaaacgcaacccggacaaaaccaggcgggcccaggggcagagagaaaccagaaagggcgggcgggcgggggaggaccccccacgagaagggcgaacccccggccggagagggc

SEQ ID NO: 124826 - DNA, 288 bp, Arabidopsis thaliana columbia
  unsure (1)..(288): unsure at all n locations
ggggaagctaccacgcctgcaggtaccggtccggaattaattcctgggtcgacgagctcactagtcggcggccgccctttgttttattgatgctttgttttgatacaaacactagaagtcttataaattcaaagtatgtctgagttttacagcattagagagaaagagaacagcacagaaacatttatagaaacatgattacactcttttctacaggggtaagatnnactgagccaaagcacttgtgttgtacacaagaagagcagctccggcaagaattccggagag

SEQ ID NO: 124827 - DNA, 264 bp, Arabidopsis thaliana columbia
ataaagagacactgagtaatatggttccatcgcatgaagatatagtgtccgcaggcataaatgcgccgcgacactatatatattaatcacaaagattataccgctcatatattttatcagataaatatgaagcaccgaataaacagaaaaatcagcgaaccttgtgtcgagatataatagaagcggggagataggtagttattgaggtggataaaaagcaaaggcgacaattcagtaatgggatgttagaccgagaaagcgaga

SEQ ID NO: 124828 - DNA, 324 bp, Arabidopsis thaliana columbia
  unsure (1)..(324): unsure at all n locations
aaaaagttcttttttaaagtgctttgtaaaaaccaaagttgctggccccctaggttccccggggttttcanaggtggttgttgggtccttttttaaaccccccccttttttcctttttaaccccccccccccccccttttttcccgggaaaaagaccctgaaaaccccccctctttttttttttttaaaaaaattttcccccaacctcctgctgaatttgtttccccggttcccccccctgacccccccccccctccctggggttttcctgctgcccctcaaatgacttttcggtctgaaccttaaaaaatttggggttccccg

SEQ ID NO: 124829 - DNA, 449 bp, Arabidopsis thaliana columbia
  unsure (1)..(449): unsure at all n locations
cgaagcctgggaccccaaaagcgttgcccttttttttaaatcctctttttcccataatttttgcgcgatagggctgatttactatttatagccgcggctgcccgcccaaagttggaaaaaaagtttctttttggaaggggcttggggaaaaccagggggccgggcccccaaaataaacaggggctccaaaaggggggggaaagcccccanaaaaaacccacccttttttccttttaaaacccgcccccaaaccctttatagggggaaaaaaaaatcttaaaaaaccccccttttttttttattaaaaaagaatttcccccaggctgtgggggaaattgattcggggtggccaccccggaaacccaccccccccccctggggtttgggcgggggcccccaaatcaaatttgggggaggaaaaagaaaaaaaggggggggtcccaggacca

SEQ ID NO: 124830 - DNA, 428 bp, Arabidopsis thaliana columbia
  unsure (1)..(428): unsure at all n locations
aaacccaccatggaatgattncggatgccaaccaggattaaaaagacgaatcatccattatagaaattggaatcgggctattttatacataagatgtgggaagcctctcattgaccacattaacaaaacaggcctttcttctaaacgnggggagaaacccaaaacacagaaacaagaccccgaaccccccacccaccagggccaaagagaagccacccgccggcgaccccaaaagccaaagggacaagcggaagaagggcggacccnaagggaaacggcagagaagggcccaccagcccaaccccaagaccaagggaaaacaaaccaaccccaacagggggcacaaccccaanaccccccccggaccacgcccagacccgaaggcccgcaagcgcaaacccccacccccgcccacagccaaccgaagc

SEQ ID NO: 124831 - DNA, 272 bp, Arabidopsis thaliana columbia
  unsure (1)..(272): unsure at all n locations
cctgcaggaccgggccggattcccggtcgaccacgcgtccagaccacgcgtggggctatacagaggaagcatgatcgagagttaggataatgggaactgacagctcgagaacataacctatacggccattgatggtaaggtatcacagcttgagcatgccttcattcgaggcaacttagacaggttctcattaagaggggacangacaaacaaggcaccaacgcacaagggaagccggggcaagggaaagagcgcagcacccacgcgaaggc

SEQ ID NO: 124832 - DNA, 268 bp, Arabidopsis thaliana columbia
  unsure (1)..(268): unsure at all n locations
cgcctgcaggaaccgggccggaatacacggctcgaccgacgaggacaccaccgcgcgcccgaccnggannnnggngaaaaagaaaaaaaagacccaagcacaagagagcaccagcgagaacgncacggcggcnacgcgacggcnagcgaagaaaccgacagaaccggagcacgacancagacagaaacctttttctttagggggggggacaccgaccagggagcgaaacccccaagaagcgacaaaccggagaacggcgagaacaacc

SEQ ID NO: 124833 - DNA, 491 bp, Arabidopsis thaliana columbia
  unsure (1)..(491): unsure at all n locations
nnnnnnnnnnnnnnnnnnnnnnnnnnnnnnnnnnnnnnnnnnnnnnnnnnnnnnnnnnnnnnnnnnnnnncttnnntnnnnnnnnnnnnnnnnnnnnnnnnnnnnnnnnnnnnnnnnnaaaagaaaggcgtctatattatgatataaaacatatctctccatctataatactctacagcttgcagcttgctgtctgcaagtgttctgtacaacgttacaaatacgaatcctcattcatttaaatttttttataagttcataaaacatttctttgtttagcaagatcaaattacaggaagagatttgatattttgaacctgagattcacaatctaattagtcagccacgcagtccgttgacagaagaatgtggaggagctgagttccttctccgatctgtcttaggtaaatgtttggacattatagattcctgttcttgaataatgctgcgtgcctcgacgagttgtgcttcaagttcaagttccctctctg

SEQ ID NO: 124834 - DNA, 497 bp, Arabidopsis thaliana columbia
  unsure (1)..(497): unsure at all n locations
nnnnnnnnnnnnnnnnnnnnnnnnnnnnnnnnnnnnnnnnnnnnnnnnnnnnnnnnnnnnnnnncttttttttttttttttttaatgtgaaaatgatatatatgttattaatccaagagaagcacttatgagaggatcttcacaacgatgactaagaatcaaacattacagactggcatctgtgtgttactagtctctagaagaaagattcgagacgtttgtttatctntttaggtttctcgatgataaagatatgaccagttctgttgatgataacgagtttcccattatatcctacatgcttttcacgtctatagcccatctccaatgagaacacttgatcatgctctgaccatataatcaatgttggctgtntgagctctggaatctctgagatatactgtctgtaggtatggatttgatgaggtctatattgctgccatcttatctcatgtgaagcatgttcgatgaaatcatggagaagacattaaggaacc

SEQ ID NO: 124835 - DNA, 518 bp, Arabidopsis thaliana columbia
  unsure (1)..(518): unsure at all n locations
cgnnnnnnnnnnnnnnnnnnnnnnnnnnnnnnnnnnnnnnnnnnnnnnnnnnnnnnnnnnnnnnnnnnnnnnnnnnnnnnncttttttttttttttttttaatgtgaaaatgatatatatgttattaatccttggaaattacttatgagaggatcttcaaaacgatgactaagaatcaaacattagagacaggaatctgtggtttactagtctctagaagaaaagatttgagaagtttgataaactttttaggtttctcgaagttaaagatatgaccagttctcttgatgataacgagtttcccattatctcctacatgcttctcaagtctcttgcccatctccaatgggaacacttgatcatgctctccccatattatcaatgttggctgtttgagctttggaatctctgagattattctgtcttttggtatggctttgatcagttctctcttctcttccatattatctcttggcaaagcatgttcgatgaaatcatggagaagacaagtaggaacc

SEQ ID NO: 124836 - DNA, 299 bp, Arabidopsis thaliana columbia
  unsure (1)..(299): unsure at all n locations
cnnnnnnnnnnnnnnnnnnnnnnnnnnnnnnnnnnnnnnnnnnnnnnnnnnnnnnnnnnnnnnnnnnnnnnnnnnnnnnnnnnnnnnnnncctttttttttttttttttttttttcaaaacagactctgtaacacttataaatgaaatgtgtgtctgatttttacaacattggagaggaagagaaccgctcacacacattcattaacacgtgactacacattctttatcgacttgaaaatttactgagccaaagggctggggaggagcacactagaagagcctaccgaaagaattgtaa

SEQ ID NO: 124837 - DNA, 338 bp, Arabidopsis thaliana columbia
  unsure (1)..(338): unsure at all n locations
gggaacggaggccggaaccgggcccgcagacctaggcagcgggcgcagcagccagcaggacgagagggaaagcaaaaggacagaacaaaccacaaagccaggaccaggcccaccacagcgcagagcgcagaccgccgcgcgcggaccaacagccaggagaggagactcgcaaggacgggggaccagaaacggcgggaaacccaaaagaagcaggccccgaccgcacgaanagcgagcacaggacggaaaggcaccgccacagccaacgacagacacagaaaaacggaagcccaccggggcggataagggaaaggaagccagcgacgccgcccgaaccg

SEQ ID NO: 124838 - DNA, 394 bp, Arabidopsis thaliana columbia
tgacgtcgcatgcacgcgtacgtaagctcggaattcggctcgagtttccatcttcttcaagtcttggccagaatggactgttctaagccaagcacggctttaaatgttttagaatcgaactcctccgacatgctggaggaaattgctggcgaatgctccttcatggcaaacacttgattttggaatacgatgtgaaacaaccattttttttcatgggccagaagcccaaatggcaaccatttgcttttttaaggccggagaaaagccaatcggtatcgatccaacaacaatcggtttcggaaaaatagatggcttggtgctaatggttaacctgaggaattcttccgttaaaccatgggatgaagaaattcaaatttatatggaccgggacctt

SEQ ID NO: 124839 - DNA, 287 bp, Arabidopsis thaliana columbia
  unsure (1)..(287): unsure at all n locations
gccggcannnnnnnnnnnnnnnnnnnnnnnnnnnnnnnnnnnnnnnnnnnnnnnnnnnnnnnnnnnnnnnnnnnnnnnnnnnnnnnnnnnnnnnnnnnccttttttttttttttttttttggggtcccatacttgcaaagcgctcatttcttcttgtaataaagagtccagaatcttacattggaatgccaccttgctgaccactaaatgttttaacagtcgtcatccaactgcaccgccaatttctccagagtagctttgagacgtatcaaaggtgcgagatcata

SEQ ID NO: 124840 - DNA, 481 bp, Arabidopsis thaliana columbia
  unsure (1)..(481): unsure at all n locations
ttgacgtcgcatgcacgcgtacgtaagctcggaattcggctcgagctcacatctgttacaatgcggactagactggttcttactgagccaagatctggtatgatgtgttaggaatacaacagacccaacagactgaagaaatctgctgcctactacacaacctagccgatcacttcatagcgaaagagattctgaaacgacacctgatgtgcatgggcaagaagccaacggcgcaactactgcatctgttactgatgaagagaggcatattcggaatgggtatgagcacatctgatgtccagatgaatctgatgcatcagtacacttctgaagctggaggattactgcagtgaatgctacggattcagagagttcgacattgactggatagggctgatctcncaacctgtgtgggagctagggcatatatgcacccggctatgaaaatgacttcagcataagcgctacaattgctcagcta

SEQ ID NO: 124841 - DNA, 234 bp, Arabidopsis thaliana columbia
  unsure (1)..(234): unsure at all n locations
tnnnnnnnnnnnnnnnnnnnnnnnnnnnnnnnnnnnnnnnnnnnnnnnnnnnnnnnnnnnnnnnnnnnnnnnnnnnnnnnnnnnnnnnnncctttttttttttttttctgagcgcgcactatcttactatgcgtgcgagacttcgtgtcatcaaggatccagaatcgtacatgcgcaaagccacattgcttaacactggattttttaacagtgctcatccagatgaaccgtcaa

SEQ ID NO: 124842 - DNA, 467 bp, Arabidopsis thaliana columbia
  unsure (1)..(467): unsure at all n locations
tgacactatagagagttatgacgtcgcatgcacgcgtacgtaagctcggaattcggctcgagcttntataaaactcgtttctcatcgcgactcgcagacttacttagctacgtgacggactggagctcggtgtagtacagagcacaatcccgccggtgaactttagctgtgaagaaatgtgggcanaggaaaaaacagagcgtntactcagagtcaacactcttggatcgattcgcataggaacataatccgtcttttgggtggtgttcgaatcggaatctgaagcttttgtctatgatatctnntctacggagtttagctctctgcttcacggtgcccgtaaggaagtggaggagctgattgggagcacgttcgacgtcgtttaggcgttgacatcactagctatcttcatatgattgtctccctcgatctacacgtgacgtaaagcttgaatgtctattggttcc

SEQ ID NO: 124843 - DNA, 354 bp, Arabidopsis thaliana columbia
  unsure (1)..(354): unsure at all n locations
tnnnnnnnnnnnnnnnnnnnnnnnnnnnnnnnnnnnnnnnnnnnnnnnnnnnnnnnnnnnnnnnnnnnnnnnnnnnnnnnnnnnnnnnnccttttgttatgatcttaatcttagcttacgtgatcgtgtctgggagactcgtgtgtagttttcagagaaaaataaaccactctgagctcttgaaattgtgtttacaatgcttttttttgtaaatggtgggcgagaaaaaataaaattaaaactcccaaacccaaacaatatgctgagttaaaatctttttttgcgctgatttaacaaatgaatgccaacaattagttttcccccaccctttttttaaaggggcataacccctat

SEQ ID NO: 124844 - DNA, 277 bp, Arabidopsis thaliana columbia
gacgtcgcatgcacgcctacctaagctcggaattcggctcgaggtcccttgattggaactattttccctaacccatagccagaacccaaccccttttgccttagctttcggtagcattttcatggaagctggccgattccttgtaggaaagacgaattcgatcccacttggtgaaccgaatttggcgctctatccggggaacttcttgttttggtgggaatctcccggagggaattcccgggccagcttggaaaaattcctgggtaggtggaaaccg

SEQ ID NO: 124845 - DNA, 344 bp, Arabidopsis thaliana columbia
  unsure (1)..(344): unsure at all n locations
tnnnnnnnnnnnnnnnnnnnnnnnnnnnnnnnnnnnnnnnnnnnnnnnnnnnnnnnnnnnnnnnnnnnnnnnnnnnnnnnnnnnnnnnncctttttttttttttttttcattgacacacattttacattctgtttggactatagaggatcgacatgacataggagagaccaggtcacacgacactccgtaaagagggatgcttcatacaatggcaatacaaatgcacttcaaattactctagcgcgcgtccctgtagaagagaaaaagctaatcaagagatcagcttagacactcaagacccataagataggctgcagacaccacgtgaaaagctcgagcacca

SEQ ID NO: 124846 - DNA, 469 bp, Arabidopsis thaliana columbia
ctatagaagagttatgacgtcgcatgcacgcgtacgtaagctcggaattcggctcgaggtcactggattgggactatattccgtacgcaatagcatgaaccaaacacctgtccacttagcttatggtaggattttcatggaagctgccagattcgtcgatggaaagacgaatacagtcctccttggtgaactcaatttcacctctatcagtggatctatttgtgttgatgggattatacgtggagagatttccagagctagcttggaaataagcttgagagggtgaagactggtcacgattcacgacactgcattatgcctgtgacaaaggtgacctttgaactgacatctatatgtgtaggactcaatcgatgactcgatgaagctctgatcagctaaggtttatcacctctagatctagcagtgcaaagacggctaagtgtaatcctggaggatcttatggacaaag

SEQ ID NO: 124847 - DNA, 468 bp, Arabidopsis thaliana columbia
  unsure (1)..(468): unsure at all n locations
tnnnnnnnnnnnnnnnnnnnnnnnnnnnnnnnnnnnnnnnnnnnnnnnnnnnnnnnnnnnnnnnnnnnnnnnnnnnnnnnnnnnngcaggcgccctttttttttttttttttattagacaacaatttacatgctttttgggacttagagggatagagacaaacctagggggcaaaccagtctacacgaaacttcgttaaggagaaatgcatcatacagtggcaatacaaatctgcttcaacttactctggcgcggtcccttgtggggataagaagctattcaagagaatagcgttagagactcaggaccctatagataggctgcatacaccacgtaaaaagttcgagcaccaaacatagtattctcgtaaaacatttaccataaacatcaactaggggaagtaccctgaccttctgaaagacggccagcttagttagagccttgctaaggaaggcttttaaccttctt

SEQ ID NO: 124848 - DNA, 278 bp, Arabidopsis thaliana columbia
  unsure (1)..(278): unsure at all n locations
gccggccnnnnnnnnnnnnnnnnnnnnnnnnnnnnnnnnnnnnnnnnnnnnnnnnnnnnnnnnnnnnnnnnnnnnnnnnnnnnnnnnnnnnnnnnnncctttttttttttttttttcattaggaacattttagctccattttgcgctttagttggatgacacaacctaggaacaaaccagctcacaccaagactccggtagatgaggagactcatcatacatagtggcatcacaaatctagcttcaagaatacacttgacgcgggtcccctgtggggc

SEQ ID NO: 124849 - DNA, 431 bp, Arabidopsis thaliana columbia
  unsure (1)..(431): unsure at all n locations
aggtcacactatagaagatcatgacgtcgcatgcacgcgtacgtaagctcggaattcggctcgagggcccttgattaagacgattttccatacgcaatagcattaacctaacacctgttgatttagcatatggtaggattttcataagaaacgtccagattcgtagatagaaagactaatttgattcttcttaatctactgaattacatcactatacaggggatcttcttgagnttgaagggattattctggatggaattcccgagctaacattgaaaaaatcctgggaccgaggatactgctatgattcaacactcttgcttatgcaccaagtcaaaagttcctctgacttaaaagcatttttttaagcctaatccatgactccgtagaccctttacctcaagggttattaccagatgatcctgcaaccc

SEQ ID NO: 124850 - DNA, 416 bp, Arabidopsis thaliana columbia
atcgacttacttagggaaagctggtacgcctgcagtaccggtcccgattattccggggtcggacgagctcactagtccgggggcagccttttttttttttttttttttttgaaacaatttgacctccagtttctccattaggggataaacacatgcttgggacaaaacagtccacaccaaactatggaaaagagaaatttcttagacatgtggtcatataaaatgcagttccaacttacattgacatgggttccttttgagggataagatttgattagaaagaaatagtttagagacattggtcctataaaataggtgcatacactacttcttaactgggataaccataaatagttttcttgtaaaacagtttcctaaaacatcgaccaggggaataaacttgaccctttgaaaca

SEQ ID NO: 124851 - DNA, 466 bp, Arabidopsis thaliana columbia
ttaacgtggcttcgccccgtccgtaacctcggattccggttcaggtccaagggcattgtaggcacaagctgcttaaggcaagggggcacaaacctctcgtctccagtggagaagccaggcacggtgaaaggcttccaggaaccttatggcaaccccatggggggaggatccaccatgctctgcgagggatacaatgtgggccttcattgacaagcacaaatcttcggcactcttgaacggtggtactcaaaatgttgcgatacctaccctaagcaaaaagccgcccattctcacattcgtggataaccaccatgaccacttggatgacctcgacatagggtccatcgatagccgaaccacttactgtgtagctcatatagccaaggctatgattgacggatctgccattgtctacagcactcataaccgctggccattatatcagtgtctcttggaacacaccata

SEQ ID NO: 124852 - DNA, 422 bp, Arabidopsis thaliana columbia
  unsure (1)..(422): unsure at all n locations
nnnnnnnnnnnnnnnnnnnnnnnnnnnnnnnnnnnnnnnnnnnnnnnnnnnnnnnnnnnnnnnnnnnnnnnnnnnnnnnnnnnnnnnnnnnncctttttttttttttttgtatcctcaacaggtcgatctctacctctcacatgctttagatgacacatagcttaggtcgttcgcatcgagatcgatacacgccaacgctaccgagatactgccacccctttagactgaggtaccgtgactccaacgtccatatactaagaagatcaatgcatttcccagcacttgatatcggagaacgctttgacctgtccgttaccaacttacgtgggccagacaaaacattaatcctctagtgttatgccagaattaaccttaattaatgcctgtgagatcatcgacgctggcggcctgactagaccca

SEQ ID NO: 124853 - DNA, 462 bp, Arabidopsis thaliana columbia
  unsure (1)..(462): unsure at all n locations
atgacgtcgcatgcacccctaccttagcctggaattcgggttgagttccaaggcaatggaagccacatgagcctaaggggaagggagaccaaactcttcttctccggtgaaaaagccagcaatggtttaggcttcaggacccttatgaccaccccttgggggaaggctgaacctgactttgtgaggaatcatctggggccttaatttacaaaaacaaggttgcggctcactggaaggggggtcctaaaaaggttgcattccctacccaaagcaaaattcccccaattttcatttttgtggttaacaaccacgactactggactgacctggacattggttccatcgctagttaaaccacttactgccttcctcatctagccaaggttattattgacaggtctgcctttgntgaggaactcatgacccctggcattctatcactgttactaagaaaacagttta

SEQ ID NO: 124854 - DNA, 450 bp, Arabidopsis thaliana columbia
  unsure (1)..(450): unsure at all n locations
nnnnnnnnnnnnnnnnnnnnnnnnnnnnnnnnnnnnnnnnnnnnnnnnnnnnnnnnnnnnnnnnnnnnnnnnnnnnnnnnnnnnnnnnnnnnnnncctttttttttttttttgtattcagaacagtgcgaactcaaccactcacatgctctcgacggcgctagcttaggccgttgacatgtgaacgataaggtcaacgatccgagaactgtcaccccattcactgtcgtaccatgactccaacttcacatacttgtcgctcaatgcaatcccagccttggaatcgaaaatgcttgacctgtcgtcaccaactaagtgggcaaacacaacatcatcctcagtgtatgccaaaattaccttaattttgcctggagattactacttgatggccttcttgacctcgaggcatgttgcaggcctgctcaagtctaacggtgagatgaacaacgga

SEQ ID NO: 124855 - DNA, 512 bp, Arabidopsis thaliana columbia
  unsure (1)..(512): unsure at all n locations
taggtgacactatagaagaatcttgacgtcgcatgcacgcgtacgtaagctcggaattcggctcgagctgcaaggacctacgcgagctgagagtgtttccgtccgagccttttgtcatggaaccaaatgtggcattgacggaacaggggcttgtctccgtctccatgggctgtccaaaactcgagtcggttctctacttctgccgtcaaatgaccaatgctgcattgataaccattgctaggaaccgtcccaacatgactcgctttcgtttgtgcatcattgagccaaaagccccagactatctgactctagagccactggatattggatttggagccatagtagagcactgcaaggatctccgtcgcctctctctatctggcctcttgaccgacaagggtttttgaatacattgggacatatgccaagaagatggaaatgctctcagtgccatttgcaggagacagtgacttangcatgcatcatgttttgtccgggtgcgatagcttgag

SEQ ID NO: 124856 - DNA, 464 bp, Arabidopsis thaliana columbia
  unsure (1)..(464): unsure at all n locations
gccnnnnnnnnnnnnnnnnnnnnnnnnnnnnnnnnnnnnnnnnnnnnnnnnnnnnnnnnnnnnnnnnnnnnnnnnnnnnnnnnnnnnnnnnnnnnnnnccttcnagccttttgttatgcaaccaaatgtgtctttagactgatgcaggtactactctccctttgaaaagagtggacaactcttaaaagggttatagagtccaaaccatccaattaaaacagttgcttgtttgacattgcttttaaaaaaatctcctttacttcttaaaaaaaaaccccccccaggatctttcagcggaagtggcccaatataccatccacagtctattgtttcttccataattaaaaacaaaactcttttaaaacccctttttctctttctccacttattcatggcccataagcttgatggttcatgaaccccccgaatcaaaattttgggaaccgacctttttttgttgctaa

SEQ ID NO: 124857 - DNA, 379 bp, Arabidopsis thaliana columbia
taggggacctatagaagatcttgacgtcgcatgcacgcgtacgtaagctcggaattcgggttgagcgactcaacgcaaagcttcttcaaagattcccccagaaaccattcaactttcttccattttcaccttattcttccggtggagcttggcttttaagctggagcattggcggcccttcttccttggctttggaataaatggactctttcttattaacaattcacaccggacaatggaacgcgccatgaacttccgggtggcaaccttgggttttgacgccggttacaaggacccgaacggtggccgtgttggacaagaaggtccgtttgtttaccaaggagttaaggttcggtgttgagggccgccctgtcttctt

SEQ ID NO: 124858 - DNA, 466 bp, Arabidopsis thaliana columbia
  unsure (1)..(466): unsure at all n locations
cnnnnnnnnnnnnnnnnnnnnnnnnnnnnnnnnnnnnnnnnnnnnnnnnnnnnnnnnnnnnnnnnnnnnnnnnnnnnnnnnnnnnnnnnnnnnnnnncctttncttttcttcttttctttccattttcaccttattctttcccttttttctgaggctttggtttacattattggacataatacaaacggggtgcctaaatgcatgggttttaaaacaggtctgccccctgtggcccattatcacggaagcggaagtccgatccctagccttacctgtaacaccgaatccatgccccccttgtccgaccacttttaaaacagaccccccaatcccggctatatgcatcaacacacatcctggccttgctcttaatgatgccgccctgccgccctaccttcataccgccctgcccccctgggaggccaccagcaccttttttttaggggccttaacatggccacctca

SEQ ID NO: 124859 - DNA, 494 bp, Arabidopsis thaliana columbia
ggcccccttccgaagctgggattcgtcttaggtgtcgaactggttggtaaggctactcagaaagtccccccgcgcgctgttcagcccggatatgcaccagcgggcccttgattgctcaggagggtatcctcttcctttcccaatccctcgagcctcatgacgtcgccccgtaagaattcggctccgctggcgttttttttttttgggggttgggcgtcacccccgctaaggctttgataaaacgcgtctaaaccacaacgcatgggtccacagctatcctccggcccttaatagctctacctttacctgatctttaccctttttctttatggagctttagtccgaaagacagctcacaactccttgcccaggatctaagtttgagcacaatttctcgaccttatgtttcaccatttgcttgagaacaacaggtcgtacgcgcctagactttatcttattgcacatgaagcctctgcgttggggttcttgcaggt

SEQ ID NO: 124860 - DNA, 316 bp, Arabidopsis thaliana columbia
gccgccgcaggaccggccggattccgggcgaccaacgccgctcctagacaccgcaaaccaactacaaccaaaccgcaatgcaacacaaccagagggatcaagcccagctggaccaaaggggcaacctagagaccccgttcacctggggggcgacccggaccggaagacgaccccgaaacccaagaaggggcggaggaagacggggagacgggggggccgggggaacacacggggccgggagagccgaccggaaaggccacgaagaacggaaggaagaaacggcaggaaacggcccccggggggggccaaacggagc

SEQ ID NO: 124861 - DNA, 493 bp, Arabidopsis thaliana columbia
tgacgtcgcatgcacgcgtacgtaagctcggaattcggctcgaggaccaaagaaggagaagagtccaaatcgccattgaaatgggtcttaaagcttcacctggtaccggattattcccttcttttcgtcctaatggttcttctttcccttcgacttcttctaatcggccttggtcccttaagaatcttccttttaaaacatttttttttggtaacctaagtggaacccttaaaatgaatggggtgaaaataacctgggaatataaaactaagggccatgggcatggggcctccaataatccttttgaaccaatttcttaaatgggcaaagcattatccaatgcccctattaacctttttgaagaaccggaaaaaattccggaaccaaccgtgaatggaaagaaataggaattgaccaaaaaggctgaaggcactgtgccaggtttaaccataccaaagccggttccgaaccaaatataaggctgcacagaatc

SEQ ID NO: 124862 - DNA, 409 bp, Arabidopsis thaliana columbia
  unsure (1)..(409): unsure at all n locations
gccgnnnnnnnnnnnnnnnnnnnnnnnnnnnnnnnnnnnnnnnnnnnnnnnnnnnnnnnnnnnnnnnnnnnnnnnnnnnnnnnnnnnnnnnnnnnnnccttnggctctctagcttacctgttaccggattattcctccttcctcctctgttttttttccttcgactctttttatgcggggggaaaaaggaaaccccctttttaaaagagctggtgtgtcccttaccccacttttaacggggattaaaaatgtggttattttctttagaagatccccacctttttgcgtttttcttcaagacactatatttttttcagaacgaacctatagattccccctcccatttgggaatccgcccattttcaaagtggttacccttcctttccctgcagtaactctttttgaatct

SEQ ID NO: 124863 - DNA, 486 bp, Arabidopsis thaliana columbia
aggtgacactatagaagatcttgacgtcgcatgcacgcgtacgtaagctcggaattcggctcgagggctaacccaacaagatgaagaatagaaacgcaacctcaacaaccatggcggtgaagaataacgtttatggagatcctgatgctgggatgtttaggagatccagaggcccttgtggcatcttccaagtatcctttacgaagatctggcgccatcaagattcagatctcttttcaaagactattggtacttgatgtgagccatacaagttccgaccctttgtaagaatatctatcgatttctttggacggatcagatcttcatgtgcttgacctatccgagctttaagtcattacgcggaggtttttgttgacccattttctacgggaagggtggattggacctgttccttaagggttcattggatattagctacctcctgggcttaaagcttagcctggtgctggtaaattggttgatctt

SEQ ID NO: 124864 - DNA, 465 bp, Arabidopsis thaliana columbia
  unsure (1)..(465): unsure at all n locations
gccgnnnnnnnnnnnnnnnnnnnnnnnnnnnnnnnnnnnnnnnnnnnnnnnnnnnnnnnnnnnnnnnnnnnnnnnnnnnnnnnnnnnnnnnnnnnnnnccttttttttttttttttttttttccggaccataagggtaaactataattgctcgatcaagttaagacccaaatgaaaagccatttgctgttgtctcacatggacagaagatcatccgttagtaacagactccttacacaagaaggaacatacatgctttcttgagagtgtgacgctacaagagactaaacctgcctgggccagagcagctccttcttgttcggcaacatcagatggtgcacatggagactccctgtatcgtgcctgatactccgtcggctgtagcccgggacgaaaggctaccaggggtccctatggctgcacaaccctggcttttcaatagcccaatgagctgaatcaaagtata

SEQ ID NO: 124865 - DNA, 470 bp, Arabidopsis thaliana columbia
tgacgtcgcatgcacgcctaccttagcttggaattcggcttgagtgggaccggaaaagggttggcctgggttcattattgcttgcacccgagaattattccttggaaccttagcctcgaatggcttttggtggccggcgaagttggacccaaaattctcggtttccggcctacctaggctgttaaccccattggttcccattttaaccccttccgcaatggaaaatttgggggtttccggttttgtggctcccaatttttcaaaacccttggttgcaactccaaaaggaaatgtctacagctccggggtggggcttctaaagctagtaacggcccaaaaagcaccaagtgtaacaaaagtttctgaaaaaaaagctgaggaaaaaaacttcaagggtaacctcgtggattggattacaaagctatcaagtgattcaaaactgcaggaagcattcgacaggtccttacttg

SEQ ID NO: 124866 - DNA, 453 bp, Arabidopsis thaliana columbia
  unsure (1)..(453): unsure at all n locations
gccnnnnnnnnnnnnnnnnnnnnnnnnnnnnnnnnnnnnnnnnnnnnnnnnnnnnnnnnnnnnnnnnnnnnnnnnnnnnnnnnnnnnnnnnnnnnnnnncctttttttttttttttttgtaccacacacccaaagcttagtacatagtaataagagagtgcatctaacaatatatcatattacaacacaccatcgacgacgagaacccaaaaataaaataaaaacaatacttatacattatatatatctttggactgctacgactagagatgtttgtttcacaattcttacccttcctcttgatcaacgagcaactatgagctcttcaatgaaatcgccttcacctgattcagatgggattaagatatcatcatcggcggtgaagttgtagctctctccaatggctcttagaagctgataaacttcaaacatggttggcctctgctttgctat

SEQ ID NO: 124867 - DNA, 487 bp, Arabidopsis thaliana columbia
tgacctcgcctgccccccttccttagcctggaattccggttgaggtcttccccggttcctttcttcctgggggggggaatccggcttcttggcccattttttttattttccccagaaagggaaccaaatcccaccatttcctggcctcctctaaaggtcctcctaaggtggaacctcctggcctgttttggaaattcccagtagaagaaacctccgttaatttccccgcggaaatcctctaacaatcataaagtttcctttttttttggctctcgagaaagttttgagaattttcacttcttcaatggcgtcaagagaagtatcaccgatgatcaaccaagggtttatcgcaaacccttctctctctttttctccgtcaagaatctcatctccgattaaactctccaccgcctttccttctttttctccgccaccttctccgccaccaaacgaatagactctctcaaacccgactcttttagatatg

SEQ ID NO: 124868 - DNA, 446 bp, Arabidopsis thaliana columbia
  unsure (1)..(446): unsure at all n locations
ctctnnnnnnnnnnnnnnnnnnnnnnnnnnnnnnnnnnnnnnnnnnnnnnnnnnnnnnnnnnnnnnnnnnnnnnnnnnnnnnnnnnnnnnnnncctttttttttnttttgctattntcttttatttttctntgtttttttgaaccttggtttcttcattgaaattcacaagtaggaacagtttaccaaaagtaagaaaacaaaggttttgaaattttgagggtctacaatcttattttatattgaggtagtcaatagaatggaattttggagccgagggttattggggctttgtcaaagacctgttttatgaaaggctcttttccaccacacctaaaatggctcgttgcacattttggacaatcatgcacctttgcgttaaaaaccggtcaaaaccattttttaagaataacttggtggtggggcttaaccgacaaagcaaatttg

SEQ ID NO: 124869 - DNA, 476 bp, Arabidopsis thaliana columbia
  unsure (1)..(476): unsure at all n locations
gccnnnnnnnnnnnnnnnnnnnnnnnnnnnnnnnnnnnnnnnnnnnnnnnnnnnnnnnnnnnnnnnnnnnnnnnnnnnnnnnnnnnnnnnnnnnnnnnccttttttttttttttttttattttcctaactcattcaagtcttgcaatagattgagcaatttataaattttgtacaacaaagcttcatagctgattgtgttatntcagctaaaatttatgagaatctgctgtgatgatgagtgggacagttatacagatttttagctactagcacgcttaaaatgttcacgaataaccctctcagcgtgagacgggtacttatctcgaacataggctcgaagacacttttggtacgagaaatctattcatgcaccatctgttctcacaacaaagaggcatcttgagggcctgaattgtggatggccatcaaccattttaaaatcaagaccacacccaattttgtctttggaatatgg

SEQ ID NO: 124870 - DNA, 531 bp, Arabidopsis thaliana columbia
cccccgaccgaagcccggaatccggcgcaaggaccacccgcccaaggggcgggcccaaaaaaaaagcggaaaaccacacccggcgccttaggcgaaagcagggcaaactcccccagccacccaggccaaacgcgccccgcccaccccacaaacaggcaccgacacgcccgccccagggaaagaaaaggcccccaagagaccccttcttcggacgggggggcgagggccccaaacccccaacaccccccccccacaaaacgccgcgggcaacacccccgccgcccaaagcgccaggccccaccacccaaccggcccacccagcccccgagccccccccacaccctccgccacaccagcaacatgaccacccccaaaccccgacactgaaccccactccgccccccaaagggccgtagaagccgggcacccagaacccgagaaagaacacgaggccctagacgggacacacccccgccagaggcccacacagcagaaccccggcccttaaccacccaccaggacaagaagccc

SEQ ID NO: 124871 - DNA, 510 bp, Arabidopsis thaliana columbia
aactatgacgtcgcatgcacgcctacctaagctcggaattcgggtcgagggaaccaaagggttaatcagaaacctggccctggtccaaggtcggcttccttcttttggaacaacaagaatgggttcttcaagccgcggtaggggttaattttacggttacttttctttttcttttggaatttccggcaagaaaggtgggacctattatggaagccttcaatggcaacaaacttttgggtggttcaataatccgcctggccaataaatcttccgggcctgttttcgcccgtcttcggaaccttaaaatatgggcaaacctggaggcagggctggaggtggaaggggttaataacccgaaccatgaccgttatgaccataaccagaaaggtttggagaaggttttggaacatggtttcaacactaagctaagaagggctggcctggttaacaagcttttggaaaaggagatcatagctaaggaccttaaggtcgaacaggatcaccctgatg

SEQ ID NO: 124872 - DNA, 334 bp, Arabidopsis thaliana columbia
aggtgacactatagaagattatgacgtcgcatgcacgcgtacgtaagctcggaattcggctcgagccgagaagcgcttacatagggtcacgattctggtcattacgttatcatgtcgaacaaatcttattacagattcgctcaacttctttccgggtacctgctcaacggaatctcaatccgcgtggtggaaatggactcacaatggtcatcatcttacctggaacagcctcgaatacgatccaaatcttacacacattcctttcttcggccggctcaacaaattcttcttcttatttgccctgagaatcttccatcggaaacctaccgttgat

SEQ ID NO: 124873 - DNA, 452 bp, Arabidopsis thaliana columbia
ccagcctctaatcgacttccttagggaaagctggtacgcctgcaagtaccggtcccggattaatttccgggtccacgaacttacttgtcggcgggccgcctttttttttttttttgaccggtaattttttattggtgggctttggccacccctaatttggttttcattttattccaatgaaaaattattcctcgtaagtattatttggaaattgaaggggggccgaagaaaaacctttattcaggtctcctggataggaccaaggggcatttggcctccgtaaatgccggaaagtgggttttcgtctttgtcttaaaccagcgttggagggagtttctggttctccacaaaaacaatctttttctaggtgttggcgtcgataaaaggataaatgaccttccttgcggtcatgaaattgtagggggcatgaactatatagagtttccctattc

SEQ ID NO: 124874 - DNA, 533 bp, Arabidopsis thaliana columbia
cctgcacccgtacgtaacctcggatttcggttctttactcaaacaaacatttcactgggctccagacctacactaaaaagccattcagcgggaaggggttatcgatttttgagcggcaaaaatctctctgctccgggtaatctaacacaatcgccttatctctctctcctcagatcctgccgccactctccgcacacagatgctttttttttagcttggatacgaccgccactctcacaatctattctcaggtcaccctcaagctcttagcatcccagacataactctgtacctacgtctagatctctcatggcgcatattgtttcaacccggatactccatatgctatatatgggtacatcccactataggctcacttctttccttaagaccctccctgttacccatagcgtcacgagaacatatagaaaacacaaagagccagcgacacaacgtgccactcggtcccacttcgcaaataacttgtcccctcccctatcctgaaacttttttatggacggataatcagtgga

SEQ ID NO: 124875 - DNA, 461 bp, Arabidopsis thaliana columbia
gcctgcagggaccgggccggaattaactcccggggccaagagcccactaggcggcgggcggcccttttttggcctctaggccggaggggcacggcggcccggaaaagaccacacccgcgggaaccaacccttaactacggcaaaaggcccgagcagccagggaaaaaaaatctctcctgcaccaaaggggggagcccgggcccataaaacaagagacccggaaggggcgccacacaaggccccggggcccccaaaccagaggaagggccagggagggacccaccccccaacgggaaccaaagacccgccccaacaaaaacccgggggagggacataagggcaataaacggggcaggcccgcaagccagaaccaccagcggcaacaaaacaaagggcaaggcaccccacagcggccgcaaacaccaaggggggagggcacaacccgaaaaaaaaaagttcgc

SEQ ID NO: 124876 - DNA, 448 bp, Arabidopsis thaliana columbia
  unsure (1)..(448): unsure at all n locations
gccnnnnnnnnnnnnnnnnnnnnnnnnnnnnnnnnnnnnnnnnnnnnnnnnnnnnnnnnnnnnnnnnnnnnnnnnnnnnnnnnnnnnnnnnnnnnnnncctttnttttttctttttttttttttgtgttttgtttaaccagaaaattccaatctttggaaaccaatttttatatatagaaaaggtttcgactagctgctaacaatatttcttcgtacaacaaaaaaaatcttccccatattattagatatcgtatggttttacataaaacttggagccaaaaccggaaggttcagtaatcgaacccccaatgtaacaaaaactacctaacgaacgttggcgggatatggttttagcggctggctgcaactaacgccatgtgttctatcaggtcaaggactcggttgctgtaaccccattcgttgtcataccaggagacaagtttcatg

SEQ ID NO: 124877 - DNA, 450 bp, Arabidopsis thaliana columbia
cacccgtacgtgagctcggaattcggctcttgcgactcatcgcagagggtgtccatatataaacccagaagccatccagctagctcctattgaaacctcatgctaccggtgaagctgtactgctaagctgaaccatagccttcctttcttccttgtccttgcaataagagcactcttgctaagaaacatttttttttggcacagggcagagcgcactgagctccggcctgcgagctaaagctctgaacccggctaccaagtaccgcacggccggcggtcttgcacagcagggccgatttgctcacatggagctcaaggccggcgtggagggccgccctggtctcctccctggtgacgacactcttgccaacgccgctggctccgtcctatgagccaaggttcgcagcgccttggttggggcccccttgagagcccccaagatcaccacgg

SEQ ID NO: 124878 - DNA, 479 bp, Arabidopsis thaliana columbia
  unsure (1)..(479): unsure at all n locations
aaaaatttagggaggagccattggggggaaaaaaaaaaagtctatcagtnaattactcgacgcttatagggggaacaagcagcgccgcctgtacgggtcgggaatttattaatgggtgggagagactagtacactagtggggcgcgccgcccttttgtgttttttttatagtgggagccattatttcctagttaagaagagggcttggagttaaataactaggaagcaatacaaggcggggggagcctaaaggaagggagttgctcatatttttcaggggggagggaggaaaaacagcacgaccttagaagagagaaacgccgaatgtaaagagaggagagacatagaaacaaccaaagaccacgcccacctggctggaaattattgggaagaggcgctcccgtagccgcctataaggatagaacgaagaggaaaggcactgctgttaactatgagggcgcacagagcagaagaaacct

SEQ ID NO: 124879 - DNA, 417 bp, Arabidopsis thaliana columbia
  unsure (1)..(417): unsure at all n locations
taatcgacttnnnnnnnnnnnnnnnnnnnnnnnnnnnnnnnnnnnnnnnnnnnnnnnnnnnnnnnnnnnnnnnnnnnnnnnnnnnnnnnnccttttttttttttgacttcgtctcagtcgtcgttggagttttgtgcctggagatcgttttcggtggctgattttccgaggtgttttccggcgacagcgagtgggattgggtttaatgactcgtaggaaatgatgactaccattggtttgttaaatttttatatttttggaagttagtaacaacccacatcncggagaattgtatggtgtatagaaagagtttcaaaactttttgaataggatcatcccacatctttttttttgccaaaaaaaaaaaaactcgagcccgaattcccgagctttacgtacggcgtgccatggcgacgt

SEQ ID NO: 124880 - DNA, 328 bp, Arabidopsis thaliana columbia
cactctttttgggaaagctggtacccctgcaaggtccggtcccgaatttattcccgggtcgaccaacttactaatccgggggccgcctttttttttttttttttactggttcctggttaattaaatcccgtgggaaccttttaaccaaacccaaattccaccttggttaaccttaaccaaagttttatttaaggggggggaaaaccttgacctaaaacccggtattaaagaaaagaatctttctgaagaattattaagcttattaagaccttgctgaccttgtcgttcgtcgtttcgggtcaaatgctctggtaaatggccttggcat

SEQ ID NO: 124881 - DNA, 264 bp, Arabidopsis thaliana columbia
gccgcgtacgtaagctcggaatccggctcttttccaggagagggaagggagccaaattagaagggaaaaggccccctcgaggcgaacgcttgacagcggaacttcgcagctcctcgtaagacgatatcagtctatagttgcctattgccactatgcgaagttccccatgtcgagatcagcgaggaggatccttagagagaaacttttttttttttttgggagccggcggggaagcggcagccaagaccgcgcgaaagacaggcc

SEQ ID NO: 124882 - DNA, 487 bp, Arabidopsis thaliana columbia
  unsure (1)..(487): unsure at all n locations
ttacactccccttccccccttccttaacctcgaattccgcttcaggtttgggaatgtaaccggaccaaccccagggggaaaggaccccttccggttaagaaaacggccaacgtcgattccttccaaaaaggcagcaggaggatcaaaaactgaaccaaggacctctcctcctacttacggcttgtaatctctaccacacaccacagttcttgaaaaggagaggagaggaggaaaccggattccccccccttaaacaatgtcgtttaaactgcatgaagtggtggtttttttgcttttgtaggccaaagaggtgtccagggttctcttatgtatgcgtgtatgagttggttggtgtgttggttttttatatgtaatctcgtttttttcggtaatgcttttatgcgttttgtaaatttttgctgcaatgaaaataaaaacttgtggttttaaaaaaaaaaaaaaaaaaaaaaaaanaaaaaaaaaaaaa

SEQ ID NO: 124883 - DNA, 456 bp, Arabidopsis thaliana columbia
tccccagctctaattcgactttctttggggaagctgggacccctgccaggaccgggcccggatttatttccggggcgaccagcctacttatccgggggcggccctttttttttttttttttttttttttttttttttttttttttttttttaaccaccaagttttttttttctttggggcaaaattttccaaaacgcttaaaagctttcccgaaaaaaacgagtttccttttaaaaaacaaacccccaaacaatcttttccccgcttccttaagaaaaccctgaacacctttttggcctacaaaagcaaaaaaacccccctttgatgcagtttaaacgacatcgtttaagggggggaccccgggttacttcttcccttctcttttccaaaacttgggttgggggttagaaatcacatgccgtaagtaggaggagagctccttgggccagtctttga

SEQ ID NO: 124884 - DNA, 496 bp, Arabidopsis thaliana columbia
aggtgacctatagaagtatctatgacgtcgcatgcacgcgttcgtaagcttcggaattcggcttcgagggccccacatcaggagggagaaaagggatccgttatgggggggggaagtgggtcacttaggggaatcgcccaattggtgaacggtcctttacccgtggcatggtatggtggaaccgccgtattttaaagaaaatttggccccctttggaaaaaaaaaaaaaaaaaaaaaaaaagggccggccgccacctatgaacctgtccaccccggaatttatttccgacccgttccttgagggcttcccagttttccttttagggagccgatttaaacctggccgtatccttggccttagctgttccctggggaaaatggtattccgttcccatttccacccaccttccaacccgaagccttaaggggtaaagcctggggggcctatggagggacctacctcactttattggcgtggccctaactgcccgttttc

SEQ ID NO: 124885 - DNA, 453 bp, Arabidopsis thaliana columbia
  unsure (1)..(453): unsure at all n locations
cgccggccnnnnnnnnnnnnnnnnnnnnnnnnnnnnnnnnnnnnnnnnnnnnnnnnnnnnnnnnnnnnnnnnnnnnnnnnnnnnnnnnnnnnnnnnnnnncctttnttttatttttttttttttatgtttattttttttcttttttgtttnaatcttttctttttttttttttttttgtttttttncccccagaagccggggaaaaaaattttttttaaaggggccccggttgaaaacccattttcttataccccaaaaaaattttttgttaaaaaaaaaaaaaattttttacatgttcccaatttcctttttttggaggagcaaccttgaaaccttcctttataaaaaagaaaggagtttttgggagaaatacacgggaaaacccgccccggggtgggtttccgggaaaaaactgacccgggggggggggtcccccctttttttaaacccaa

SEQ ID NO: 124886 - DNA, 513 bp, Arabidopsis thaliana columbia
tgggcacactttgaagatatttgacgtggatgtgccccttccgtaagctcggatttcggttcagagcaataacacacaatattctttcttccaaattttctcatttctaatgggcatatctaaggcacactatggcaagggtgaccagaacttagaagcaaaccttctagatcatgaggaaactgaatcattttcagtacctcaaacaaagaactgtaagaggtggttccgtgtctcacatatacgcaatctttgacatcttctgccaaccacttgctacagttctgggtagactgtactatgaaaatggagggaaaagcacatatgtggtaacacttcttcaactcatgggcttccctgtactgattctcttgcgcttcttttctcgaatcaggcaacccatatcaacagatacaaatttcagtcagtcctcttccttcaacacccttgcatcggtttacttgtgcactgcactgctagtgtctgcttatgcttatttgtctgcagttgggt

SEQ ID NO: 124887 - DNA, 481 bp, Arabidopsis thaliana columbia
  unsure (1)..(481): unsure at all n locations
nnnnnnnnnnnnnnnnnnnnnnnnnnnnnnnnnnnnnnnnnnnnnnnnnnnnnnnnnnnnnnnnnnnnnnnnnnnnnnnnnnnnnnnnnnnnnnncctttttttttttttttttttatgagcgacatacatatcccatttgcatggaccattacggatattacacatacaagctttatataggttatttacatgactgtgtacaactatgtatgtttgttttctgagaccttcgatccaacttgtttcataaagtttgggttttttcctcaacaggttttgtctggcaagtcttcaacttcttttcgtcgaggtagtgctgatagacaaatgaaggaagccccagatagctaaaatgatggagaaaatctttgatgcatccctttttaatcatggaaaactatcacttgctaccactggaaactatagggcagtcccccacagcagttttgggatttggagaaacccagaaaaaaaacttc

SEQ ID NO: 124888 - DNA, 518 bp, Arabidopsis thaliana columbia
gccgcccacctaagcccggaattcggctcgtttccaaccccgagtttgggttctcccaaaaaactcgagcgtgaatggggccaatacctgttcagtatcaccggggttgacgataacctcctatggattcgtttcccttacgctggaaacggatctttttcacgtccccaaattaaaaacccggaagaagctttttttttggcgagcgggggacggaccaagtgtgctcataccgcccaccacttttctgcaggtgtccggtggccttggactgtgggaggagttggggtccacacggtttgggttggtcctattcactcgcctcacttgggccttccctagattgatattatattcaacaaagtttcttcgactcagggggtatcctattccagtaataacccttttgacacctagtgtgccatgacctccgcgccctcttacatagagtatcactagagaacctaatgcggggaaagaagccgcggaatacgtaatacgaatgcgggagagggaag

SEQ ID NO: 124889 - DNA, 404 bp, Arabidopsis thaliana columbia
  unsure (1)..(404): unsure at all n locations
gccgnnnnnnnnnnnnnnnnnnnnnnnnnnnnnnnnnnnnnnnnnnnnnnnnnnnnnnnnnnnnnnnnnnnnnnnnnnnnnnnnnnnnnnnnnnnnnnnccttgttgttgtttattttgcgagatacaattgtgacgatgactagtactaggagctttctttttgtttgggaccccaatctgaagaagggttattccaatgttttttttgttttggtccaacacggacccgttgtacaatttttggaagggtgttcggggccaaatgggggtcggaaatatattagggttcaatccataaaaagtgcggtttacaattttttgaaaacacatccgaggaaaatcttttgttatgggcctgagaaaaaactgggacgggggctttggaaaatgtagaagggccca

SEQ ID NO: 124890 - DNA, 415 bp, Arabidopsis thaliana columbia
atgacgtcgcatgcacgcctacgtaagctcggaattcggcttgagtgtaccagtacgcgcgccgaacagcttctgggatggcgtcaaaggccaaaatctgcggttaccaaatctggtggaccggcggatggtaccattcccattttcttgccggcattgatcaagccggtggccaccgggttcacgttattttttttttcctccgaaccagcgggttccgcccggaatattacaccgacttttttgcgaaccgaacatttggaaccaccccggaccggattgtcgtttcttggttccgttggaattcttgtccttattcttaaacccgcaacaaccttggttcattgatcctaaccggtggtgccttcaccggcgattgaaaatttccccgaaaccccattcacggaaaacggaa

SEQ ID NO: 124891 - DNA, 464 bp, Arabidopsis thaliana columbia
  unsure (1)..(464): unsure at all n locations
tnnnnnnnnnnnnnnnnnnnnnnnnnnnnnnnnnnnnnnnnnnnnnnnnnnnnnnnnnnnnnnnnnnnnnnnnnnnnnnnnnnnnnnnnnncctgtgttttatgctattatttgtcgttacaaaattttgtttgtaccggcggatgttacgattccgttatcctcgccgccctggggcaggcggcagccagcagaagacacatttatctctctctgcgtttgagccagcgggtccgccccggagtatcgccccactctaaaacgagcgggtcattagggaggccacagtacggatatttaaattcttgccccttagaaaatcccgggccgaattctgaacccgagaagaaaatcgttccttgggacccaaaccgaaggggccaccaccgtagattgagatttccccgaaaccgaatgggcgggaccccggaatttctacacggggaacatcactggacgcatga

SEQ ID NO: 124892 - DNA, 452 bp, Arabidopsis thaliana columbia
ttgacctcgcctgcacccctaccttagctcggaattcggctcgagaaaaacctttaatctctcggtggcttggttccacaagaaccagcccattaagattttccccagtttattgaaccccaacacattgggccaccagaagcgcgcctggtaaaaccgattgggcttaagcttccttcattgcttcttaccaaaacactttagaatgacttcaaacccaacctccattggtacccttaagaaattgattccaccagcccaacctaacactaaaatgggtcaaaagaattaccttaacctccatttttgtgcctgcccttagaaggttcccacaggaacctcctaaggattccacaacagcctcttaaataccaaaattatatcctattaattataccaacactccctctctttcttttagtgaaaaatgtgaatgcctctgtttatacctg

SEQ ID NO: 124893 - DNA, 465 bp, Arabidopsis thaliana columbia
ttgacctcgcatgcgcccctaccttagcttggaattcgggttgagggtatttttaaagaaggttgggaagacaaaaggatccaaaaacttccttaagaaccttccgcttatttaaaagaggaggttccaaagaaaagaaggaaaaatgggcttttttggttggcccagggaacaaccttttgttggtccaagaaccagggaccttaccgaacccggtaatccggccaataaaccgaacaaccaagaattaccggtcacaagcctttccggggctaacaaaaacatggtgggaggatgttaaaataatatccaaaaccacatcagggacaccttttttgtttccacacgaccggaactggtgctgggaaaattgccttgaccaacacgttatctcctgaagacaggatggtttcgtttctgatggaacaattaacctggctctgaatggaccagcagaagaggctt

SEQ ID NO: 124894 - DNA, 484 bp, Arabidopsis thaliana columbia
cccctaccttaacctcgaaatccggttctggactaaatcaaatatgttggggaatacaaagtaacccaaaaccgccttaaggagctagggcttatgattttggggagggacaatcacaatatgcttaaagatctggactatttgtctgagccgtggaaccaacattcttgtcggaccttatcaaccaatataacctctttttaaagcgggaatgcctcggcattaaccaattaagacaaaggatacatggtctccatgaaatttcacacttaagactaaaaaatatgatagatagatccactaatatgtatctgaagcaacagaacctactattacagatttatagcttcccccaacaatagagtcatcagcctacttaatatagtatgatgctccaaacacattcttcgatcctttcatatacatcaaatccctcacataacaatattcaacgcattattcttttatatttgtatcaatttat

SEQ ID NO: 124895 - DNA, 456 bp, Arabidopsis thaliana columbia
  unsure (1)..(456): unsure at all n locations
ggaacctggcacgcctgcagaggccgggccggatttaatcccggggcgaccagctcactattcgggggccgcccttttttttttttttttgattatctggcggagggggaccaccaaaagtccaacctgctgaaaggccacaattgtattttttagaagaagggggaaaggtagccggaaaaaaacacctttttttatcaaaaaagggaaaagnggaccagataaagaagaaatgagaaaggggcccccacaataatccggggccataaccacgagagggggaggagctgcccccacccaatggtagcagcaaatcaccccacccaacccccgggaggcaataagggctgttaaacaagtcggccaggaaacataccacccagccggaaagaatcaacgaacagagacgggccttgtctgtggacccccgccccaatgtgacacaaccataaaaaa

SEQ ID NO: 124896 - DNA, 497 bp, Arabidopsis thaliana columbia
ttaggtgacactatagaaatatctatgacgtcgcatgcacgcgtacgtaagctcggaattcggctcgagggagaacattgtgccactccctgggatcttcgatcctgatttcatagctgctaatcaagggtcacgtgctaaccacgtgatcaaaggtaccaagaaggaacaagtcgaccacatcatcaaggacatgagggagtttaaggagaagaataaggtggataaggttgtggttctctggacggctaacacagagcgttatagcaatgtggtcgttgggatgaacgatacaatggagaatctcatggagtctgtggatagggatgaggctgagatctctccttcaacactttatgcgattgcttgtgttcttgagggaatcccgttcatcaatggaagccctcaaaacacctttgttccaggtctaattgatatggcgatcaggaacaatgttttgatcggtggagatgatttcaagagtggtcaaaccaaga

SEQ ID NO: 124897 - DNA, 519 bp, Arabidopsis thaliana columbia
ttttaggtgacactataagaagactatgacgtcgcatgcacgcgtacgtaagctcggaattcggctcgaggcaaggccatcatcaacttgaagacacgacctatggttctggtgggatgatgcttcgtataacactaggcgagctgcaccttcatcgagcttctgtcaatggagcatttgacgagacgagaaggtccactttgcaatatggcatcccctgaggcttcccgtgtattttttgcaattacaactggggacttggttttgcttcaatgcttgcaaaccactttctatttccgatatcaactttaccgtctcatttttgtaaatccataaaccggtctgggattacattccaattggaagatggaaacatcttgaagattgaaacacaaaaggattttggacccaccaagactgatttaagacgcaacatttgtatggcaagaaaggaggctctaaaagaacctcattcttaagctcatggggaagaaatttggataacttgcgaccacccaa

SEQ ID NO: 124898 - DNA, 477 bp, Arabidopsis thaliana columbia
  unsure (1)..(477): unsure at all n locations
gannnnnnnnnnnnnnnnnnnnnnnnnnnnnnnnnnnnnnnnnnnnnnnnnnnnnnnnnnnnnnnnnnnnnnnnnnnnnnnnnnnnnnnnnnnnnnnnnnnnnnnccttttttttttttttaattaatcggtttttttttctttctaagaaaatacatacatgttatcaactacatgcatatgtggaccatgaaacttaataaacgaccaattngccctttgaaaagaaagtataaagagttaaaaactttggcgagaagcaccaaaagtcgagccgggggatgtggaaaacccataatctcccgcattggcggggaaaaaccaagggggcgctgactttttttctctttgaatggggtggcgggaccccctcgtgaaaacacgcagggcacatggtcaaagtttccccaggggggatatgcccgtttttctcacaataaaatttttgagcccccaccaaaaaaattttaaaccgaa

SEQ ID NO: 124899 - DNA, 428 bp, Arabidopsis thaliana columbia
  unsure (1)..(428): unsure at all n locations
cnnnnnnnnnnnnnnnnnnnnnnnnnnnnnnnnnnnnnnnnnnnnnnnnnnnnnnnnnnnnnnnnnnnnnnnnnnnnnnnnnnnnnnnnnnnngccccccttntttttgtttttttttttttttttttttttttttgaaaaaccaccaaaattattctttcttcaagatgattcttggccaaaccaaaaaaggttccaaattcattttttaaattaacaaccctggtttttggttttggggagggttttccaacctttccatggccttgattgttatttccaaaaccaagggtggaaattgggccaggtaatttacacccttaaaacttaaaccccaaatttttttaaccccttttttaaatagaccgccttttttttttgggaacccttttaccggaaggattttcaacccccacccattttaacct

SEQ ID NO: 124900 - DNA, 519 bp, Arabidopsis thaliana columbia
taggggacccttagaagatcttgacgtcgcatgcccgcctacgtaagcccggaattcggctcgagagaagagccgcttatggaattggcatgaccgcgatggctcttttcaaaggccttgggcccgcagcagcaggaatcatggatgccacctcttctaccttcctctttaccttaaatatgcctcaacattttggttttaaaccaaccaccagaaccacctggacctggtgggttatcgaattcttaagtttggtttgcccctaaccaccggttggtgaccggttttcgtggaaccaggaaccgcaagggggctgttttcttccttgcccccaaaagggattccttattccggatggtggtttgggccctggaagtggattggccatccaaacctttcttagctgaaccccaccggtgaaaaatgaggagaatttgaaggggttcaaaataccttatccagaaggtatgggataatatataaattggaaggtcggaccaaagttagattaaaaaaagg

SEQ ID NO: 124901 - DNA, 455 bp, Arabidopsis thaliana columbia
  unsure (1)..(455): unsure at all n locations
acgactttnnnnnnnnnnnnnnnnnnnnnnnnnnnnnnnnnnnnnnnnnnnnnnnnnnnnnnnnnnnnnnnnnnnnnnnnnnnnnnnncctttntttttttttttttttttgttctttatttttatgaattatgttttgcttttttncnaaaacaccttttgaacactaattatcctggaacccgggccttaaaacattttttatgaacaacatgaccttttacacacataggatgataacaacaaggctaacaagcaaccccggtttgttgcctgcccttcttgcaatgaaacactggaagcagcgtaccaggttactaattacaaaatggtattttatattctgattgtgataccggcaaaacgttgaacattttcaactgtaccatttttaacagaaaaaggtcaaaaggaaaaaatggacaaaagagccaaaaccccattacgtaaaaaaa

SEQ ID NO: 124902 - DNA, 503 bp, Arabidopsis thaliana columbia
aggtgcactatagaagactatgacgtcgcatgcacgcgtacgtaagctcggaattcggctcgagttcaaaatcagattcgagatgagctgcgacggaggcaaaccggcgccggcgaaactaggcgacgaacaactagcggagctccgggagatattccgatcatttgaccagaacaaggatggaagtttgacggagctcgagttaggctcacttctaagatctctctgtctaaagccgagtcaagaccaactcgacacattgatccagaaagcagatcggaataacaacggactggtcgagttctccgagttcgtcgccctcgtcgagccagatctggtcaagtgtccttacacggatgatcagcttaaagccatctttagaatgtttgaccgcgatggaaaccgttacataacggcggcggagttagcccattcgatggcgaagctaggtcacgccttgacggcggagggagtaacgggaatgatcaaagaagctgatcgag

SEQ ID NO: 124903 - DNA, 463 bp, Arabidopsis thaliana columbia
  unsure (1)..(463): unsure at all n locations
cnnnnnnnnnnnnnnnnnnnnnnnnnnnnnnnnnnnnnnnnnnnnnnnnnnnnnnnnnnnnnnnnnnnnnnnnnnnnnnnnnnnnnnnnnnnnnnnccttttttttttttttttttttatgtaaaattgttattcaagtaactaaaattattcactgtttacatatataggggaggctatagttttattgatcttagtttctctatggaaatattcaactttctcagttgtactattccagcaagttcagtgattataacatgtgatcatgagtctttagagaacccaaagaaagccaaaatggcagcaaatatgtttgaagagagcaaagccttaagcaccatcttcttttttggtgtgtaaggaggatatctaagatccgcgtcccctgaaaagctccggtaaagaactcctttcttatggctaaacgtctcatacgagaatttcccatggtaagcaccga

SEQ ID NO: 124904 - DNA, 372 bp, Arabidopsis thaliana columbia
gacgtcgcatgcgcccctaccttagcttggaattcgggttgagccaacctattaaaagaaagggttcgttgcttacctttataaatacaataaacgttttgaccacccaacctaaggaataatatccaacctgcttgaaaaatggttttgaaggaagcaaccaggttttggttcccaaggttatcgacttccaaattcttggtttttaaggctttgcagaagacacagctttggttttttgtttactacaaggagggtgaacctaacccacctttttggaccttcgttaatggttggaaggaggacaaggcctgaaacagaacctctctttggtttcctgtggcgggtcgcagcaactctctaagtttaggt

SEQ ID NO: 124905 - DNA, 475 bp, Arabidopsis thaliana columbia
accgcccctgccccccttccttagcctcggattccggttcagccaaaccaccaaaaaaaaggggggggccttgggcctcctcctaattaaagctttccttcggagtaaaccttggattaatttggaaaggtttgggaagttccatgtgattctggggaaaggggttggttattattggggattcccgtaaaaaaaaaaaaaaaattaaaaaaagggcggcaaaaacacaattaagctcttaaatcaaaaaaaaaaaaaaaaagggggcgccccccgcttagggacctctccaccccggaatttattcccgacccggaccctgagggctacccagtttcccttttggggagccgtttaaaacctgggcgtaaccagggcattagcggctcccgggggaaaatggtatcccgttaacattcccacacaaattacagacccgtaaccttaatgtggaaacccgggggtccctaatgag

SEQ ID NO: 124906 - DNA, 214 bp, Arabidopsis thaliana columbia
cacaccgaaacaaacccgaccggcacagcccgcgaccacgcccaacaagccgcgacgggacgcggcggcgccggaacaccagcgcgaggcggcgagagaacgggcacggcgagaaagaggccaggcagacgacttttttttactaccggggacgcgaagccccgcacccaccccgcccaccccgcccccgcacaacaccgcggatccgacacag

SEQ ID NO: 124907 - DNA, 478 bp, Arabidopsis thaliana columbia
tacgtaagctcggaattcggctcgtgttaaaaacagtttttttgctgatcctatcaacaatgaccaaaatagagcctcgagccttggggaacaccaggcttaagggtagcgcccgttggttttgggggcctttccgctcgaaagggttttgggcccatccgccaaaaataaggccgcggccaccttcttctttgttggggggccgggaacaactttttcaacacctccccgtataatggaggaccccggtctgaaaaaagcctgggcagggacctaaaggctttccaggcccctagaacggactccctgggggctcctaaggggggaaaatcaaagagggtttagattccacggctgaaagagtaaaaaaaatgtttgacaaaagcttggaaaggcttcagctggattttgtgcacctcacttaatggccttaacattgaggtccgggccccttgaaccaaattcgggagagaaacac

SEQ ID NO: 124908 - DNA, 453 bp, Arabidopsis thaliana columbia
acctcgcatgcacccctacctaagcttggaattcggcttcagaagaattttaagtaagaaaaaattccaatccggaccccttgattgaagtgagaccggattttattaaggtggcagtcttgaattccggtgggaaccaaacccttagaatgggtcctggcccaaatattggttttgaataactatggccgcaaggtgaatgtgttggaacaaaaattaactgaaataacccggaagtggaaaataccagaaccgttaccattgaaaagaaaaaacctgttcaagtgggttgaaaaggctaatggaatcctggctagatgaatcctaaacctgggccttttggaaaggccaaatatacctggaaaggatccaaattatggccagatatggaagtttctgaaagataattttgaactgacacagagttttgcaaaccttgattataacctcaag

SEQ ID NO: 124909 - DNA, 494 bp, Arabidopsis thaliana columbia
  unsure (1)..(494): unsure at all n locations
cccccgnccgaaggccggaattcgggcagttttgccagggccggcagggcacaacaaccggggagggcggaaaaggcgggaacggcttttaccaaaacagggggaaccgccgaaggacaaaatcccaaaatccttccccgccatgaacaaggcggacgccgacgggggcaaggtaagagatctggccgtttttttttaggggggggcgcggaaaaacaaaacgaccccaaaagagacgggagcaccgggagcccggcgggccggccacgcggaggccaggcaccccggaaaagccaggcccaaagcgcaaaaccgccgcaaacaagcgccccaggggaccaaaacacgggggccgcggcccccggccaaaagagaagcagcgccaaacccccagcccaggaggaccgggaagcgcccccacgggaccaccaccccggcacggggccgaaggccgcgcaagcaccagaaacgcgacccggggcacgggccgacga

SEQ ID NO: 124910 - DNA, 481 bp, Arabidopsis thaliana columbia
ctatagaagagtctatgacgtccatgcacgcgtacgtaagctcggaattcggctcgagcactcaccaattaaaaagagagagagagagagagagacagagagagagagagattctgcggaggagcttcttcttcgtaggggggtcattggtattaacgttatcgcccctacctcagcttcatcttcaaaaacatgggtgcaggtggaagaatgcccgtttctactttttccaagaaatccgaaacccacaccacaaagcgtgtgccgggccaaaaacccgctttctcggtgggagatctgaagaaagcaattccgcccgattggttcaaacccttaatcccttgctttttcttctaccttattaatgacctcattattgccttatgcctttacttccttggcacccattaccttttttttcttccttaagcttttttttaactggcttggccactttattgggccctgtaagggtggggcc

SEQ ID NO: 124911 - DNA, 484 bp, Arabidopsis thaliana columbia
aaccgcacgcgtacgtaagctcgagatcaaggtcgattatatatcaaagaggtttgtgaacacataaggattccaatcccccctcaggagctttcggcttattcagagaggacgatccaaaagaaaaaaggaaaaactggactttttgtatggaccatggagacatcatctgcttgcaccaagaccaatgaacatttttttttccggggaggcaggcgaagaaccggaaccacgaggattaccgggcaccatcccttctggcgcttataaaaacattgctggaggatgttaacaacaatttcagaccacttttgggacatcttttctgttttaccaccaacgcgactgtgtgcttgggaaaattgccctgaccaactcattacctttccgcaaacaagactcgatacccttattcattggacaacaaagcttcgtccaggacgaaccctcggaacaggctaattatgcattgcgaacttatcct

SEQ ID NO: 124912 - DNA, 474 bp, Arabidopsis thaliana columbia
tcccctgccccccttccttagcctcgaattccgcttcagggcccccggtagaagggttaggtggaaccaaagggttggggccaattggttagcttttcctgggggtaaattcaattgatgagaaaccgttattggaggctggaccggctcacccagttagtgttggcttctgtggaagcaagagaccgtttcagctttattctattggattattctctggcccgtgttcgacatcattggatcatgctgtgctcatagtaggatatggttcacagattggggttgattattggattgtgaaaaactcatggggaaaaagttggggaatggatgggtttatgcacatgcagcgtaacactgaaaattcagacggcgtttgcggaatcaacatgcttgcttcatatcccatcaagacacatccaaacccgcctccaccgtcccctcctggccctacaaaatgcaaccttttcacgt

SEQ ID NO: 124913 - DNA, 447 bp, Arabidopsis thaliana columbia
  unsure (1)..(447): unsure at all n locations
cnnnnnnnnnnnnnnnnnnnnnnnnnnnnnnnnnnnnnnnnnnnnnnnnnnnnnnnnnnnnnnnnnnnnnnnnnnnnnnnnnnnnnnnnnnnnnnncctttttttttttttttacatagatgatactcttattactttatgtgtcttgcagatacaaatactagtgcttgtcctgcaagtgtcctttattgactcagaagttgtatacatccaaatgagagactaaaaatacatccgtgatgatatcgtatatatctatctcaataacagctacaaataatcccctcgcagataatcgaatctacgaggtttttgtatggatgagtttgaattttctgtaacatgtgcgtaaaacttctctcacataacccattcctcaaatcggccaagttgttttgaagaattcttcttccagaaaggcttgatcgcagtgaaattaccagtttt

SEQ ID NO: 124914 - DNA, 203 bp, Arabidopsis thaliana columbia
ggaatttcccggggtccgaccccacgccgtcccggctttcttcttccccaagctggcctttctgggcttttccccatccttactgggtttcctaccggattggcgatcttggggaacctaggacttggattttaggggtgcccaatcaaaatcccagactgctaagggggggaaaattttttgctgaaaaaaaaaatgggggg

SEQ ID NO: 124915 - DNA, 380 bp, Arabidopsis thaliana columbia
  unsure (1)..(380): unsure at all n locations
gcacccgaacgnaagcngggaaccccaaaattttccgcccttattaaagccttttgacaaacaaacctcatgagtccctacggcgcgttcagaaaaggctaaggggattctggcccaaatgtaccatagagccatacaaccagggggtacaggggagagaacttgcccgggcagaagcgaaaaacacaaagtttcttctttgaggggggggncgcaccaaaaggaagagagccccggcccagccgcaagagaaaggaagaaccagccccgcaacgcgacccgccaggaccaaaacacagccaagaacagcccccacaacaagacaacgcccgacccacaaacagcggcccggaccccccggggacccccggcgcacccaa

SEQ ID NO: 124916 - DNA, 440 bp, Arabidopsis thaliana columbia
gggcccccccgaagccaggccggatttaacccgggcacaactctctaattgggggcgggccccaaatagacattataagggagagccgggtgcttcccgcccgacccaggcatcaagcccacaagacttgaacagaaatggcagacaaccgagaacaggtttttttacacagaaagagaaaaaacgccccccccataatacactctccgtcagttgggtcacggcaaactagaagatgatatccaaacaataacggctaaaaactagatatagcgcgttctgtgtactcttctattcagcaataccacaagacaaaaaactaaaaacaaatgaaaagaaaacaactaactacaaccgcacgaaacaacgtagagctagtatacagatagcagaaaagcagaaaatacataactaacagaataataccaacacaaaaacaa

SEQ ID NO: 124917 - DNA, 498 bp, Arabidopsis thaliana columbia
gacgttccatgcacgccttccttagcctggattcttttaaaccggccgcccttttttttttttttttttttttttttttttttttttttaaccaaaaaagaacttttgtattttacccaccggaccaaaaagaggggccgggggctgacaaagggttcaaaaacttcttgtttttgtaaggaataccaaaaaatcaacctttttctttaaaaaatcctaccggaaattctcaaccttttaatcaacaaaccccttaggggaaaactttccattctttaacacttttttttcctaccaaacgaatgactaagtatggctgcttttcatttaaaaaaagcgtcccaagatgggacctcattggcttatccttccttttaattttctagcaaaggtctctcctttgggctcactcccggaacaaacaacataccctgtttccacttggaagtctcttagagtaacacgctcttgaagctgggcgttgctgcaaatgactga

SEQ ID NO: 124918 - DNA, 459 bp, Arabidopsis thaliana columbia
cagctctaatacgactctctataggggaaagctgggacgcctgcaggtaccgggccgggatttccgggtcgagccacgcgttcggattcctctttttctggaccaatggttcttaatattcttcttcttcttaagtcaaattttttccttctttcaacaaccacaaaccctttggcttttcaaaacaacccttttttaacgggacccacggcggtggcgcggccaaacaacatccatttttatcaagaagttcctcggaagaagcccaaaacatgtcaggttcctcctaatcaatttatttccaaccttcctaactttgactggattggcccggcgatggcagggttaaccgacccagatgggtcaggcaagcaagctatttcaaggaccttagagagaatttaccctggaattcctactggtcatggagctttgttgacacaccatctcaggactttg

SEQ ID NO: 124919 - DNA, 258 bp, Arabidopsis thaliana columbia
agaggcaaaccgcgaccgggcgaaccttggcgaagaacacggggcggccccccgggagagacgccccacattgtgcccagccggggagagggcgccggaccgaaaccggaaggggaggaacgagaaagttttttttttggggggggggagaagagaacaagggcgcacaagcagacaacacgccacccggacacacgcacggcccgccagcagccacaacacgagcaacggccacgccaaagaaaaccggggcgggga

SEQ ID NO: 124920 - DNA, 422 bp, Arabidopsis thaliana columbia
  unsure (1)..(422): unsure at all n locations
gccgcctgcggtaccgggccggatttacggggggggcgaacactncatacaccgagggcgggcaccccggggccctttaacaaacagccacgagcaatccagtgaaacaatgggtttcacacgacaaccaagggagcagacccaccccacaaatgcctggaaaagggggtccgtaaaattttggggggggggagagccaaacccaagggacgagaagacaatgggcaaaacgacccccggcggggcgaaaaccccaaacccgaagacaaggcgcagcggaaacaaggcgccgggaacagacgcgggggagaaccgcggcaacccccccgcagcagcaaggagagcgggaggaggagcagacgcgcaaagacccccccagacaggaaacgcacggggacgcagagccgccacagcaggagggg

SEQ ID NO: 124921 - DNA, 446 bp, Arabidopsis thaliana columbia
  unsure (1)..(446): unsure at all n locations
ccgccgtaagctggaacccggaatctcaagccctgaaaatagctaaggaataaaaacatctaatcaaaatcgccggatccaaaccaatacggcatcgcctgtccagagtttaatggggtacattgggaaatcccgtccgcgtggaggatggtaaacaacgaggaccatccacccaaaggttttttttttaaggggggggacccaaccaaacaagcgaaagccgcagccccccgaccccaacacccggggaccaaacacacgagcccaggcaaagacccgccaccagagagcgaaaacacacacggaaccggaacacgggcgaaccacgaccgaacccccacacagggagccgggaaaaccgaccacacagaaaaaccgaaaancccagggcgcacacaaaaagagaaggccgaaacaacaacccgaaaaggaacaagacaagcgaa

SEQ ID NO: 124922 - DNA, 447 bp, Arabidopsis thaliana columbia
cgtaagctcggaattcggctcgttcaagcctctctaacaagcgagaggagatataagacatctcatcaccaatctccggatccaatccaatactgcatcgactctacagagttctatggggtcattggagattcttttcggcagaggatggctaacaatgaggagcatccccctcgaaggctttttttttgaagggggcgcacacactaaatcagctaatactgctgatcctggtcccaataacgctgaatcaagacatgtacacaacaatcacgcttactatggagcggaaactaacgagaaccgtacaagtctgaccactatgaatcccacctactgaccctgaaaatcacccccagatgaacaaacatcaaaagtggcacaaacaaaaagtggcctacactagacctccaaggtagccatcggcaacaaaacacaccacaaaca

SEQ ID NO: 124923 - DNA, 471 bp, Arabidopsis thaliana columbia
gcacgccagcaggaaccgggccggaataaaagccggggcgacgagctcactagacggagggcgcccccccctgggtcactcgcccgaaccaaaacgagaaggagaccacagcgcaggaggccaaacgagggcaaccgccttcccgcaccaaaagaagaaagccgaggaaaaaaagccccctcccccccccgaggggggagagcacaaaaacaccgcaaggaccccggcgcgccccaagaaaggaaaagaggccggggaacaagaacggcacaacaccggacacccaggacgcaaaggggagagccccaccccacggcgagggggaaaacacgcgccccaaacccacccacacaggcgagaagcaccgctcgcccacacccccaccgggcgaaggagccaacccccccgcccgcaggagagaagcgaagcggggcgggcaccccgccagcaaaacgaccggagccgggcaag

SEQ ID NO: 124924 - DNA, 522 bp, Arabidopsis thaliana columbia
cctcacttttggagagcggccgcctgcagtaccggtccggcaataccgggtctaccacgcgtgcggggcggtgtaaacatggctcgaagagcccagaagcatctgatgaggcctcatcgctcctcagcattctcatgctgtgacaaaattgcatggtaacatatcgtcaaacaccatgctctggacctcacatgccttaggaatgacgtcccacttttttttcgaggggcaccaggccaaccatactaggactaaactagaaaatttcctctcccgagccaaggcctcttccatgatgcaagcaaggacaggaacgaccggacctactccgacgaatcatggatgttagcatcctggcccagatcacttacaaacttctgcttctttacaaaacaaaaagccgtcccatttccattccttaaagattcaaaaaccaatttcaagctttgccaagttatacttattaaaactgtctcataggaaggcattaccgcaccacttataaagtcccccctccctccc

SEQ ID NO: 124925 - DNA, 473 bp, Arabidopsis thaliana columbia
gggagctactaccctgcagtaccggtcccgaataccgggttacccagcgttccgggcgagggacaaaccttgccttgggggctgactttacagcgggggtaatgtctaccggaggaacctatattctggctggccgtcctccacaatatgggcaacttggtcaagggaccggatattaattcaatttgaaggaaagttttttttggatgggctaccaatcttattcacgtactaaaaccattcgctttcttgcaagggaaaacacttgcaaagttttatgttgaaccaatcattcttgggtccgaaaataaaattgctttggttacccctggggatttagtggattttgaaaggtttgaccttgggagccaaaacaataatgggcttcaaccccgattgatgggctttaaaaggattaatttttggcttcttaaggccttcctttttgtgggtctgcaaactccgttgtccac

SEQ ID NO: 124926 - DNA, 562 bp, Arabidopsis thaliana columbia
  unsure (1)..(562): unsure at all n locations
attaacccggggttttgacccaccgcaggtccgtcacggggtgattcatattcattgttatataatggccaacccaacagcgcctgcctctctggcctatctcaagacatgcggagcctaaccggctcaattagtaagtggtagcggccttcgcgcgggggctgtcgccgaagcaacccgacgacagcgccgaagcacaagcgcacaaccacccccgcactagcccggcaattttttctttctggtggtgagggaccagacaaaagaaccaccctgtggcaatcgctcgccgtacatgggaagcaggagccccgacgccgagacagaagtgcgcgccggttcgcgcgcccgctccccncagcccaatcccaaacagcccaaaacatcttaaaccacgccatctcgaccgactgggccactcctaacagaggcaggtcctccacggcaccgagcactacgttaccccacccggagccccccctcgcgcgcgcccgctcccccgctccgcctctctcgctgcacgcggcttgtaccgcctcccgccctacgtggctcatgcggc

SEQ ID NO: 124927 - DNA, 361 bp, Arabidopsis thaliana columbia
gccggacccgcaccgaaatacccggttttaaccacgccgggaggagaaaccccaaacatcagacataacaccccacatcaggaaagatctacaccgcaaacccacccccccagcaccgccacgggacacagatcactccgcatgccaacccacacccaacgccacacgacccacaccaaccccaaacaacaagacaacaaccaccactttttttttttaagcggggggccgcccacccacccaacaccccgccaacgccgcctctgcaccaccacaccccaacccgccaacaacacacaccgagactatccacgcaaagaaaacacacaaaaaacaccaatagagaaaaagaaacaccaca

SEQ ID NO: 124928 - DNA, 552 bp, Arabidopsis thaliana columbia
ccccctccaggaaccggaccgaattaacgggttttccaacgcggccggaacccaatcgacaccccatgggcccacgggtggggagaaatcccgcgagcgagcgtgggtgcgagtcaaagtgctaaggccttgctgtagagggtatggccggtggctcgttggtagcgcatagatgaagcgggagtagatcgcacgcggctagcggaaacaggaattttttttctgggggggtaagccagccactgcgaacaggctgggaactataagaagagggctcgtttgaggcaagccgggacagagcggggcgatattggagacaatactttgcggtaatccggaatgccttgacaaacttgacgtataatacggccatttagatggttgcataatcgcgagccaacacgtcagcagcgaagagagatagctgacgcgcccagaacattttacgggcttccacgcctggtgctttctcctgtgaatccagcgactccagtttccttcgcatggagcccgcccggtaatttcgtggggggtcataccacatttccgctt

SEQ ID NO: 124929 - DNA, 319 bp, Arabidopsis thaliana columbia
gaatccgggcttccagcggcgaaaagacaaagaccatgacatacagaggggaggaggctgaacagttagccaaggtaaaatggaacgaacggcaccctggtggagacgggagaatacgaaaaagaccaaaaaaatggaccatttttttttttcgggggaacaaacgaaaaaattgggactctatacaaaactaaaagaaaaagggaacacaaagggccgaataacctgggctatgatcgaacttcaaaaaaaaaaagaaatgaaagctgttatactataagacctaacacacctagaacgaaactccgaaaacaacaga

SEQ ID NO: 124930 - DNA, 481 bp, Arabidopsis thaliana columbia
gcctgcaggtaccggtccggaattcccgggtctgacccacgcgtgcgggtcacttttctcaaactacgaaaactatggcttgaaaatccgtcggggttatgctctttctcgctctcatagcttcatcaggcataggttaagctccaggaccagctccaacaagatctcctgttccatcccctggtcaacctattttttttcggcgggggcggctccttcaagggacaccaagctccaacctccaagatcctattggggtacctgccaacggccgggttccgggtatgttcctgccggctggtatcaccgacttgccctctctcccggtttcaacacccgcagggcggcccaactttattattacttcctgggggggagccccctgtccgcttgggtcccaccagggatccacttccgcgtgcgatgaccgacacaccgccggccactatgcgctagttggatgccttaggccggggtaagg

SEQ ID NO: 124931 - DNA, 487 bp, Arabidopsis thaliana columbia
gcgcctgcaggtaccggtccggaattcccgggttgacccacgcgttcggggattggtgttgataatttcttcactggaaggaaagagaacgttatgcaccatttcagtaaccctaactttgagatgatcccgcacgatgtggttgagccgaatctttttgagggtgatcagatctaccatttgggttggccttctttttctgggggttaccaaatcaatcccggccagactattaagaagaatggggctggaacattgaacatggttgggttggctaaacgagggggggctagatttcttttggccgaggtccaggggaggttatggggaatctctggagggttctcagggtgggaattacttggggccactttaaatccattggtggcccttagctcccaccatagaaggaaaaacaaccggcgaaaatacgagcctgggctttcagcccggggccacagggacgagtcttaattccatggaactt

SEQ ID NO: 124932 - DNA, 510 bp, Arabidopsis thaliana columbia
gaaagctagtacgcctgcaggtaccggtccggaattcccgggtcgacccacgcgtccggttttaaagggtcaataaaaagcaacttatggaacagatttgatgagatgaccaaacagaaaggaacgagcaaggaggatttgcacttataattacgctttaaagattcaatttcacaacaaacgggcatgatggtccattgattgaataaatgcataactttaaattgggggggaagagaatacatgcctaagtggattttagttaataggactgacaattgaaagatctgccaaagttccgaaaaatttgatgaagctattaacttgttcttggaaatgagatattttgattttgtattacatacaattgattaaaatacaggaggcttcaaaacagacttaaaattgaaagatgtgaagaagctttggattttttaagaaaaaaagcatctgattggattagaaaagaagttcagacttacaaagctgttcgtcgaagatatcgcaaac

SEQ ID NO: 124933 - DNA, 492 bp, Arabidopsis thaliana columbia
agctggcacgcctgcaggtaccgggcccgaattcccgggttgacccacgcgtccgagggttgggagaagacgacagaaggggactacgacgtaccttctgttccccgttaccttctgagagtttttagtagtcttcctttggaacaatgagtgacgttgtttgatggatatgagcgacaatactgtaagctctcggggagtttttcaaagaagtgttcctctggtatttgggttgatggacaacaaaagaagcaaagttgcgtgaaataaatcccggctggcaaaaggaaaaaggctgattacgaaaatggatatatgagctaggacccttgcccctaatcaaaagatctgagctgctgcctaatttgtcaaataaacacagtgacggggagatctgaagaatggaagactgagaatgagaagagtgacatctggccagttgaacgctgatgctcgtgatgaggtgctagaagcttgtatgactgacacaaa

SEQ ID NO: 124934 - DNA, 349 bp, Arabidopsis thaliana columbia
gagctggtacgcctgcaggtaccggtccggaattcccgggtcgacccacgcgtacgcaattatttttcttatcttctacgggatttaaatattgagacataaatagtgagccccaacttttcttttgcagaagaaagaagcaagggttgataatgaagggaccaaggtaccaaggcttgcattaaaaaaggtgcaaagggaactttttttcctggggattctatccgcaaaagaatcaaaaaacaatagtaaggtctcttaaccttaagttcgggattttgggccgcgtggtaatagcttcagggtctttctccattgcaaaatcttgtacctcggaactggggtctta

SEQ ID NO: 124935 - DNA, 540 bp, Arabidopsis thaliana columbia
  unsure (1)..(540): unsure at all n locations
tgcaggaccgggacggaattaccgggattatccacgcgtgcgagcactcggncaaacaagcgancgacaagccagggccgaancttctttaaatgacccgaaaacgcaaagacttaggtgtgatttcaaatataatggataccttcgaagggctttttcttgcggaccaagtaacgagtggagggcccaccatctttttttattggggggccaaaaaacaacccaaaaaggtactaaatcacttgcatgcgcatcattatcaccatgaacaacatatgttccaaaaaaaattctttcttccatatccttttggtacagagcaccaaacacaggtctaccaacaatgcctcaagaattccaaggttgactcatgaaccacgggcctctacggaacagtgttttactatctcataagcccaatttataacccccaataatgtcttcgttatatgccaagtttactcggatcttaactaaggatataaaattataaacggtctaactaccgggccttcgacaattcttaaaataaacactata

SEQ ID NO: 124936 - DNA, 457 bp, Arabidopsis thaliana columbia
ccgggcccggccgaatacccggtttcccgcggcccgggggggcaaaagggccgaacaccacgcaaccagcgtccggcgaacgccgggggccccagctggcgaagacgacggaggaaccgaggacaaggacaaccgaaccacacaagaagccacaaggacaaaattttttttacgggggcgcaagcaaccccaaaggaagagaagaaggaaaggacgccttccaccaccagcacttgacaagcgagggaagaaaaccaaaaaacagggcgaggaacgccgccgagaaggcccacaccgaccaacaaaaaaaaacacgccacacgacggagggacgcaccagagcaaataagacggagaggagcgggaccacgccgaacaagcgcagaagaaacccagagacccccacggccaggtgaggcaaagaaggcacccgaccgaggcgccccccgaaacaccg

SEQ ID NO: 124937 - DNA, 547 bp, Arabidopsis thaliana columbia
  unsure (1)..(547): unsure at all n locations
nnnnnnnnnnnnnnnnnnnnnnnnnnnnnnnnnnnnnnnnnnnnnnnnnnnnnnnnnnnnnnnnnnnnnnnnnnnnnnnnnnnccacgcgtccggctatggtcaacgattacaggactccgttgatggttgctgctacttacggaagcattgatgtgatcaagcttattggttctttgactgatgctgacgtgaaccgtgcttgcgggaatgatcagaccactgcgttacactgcgctgcttctggaggagctgtgaatgctatccaagttgttaagctgcttcttgcagctggagctgatttgaatctgttggatgctgaaggtcaacgagctggtgatgttattgttgttcctcctaagcttgaaggcgtgaagctgatgcttcaggagcttctttctgctgatggatcatctactgcggagcggaatctacgggttgtgacaaatgttccgaatagaagctcatctccgtgtcattctcctactggagagaatggtggatcagggtctggttcaccgctcggctctccttttaagctgaaatct

SEQ ID NO: 124938 - DNA, 425 bp, Arabidopsis thaliana columbia
gaagctccgcttgcaggtcccggtccggattacccggtttgacccaggggtccgggagcggttcggatcttttgaattttttaaaaggcccacaatctttcccttgttgtaccggaacttttggaggttccagaattcagttttagattccaaaacaggtgcttcgcgagcgttattgggagagaaccatcgagctttttttttttgagggggggctccgggaaccaaggaaaaaagggctacccatttaataagtagatagtgaagcggcaagggagacgaccattattgttttcaccggggtgggggaccggtaaggactatgtcggcataggagctactttaaaaaaatatcgaagggggggagatattaagaacagcttgtccagcgaagaagtcagtgccattcatagctgagtgaggat

SEQ ID NO: 124939 - DNA, 459 bp, Arabidopsis thaliana columbia
  unsure (1)..(459): unsure at all n locations
acaataaaaaaattaaagatttccttagatgtacnaacacacacaaacctaaagggggagagaaggcacccccacgcaagggggccggagccggcaaaagccggtttccacgcacgcaggacggcggggattaacacgtccggacgcaaaaaccgggacgaccggaagaaagacagagcgcgcgagaagcgagcgacacacggcggcgccgagggcgacgagccccgcccgcgcggggcagccgccacgcaaacggcacacaagcaaaggacagcgccgggacggcgggaacgcggccacccattttttctctctggggggggcagcgcttcgcagggacggggaaattctatagcccgcgcggggccatcgggatcacctagcgtggcgcggtgggacgcggggccacaagttcaccgcggggtgcaagagggacgagcggaaagcacaagcccaccg

SEQ ID NO: 124940 - DNA, 508 bp, Arabidopsis thaliana columbia
gaacccccctgcacggaccgggacggaatttccgggttgaaccaagcgtggggttggacctaaaaaaagtaaaggtcccaaagtgaaacagtccacttaaaagcgacaaacattggggagggtaagaagtggcaaaccgagggaagctctgcctaaagctgcagaacaaaaggcgttgccaaaaaaaggaaaatttttttttttggggggggggccaacaacggaaagatcggattaatcctggaaacccccaccccaacgcaaaacagaacacaggtagggaatggagagtgtattacgtacctccgtcaaataacacgggacgctacctgcaaagccaagaagtatcccaagagagggacccggagaggggcgccaaaaggcgacgcatggaagcggagccaagcaggtgcgatgtacacccgcccacgacgccacagggtcttgttccagccatacgggtaaaccaacgccagaggatcggcggacgactgcctaataaaaaacc

SEQ ID NO: 124941 - DNA, 500 bp, Arabidopsis thaliana columbia
gggaggcggccccccttccaggacccggcccgaattcccgggtttgacccaggcgtccgcgacccggggcaaagtctaaggagaagaacaacggtaaggttgcttccaaggtccaaaacctggccgggacccttacctggggttgattaagcctgccaccgacttccctcaggaagccccgtttacggactatgaaaaacatgttttcggaggagggcgaacggaaaggcaaaacacggctaagggggctaaacaaagaaaagtttccattgaaccttaccttgggggcttgcccccttagagaaccgaaaatatgccttttggaaaacatgccacacatggatcgaattgtatcccggttatggcgcccctattcaccacgcaatacggaaaggggatgttattaatgctattcaccatccttaaagccaaaacaagcttcgggactcattggcctgcccacacaccccccccggcctttcccctttcctttccggtac

SEQ ID NO: 124942 - DNA, 517 bp, Arabidopsis thaliana columbia
  unsure (1)..(517): unsure at all n locations
cnnnnnnnnnnnnnnnnnnnnnnnnnnnnnnnnnnnnnnnnnnnnnnnnnnnnnnnnnnnnnnnnnnnnnnnccacgccttcggaccattggaaccatgcttctggaaaggaccgaacggttgaagtgggtatggggtagctcaagtctggctttatgcattttaagcttttgggctttgggacccattatgggttgggaaacaccggatttttgacttcttccaaaccattaaaatcttcatgggtctgaagggcttaacccatggtgccacaaaaaccactacacttgcttctggattcattaaaaggggtcaagcttatccggctggttttcaaccttttgaaccgaaaaaccaaaatggaccctgagaatccggatcccaccccggcccaaaaccggttcctgggggaagccaacctcaaccttatgaatttttttaacccttcaaggccaaacttccaaattttccgggacctaagccttcgggctagagctggcaaaaccctacctcttgg

SEQ ID NO: 124943 - DNA, 319 bp, Arabidopsis thaliana columbia
accggaggggcgcctacctatctaacctcactccttgctccgtgaccattatgaagaggtcatccgctcatccttacttaccaaatcactgggaagcccgctaaaacatcagatatccactcgacactccccgcagagctttcttttttatgggtggtgcaaaaacacaaacactctgcctataccaacttaataggaacaatcaaaccatagcagaatctgccccgatagtatgatcctgctcccggaaaaaagcacaaagtactcgataacgtaaaaatctctccttcgaggcagagaccaccctatcctacgtaat

SEQ ID NO: 124944 - DNA, 487 bp, Arabidopsis thaliana columbia
  unsure (1)..(487): unsure at all n locations
gctctaatacgactcactatagggaaagctggtacgcctgcaggtaccggtcccggattcccgggctttctcnnattcctcatccttactctcttncagggtangatcttataatgaatgattttgctagaggactataagtctcggtgatccggggaattcgatattggaggaaagatgaaccaaaaggggagaatcaatccaggaacctgataagggctggggtttcactttaaaaaaattgggcccactttacctccatcctttggggaaaaaaggggaaaaaattttaaattaaaaaaaatttttaccccaaaaaccccaaaaccggggaaaaaaacctctttttcaaaaaaaaaaaaccacaaaaacccctcttgggaaaggggcccccttgagaaaaattggggggggagaaaggggttaaaaaacccccaaaagggggagaattgttgaccccccccccgggggttttgggggggggggg

SEQ ID NO: 124945 - DNA, 490 bp, Arabidopsis thaliana columbia
cccccagacccggacggaaaacacgggcgttcaccggggcgggagcgccgaccccacagacaccgccgggaacggtcaggagcggagacaaccaaacgggcaaggggcaggcaaagaccagcgacccagcccgcccccccgcgacgcgacccaccttttttttcaggggggccaaccccccaaaacggaccaagccacaagaacacgcgcccccccagccagccggcccaacacggacgcgccgccaaagaccccaccaaacaacaccgcccacaacagagtgaagcagggcaacgacgacgcaaaccccgggcaaccacccacagaggaggggaaccgccggcccacgagagacaaagcgggacacggagaagggcgcaccccggacacgacgcacccagcgcccccgcagcgcgccccacacaaaactcgacagcgacaacaaacgccaccaagccccgcggcgagcccgagcccgggcagacaaaac

SEQ ID NO: 124946 - DNA, 345 bp, Arabidopsis thaliana columbia
gaaaggtggcacccctgccggtaccgggcccgaatttccgggtcgacccacgccttcggttattttaagggaccttgtgggggcattggctttggacctttctggtttctacccccggaaaatctaactggttgaccgggagccttccaaggttaatggccatggaacttccaaccttaagggaattccggttatttgacctccattcttaaaacaaggaagggtttttaaccgttgataccttttaaaaaaaactcggtgtttaaaggtccgtggttagaagaaccaaaatgtgttcagaactccttgaggcaggtcccattcccaacaaatggtggttcgtga

SEQ ID NO: 124947 - DNA, 517 bp, Arabidopsis thaliana columbia
  unsure (1)..(517): unsure at all n locations
cccccaacagaccgaaaccagaaacccggttagcacacgggaggggacccctaaaagacacgcagagcaaaaaagcggaacaaagcagagggcaagcacacaaggacacacaaagggggacgaccctgctcaagcgaggccaggaccagcaagcaaacgcacacgaacacacggccaacacaaaaaacgacccttttttctaagggggggggcaaagaaccccagaaagcaacagcgaaacgccaaggccaagcaccagccaggcgcgggacaggcccccagtcacacaacaaaaagagaaaggaacagagagagaacacaacccaaacgaaggacaaggcaacacccacacgcagcaccggaaaaagagaanaggaagaaccacacagagcccagccagcccacccaagaacaacccaccagcgacaacgacagacaggccaagcaaaacgaccgcagaaccaagaaacccgcgcagaacggcaacgccaccccccgctcaaccaaagaaaaaacg

SEQ ID NO: 124948 - DNA, 220 bp, Arabidopsis thaliana columbia
cgcctgccgggaccggtccggaattcccgggtttacccacgcgggccgaaccaaatcgcctaccttttcaaaaccaaaccggtgaaaagaatgcacacacccggctacatgcaggagatggctacggttgcagttcttgcagggaggacgaccaatttccctctcccacatgtccgggctacaaacggcctacagcgtcgaggttcgacccaacattttt

SEQ ID NO: 124949 - DNA, 519 bp, Arabidopsis thaliana columbia
  unsure (1)..(519): unsure at all n locations
nnnnnnnnnnnnnnnnnnnnnnnnnnnnnnnnnnnnnnnnnnnnnnnnnnnnnnnnnnnnnnnnnnnnnnnccacgcgtncgcccacgcgtccgcccacgcgtncggccatatccgagcaacaacggcgttagcaaagcttctcgttgccagcgacaaccgcctctccgtcactctcatcgtcattccttcacgagtctccgacgacgcttcttcccccgtctacacgaactccgaagaccgtctccgctacatcctcctccccgcccgagatcaaactactgatctcgtatcttacatcgacagccagaaaccacaagtaagagccgtcgtgtccaaggtcgctggagatgtttcaacacgttcagactcacggctagctgggattgtcgtagacatgttctgcacgtccatgatagacatcgccgatgagtttaacctctcggcttatatcttctacacgtccaacgcttcttatctcgggctacagttccacgttcaatctctttacgacgagaaa

SEQ ID NO: 124950 - DNA, 480 bp, Arabidopsis thaliana columbia
ggaaaggtggtacgccttcaggtaccggtaccgaattaccgggtcgacccacgcgttcgatggtgcctgaggagaatatggtctttgtgaaaaggaaaccgttaacgtgagggatgttgtaccggtttgcccaattgggttggttattgggaaagggggtcaaggtatccaaaattttggttaccacacccaaggttaaaatcgtggtatcaaagatcatcttccaggttgggccttggcttttaaacattaagaagcttttttggttattggaaaatccttggttgtttgaaaaactttttaaccaggttgtttaatggttgattattattctttaagaatttaacaattacttctggcttttttaaggtttttcaatgcttaaccttggggcatggtaatggttggaggaattgccgacttttaccagaacttacgttgggctcatggttttagcaaatgcagaaaacttttgggttg

SEQ ID NO: 124951 - DNA, 497 bp, Arabidopsis thaliana columbia
cccccagcaaggaaccggaacagcaaaaaccggttttaaccccagggggagggggaaaaaaaaaaacagagcaaaaacccccgccggacggacggggccaacaaccccgagacaggggtgaggaagaaggataccccacggacaccccaggtagggcgcggccaggcagaccccaacaccaggaccgaagaaagtttttttagaggggagaccaaacacaaacaggacacaagctacccagacaaacagcgaacacagagagaaaaacgggaccagcaaaaacaccagacgcacggcaagagacagggacaaaaagcaacacaaccgatagaacccgaccaccacgagcagccaaggccgggatcacgagaaggagccgcgcgagcagggaccccgcacaacgaggagccggacggaggggcgggcgaagacaaggggcacgcggataccccgaaaccgcacgcacggagaccccaccgcagcaaaaaagaaaaaaa

SEQ ID NO: 124952 - DNA, 242 bp, Arabidopsis thaliana columbia
ctggaccgggaccggaatccccgggtttgcccaggcggtacgggcctcctgatggcatcgacaaaaggatctgacaagaggacaaaagcaaaggacgattgcattctcaaccatcgcactgctgaggcatgtttgctagaattacgcgcacatcgtcagagaatcttcgcgcgcgcgataccgccgtgggcagaacaccactactacccccttttttctttttctaggggggcccccgccgc

SEQ ID NO: 124953 - DNA, 528 bp, Arabidopsis thaliana columbia
accactcactatgggggagctggccgcctgcagtaccggtcccgattcccgggttgacccacgcgtgcgccccgcgttcgttaaagagagcaaattaattttggtttgaataaaaatttcaatttcattatggaatataattatattagcatctaccatatgggtagcttgaaataagtgttatttgttttggtgattttgaacccactaaatttgtttttcttttaggataactcatatgaagtcatggggtgtaaaataatttattaataaatatataattaaaggttcaattagcatgtcaatatgacatattacatttttactttcacaaaaaataatatctactcaagatattggttttttaactgacaaaattgatatatctgggtaaggcctgattttcaaaatcaactgaccacctttatgttattgaaaaacctaaatgaactccctaccttttaatttcacacttttctttggttacaccataatcatcatctattggttgaaaaaaaagccaaattt

SEQ ID NO: 124954 - DNA, 343 bp, Arabidopsis thaliana columbia
acgccctcccaggaacccggcccgcgaaataaacgggtttgaaccaacgcaggacggaaccaagagaaacgaaaggtcaagggagaaaggcccagaaccccctgcaagaaggctaaggacaccagacccaacacaacgggcattaaggaggacgaagcgctcgagcgacgcttaaacaacagactcaatagcctaggagagaacaccacagaaccacaaagatcgcacgaaaactttttctaaggggggagagggagccaaacagagcccaagccgtcaaccgaactaaggagccccacggaactggcgggaccgaaaaccaccacatagaagaagccaacac

SEQ ID NO: 124955 - DNA, 213 bp, Arabidopsis thaliana columbia
cactaaattttaggggggagccgcggctgcagcgactggagcggcataccggtttgcccactggcccgcccgagcgatataagtaaagcccctactccagggcagcggggaagccagcgaatacatctcgttggcctgaagaggggccaactcgattggcaagactgcagtgccaaaaagcactctggccatcgaccaccgctcttatctatt

SEQ ID NO: 124956 - DNA, 535 bp, Arabidopsis thaliana columbia
  unsure (1)..(535): unsure at all n locations
agctctatacgactcatatatggaaagctggtacgcctgcaggtaccggtccggaattcccgggtccgcccacgcgtcccgggaccgcgtcggccacgcgtnccgccacgccgtccgggacgccgtccgccacgcgtaccaataaaacttattttttttaatctttttggccctggcaaaagaattggatgggaaccaaaatggaccaaccgcggggaaagattccagggttccgcttccggaacatttttcgacctggaagaacttaagaaatgggccgtttatagaaccggccttagtgaagttggaagcaacattttggttcttttccgtttaattcctgactgtaatccggttacaaagttcaaaccgatgcacccgccgtaggagtggatggtggcggcgtaggattatggggtattgcgtgggctttcggtggatgatctttgttctcgtttactgtaccgacggaatctccggtggcatataaatccggctgtgacggtgggactattcctggctcgtaaagtgtcat

SEQ ID NO: 124957 - DNA, 520 bp, Arabidopsis thaliana columbia
ggtttgggccaaggcggtaggggcccccgttggtttattgtaatctttggcctgcgccggatggggtgaagggtgatgattggagcaggcacagcagaggattcccgaggcccaccgcgtgttggtacggctgcagtagcgagccctaaggaaatcgcgcacagaagacccccagcggttttttttttcagggggggccgtacgacacacagtgaccctttcggtgctgtcattggtgcccctgtcgacaactggaacgtgtaggaccgcccgttcgggcctaggcggcagcagggcggaagttctaatagatgtacaacgtcgaagataagtggtggagatagcctccgccgatcgaggtcggcccacatagctcttaatccattactcaacaatggtaatatcctacactccgagtcgtgacgatcctcccaccgccgccatcggtgatgggtagcgcgcgcgccgcgcgaagcacacgacagctgtatcccggacccgtttctttgagactacaaac

SEQ ID NO: 124958 - DNA, 447 bp, Arabidopsis thaliana columbia
cgactcactttagggaaggctactacgcctgccggtaccgggccggaattaccgggttgacccacgcgttcggccacgcgttcggccacgccttcggccaagcgttcggccacgcggtcagccacgagttcgtccaagccggcggagttctttggacctttttgtttaccctggtttttggacctgaattacccaaccctaacttggtcttttgtttattatttaggaggggggggttggttggtttttgggaatgaagaaaaatcaccaaaagggtgggttaatatttccattgggattaaatcggtcgaaaatgaagcagtcctttgggaattttggttaggctaagtatgaacaacaccatcgattttgggaaggccgaactgtgcggctgtaacgcaccatttaatattctggattagaaggaaatcaggctggagataaccg

SEQ ID NO: 124959 - DNA, 429 bp, Arabidopsis thaliana columbia
  unsure (1)..(429): unsure at all n locations
ccgcctgcaggacaccggtccggatattccggggtcgacccaggcgtcgcgttactttttttaaaactacgaaaactatggttggaaaagcctgggtggcttggttctgcctggactaatagcgggtcagaatagctcagctcaggaccgtccaacagatctgcttgctctcctggtacctcctttacgcggggggcaactccttgaatcacaccaactacaactccaacaccatccgatactcccacggaggctccagtttctcctccgggtgggacaccagttccgtgctgcgtttcaccacccgttcctacaacttttctaactcctgatggtgcacctgtagctggtcccactggatcccctcccgtggaaaacaacaacgccggcaattttagctgttggatccnttagcccggattcgtattg

SEQ ID NO: 124960 - DNA, 376 bp, Arabidopsis thaliana columbia
  unsure (1)..(376): unsure at all n locations
gcaggcgggggacgacgcgccgcacccacacaccccacccgcccaccgccgcccacacgcgacacacacccaccacacacacaccgcgcgcacaccaaaccacacaacacggagcaaaccacacgncaccgcgaccccacaaaccaccacaaagccgaccccacccacaccccaaaccacgcgacagggccaaggacaaccatcttttttcaaaacagggggggagaacaaaaacaaccaaaaccaccagcacaaccccaaagaaaaataagaagaaagacgcacagcaagcacgagccccccacgccagcaagaggacacacacagcacagaaccaaacgnaacccgcagcgggcaacgacacaaccaggccaaa

SEQ ID NO: 124961 - DNA, 463 bp, Arabidopsis thaliana columbia
  unsure (1)..(463): unsure at all n locations
cggcacccctgcagggaccgggcccgaattcccgggtttgcccacgcgtgcggccacccgttccgtgagaagttgagttgaagaaccaaggtcgtggtccatgccattgacccaccagaccactacttaatgtgtcgcttttaagggtaaaaccacccattcttgcaaattctggggtcggcccaaccctggggttttttttgccgggggttgccgcaaaggtaccgggaccatgccaggcccgaaagaagcgccacttggttttccatgccaagaccagttccttggtcaaactggtggtggcctttaagggacctccttccaagaaggccccgnctggaatggtcaaccaaaggaggtcgtgtaaagggattgaggattcaaaccggcaagtgggtacctttccggtaatccctcctaacctgccccggaaggtcttaaaaaagggacttttcttagggtt

SEQ ID NO: 124962 - DNA, 547 bp, Arabidopsis thaliana columbia
  unsure (1)..(547): unsure at all n locations
gctggcacgcctgcaggtaccgggccggaaattccggggtcgacccacgcgtgcgggtcatttacattgatgatgaaacttagtttccagaaagtgggcaccatccagtgtttgaaagcagtggtaagcacagaaagccaatgggagctacgcttgagtnagagagattaagaaaacaatgatcccaatggttgtctcatttgtagaaaacttcttattgctctatagccaagggtngagtcgggacggagtactgacacaggggacccataggattgagccagtcttaggcagtcccaagtcattgttcattgagacccgtcacactttagtccctctcccttcagcatcattacagcttggccacccgtttcactgcaggcggccgctctagaggatcccaagcttacgttacgccgtgcatgcggacgtcattagctctttctataggtgtcacctaaanttcaatttcacttggcccgncgtttttacatccggtcgtggccttggggaaaacccctggccgtttaccccaactttaatccgc

SEQ ID NO: 124963 - DNA, 352 bp, Arabidopsis thaliana columbia
  unsure (1)..(352): unsure at all n locations
ttcttcttcaagtgaaaaatggcccgtggtgaggatatccagccactttgtttgngacattttttctgnggtgttgaaggccgccccngctggcgatgatgccccgagagcagagcccccaaggtttggtggccgacctatgcacactggacgcatcggacggcctggcccacaaagatgctccccgaccgccaccaagagcacctccagagaggcacccccacaccgcagctccgcacccccgatgccacgcccacgcaaccagcaccgaccgcccaccagcaacacacggccaccgaactacacggcgccacgtacgccccacagaacccgacgcgacacctcccccaaa

SEQ ID NO: 124964 - DNA, 145 bp, Arabidopsis thaliana columbia
ggggggcgagaccccccgggaggcccgcgccggaaccgcggggtaaaccgacaggcgcccggacagacgcgaacagaagacgacccgccggaagcgacgaacgcagaggacgaagcgcaccagccgccagacgccgcacacaaac

SEQ ID NO: 124965 - DNA, 493 bp, Arabidopsis thaliana columbia
  unsure (1)..(493): unsure at all n locations
nnnnnnnnnnnnnnnnnnnnnnnnnnnnnnnnnnnnnnnnnnnnnnnnnnnnnnnnnnnnnnnnccacgcgtccgcggacgcgtgggcggacgcgtgggctccagccaaggatgcccttggaaacgatgtagttgcagcggaatggcttaagactcatggtcccggtgaccgaaccttgacccaaggattaaagggagatccgacttacctagttgtagagaacgacaagactgtagcgacatacggtatcaacgcagtgtgcactcatcttggatgtgttgtgccatggaacaaagctgagaacaagtttctatgtccttgccatggatcccaatacaacgcccaaggaagagtcgttagagggccagccccattgtcgctagcgttggctcacgccggtttagatgaagctgggaaggtcctttttgttcatgggtggaaactgacttgaggactggagatgctccatggtgggctaaaactcttgaacaa

SEQ ID NO: 124966 - DNA, 518 bp, Arabidopsis thaliana columbia
  unsure (1)..(518): unsure at all n locations
gannnnnnnnnnnnnnnnnnnnnnnnnnnnnnnnnnnnnnnnnnnnnnnnnnnnnnnnnnnnnnnnnnnnnnnnnnnnnccacgcgttcggtttcgactgcagcgtactttgcgcggcgagcggctcacaaggagaaaagtcgaatcctttacccgcagtgcccttaaggatactatcaattgggctggtcatcgacatatcttctaccctgacgcttctgatctgcgggaaaagttcaatgtcaacccagatgtggaagatgtccacagaatcgaccaaccgattgctcatggtgaaccagaattccacaaatggcggcaccctgatccttatatcggtccatgggcttctggtggcctaaaggtctgaaaaaccccactcccccctgttggaatgagaattgttaccactatgggctagaagacacccctaataaacctagcttccataatggcaacaccatcaattaaattgaaccatccggcgggctttggtcggaaaaaaattaaactgattt

SEQ ID NO: 124967 - DNA, 458 bp, Arabidopsis thaliana columbia
  unsure (1)..(458): unsure at all n locations
caaacaacgggttttaacaggggggcggcggaggcaaacccaacaaccacccacaagcacgcacccagcggaagcaaagaacgccccccaaccccacagaaccacacacaacaaaagcccccaccaagacgaagacgccggcgagagcgacacaaagaccagcaaacaaaacagcaacacnacgcgaagagcgaacacgcaccaacacccgctcttttttcacaagcggggggggccaaccacggacgagaccacaccccacaaccaccacccacgacaaacacaccaacaaacgcacaccccaccccacccccccacacacccccgcacaccgccagagcaccgaccccaggcacaaaggcccgaccacccaggagggccgcgacaaagcacacagaaagggggcacaacaacaagggggaacgacaagaaccaaaagcccgccgcgcaaaccgaca

SEQ ID NO: 124968 - DNA, 303 bp, Arabidopsis thaliana columbia
  unsure (1)..(303): unsure at all n locations
gccccccgggacgcccaacccgaacaaaaaaaaaccctcgttgcccgggaagactanaagggaaaacaacaaaaaagaacccaccccggaaacgcggggccgaccccggcggcgaggaaccggcgcacaaagcagcagggcgccagcgaccagagcaccccgagccgaaccacgccaccgcacaacagaccacccgacaacaccgcgcgggcagccaaggaccaagacgacccaggaccaacgacacaaccaaacccccacacaaccaccaccggccagaagggcgcggcggacacgcaaaaa

SEQ ID NO: 124969 - DNA, 348 bp, Arabidopsis thaliana columbia
ctcacttttggaaagccgggacccctgccaggtcccggcccgaattccccggtccacccacgccttccgagaacccaaagaagaaaaccaaacttttcaagtccccaccgaaaagaaaacaaaaaaatattgttgttagccgccgaagaaaaaggaatccaaagaagagccaccgaaaaattattgccaatggcaatttattccaccattcaccaaattccattccaccagttccaggttaattccaagaagttaaaacctaattccagaacatggtgtgcaaaccagccaattccggtgaaagccgccgtcttatccaccttgaccggtgcacaaggacctttcatt

SEQ ID NO: 124970 - DNA, 489 bp, Arabidopsis thaliana columbia
ttctatacgactcatattgggaaagctggtacgcctgcaggtaccggtccggaattcccgggtcgacccacgcgtccgcccacgcgtagggacatgctttaccctcaaaagtggcttatgttctctaactatctctatgacatggcctgctttgaaatctctctgggtgatacaattggaatcggcactccaggacatgaggttgcaatgctcgtaaccccgatgacaggtgtgccggcgaacaagatgcctgttcactaccatgatacctatggcctagctcttgcaaacatattggtgtatctccagatggtaatacgcatagagaactcatcacttgtcggattaggcggctgcacatatgcagaaggagcttcaagaaacgaatcctcagatgatgaggtaaacctgtagaacggtttaggcttgcatactaatgccgacttgggaaaccttaaggctgctggaaattttattagcaaccatctc

SEQ ID NO: 124971 - DNA, 456 bp, Arabidopsis thaliana columbia
ctaatacgactcactatttggaaagctgggacgcctgcaggtaccggtccggaattcccgggtcgacccacgcgttcggcgaaagctctatcttcttcaaagaaaatagggttcagtggtattccaatctctatggtcctgtgcactttctagctttcgctctgtgaaattcggagcccgcttagactctctctctgtgtttcgcccgcgatcatgtgcatgtgcacttcccggaggcttcccatccgagaaggagaggtatatgaacctctcagagagagaagacacctcgagatattggtatctcacactgtgtgtgggaggagataaagagtgtgtgtactctaagagagagagaggaagatatgtgtctctgagagagtgtgtgtgtgtatatcacacagaaaagagactcagagttgtgagaagaccttatgaggtgttttatagggtgag

SEQ ID NO: 124972 - DNA, 494 bp, Arabidopsis thaliana columbia
tataccactcactattggaaagctgggacccctgcaggtaccggtcccgaattcccgggtcgaccccagccttccgaattccgaccgggaagagagagatccattttggtggccgaaattaagatctggaaaacaaaatggtcgccaaagataccaaggattcgaagccaaagccgggattcgaattcaattcgaccacccgcttttgccggaagccttgtcttctcttcctgaattggccaatacccctttgctcctccggtgacacttcggctttgttccatatgttcgttgtggttaccgttgcggttttcgtcgtggcaatgttcgttaataactgtccaaatcatttcgagtctcaccgtctcagaggtcactgtgtcgccaagtttctcggtaaactctcctttgagcctctccgaactaatcctctctttgggccatcttctcacactttggagaatttaggagcacttgagtggaccaaatttgtg

SEQ ID NO: 124973 - DNA, 505 bp, Arabidopsis thaliana columbia
  unsure (1)..(505): unsure at all n locations
tacgactcactatagggaaagctggcacgcctgcaggtaccggtccggaattcccgggtcgacccacgcgtccgcggacgcgtgggagttaagtgaggaagagaaaaaaagacagagaacaaagctctgtttctgagacacaagaagacagtgaattctaaaaatgtttcaagaatttggaattaagttggtgggtacacttgttttctattttgttgttactactacgtatatttttttctgataaagaacataatttttcttggattttattaaataatagattcgaaaaaaaatcaagtttaccataaaaaaaaaaaaaaaaaaaaaaaaaaaaaaaaaaaaaaaaaaaaaaaaaaaaaaaaaaaaaaaaaaaaaaaaaaaaaaaggnnnnnnnnnnnnnnnnnnnnnnnnnnnnnnnnnnnnnnnnnnnnnnnnnnnnnnnnnnnnnnnnnnnnnnnnnnnnnnnnnnnnnnnnnnnnnnnnnnnnnnnnnnnnnnnnnnn

SEQ ID NO: 124974 - DNA, 444 bp, Arabidopsis thaliana columbia
atgataccctatctctaatacgactcactatttggaaagctggtacccctgcaggtacccgtcccgaattcccgggtcgacccaagcctgccgccacgccttcgaaagaaaagggtatcaagattgccaagaaagattgggagaagctgcatctgcacattggttctcataaccacctccctactggtggtggcttaacatcttctgctggtgggtttgcttgcttaagttttgctcttgcccaggtgatgaatgtgaatgaagatcccagcccactttctgctcttgcaaggcgagggtcaagaagtgcttgcccgtaattatttgggggatttgtccagtggaatattggaaaccaagaagattgaagtgacactgttgcaattcaactggtagataaatagccctgggaagaactctggatcaatattgcgcggggtaggt

SEQ ID NO: 124975 - DNA, 505 bp, Arabidopsis thaliana columbia
gcgcgaggccgcaagagaagtagatacgctagctttttacgactcactatttggaaaggcgggacccccgcgcggacccggcccgaatccccggtccaaccacaccgtccgggcaaaattggcgttcctctggcttcgttttctcggcgcacgggtggaacacgagattcgccctctctcacttgttccgtttcttcgaaatggctacatggctcgtttctctggacgcctgtttccctagcgcctccattttctggttgggccatggcgttagatctcagcagccaaactaggggactgaatggccagagacccagaggccttggggttagagctggaaaagctgctctgtggcaaactaagagaaggagatcaagaaactctctagctaggactaatggctcccgaacaaggatgaggaccccctccggaagagcgacccataaagcgacgaccagccaagggacgtggagaaccttctgcccgaagggccaaccctagggag

SEQ ID NO: 124976 - DNA, 503 bp, Arabidopsis thaliana columbia
  unsure (1)..(503): unsure at all n locations
nnnnnnnnnnnnnnnnnnnnnnnnnnnnnnnnnnnnnnnnnnnnnnnnnnnnnnnnnnnnnnnnnccacgcgtccgaaaataaaatagaaagataaaaaaccagattatattaccagagggtgaaatggaaaaaagagtctataaatatactgttcaattttttttattttttttttattaatatcccaacggtcgtggggaagaaaatattctgattttgtaatgtcacgttaggtgtatgtaatatttttgcttgcagtggtagaaggtagcaggaacactttagaacgaaatactgaaaccaacgcaacagaagccaaagtagaaggtaaaggtacaataaaactaccgccgaatgttaccattcctggaatcataacatttggagattcaatagttgacagtggaaacaataaccaccttcgtacagcattaaaatgtaactttcctccttacggtaaagattttcctggcaaaattgctactggaagattttctgatg

SEQ ID NO: 124977 - DNA, 456 bp, Arabidopsis thaliana columbia
gaaggcgggaccccctgcaggaaccggcccggaattcccgggtcgacccacgcgtccgttctgctgttataacacatgaattattatgggatgaaacgggtataaaaatgagcaattctttaggtaactaaatgtgcccacgttgggtctttgaaggagggaaaagttcataggacgcacctgcttacggagctgatgttattcttttttgggttggtactgtagattacacaggggatgtactaataggccctcagattcttactcatatgtctactatatataggaagtctaggtgaacgttacagatacctattgagagatcttcatgcatcggagagtagataatgtctgctcataccacgatttacctatcatggatcagcatgctctcttatctgttgagattgttgtgaagaattacatgactgttacaagaactaccgagtctttaaa

SEQ ID NO: 124978 - DNA, 367 bp, Arabidopsis thaliana columbia
gaaggcgggcccccctgcaggacccggcccggaattcccgggtctacccacgcgtccgcccacgcatccgggtaaatttcgttttctgtgttcggttatgccggccgaaaagacaagaggtggagactaattggcagcaaagcgagtctctctctatatctgttgatatcagccgagcaatactttcggagtgctcgaaaccactttttttttcgaattatcctgtattttcttgaaattgttttctgcttccttataatgaaaatcacggtgaatgagcctccgactaaaactagtattgcctctggacacaatctggatcttgtctttgacatgggagaaactgtgacgaccagcttcaatccca

SEQ ID NO: 124979 - DNA, 504 bp, Arabidopsis thaliana columbia
cttttttttattcaactcatattgggaaggctggaccgcctgcaggtaccggtccggaattcccgggtcgacccacgcgtccggttgaagagaaagagataagctttcacatcaatttttgaaggcgcgaaatggggaatacttcatcgatgctgactcagtacgacatcgaagaagttcagagtcattgtcatgatctatttgagcagcaggagattttatctctgtatcaacggttttgccagttagatcgaaacgcaaaaggatttatatctgctgatgagtttctctctgtgcctgagtttgcgatgaatccactctctcagaggctgcttaagatggttgatggtttgaactttaaggattttgttgctttcttgtctgcgtttagtgccaaggctagtctaagacagaaagttcaattgatctttaaagtctatgattcggactgcaacgggaaggtctcttttaaagatatcatggaagtgttgcgtgacttatcgg

SEQ ID NO: 124980 - DNA, 375 bp, Arabidopsis thaliana columbia
  unsure (1)..(375): unsure at all n locations
gatacgcctagcttttattcgactcacttatttggaaagctgggacccctgccggtaccggtcccgaattcccgggttgaaccaagcgttcggccaagccttcgttaacatttttttttttctttggcttctctttggcctaacgagaatttgacttacccgaatggcctcctttccgaccgggaacccattttgggtttgaaaaccattactggctctgngcttaacccttccttggtctttaattcctcttcccaattactttaactttccttggcgaaagcttttgaaacttcttggagcaagccaccaaaaccacttaattggtgcttccaagaataccttttttaaccaatcccttgctgaatttttccc

SEQ ID NO: 124981 - DNA, 489 bp, Arabidopsis thaliana columbia
  unsure (1)..(489): unsure at all n locations
gcgggcccgcctgcaggtaccggnccggaattcccgggtcgacccacgcgtccggtctctttttccgccaccaccgttcctaatacgtgtgcggttttcttataatggcgagcaatcgaagctccaatcatgaatccatctataacaccgcgtctttacacatgcttaccagaactaccaggccccgatcaactctcagtctctatactagctgtcgactcctccggaatatgtgattggcggacgagtgtctcaagcagagtgaatcatggggagaaaatgtcacttggtacacagggcccggttatttagccggctctgaacacggtgcttcagctgggatcttctgtgagttcaagagttgcgaaaatggagacaccacgaagctgaaaatcaaccggattgtgaattcctctggacaggcaggtcgaacttggggccatagggatgagattggtggtttgctctacgctggtatcgataggggcg

SEQ ID NO: 124982 - DNA, 375 bp, Arabidopsis thaliana columbia
tatacgactcactataggaaagctggtacccctgcaggtaccggtccggaattcccgggtcgacccacgcgttcggtgggaaccaagaaaaccaaattattattaaaaacccttatttcccggttcaatttttttttttacgctttttttgggattttagtatgggagccacgggggaaggattaagtagtacttttggtaccaccaagggtgatgaaacctatgaattcttaacgccttcatgggttgaattccgtaatggaaaaaatggagaagaatcttggccaaccaaacctttggttcaattcggcctaaacttggcttctttttccttgggttcttaaattaaagccagggaaatcgtccaaggaaaag

SEQ ID NO: 124983 - DNA, 561 bp, Arabidopsis thaliana columbia
  unsure (1)..(561): unsure at all n locations
aagcccgcaggaaccggcccgaaacccccgggccgacccaggcgggccgggcacccgacaacacaccacgccacgccaggaacagaaccaacacgaccagaggaggaaagcaacaccccaggagcagcgaaacacaacaaaaacagacaaaccgacacgcaaagcaaacacaggcagaaaaaagcacgccacaacaccacaacacaaacaaaaccgccgcaccaagaaangaaccaacacgacagaccacgaggcgacaaacaaacccaagacaacagccgcacagaaacacaagaagccaccaccaaaaccagacaaagggaagacccaacgcggccaccaaagcagacaaaagccaaaaaccgccacacgccgcccgaacacacacccacaccaccgagaaacgaccgccagaaagcgagcaaccgaccgcgaccgcccacccaacacccaccacggccccgacacaagcagccacaggaaaaggaaaagcgcgaagcacaccgaagaccgagacgccgagacgagaagcgagcgagaagaaacaccacgaacccccaa

SEQ ID NO: 124984 - DNA, 176 bp, Arabidopsis thaliana columbia
aggcccttcctgttctacttcgctcattagtcgccgcgcgcgaggcgcattcttttttttcattttaggacaacaaagtcctttttaagattgtgtaccaaggcgttagaagcagctactcatcttcgcgtgtattcgcttagtatagatgatatcgatcgcgctcgcgcaataca

SEQ ID NO: 124985 - DNA, 137 bp, Arabidopsis thaliana columbia
ttggaggagaggcccccccgctacacgatctttcccacacactctactaggcgatgaggtaacctaacaggcgtcgccaacagcacgcgtcagccattcgatagcgaggttggtccgtgacacgcacaacaccgcgc

SEQ ID NO: 124986 - DNA, 485 bp, Arabidopsis thaliana columbia
  unsure (1)..(485): unsure at all n locations
cgacaccgccggcaggaaccggnccggaattcccgggtcgacccacgcgtccgcccacgcgtccgaggacaccgactctgaggaagagctcaaggaagcattccgggttttcgacaaggaccagaacggtttcatctcagcagctgagctccgccatgtgatgacaaaccttggtgagaagcttactgatgaagaagtctatgagatgatcaaggaagctgatgttgatggtgatggtcagattaactacgaagagtttgttaaggtcatgatggctaagtgatgctgttttagaaccaaacaatggctctataaacttggtttgcatctcttacatataaattcttatgttatgttctataatttttattcatgggactcgaggtatgttttctgcttgttaagacgcgaatgttttatccctttatgctctattttgcgtctgaacattttcaaaagtcttttttttttgttggcttgctcct

SEQ ID NO: 124987 - DNA, 245 bp, Arabidopsis thaliana columbia
  unsure (1)..(245): unsure at all n locations
ctatacgactcatatatggaaagctggacgcctgcagtaccggtccggaattccgggtcgaccacgcgtncgctgacttctgtctattaaccggcgatggactcgccgcctatgactgccgtggtgatatcatcttcagggtagagttttatggacctgacacatgagataacgatgagattgtccttattgactcgaaccgctaagtgtccacttacccgttaacgaaagagaccaactctaca

SEQ ID NO: 124988 - DNA, 473 bp, Arabidopsis thaliana columbia
  unsure (1)..(473): unsure at all n locations
nnnnnnnnnnnnnnnnnnnnnnnnnnnnnnnnnnnnnnnnnnnnnnnnnnnnnnnnnnnnnnnnnnnnnnnnnnctttgtttttttttttttnttttttttttttttttcaaatcaagaaatcttataattaatcttgaaaactatatttatattggcaggtaaacaaattaaagtataatacaacgctcattggcagcgtcacgaatgagacatttattcttaaaataagtttgagtttttggcacgagcaaaagacttaagccacagaaaatccctttatattccacaatcttagttaaataaattccaacgccccccatattagcaaataaactgcaaagctaagataaactacacaaaaaaaaaaaatcccctctggtaaaatttaagaaaagatttgagaattaagaaaaattactatcatgttattacataattagttttaaattggatggagacttttaaaaaaag

SEQ ID NO: 124989 - DNA, 506 bp, Arabidopsis thaliana columbia
gacactatagaagttctatgacgtcgcatgcaccgcgttccttagcctggattcttttgagcgggccgccctttgttttttttttttttttttttttttttttttttttttaaaaacccaacccgaaaaatggttgcccttttaggggtttgtttccaaaattggtttaattccaaaggtggccccccaaggttaaaaccttaaaaaaccattttgtccccccggggaggccaaggaagttttcctttataagaaaatggatgggcaaatttcgccagtttaaacctgccgaaaacccttatccttgaccagattgggaaaatcccccagtcttaggctgatttaagttttttttgggttctggtggactagcggaaaaggcggggaactgattttttaggcccttttctttcaggctttattctccgataaaactccctgatttaacagggtctgataggccctgattttttcctttccgccataacaactggagctgtttcaac

SEQ ID NO: 124990 - DNA, 478 bp, Arabidopsis thaliana columbia
tggccttgcctggcccccttccttagcctggattcttttgagggggccgcccttttttttttttttttttttttttttttttttttttttttttttttttttttttttttatttttttttttttttttaaaaaaaaaaaaaagggcccttttttccgggttttttgcctccgaaattttgggggtcccttctttttggaccaggaacttttgaggggaatttttccaaaagtttttacccgggttgggaatttaccaaaattttttactttttttgggtcccaaaattcaaaggttcaaacccctttccaaacccgcccgaaaccaaaaatcccaatgggtaaacctttggggcaggtttcacggaaaattcccggcctggaatttggaaccccaataaaacctcgggggttttgttgctgcctcctcgcaatgactttaggggacaaattttactttttccggggtttggcccttgg

SEQ ID NO: 124991 - DNA, 358 bp, Arabidopsis thaliana columbia
  unsure (1)..(358): unsure at all n locations
nnnnnnnnnnnnnnnnnnnnnnnnnnnnnnnnnnnnnnnnnnnnnnnnnnnnnnnnnnnnnnnnnnnnnnnnngccttttttttttttttttttttagtcactaaaaaattaattaagatttctggtaaagaaaatacaaaatggaccccaaccgcaaaaaccaagaccacattgttttaagagattagtttacattgccaaagttccaccaccaccaccacccaccaagaaaagaacacattccctttttttacccagaattcttcttttgggcttaggtcacttatttgattcaccagccaaaagaagagttaagacccgaaccaggccggttcaacaactttacatgtgtggaag

SEQ ID NO: 124992 - DNA, 513 bp, Arabidopsis thaliana columbia
  unsure (1)..(513): unsure at all n locations
cgatactannnnnnnnnnnnnnnnnnnnnnnnnnnnnnnnnnnnnnnnnnnnnnnnnnnnnnnnnnnnnnnnnnnnnnnnnnctttttttttttttttacagtatgatatattcatatatgtttataaacattcaaatcttgcttaacaacaaacagtatgatatagtgctttattattagtatttacatgaacgctaaaatattatattatacaaatagtatgatcacaatatatccatcacttagcctttgattgccttgtagcatcggaggctgcacaatggaagatttgactctgaatctctatatttgtatgggtttgtacattctggacccgcacatctttcccgcggtggaggataactgtgtggtgtagagttgaatatacttggcaatccaagttcttctgggaaggttactatggttcctgaaggacccatcacccacttcactgtgtctgatctacgggcaatcgagtctgcagccttctccttggccttgtcttcttggcg

SEQ ID NO: 124993 - DNA, 503 bp, Arabidopsis thaliana columbia
  unsure (1)..(503): unsure at all n locations
nnnnnnnnnnnnnnnnnnnnnnnnnnnnnnnnnnnnnnnnnnnnnnnnnnnnnnnnnnnnnnnnnnnnnnnnnctttnttttttttttttttttttttttttttccctaaaacacaagtttctgactagagagtactgagccatacacagtaatagaagtcgaaagtttttggtctacataataattcaataagattccagattcttggaatgaaccagaacaaagaattagctttctgacccagaacctgattatcaatcgactacaacaatgcattagaccgggggcatttgtctaagtgcgtcatcaggcagcaaaactctaaacactgcataatgatgggtcaaacttttttccccttgaagtctatgaacactcccgagaccacctgccggggtgtttggaaaagcataaaaaatccgttttattctttgatgcacaagcgccatagcacacattggacaaggcttcaaccggaggaaaatgtgctaaccagtgccga

SEQ ID NO: 124994 - DNA, 558 bp, Arabidopsis thaliana columbia
ttttggggtcggccgcgcccctccctaagcttggatcctctacaacatgtcgcccttttttttttttttttttttttaagggcaaactgtgacacccttgggggttaagagggagaacacagcttccaaggtactctaataatacttgaacaactcccaaaaaatccttccaagcacacacaaagaggatctcctctgtcgcgccgcagccccaaacaagcttttttcttatgggggggggaaccccttccaccttaattggaaactgcccaaacactttctcagagagaggcctctccttatgccccggtcaaataggagcgctattccttttaaccccctccggtccaaattctctttctcaacaggccaacaaccgctacccgagggaaaagtactataagagttactattttctgaggcccctctccaccggaagaaaaaggtggtttgtcttctgtgccaataataaagcgcgcactcccgataaactcgcaggattgtaaagagaaaaaagggggcgcggggtacatctgatcttgcatggaacaaactaga

SEQ ID NO: 124995 - DNA, 520 bp, Arabidopsis thaliana columbia
  unsure (1)..(520): unsure at all n locations
nnnnnnnnnnnnnnnnnnnnnnnnnnnnnnnnnnnnnnnnnnnnnnnnnnnnnnnnnnnnnnnnnnngcggccctttttttttttttttttttttttttgatcccagataatagtttcagatgccacagattccatggtgaaaccgagaccttggtttattttacccgatttttccgggaaaccttccgagagaaagctgggtttatttgaaaatgaatttattcgctttctgggaactttttttttaagggttcaatattcttagcccatttctttttggttgacttggaaaaaaggtgtttggaaaccaaccattcaggggtcccgaaacccaccaggtccattacttttggaagccaaagaaccaaattgatggcccccaccaccatgggagaatacccaaccggcaccatgggttcttcttcattatttaaggccagaaaattggttttaaaaaccttccaatttttctttaaaattgggaagaagtccgtgggtttaaaggaccaaggctttttt

SEQ ID NO: 124996 - DNA, 521 bp, Arabidopsis thaliana columbia
  unsure (1)..(521): unsure at all n locations
nnnnnnnnnnnnnnnnnnnnnnnnnnnnnnnnnnnnnnnnnnnnnnnnnnnnnnnnnnnnnnnnnnnnnngcggcctttttttttttttttaaccccattattccatccacatggtttttaactcaaatcttaccataccacctgaccaaaaccttcttggcattaggcttcacaataacctaacttgactcttcagctttttttatttaatatgggggttaaaccccaaggggattttttgaaccttcctgacaccaattccttcaagaagaagggaccttcgggggaaccttttttttggagaccttggtggaaacattctttccctttccttgggggatcccttttccttccaaggacctcggggaccgcctttaggaaggcctcaaggggaaacggttccctttcctggaaatccaatcctccaccattataaggaccatcctggtggacccagggataggttcccactctaatcttctaaaaatggtcttttttaacaacttaaacaaacactttt

SEQ ID NO: 124997 - DNA, 488 bp, Arabidopsis thaliana columbia
actatgacgtcgcatgcacgccgtacgtagcttggatcctctagagcggccggccctttttttttttttttttttttttccttttttttttttttttttttttttttttttttttttttttttttttttttttttttttttttggggaaattggggtttttttttttttttcggaaaatttttttttccggatttccctgggaaggggaaatttgcaaatcccaaaaatgcctttccccaaaacaggtttttttaaaaaaaaaagaaaaaattccaaacccccctttccaagggtttttttttttttttgaaaaccccaaaacttttttttgacccccgcccttaaactttcccctttcctttgcctttgtaaaaacccttgttgtgggaacccccaaattgttcgcctgaatagaagggttttttgtgggtgttccccccggaaaaatgccccccaaacttggggctttggttaaaattcaagggaa

SEQ ID NO: 124998 - DNA, 481 bp, Arabidopsis thaliana columbia
  unsure (1)..(481): unsure at all n locations
ttgacgtccctatgcacccttccgtaaccttgaatcctctaaagcggccgcccttttttttttttttttttttttttttttttttttttttttttttttttttttnccaccaggggaaacctgagccttgataatctgcacccccaaaacctggaaataaaccactttcctttttcaaaagggcaccttattttgtagaaccacccgccctgtaaaaagtctcccttccccctgtttttttggcagaaaacctgcttccattctggttggcatccaaaaataacccccggttatgtgtcccattgcctcctccgttgtaagctcgggcccccaccttttttttaccactgcaccgtcttgcagggtttggcctgttcctaaaggcaaattcttgctctacggggggctgttcttgaccctttttttgtcccctaaccctccgtttctccttttttggttcttgcctaaccataccgtactc

SEQ ID NO: 124999 - DNA, 508 bp, Arabidopsis thaliana columbia
ttaggtgacctttagaagaacttgacctcgcatgcccgccttccttagcttggattcttttgaaccggccgccctttttttttttttttttttaaataaaccattttacctttattttattccccattaaaattttccagccattcgggaggtaaaaggtaccccaggggttaattttttacttttttcccccattttgaaccggtccattcggagtttagtgcccttattttttttggcattttccttgaaacaccttaggccattccccttttgaccattccttttgaccttaatgtttttgcatttgcttcccacatttccgggggtatcgtctgaaaaaaggttcagggtcattgtcaactacttatccttcatcaaaatgttggggagtttgattcgatgttcctggaagaagtgctaaagactttttcgtcaggagaaaaatcccccaaaggaagttattggttttcttctgcatcttgatgataactgcaaacacaaaacg

SEQ ID NO: 125000 - DNA, 495 bp, Arabidopsis thaliana columbia
tgacgtcgcatgcacgcgtacgtaagcttggatcctctagagcttccgcccttttgtttttgttttaaaaatgcctattgcgattaccttagagattccaacaatgatgatacatacaaagcgtgtgttggaaacgatacaccataatcaaattgcggcatcccggtacaaatcaatcttggtacgcctaacccaccctaattttttcttggggggggggacttaaactgctatgcaattttaagggaagcaaatgtggaaattaaagaccacacaaacctttattgttagcatttagccagtttccgggaaagaaatcacctttgaatctgttttttaccttgggaaaggaagagcctcttttgttggggagcctgggcttagaaaatccaaacttcggtatgcacgggaagaactaagcaatttgggcatcccgcatttgtcacgttctttttcagaggggccccaatttttatgtcattggtccaaaacaat

SEQ ID NO: 125001 - DNA, 519 bp, Arabidopsis thaliana columbia
  unsure (1)..(519): unsure at all n locations
tnnnnnnnnnnnnnnnnnnnnnnnnnnnnnnnnnnnnnnnnnnnnnnnnnnnnnnnnnnnnnnnnnnnnnnnnngcctttnttttttttttttttttttttttttttttttttttttttttttttttttttttttttttggggaaaaaaaaccctaattttttttttttttccccttaagaagggcttttttaattttttgaaacaaaacccaaaaggggcccaccatccccccattataagaatttttttttttttttcgaaaagggccatccaagggggaaaaaaaaaaacccaattggggagaaatcaaatcttggaagggggcctccaccggggttgggcgcctcaacggtcctggggggggccaccgaggggtccctggtagaagcggggcttttggttttgaaggaccctttacctttcttttttgggggacggtccccttttaatgggcctccaagggttgggaatccccaaaaaaaagggttggatgctgggggttccgggtttccagggg

SEQ ID NO: 125002 - DNA, 499 bp, Arabidopsis thaliana columbia
tttgaacgtggataggcccccttccgtaacctggatatcctttaaaccggccgcccttttttttttttttggacctaaataaagttggtccaaataattctaagcattaactcaaaatacatactaacaaaaccctaaacagcctcattacataaatgaggaccaaaagaatctccaaggatattaacccctaacatgaataattatttcttatataatcggccatttaaaatttcatgcagactacatatatatcaaacaggttttagtagatcgtcgggtaaaaatgatacagtacagatccgggtagtccctccggtttatcggtttttttatccaatcaaaccggaatgttatcgatggagtatgcgtcaaagtcgaattcgccatcaaccggtgcaatcccttcctgcttaagaagtgcgctcataagatcttctggattactatactgctcgtgaaacgccattgttgctgtatccgtagccactctctctga

SEQ ID NO: 125003 - DNA, 490 bp, Arabidopsis thaliana columbia
atgacgtggctggcccgcgtccgtaggctgggatcctttaaagcggccgccctttttttttttttttttttttttttttttttttccgggccaggactttaaatcaataaaattcaccatggaaatagtatatatatccattcctttttaatccttggctctacaaaacaaacgcaggtttccataaatccttagaataacaagatgatgtaaaatggtatgaaccctattaagggcgtaccatattaccatgggttcaacttttatagcagatcatagctcaggccaccaatggctgggtccatcagcaagtttcttttttgtaaacacaagctttctatcagtttcaggcatctccatgtttagagaaaccgactttaatgaattttcctgaactgggtgtttttaaagctctagataacctttttgaagagaataagatcgtcgcggggatgagcttcttctactcgaacttggatttcatctccca

SEQ ID NO: 125004 - DNA, 486 bp, Arabidopsis thaliana columbia
  unsure (1)..(486): unsure at all n locations
ttgacgtggcttgcacccttccttaagctggatatcctttaaagcggccgccctttttttttttttttttttttttttttttttttncaaaaaaaaacctttgggttaaaaaaaaattttcctttcaggtaccattaacccccttggaaactgacctaagggaattccccaaaacccggaaaaaataacctgggcctgacattttaaaacactaagaggtttttttttttaattcacaatccttgaccaactgtttttgggcattgtacatattttcttaaatggggaatgaccgactatccgactgaatgttgtatagtccccaccaagggaccgaaaactagtcctttatcgttacatcaccaaatcatcagcagagtagtagtccgcattaaaacggtccatgtaggatggattgtgtcctcccgtgtctgttataaagagactaacaaggttgggggggacataatcgaatgtggggttgac

SEQ ID NO: 125005 - DNA, 515 bp, Arabidopsis thaliana columbia
  unsure (1)..(515): unsure at all n locations
atctnnnnnnnnnnnnnnnnnnnnnnnnnnnnnnnnnnnnnnnnnnnnnnnnnnnnnnnnnnnnnnnnnnnnnnnnnnnnctttttttttttttttttttttttttttttagnctgaaactttttttaggatgaaactttttttctagtttaaaacttaaacggatgctaatcgtaaaagcaatgtttgcaaaagaaaaagggttacaagcaagaaacggagtcacgttgtcttcaaaggcaaattgtcttaaaacgctgactcacctataacgctttcctattaagcctccttatccgctaatccttccaataggcttttatttcaccttgggtctgacccgacgcctggacgcgtcgcgtgacccgacacttgggtacccccacctatacgcgacccagccctgcctgtagaccagcttttcctatcttggggtaattaagggcttggctgaatcctgggcaaaactgttatccgttcaaaattgcacacaccatacaatcccaaaccatata

SEQ ID NO: 125006 - DNA, 508 bp, Arabidopsis thaliana columbia
ttaggtgacactatagaagaactattgacgttgccaggcccccttccttagcctggattcctttaaagcggccgcccttttttttttttttcttggaccttctggagtctttccttccttgggtggaccttcataatctccaaaataatcagaaaggatggcctggaaaagatcaacaggtttctccacattctccatttttacctcaacttcaggctcttctatggatgtctctttcttaggaactggcaactaagatacttgacgtgcagatgcagctttcactgtttccggcaagaatacgagagaatccattttgtttctcgctcgcggagcaggtggcagctttcccatgaatggatcggggagatcaaaacgtttgcacaaaagaggtgaaggacgccattggaactcttcccttttaggatacgtcttactcgatttcatgtctaccactccagtgtctttaatttgctctgttcccccagaagtaaactgaagacctcca

SEQ ID NO: 125007 - DNA, 508 bp, Arabidopsis thaliana columbia
ttttaggggacctattgaagaacttgaccttgcatgccccccttccttagcctggattcttttaaaccggccgccctttttttttttttttttttttttggaaactaattcctgtttttcaaaccttattattcttttggccaaaaaaccgggccggtttttacctggccaattgggaaagggactcgattttcctttaaggagtccaccagacgttttaaccttatggaaaaaaaggtcgtcttaaaaaccactaaaccaaacggagcgagagatagttgtgaacccccttaacctttggaacacctacagggttgaaatctgaagagcttttttcctgagggacgtgctacttgtttaaaaaggcttgtaggttgaagtatcaatctgctccggaggttcctttatatcaacctcaaacctttcttgtccctggttaagaacctctgaatctgaagcagatgcaacaaatgtgattgcaagcggacgcttgggcggacgcttgggt

SEQ ID NO: 125008 - DNA, 511 bp, Arabidopsis thaliana columbia
ttaggtgacactatagaagatctatgacgtcgcatgcacgccttcgttagcttggattcttttgagcgggccggcctttttttttttttttttttttggttttttaaaccgtagaaccccaatcttatttatttgccttataccattattcttaaaaaccaaagccagggttaaagggttaataacctgggttattaccggccattggggctaatggtttttattccttaaaccagaacccttttattccattctttcccattattttttaccttttgtaaagaaaccctccccggggggggaacctttttttcttgggggggttccgggggcaacaacattgggggccctaaccgaacctttttttttttccttcctttggtccactgtaattggtggttgcctgcactttaaactacaaaccgctttttctcctctttacttatagatgtcacggccttgaccaggaaaacgtttccaaagagagcaggatcttagaaaatcttcaaaa

SEQ ID NO: 125009 - DNA, 517 bp, Arabidopsis thaliana columbia
ttaggtgacactatagaagactatgacgtcgcatgcacgcgtacgtaagcttggattctttagagcgggcggccttttttttttttttttgaagaaaccattattaaaaggttaagtggttattaaaattacaaaagcgggactggataacaattaccgcaaaaaaatattaaattggggggccggaacaaaataagaaacccaatgggtttgggaaattccttgggactaattaaaaatgttgcttcaaaaatttggcccacttaaaaaaattgtaagggtaaaccattgaaacctttttattttttttaaaatcctttgccttacttaatttgggggtttggtaggggaaaaatgcttcccaaaaaactaacccattggggtttttagatgttttctggccacgacaattttagaattaaaacatttttgttccaaataccaaagaaacccgacgtatggatttttaaccaaaaaagggctgaattttaaaaaaagacctggaaaattcccttat

SEQ ID NO: 125010 - DNA, 473 bp, Arabidopsis thaliana columbia
gacacgtaagctgggatcctctaaagtttccgccctttttttaagtttttttttaaaatggaccccaaaaaaaggggggcgcagggacaagaccccgggttttgcccaaccacgcgatatatatccccgatataccaggacacctttcccagggaaggctggggggactgaaaaaggaacgaattttcctccttgggtgtggggccacaagagggaataaatccacccaaaagcgccaccctttttttggacggaaaagggatgtaaaaaaaacaacactgttccgggaaacccaaagttgcctcaagccctggagccaacagaacacagccgcattgccccactccccgcgaagaaaaccccgctagcagaggggtgctccgcccccttaaccgactatcagaagagacgctgaataccacctcacctttttaccaaaatagggagagagggtcggtttagcataagcagag

SEQ ID NO: 125011 - DNA, 493 bp, Arabidopsis thaliana columbia
gagttatgacgtggcttgcacgcgtccgtaagctgggttcctttagagcggccgcccttttttttttttttttttttttttttttttttttttttttttttttttttttttttttttttttttttttttttttttaaaaaaaaaaggttttttttttcctttaaaaaaaaattttacaaggtttgaaccttttgggttttggttaaaaggtttccaaaaaaccctcaggggggtttccaggttttttttttaaaacattttcaaaaaaaccgcccacttttttttttaagagggttggaacccagggtgttttttttcctaactgggccaggggggcagttttttttaaggcccttttttccttttcctttgggttccccgacttggtctccttaacattgggttaaaaatacttttggattttttccatcccctttttttccccgccttttttaagggggaggttgaaaaccctttttttgggaccaaaccg

SEQ ID NO: 125012 - DNA, 446 bp, Arabidopsis thaliana columbia
  unsure (1)..(446): unsure at all n locations
cgtaagcttnggatcctctagagctttcgcccttgggaaaggctttttttttaaatacgggcccaaccgcgcaggcgcgcaccggggaaaccaaaaacgatgtcgctgagatcaaacgcacccaagctctctgaggaactatccccacccccggagagcacccgcaaggcagaacaagggagttcctcattgggtgcgggtgaaacacacataacccgcgggaacgcaaaatggttcccgttctgtttccctccggcccgccacaatggggaaggcgcccaccctaggatgaaggccgaacaagggtcaaaaggcgcggtcggctacgcatccaccatgcggccccacccaagagggagcggaccgttcgctatcacagcgaaaaaaccgtctcatcccacaaaaccccctccataaaaggacccacccctgcacgacctcccgat

SEQ ID NO: 125013 - DNA, 499 bp, Arabidopsis thaliana columbia
taaaaaagctatgacgtcgctatgcacccgtcacgtaagcttggatcctttagagcggccgcccttttttttttttttttcactaattacgggcttacaatacattgggttaagtagtaaaaaataaagagtggcattaacattaaaaaagaaaaaaaagggttttagggtggcctaaagtttccagcacacctttaataggatagagagtaataagtaataaggccctccctcatcgccaagtagaatgggcggagaagtaaccgagaaggcccactagtggtgcattgatataagtcgtgggctcagactgctgaaagtaaggtcttgaatccggaaaagcatcagtgacattaggtccaccgactacagcaccaaccaaaaggtttgggttaggatttgggcttaggaaatagcgagagccttctttgcaccctatgtggcttggatgggctgaaaccgaaggaaccgagctaccacggtgatgaatcctacgtgg

SEQ ID NO: 125014 - DNA, 501 bp, Arabidopsis thaliana columbia
taaaaatcatgacgttgcatgcgcccctaccttagcttggatatcttttaaaggggccgccctttttttttttttttttttgtttttaaacaaaaaacagggttttttttttttttttaatcggggaaaaaaaaaacaacaaaattttgggaacttaaccccaaaaggcccggattatttttccccaaccaaaaaacatttgccgaaaaaaagttccctttttgggggaaacctcggaattttccgggaggggcgttacacccgtaaaaaaaattcccacaatttgcggaagggtaaaggaaaaatctttggcactgccgcctttagggggggttaagcccttaaggggttccccaaattcatcccacccctattttccttgggttcttttccgcggaaaaaacaacagacaactttcctttaaggggtaggggttttcccgcgaacgcacccccacctttttggatgggccgcttttgtatccccgccttttttaaaaat

SEQ ID NO: 125015 - DNA, 420 bp, Arabidopsis thaliana columbia
gacgtaagctggacctctagagcggtcgcctttttttattctacacaaaaagcgcttcacatatgggaaggatacaaaaaatcccggcgttctacattctctatattgcttttacagaaagaataactgcctgcgtacttatatcgggaggaaaagatttcttctttagcgtgtgagccctaagtctgcaagccttgaagtttctgttgagctcgggggggggatgcgaaaatttgaatcggggaacagacctagagcggacacttggctttaactaatggaggctcttaacggacaaaaggtgaacccaggttggacgaaaaaaatcctctattgaaccaaggtgcaaaaaggggaactttggaccaacgggatgttggttgggaaaaacatttgggaaaacttgactgcaaggtggtt

SEQ ID NO: 125016 - DNA, 523 bp, Arabidopsis thaliana columbia
  unsure (1)..(523): unsure at all n locations
nnnnnnnnnnnnnnnnnnnnnnnnnnnnnnnnnnnnnnnnnnnnnnnnnnnnnnnnnnnnnnnnnnnnnnnnnnctttttttttttttttatataatgcaaatctcatattttcatgaacaaaaaattacaggttttgattaaaaactaatcaaaatgtgaatactgaagattttgtctacaaaacaaaaaggaagacttttactttaaactccatgacacaaaacagagctcccttatttgaaaactttacttcgtctgtctcatcagttatcttctccaagagtaaacttcacaaaccttctgactttgatgttttccccaagagtagccactggttgcttcaccagatccttcaccagaacactgtcgtctttgatgtaaggctgctcaagcaatggccattctccaagcctttttgagattctttctttcacaatcttcttccttatggtctctggtttcgacaaaagatcctctctttgcatctcaatctctttttctttctgctttatctcctctgg

SEQ ID NO: 125017 - DNA, 530 bp, Arabidopsis thaliana columbia
  unsure (1)..(530): unsure at all n locations
nnnnnnnnnnnnnnnnnnnnnnnnnnnnnnnnnnnnnnnnnnnnnnnnnnnnnnnnnnnnnnnnnnnnnnnncgccttttttttttttttttaaaaatagggaataagttttattttaaaataattaccgtttggcgtaccaaccaaccatattttccattatgaactggtttattggagattcctgccgaaattaattaaatttcactttttaagcacctgtgggaccagttcaaaaatggggatttttgggagaatattttcccaattaatttcttttgggtccaaatcaaaccttaatttttccggatttttgaaccccctttcccttcgggttgggccttaaccttttggatttctattggcgaattttcccttggagaagtccttagggttaataaggctttaccattttattaaccaattggatttgggggtcctggcctccatattaatctccgttcttccaaggttatttaatgtcacctagtttaaatacctggagaggtagtttgtaacgaagggtcatg

SEQ ID NO: 125018 - DNA, 504 bp, Arabidopsis thaliana columbia
  unsure (1)..(504): unsure at all n locations
taggtgacactatagnagnagcttgacgtcgcatgcacgcgtacgttagcttggatcctttagagcgggcggcccttttttttttttttttttttttttttttttttttttttttttttttttttttaaaaaaaagacaaaacggtttttacattatcaatcggggtggtttggttccaatttttgccccaggcccaaccttggtggggcccttgggccctttcccttttatggacaaccccaattggtttactttttccttattcccctaggttccaaaaaaaggggttgtaagcaaaccaacgttggttcccgtggtggggggccggggaattcaatgggggaaaaaaaaccggggggggtggttttggggcctggggggttaaaaggtttagggggggtggtttcccccggccagttggttccccccaacccgttggatggagcccgcccctggttgcttttggccggggggaaggggccttcctttcccttaaaaagaac

SEQ ID NO: 125019 - DNA, 502 bp, Arabidopsis thaliana columbia
aactattaggaggactatgacgttgcatgcacgcctacctaagcttggattctttagaacgggccgcccttttttttttttttttttttttttttttttttttttttttttttggggaaacaccccaaggcaggtttttcccggtacttattccttttccttttttacccttttccttcccccaatgaaaccaaaaaaaaaaatttccaaattggttttccaaccgggggccttttttacccaagaattaaatttaattttggtttttggtttgggtcaaagggtttgaaaaattttttcctatttaaaacctaaaaccgtttttaatacccggtttgggtttttctttttaaaaaaaggggtttatgcaacaaattcgggcattaattgacccaaatatttttctgggtttgggaggtcaatccaattgaaagccggggaacttgccgttgataaatgcgcggttggggccaacctaccaccattgtggggggggggtcct

SEQ ID NO: 125020 - DNA, 432 bp, Arabidopsis thaliana columbia
aacgtaagctgggacccctaaaattttccgccctttgtttaatctttttttttcgaaaagattgttccaaaatgggggagagccaaaagcacctttaacgggttaaacgggaaaagcggcctccgcgaattttgaaccctgtcccgtaaaaactacttggactcaaacagacaaggaaaacccccccatttcctatttgggttgattgggacaaaagacaaaaaagactacaagccccgaacattggtatacactattttttattgttatagaggtgaaaaagaggtaaagaaagccaccgcgagaggccttcagtggcaggggggaaggtctttccccgtacgggagctcgtcgcgttatatatccttacatgcgcgaaccatcagagagtacagaagccgaaaaaatcttgacgattcactgagcagaaa

SEQ ID NO: 125021 - DNA, 515 bp, Arabidopsis thaliana columbia
  unsure (1)..(515): unsure at all n locations
nnnnnnnnnnnnnnnnnnnnnnnnnnnnnnnnnnnnnnnnnnnnnnnnnnnnnnnnnnnnnnnnnnnnnnncggcctttttttttttttttttaaaatataactattcgtgatctattaaatttaagtctaataatagctagtgggtacccatgtttagaattacccattaacttcgtttcttgacttattttaccttaaaacaaaaaagggaaccattatggtattccatgagaagagaagccagaattttttccatgggttttttaaggctggtttccgtggcattttactgaacctccgacttttaaacccgccgattaagaacttgtttcccgtttgcttttttggaaaaggtcttattaacccgtgatttccgtacccagtctggaaatagtgactgggttttgtttgaccaatacgatggcaacgatcttcagcttgccgatcaatctgtggattaaaatccatatcgtgaataatgactgtatccgctccggttaaattaagaccttg

SEQ ID NO: 125022 - DNA, 486 bp, Arabidopsis thaliana columbia
  unsure (1)..(486): unsure at all n locations
nnnnnnnnnnnnnnnnnnnnnnnnnnnnnnnnnnnnnnnnnnnnnnnnnnnnnnnnnnnnnnnnnnnnnnnnnnctttnttttttttttttttttttttttttttttttttttttttttttttttttttttttttttttttttttnaaaaaaaaaaaactaaattggccgttaagagtgtttttttaaaatttaaaaggggttagaggggtttttgagttttcgaatgtttttaaaaaatgccctttaacgattcttttttccaaaaaactaaaaaaaagaagcccgggggtgaataattttttcaaaacgtttttttttttagaacagttttttggggtttttttttggcctatttttttgaacccgggagaacaaaattccaaccgtgggttgggaaatgttttttaacctgggaattcttaggaataaataattggcgaaactctcaataccgggggcatataactgggggggccctttttga

SEQ ID NO: 125023 - DNA, 508 bp, Arabidopsis thaliana columbia
  unsure (1)..(508): unsure at all n locations
gtnnnnnnnnnnnnnnnnnnnnnnnnnnnnnnnnnnnnnnnnnnnnnnnnnnnnnnnnnnnnnnnnnnnnnnnnnncttttttttttttttttttaaaaaggcaaaatggttagaaatatcatgaagaagaagaagaagaagccgcgaaatcagcttaatagttatatagtaaatggttggtctctacgacaaagaacttctagtcgaaacccaacgctgatcatcatcattcattattaaagggtttcttatagaatcaaaatgatgggattctctttaccaagtccttttttcaccgggagggaccaaggttgaagtcgatcctggacggttattttcaaacccaccaccaagttcttcttcttttggcctggaggttctttccccacctggaccttcctaaccagaccagatgatcggacttgtgcggaaaagataggagggacaacttgaccagcttctggaggatcttggacagctttttgcaacctagcattgcctggtggg

SEQ ID NO: 125024 - DNA, 484 bp, Arabidopsis thaliana columbia
cctaaaaatctggggtgacaggccccgccgtaagctgggacctaaaagggccgcccttttttttttttttcggagggaaaaggaaaaaacgggggagaaaaaaacggagacggacgcaacggacccctgcccgagcacaaaaacgccagccacccccccaccggaaaaaccctgtattaagcgaaaccggcgagatttttccggggggggggaacctagatcttatttaccgggggaaaaccctaaatcaccaagcacacaaaatttacaactacccaagacaagaggaggcccccgccatccacaaacccagcgcccttaacacaacagggagaaccccgaagggaagcaaccaaacgaccaaccaaacacacacgggcgccaagacaggcaaacacaaccagaggacaaaccacccaccccgcacacgaacaaacaagatccacacaccgcgcaacgtaattcccacgaaacaacccgttca

SEQ ID NO: 125025 - DNA, 517 bp, Arabidopsis thaliana columbia
ttttaggtgacactattagaagactatgacgtcgcatgcacgcctaccttagcttggattctttagagcgggccgcctttttttttttttttaccatctaaggccttacttcttgggggggcttcaaatttaaaaattgaaggtggttccccccccccccttccttaagggtaaaaggtaaaaaggtggcattaaacctggccttaaaaaaggcacctttcttccagccaacttgggcagttttaatttaccattgaaactttacctcttccttttaaaccttttcttcctttctctggcctccttctcctattccacaaattattcaggaagggctaacatggttaataattctcccacacaaaccatttggaccttcttcctcttaaccctcggggctggttgaacagttatttttttttaaaaggctttaaaatcccaaccctgaggaagatcttatatcttggatcggttctttaaaattatcatgggatcatccatcgaggatcccatttgt

SEQ ID NO: 125026 - DNA, 446 bp, Arabidopsis thaliana columbia
  unsure (1)..(446): unsure at all n locations
gtgacactatagaagnactatgacgtcgcatgcaccgcctacgtaagcttggatcctttagagcggccggcctttttttttttttttttttttttttttttttttaaaccaaacgggactttattttttgaaccaaaccaaattaaaaagggccaccaccaagggaaaggtaggggttttcccatgaattaaaagcctatttgccttatggagatttttttaagaaccaaaaagaattttttgatccttccttttaccttaggttcctttaaaaagaatggaaaaaaaaaaagatgggagttaggggaaggcatttatttttaccgtccaaaaagaaaaatggagattccaaccttccttggtggaataaatttttttctttttattatttaacggggctgccttttagaatggcggaagggacctgctctcccccctgaaagata

SEQ ID NO: 125027 - DNA, 512 bp, Arabidopsis thaliana columbia
  unsure (1)..(512): unsure at all n locations
taggtgacactatagnnagactatgacgtcgcatgcacgcgtacgttagcttggattcttttgagcgggcggcccttttttttttttttttttttttttttttttttttttttttttttttttttttttgaaaaaaaaatgggttttgtttatggccaattcttccaaggtttggcaattttccttttggaaggtttaaaaccttaaattccaaccttttttttttcctaaggtttttccctggatttcaaagaatggaagaaaaggcaaattccaaccggttaaaactgggttcattttccggaaacaaatttggttgcaaaggcccatgctttgttgttgccgggatcggccaaagggtcagaagggttttttttgggccccttaccagggacaatggtttgaacgaaaattccaacctttgagaacttggccatttttccgtttttgagcttcttcaccttaaactccgggaaagcctttgggtcggtagcaagacccaatgggtcgaa

SEQ ID NO: 125028 - DNA, 510 bp, Arabidopsis thaliana columbia
ttaggtgacactattagaagagcttgacgtcgcatgcacgcctacctaagcttggatcctttagagcgggcggccttttttttttttttttttagaagaattgaaaaaattaaggaacttttattttatggaaaccggttgggtttattattcttcccccaagagaataaattaaaatcacttttttttccagccaagggattaaatggacccggcctttaattccaatattttaccacttaaacggtccttttttaacctaaggcggaaacctcaaccagaatggggggatggtccttttaaccagccttaaccacaccagacgggaaattcgactggttaatcgcgttcggaaatccctgcgtttaagggcacacacccgcttgtttccggtaaaccgaattccttttcccaaccactccattcacatagttcccggtttaaaactgcattcccggcacatgggtccacaagttcagtacccttgagctagcagcatcactgagcttc

SEQ ID NO: 125029 - DNA, 499 bp, Arabidopsis thaliana columbia
  unsure (1)..(499): unsure at all n locations
nnnnnnnnnnnnnnnnnnnnnnnnnnnnnnnnnnnnnnnnnnnnnnnnnnnnnnnnnnnnnnnnnnnnnnnnnncttttttttttttttttttttgttggggtttaactatcaaatatattttattttcaagccaaattacatttagaccttacacctagattaaagaacagcctaggacttatataagataacaagggctaaagcaatatacttaaatttgcaaaacaaagagaaagatttagccacgggccccaagacaccaacaaatggagcagcagtgggcggagcagggttaacatgctggtaatcaggcctttcattttcataaacatcggtatcggtggggccttccaccactggttccattaaaaccttaggatttggggccgggatggttaaacatgccttgaattccttacttccacgtaatgggggtttggccctgggggaccaatccatagaaggcggtttttggggggggtttttgggaataatgg

SEQ ID NO: 125030 - DNA, 480 bp, Arabidopsis thaliana columbia
  unsure (1)..(480): unsure at all n locations
tgacgtcgcatgcacgcgtacgtaagcttggatcctctagagcgttcgccctttgggtttggtttttttaattaaagaaaaacactgacatgtgtgtgcacatcgtctagtgaatcaccctttgaacgaagaaacttcttatgaccgtttttagggttttgcaacgaaaacctattgatttcaaattggacgcacctggccaacggaattttttttaaaggggggtgttanaaggaagcctgctcttggagaacccaaaactttgaccgagtcttctgggcctgaagccttttaaagacgaatggatgttccggaaacaaccggcgggtaaactcttttcctaagaattttacgccccacggggccaattctctatccaggggcaggggactttccccctcgcttaaaaagctgcgattttcttacctacgagtatattgttcttgcccgcgaaaaaaaatagccttgaccccgggaatc

SEQ ID NO: 125031 - DNA, 519 bp, Arabidopsis thaliana columbia
gtatttaggtgacctatagaagactatgacgtcgcatgcacgcctacgtaagcttggatcctttagagcgggcggccttttttttttttttttttttttgggggaaattactttcaattttattggacctggttcgcccaaagaattttaccaccatggggatccgatcaagaaccagaaccggtggattaatcaccttttttccttattaattaatggctgggagacttaatggaaatggaaatttaccggttccttttttggaaaaacaaaaagcctttggttttctttttggttaaaagcctctcctcctcctcccttggttcctcaccggcggggaataacaaagggaggggccttacccaaaggaggtggtggcggctggcctggttcaaaacccaaaaggccttctaaattccctggtggaggttcccactacctaatcggcctttgaacctgggtggccgaatggaaatcctcgcttggggggatcaaatttacagctggaaccaaattggc

SEQ ID NO: 125032 - DNA, 520 bp, Arabidopsis thaliana columbia
aggggacacttttggaagaatcttggaggtggctggcccccgtccgtaggctgggtatcctttaaaggggccgccctttttttttttttttttttttttttttttttttttttttttttttttttttttttttttttccggttgtggcccctctgggggcatttccacccgggggggacccaaccttggagaggtttaaaaaaaaaccatcccaaaaaaaaaaggtccttgtggccccaatgtgccaaaaaaaatcccccccaggctcttaaaaacccccaagggggctcccaaaaaaaaaaaacccctttttttccccccccaaaacaaaaaaccccccctgaaaaattttttttccccggggaagctgggggaaaaaaaagggcgccggggggacaattttccccaagggggggccccttttaaacaggggaaaccccctttgggtttttcccgaaacaaagggggtccccctttggttagcgggggaaaaaatgggggggggaggggggtcctttgg

SEQ ID NO: 125033 - DNA, 462 bp, Arabidopsis thaliana columbia
ttataacgtcgctatgcacccttcacttaagctggatatcctttaaagcggccgccctttttttttttttttttttttttttttttttttttttttttttttttttttttggaggggggaagctaaatttcataaattaagggggggttacaaaaacttgtaaaaatccaaaccctttttcccatgacataaaattttgttttttctaattggcatttttttaaaagtcaggttcaaaaaattttcctccaaaataatggaaggccttttaacggaaaaccctgtttccaagtccaaaattcacaaacttcaaagataaaaaatcaacctaaagaaagggttttaaaaaatgtgaaaaacacttactgttgggggctgttaaacttttcattttctttgtaaacgggttttaaaccccggggacgtgaaacgggctttttatcgaccttgatttcagggaaa

SEQ ID NO: 125034 - DNA, 519 bp, Arabidopsis thaliana columbia
  unsure (1)..(519): unsure at all n locations
ggattatnnnnnnnnnnnnnnnnnnnnnnnnnnnnnnnnnnnnnnnnnnnnnnnnnnnnnnnnnnnnnnnnnnnnnnnnnnnnctttttttttttttttttttttaggatataacgacttctttcattccaaacggaaaaatcaacaagtctcaggtgtcacaacaaacatagaatccccgttacagaatgaagcagtttatataaccacaggtaactctcttggaaagaacaaaggtcatttccacagacactagctaaaactgaaaaccattgagtatgcataccactatctacccctttaacgacggcgatcttcccttcttaatgaatccctatctttttcctccctgtcgttacgatctcttctagattctgccttccttttctcccaatcttgtgctctggatcccttgtcctcccttacataatcaatttcatcattgggccttctagaatacgcattatcataccgtcctgatctcttttgttccttcatatcataagcatctcttggact

SEQ ID NO: 125035 - DNA, 503 bp, Arabidopsis thaliana columbia
taggtgacactatagaagatcttgacgtcgcatgcacgcgttacgtaagcttggatccttttgagcgggcggcctttttttttttttttagggtggactggaataacttcattgtaaaaaccaaaagttaatttgttaaaaaaaccaccacccatggttcgtcattcttagccttacccggtattaccaaaattatcattctttccttttaagccaaggtaggggttgtcgcgcctccctttgagtctgggcttaaaggggggcggggtttgcccttcttttaaggccaaaccacttaaggggttaattaaagggggaacccggaaaattccggtgggttaagttaaaattcgggttggcctttgggaacccttggtttccttccaccaccaaaaaaaaccccggtgggtccattattaaattcagttccaccaggttttcttctggcttttgggttggccacgggaggcggtggtagcggcaaagccgtttttttggaggaa

SEQ ID NO: 125036 - DNA, 525 bp, Arabidopsis thaliana columbia
ttaggtgacctatagaagagctatgacgtcgcatgccacgcgttccttagcttggattcttttgaacgggccgccctttttttttttttttttttttggggtttttttttttttttttttttcccacccttcctttttttttaaaacccttttaaggaaaatggccaaatggggtgccgggtgaaaccaaaaaacccacgttcccacccaaccaatttaaaactttggggcttaccctttttttaaaccttttaatttcaacctcaaaccaggtttaaagggaaccaaaccaaaaggttgagttttagggggggccaaacctttaacctttttaaaaaggtggttttttgttccaattcgaaaccccattcttggaatttttaggctcccaccacgtcaatgggttggggtggagttttcaacatcctgccttctttcctcctaggaccacatgtaaggattccatccactcgcaatatcatctaaaatgcttctgtggctgaaagcaaaaccgtttgtttcatt

SEQ ID NO: 125037 - DNA, 516 bp, Arabidopsis thaliana columbia
  unsure (1)..(516): unsure at all n locations
annnnnnnnnnnnnnnnnnnnnnnnnnnnnnnnnnnnnnnnnnnnnnnnnnnnnnnnnnnnnnnnnnnnngcggcctttttttttttttttttttttaacccaaagaacctttttctggttgaaaacccaattccaaactggattccaaaattttaaaacctttttttttatgggttaccggttactggtttaaaagaaaaattttaccccctttgggtggtggtccaacttaccccacggggaaaaaggtggcttttccggaaaaggaaggatttaaattagggaaccctttaggacctggatttaaaagaagttagtggttggatgaccatgtttaacattttgcattggaccaaaccagagactgttaagttttttcaaggttgaattttataaaaaaaaacggctgcaaacactacggacgaagaacccgttacctcctctcaaatggcgctcactatacatttcttcctccgtttggttgcccaaagcttttcttttgcggtttatcatgt

SEQ ID NO: 125038 - DNA, 471 bp, Arabidopsis thaliana columbia
  unsure (1)..(471): unsure at all n locations
gcacccttccttagacctggatatcttttaagaccggccgcccttttttttttttttttttttttttttttttntttttttttttnaacaaaaaaaaccttggcttcttattaatggtaataatagcgccggtcacaaatacacacatttggttggaggataatctatttcacagtgggagaagaattgcacacccctataaataaaagactcagtatttgttttttttatccccattcaagggtagaggggggttttgatgtaatgtttaaaaccacacggttttctttttgaacgctgttacagtttttgggggaaacattgccaaaaatcttgtgctaaaattagaacaaatgtggggactttccatttgggtttgaacctgcacaaagagcacccacgtgaaagtgtgttcttttgacccctgggactccaactgattttacgggaaaaaactctgaaaaagcttgc

SEQ ID NO: 125039 - DNA, 475 bp, Arabidopsis thaliana columbia
ctccccttccccccttccttaacctggattcctttaaaccggccgccctttttttttttttttttttttttttaagggggaaatcttcatggggtttttaattattattttttaccaggaccaaggaggcaaaaattgattcgatgaactttttaaacctcataacctccatttaatcagcattgcttgatttcaaatccaatgctcaacaaagtcctagctgattccataactttttttccaccaacgtccaatgcttttttactctgcttttaactttctcgccccaccgagcactggcttgaagtcggaatgttcacctgatcgtctgtcctggttctcattgatgttggagcggctgcagctacaagcattgagcttggaggaccatggcgtttcttaggcaccggcatgtcggggttgggtactcctttgtatgtgattattactgcttttgtgttctcgactgctgtct

SEQ ID NO: 125040 - DNA, 501 bp, Arabidopsis thaliana columbia
  unsure (1)..(501): unsure at all n locations
nnnnnnnnnnnnnnnnnnnnnnnnnnnnnnnnnnnnnnnnnnnnnnnnnnnnnnnnnnnnnnnnnnnnnnnnnnctttgttntntnnnttntttttttttttttttttttttttttttttttaaggatcttgaacatctgggtaccataaaacgaatttggaccctatgtcccattacatgcattttttataaacattttttttttggtaaaaaccggggaacaagaaaattgaaattccgaatggtgacctttgagaaaagggcagaaaaaaccaaaacaaccttccccaatgaaacaaaaaattcagggggaggaaaatcttgtgaaacctttgaaacccccgtttgtgaaattcatgaaaaaaaggttagccggggttattttggggatcctcaagcaaaatttttgccaagcttgggggtttgaaaaaaaaaggacctgggccgggccttttaacccaataaactttttagggaggactacttttgatcatgttttt

SEQ ID NO: 125041 - DNA, 436 bp, Arabidopsis thaliana columbia
  unsure (1)..(436): unsure at all n locations
nnnnnnnnnnnnnnnnnnnnnnnnnnnnnnnnnnnnnnnnnnnnnnnnnnnnnnnnnnnnnnnnnnnnctttttttttttttttttgacacatcgatagatcgcaagcatatctgttgcatttgcagctcacttagagacataataacatagtagcaggagttaatgaacttgcggagtacatataacatagcgtaattcatatgagggagctcgtgtctacagctacatacgagcttcagaagaatagagggtatcccactcctatgattttgcaaatttgaagatctcaaacaacacagtttgatatctatgacctgaactttgagatccaaattcttgatgcctaccatgcagagctggtaatttgtcttttcgcgctatcgtgaacttgatagctacaaaagaattttgcgacaatcacaagctgctacatg

SEQ ID NO: 125042 - DNA, 465 bp, Arabidopsis thaliana columbia
  unsure (1)..(465): unsure at all n locations
gtcgcatgcacgcgtacgtnnagctggatcctctagagcggccgcccttttttttttttttttttttaattttgattacttaaattgttcttacatcggccacaaagcctaaacattttttttaattaagctggaaatgggaaaacgtgatttcgatttaagagaaactaacatttgcaatgcaaggccaaaaccacatacctgttaattgcgaaacctcatagaacactcaggagcttatgaaagtgacagatttgctctcactggttggaagctccaaccttatttttttgccaaagcctgtcaacgccactgtttgcgatttcatgagacctgacaactccgtgaagagaaaacgcggagaattggcctgcgagcagaccattaccaccatgatgacctaggtcaagctagaatgaacactgaacctttgatgatgatcttctgtaagctggcgagataaac

SEQ ID NO: 125043 - DNA, 492 bp, Arabidopsis thaliana columbia
cgggcaaggcccccgtccgtaagctggaatcctttaaagcggcctgccctttttttttttttttcattagcaccactatcgcaacctgcatcagtaggattactggaaacgctaatactataacctgcctggtcccgcttggccttttaacaaatgaagtcagattcacccatgcttcctttaagctttttttaactaccccttcttttaccattggcaccttcccctcctgggaacattcagatactctttcttcccttgctgctagcggttcaccatcctcaatcaacttatgcccttcttggttctccagcttcttctgcttcaacagttcatgtgccattcttatccaatgtgcataagcttctctacattcttctaaagtagactgcactattttcccttaccacactgttcttttagagaaggccacattgacataaacattccatatacaaccctttaccgagtctctgaaatctcttttcaagt

SEQ ID NO: 125044 - DNA, 501 bp, Arabidopsis thaliana columbia
  unsure (1)..(501): unsure at all n locations
nnnnnnnnnnnnnnnnnnnnnnnnnnnnnnnnnnnnnnnnnnnnnnnnnnnnnnnnnnnnnnnnnnnnnnttttttttttttttttaataaaaattcatcgtgtaaatacttatttgggttaacctttgaagaaagtttcagaagaaaaaggattaagggctttcgaacaaaagaaacgggaagttcactttaacttgcacaagaccgcacatcagcttcgacgacacccacttcggggaacaagggacttttaactattcgcaagagcttccccaaacaacaatgccttcgttgattgctttatctgaacctcaacaaatgccccaattccaggattccttttaagatcatcaccatcaggagaactcgctttttcaaccggaggctccgtgacaaacgaacctgtgcgtccttcatcagttttacacatgagttctgtctcaggcgctctctcgttaggacctcctacgagacctaactgagttgatcctacctgaaag

SEQ ID NO: 125045 - DNA, 490 bp, Arabidopsis thaliana columbia
gacactatagaagactatgacgtcgcatgcacgccttccgtaggctggattcttttgagcgggccgcctttttttttttttttatcgggaaaatggtttggggggcttaacctcattggtttccggaccaaaattctttggagaggtttaaggttcttaaaatcgatcctaacctctaaaccaaacctgggaagacaccttagcctcctgacttcttttaaccttaaaccagcaaaaatttcagacaccaaaaccaggggcagggaactccctaactggagccatggttgatttctgttaaatcatgaccgaaactttgactgtttcttctccagtttcattttgaggttggctataatcttatcctgagcctgtatctgatgttccttggcattgagcttctgcttcagttcttcaatttcttttgaatgaccttcgcagctgattgcgaactccatagctttgagtttttccttcagttcttccattt

SEQ ID NO: 125046 - DNA, 526 bp, Arabidopsis thaliana columbia
  unsure (1)..(526): unsure at all n locations
nnnnnnnnnnnnnnnnnnnnnnnnnnnnnnnnnnnnnnnnnnnnnnnnnnnnnnnnnnnnnnnnnnnnnnnnnncttttttttttttttttcagataacatgaacaatattattaaaaactagggcccaagggttgggggtacaatgtcttaaaacaaataggtaaagccagaacttttaaagagaagatcaaaccctactattaaaaaaggcacatacttatttaagcttcatggagatgggaaaagccttcctacaaatcagtggatcttaaagccaaaagctaattcttactcatggtccaaaatgtggatggttcctgatcctgctggaccgtctaacaggtgttataatctttttcttttcgggaccacttctctttagtatcttctcatatgtggggaaacttccatatgaaacagaacctatggagtactctgatgcagaggaagccatggattcaccgctatcattactcttcttgcctcctcctccgctttgatgttctttaagatcatctttcttg

SEQ ID NO: 125047 - DNA, 513 bp, Arabidopsis thaliana columbia
tgacactatagaaagactatgacgtcgcatgcacgcgtacgtaagcttggatcctctagagcggcctgcctttttttttttttttttttaatcaatccttgacattgtaatatgatatcaatacaatcaaaatctcacccattaaagttttgaaactatagtactttaatatttatacaataactttggaatcgaagcagacttcctcagtacaataatgagaaattgtcacttttgaaagcaagcgctcaataaacattacattaaacaacatcacctataacaacattttaaaccggcctctatatgaatctatctcttcttacacatatctacaagtagctcttaagccatacattcacacttagtctgaaaatcatccacctttcctctccaagaaagacagcacggaatgggtttaagctacataacttacacagcattgcggttctcgggattattttcagaccctctttgatctaggtggagtccctggagcgaaaagggatcctt

SEQ ID NO: 125048 - DNA, 294 bp, Arabidopsis thaliana columbia
  unsure (1)..(294): unsure at all n locations
nnnnnnnnnnnnnnnnnnnnnnnnnnnnnnnnnnnnnnnnnnnnnnnnnnnnnnnnnnnnnnnnnnnnntttttttttttttttaacactggaagccataattgaaatggggttaaccaaacgaattaaattaaaccctacttcacttattccatggtttcaaaacttcaccacccctaacccccaaaattaaaattggaaagattatttaatttaaaattaacaaagggaagtgccaggccgcgttattaacaaagggtttaaaaaccaaaaaaacacggaaacggttttggc

SEQ ID NO: 125049 - DNA, 522 bp, Arabidopsis thaliana columbia
  unsure (1)..(522): unsure at all n locations
tgacactatagnnagagctatgacgtcgcatgcacgcgtacgtagcttggatcctctagagcggccgccctttnttttttttttttttttttttttttttttttttttttttttttttttttttttntaaaaaaatctcagtctttttccatgaatcttctaaggtttttaaccaaatttttgaacaaattctatacaaataaccaatatcacccttcacttttttccaacgtagtagaccctttcctgtccccctttttcctcctccttccacggaagcaacacatccttttaaaacaactggaacaacaacaactactccggaaacattgggtgtgggggctttttaaacatttccaacaagagcatttgggacatttgggttttccaaaccattgctgcattggaacttgggacattatcaactactaacacagttgggttttttgcaacaagagaaacatccttttaatgtcggactcgaacttttgaaacaaccgaagcttcctttcctgggccgaa

SEQ ID NO: 125050 - DNA, 509 bp, Arabidopsis thaliana columbia
  unsure (1)..(509): unsure at all n locations
nnnnnnnnnnnnnnnnnnnnnnnnnnnnnnnnnnnnnnnnnnnnnnnnnnnnnnnnnnnnnnnnnnnnncttttttttttttttttttttggggaattaatattggtatagaacaataacgtgaactgtagtataacattgaaagtagctacaatggtaaccaaaggtttacaaataataaagactatttaaaactgttttgagactgtttttgtttaatgaattgtatgaatcactcttcataactcaacttggatcagatgaaatcgtttgttctctataggcattttgtctaactcaaaggtgaccaatccagaggaggaatcgtactcgaatgcaatctcatttgactcaacaacgcatctcttaggcttcacagaagagtaagatccgaatttgccacatcctttaacttccattaccactttcatcttctcggcttcatatctaagtccttcgatagctcctcccgaattgtacatgtttactagaccaattggggcaaaaga

SEQ ID NO: 125051 - DNA, 494 bp, Arabidopsis thaliana columbia
  unsure (1)..(494): unsure at all n locations
acgtcgcatgcacgcgtacgtaagcttggatcctctagagcggccgccctttnttttttttttttttttttttttttttttttttttttttttttttttttaaattatttttttttttttttttttttnntnnnnnaaaaccagaaacaaacttttttttctgacattacattttgggccggaaaatttcagaaaacaaaaagaaattttgtttaaaaaatcctcaaaacattaacaaagttgttttaggttttttaaccaaagagatcaattccaaagttttctttttttttttaagatttttccttttttttcttttcctccttggggggggggggagcctaaccaacaccaccacctccagaagttggacttttttggggaggaaattcttcaccacccccaccaccaatgaccaccaggaagacggggggggttggaaaaacaagaaaaaaagaaaattgaacccccccagatgaattgggggaaagagt

SEQ ID NO: 125052 - DNA, 516 bp, Arabidopsis thaliana columbia
  unsure (1)..(516): unsure at all n locations
nnnnnnnnnnnnnnnnnnnnnnnnnnnnnnnnnnnnnnnnnnnnnnnnnnnnnnnnnnnnnnnnnnnnnntttttttttttttttgacaaatatccaaaccatttatttttaggattttcgacccaataccatttgggactggttgaagaaaggcttcttatttccaaatttttggttccccattaaacccgtggttcctggcgtgacctttttttggataggccttgcgtttggattttattatcttttggtaaattaaagggtacttatttaattttctggaggtacccgattcttcttttaggttttcttaaccaactggacatggcgtttattggtagacttattctctttttccttttccggaaccaccgaataataggctttctccttccttgcttggtagaaaattgattctttttcaacaaaaatgtttgctttattatggtggaccgttccattcttcagagaatctgaaatttcattaagtaacgattcagatttcaccaaagatt

SEQ ID NO: 125053 - DNA, 487 bp, Arabidopsis thaliana columbia
ggcaaacccacgcgaacgaaaggtatgcatcctaagagcggctcgcccttattgtgggtgatttggatacacgaactgcttccaaaaagggaagatgttgcttgatttattaataacatcccaaggtattttattgaagtgcttgagagaaaccagcccccctatgaaaaagccaactaaaccacttcaaaactaatttcaatttttttgaagggggggcctttcatcatagcctatttttggttaacagagaatgagcttgttccttgcgaacctctaaacttcatgttcggccgcccgtaagataaaaatcgactgcactttgtttgggactactcttgatttctttcaacctcagacaaacgaatccctaccttccaaatttcaaaacccagaattttgcctggattagagtttcgtacttagacctaaataaatcagcatatactgggctctcgatgtttctcgaatgccatattaacaaaag

SEQ ID NO: 125054 - DNA, 513 bp, Arabidopsis thaliana columbia
  unsure (1)..(513): unsure at all n locations
nnnnnnnnnnnnnnnnnnnnnnnnnnnnnnnnnnnnnnnnnnnnnnnnnnnnnnnnnnnnnnnnnnnnnnnctttttttttttttttacaaagatgaacaagggtatatacctaacgctgttgtagtaactagtacagagagtgaagctattgtgaagctctttgagtcggatcgtgcagaagatatgctgtaatattttatgtcatgcacactggatctatggagggctgatgtacatggtggtgtgggaggcccgaccgcacaacaaagcattctttgtcaaaggtgcttcatctttgcgagagtgatctgcagaatgaactagaaggcagaactgcagacctaagcattgactcggccagaactggctcgttagattgcacattctcacaccgaccagtgccacatatacagctagccaagattacggatatactcgagtagcgcagcgagatataccatccttgaggatatactctcgtttgctagcacgtgaccatattccttgattg

SEQ ID NO: 125055 - DNA, 501 bp, Arabidopsis thaliana columbia
  unsure (1)..(501): unsure at all n locations
cgataattagtgacactatagagacttgacgtcgcatgccgcgtacgtaagctggatcttaagcggcgccttttttttttttttaggataagcttctcttgcttatgacttggtctgatggtaagcaatagagaaaacatagatttaggtaagtgtgatctactacaaagaaatctccagtttcttggaacgcaagtatgactcttcgagggaaaactgtatttacaattagattagtacgtctcaggacttngtgcgtttctcagaggatgaattgcctgtatgattctcctgagaattcttctggatattctcgccttcgagcttcgctgagaacttgtatggcctctggaaatctctggcattttgactgtcaatactcagattgttcaatttctcctcattttgtaaagcttcaagctttttctgcatagcttcatgctcagctcgaatccggaaaggaacaccttgcttctggtagacattattctgggcaaggtc

SEQ ID NO: 125056 - DNA, 503 bp, Arabidopsis thaliana columbia
  unsure (1)..(503): unsure at all n locations
nnnnnnnnnnnnnnnnnnnnnnnnnnnnnnnnnnnnnnnnnnnnnnnnnnnnnnnnnnnnnnnnnnnnctttttttttttttttttttttttttttttttttttttttttttttttttttttttttttttttttttttttttttttttttggggacaagggtcaattttttttttcccagacgacttgcccgttaaaaaaaaccaacctcagaatccgataatgtgtgtttccaattttaaaaacccctcaacccaaaaaaaacaaaaaaggtttttttcgggtgggggaacatttaaaaatttttttcattaaacccccattagctagaagcctaaaaaatttacacgtacaaaccttgaaaccattttttgaacgtggttgactattaaaattaaaacaggggggccatgcttttcctccagtttagtgatctccccgttgtcggtagcggaggcgtgaaactcaaaccaaacatttcctttatagctttaccttgctcca

SEQ ID NO: 125057 - DNA, 562 bp, Arabidopsis thaliana columbia
  unsure (1)..(562): unsure at all n locations
nnnnnnnnnnnnnnnnnnnnnnnnnnnnnnnnnnnnnnnnnnnnnnnnnnnnnnnnnnnnnnnnnnnnnnctnnnnnnnnnnnnnnnnnnnnnnnnnnnnnnnnnnacacaaattaaatatattatatttaaaaagatttacaaaatatatggttttaacaaccaaacgtgggtcacgcccagtcccaagaaacaaagagagcagcctgcattagtgagacaaaagcaccccaacaaaaacgaacacatgggaaagatnnctgatgactatttgttcccacacgatcaaaaccatccccggttttaaagcctttctgggcactctcccctacgtaagaatcccttgttccaacaagatagaaacacctgncattaagccaacttcgtaccacgaagcgtcacgtttcctttttgcggggtttcccccaattgaaccactaagcggcgtggggcaagctggggacaattccccaaacagcccccatgggaggggcaaagaagcaaagccgcggaaagcctcggtactttgggagncggaaagtgatgggggtgaaaaagtgtg

SEQ ID NO: 125058 - DNA, 442 bp, Arabidopsis thaliana columbia
  unsure (1)..(442): unsure at all n locations
gggcagcaccgtcgtaagctgatctctagagcggcgtctttttgttaatttcattgttcttatccaaccaagagtgtatacacaggtggaacaaccgaccaaccagagttggggagggaaatacaaagaatgtttcacacaaatcaatccaactacaagacaggttcatttcactttcattggggtctaaaaatccgacgcgtgggtcnnnnnnnnnnnnnnnnnnnnnnnnnnnnnnnnnnnnnnnnnnnnnnnnnnnnnnnnnnnnnnnnnnnnnnnnnnnnnnnnnnnnnnnnnnnnnnnnnnnnnnnnnnnnnnnnnnnnnnnnnnnnnnnnnnnnnnnnnnnnnnnnnnnnnnnnnnnnnnnnnnnnnnnnnnnnnnnnnnnnnnnnnnnnnnnnnnnnnnnnnnnnnnnnnnnnnnnnnnnnnnnnnagccggaaa

SEQ ID NO: 125059 - DNA, 503 bp, Arabidopsis thaliana columbia
  unsure (1)..(503): unsure at all n locations
tgacactatagagagctgacgtcgcatgccgcgtcgtagcttggatcctctagagcggccgcccttnttttttttttttttttttttttttttttttttttttttttttttttttttttttnaaagtcaaagaaaattggtgggaccttttagtaccttacccaggtcttggccaaaagaaagtttgaaattttaaaaaaacaaaaagggggttaaaagggactgtttgatgatcttttggaaacaaaattggtttcctttttggcccatatattaagacacatttatgggtatatatttctcctctgcccttttttttggatttttcctcattcatcatgagctttattaacctcctcactagtctttgattcatcagccggggcttcctctgtctttgattcatcaaacgccaacaacggtttgatgtcaccgttccaaatgcagggagaagccaagaacccaattacgggtgggacaatgtataacaaagcaggctgtgt

SEQ ID NO: 125060 - DNA, 524 bp, Arabidopsis thaliana columbia
  unsure (1)..(524): unsure at all n locations
nnnnnnnnnnnnnnnnnnnnnnnnnnnnnnnnnnnnnnnnnnnnnnnnnnnnnnnnnnnnnnnnnnnnnncttnntttnnnnnnnnnnnnnnnnnnnnnnnnnnnnnnnnnnnnnnngggggntttttttttttttttttttaaaactgaccctcttacaataaaaataaataaaacagttacatttttaagtcctcctacagatcaaaactaaagagtcttttacttttttattcccccaaatcctggtaaaaaaaaaaaaaaacctttcccttttttaaataattaaccaaaccggaggagggttcctttaaacccggcttccaggactttggaaaatggtaaaaaaaaaaattttgggtttttcttttttaaaaaggaaaggaaaaaaaaccccttgggtggttgatgaaaatgggttgtttttagagtttgaaaaatgggatttttttctttccaaaaatggaaaccttcatccctttaagggatctttccaggggctagggaaaaaaattctttttacc

SEQ ID NO: 125061 - DNA, 537 bp, Arabidopsis thaliana columbia
  unsure (1)..(537): unsure at all n locations
tgnnnnnnnnnnnnnnnnnnnnnnnnnnnnnnnnnnnnnnnnnnnnnnnnnnnnnnnnnnnnngccccccttttttttttttttttagtcatanagcatctcatactcatagagaaagagtgatgaaatatccaaacacancgatanngtcttagaaagcataccatgatannttcttcattaatntagggtcattaaagaatagatagaggggtgaatcaaactcagcagtagaaaccatgacacgcttcacatttctcttttcagaagctgggaagtggcctcactttgcagcattgacatttaggcccgcgttgtgcttctaccagccattccacctccacgtgccatgctcccactagccattgagccactgtctgatgtctctggctccatgtagaatcgagccctaaaagctgctagatgtgcataatatgcagggggaacaattgaaactgagcgtgtgcatcttgcatacgtgtaacataagttattggtcagagattgaagtccatctgcagtaaagttgttctcatt

SEQ ID NO: 125062 - DNA, 517 bp, Arabidopsis thaliana columbia
  unsure (1)..(517): unsure at all n locations
tgacactatagnagagctatgacgtcgcatggcacgcgtacgtaagctgggaccctttaaagcggccggccctttttttttttttttttaatagaaattttttaatccttaaatcttttaattcagatatttaacattatgaaatcaactggagctggggtcaacttttcatcaaagaatattgggtttccaacgatttccttcttcttaatcatggagctgagacatgaccaatcgaaaggaggaatcgcatatggtcctttgactaatccatcagccatcgatttgtgtgcagcctcagtcatatgaaggccatcccaggccacatactttgaaggatcactacaagcttccactcctacactcccacaacttctacttaagttgaagttgtacggccctcctacaccgcaacaagctgacaagtgtctgtttatgaatcttggttctcggccaaggcgcaatgaagcattgtagtagtcagcatatatgatgttgacgtgaggggtaagcttcc

SEQ ID NO: 125063 - DNA, 509 bp, Arabidopsis thaliana columbia
  unsure (1)..(509): unsure at all n locations
ctatagaagagctatgacgtcgcatgcacgcgtacgtaagcttgggatccctctagagcggcgcgcccttnnttttttttttttttttttttttttttttttttttttttttttttttttttttnnncaaaaaattggttaacttgccttaaacctgggggccggggggaaattaaccggaaatttccaagggttccttccacccttaaacccccccaggtcacttttttcctttttttgaggggtttgaatttaccccaaccaaattgggcttcttaccctttttttccccggcttgagaaaccttaccaaaaaaaaggagattcggaagggtttttcttaccctcaacttggaggttggccccaactttgcaaaattgtaattgttttttttccgagtgacttgaaaatcgaatcttcgtttgttttattgggaccttgggaatttccaatacctccttttcggttttgaaggctaactgtgttgttattctgtggaacattactgt

SEQ ID NO: 125064 - DNA, 346 bp, Arabidopsis thaliana columbia
  unsure (1)..(346): unsure at all n locations
gtcgcatgcacgccgtacgtagcttggatcctctagagcggccgccctttnttttttttttttttttttttttttttattttatgttttataaagaaacaagttttgatatgctttttttgttcaggtgcggcaccggcccacaagagtcagggcaaagcagatggcctggtttttgaccccgaaacgaaggaatcaaaggttggggtttttttccgcgcgagctttggacaacaaaatgggctgaccaggcttcggtaaacacttctacaagactaaagaagctaagggagggtcagggttcctctccaaacacctcaaaaagtatatgaagattcgggtgggat

SEQ ID NO: 125065 - DNA, 507 bp, Arabidopsis thaliana columbia
  unsure (1)..(507): unsure at all n locations
gtgnnnnnnnnnnnnnnnnnnnnnnnnnnnnnnnnnnnnnnnnnnnnnnnnnnnnnnnnnnnnnnnnnnnctnnnttnnnnnnnnnnnnnnnnnnnnnnnnnnnnnnnnnnnnnnnnnncnctcactcatatatggtttttggattaaagatatatccatctattttgatggacaatgcacacgtttatacattttagaaaggccctttgatatcagaggcggcatacatatatacatatagactcagtcgagaatttccagtcaaaaacataacatanttgttttagcttacacgaaccaaagcctaattaagaactttgccggaagactgcacctgaaatcagatcgagaagtaccagtgactaagaaagctcctccggcaaagcaagacggcaaaactctattngaaacttttactttcttatctacaaaaaagacaacactcctaaaacttagaaagcctatcacactacaggaaaagctctataactccaaatcttgtaata

SEQ ID NO: 125066 - DNA, 514 bp, Arabidopsis thaliana columbia
  unsure (1)..(514): unsure at all n locations
nnnnnnnnnnnnnnnnnnnnnnnnnnnnnnnnnnnnnnnnnnnnnnnnnnnnnnnnnnnnnnnnnnnnnnctnnnnnnnnnnnnnnnnnnnnnnnnnnnnnnnnnnnaaaaatcaaataggccctttcttggattattgatataacaatgttactgcacaggaactatgancaaattttccctatcttctgctggttcaatcggttaatgattccgagattctgttaattaacacaatacttttggaaagcaagtgagacttcttggggtttactaaccttctttttttgagctcagctttcattgtcatcgtttcgggtttggtccaaaactactgaacccaatgcttataagcaatctggtgaagctgatcatatcccgcaagcactcctgctcctgctactccaagaagcatgttcgcagtaactcctctatatagcgcatagaacccttccgacttcaatatctctcttaaggcatgaatggtgttccggtatttaacaggttgtcctga

SEQ ID NO: 125067 - DNA, 490 bp, Arabidopsis thaliana columbia
  unsure (1)..(490): unsure at all n locations
nnnnnnnnnnnnnnnnnnnnnnnnnnnnnnnnnnnnnnnnnnnnnnnnnnnnnnnnnnnnnnnnnnnnnnntttngtttttttttttttttttttttttttttttattttatttattttttagtttttttttttgggccttttgacaaaaaaattttgttttgagctgtggctaacaaaaaaggttcaaaattcaggggcttttttagcctttttggttttaccttttacaaactaagccgctttgtttccggttttttttcttttttaagtcacttaatccaaagtttttttggtttcctaagccgaagtttttgcgagtccacttgaaaatagccttattcacgaaaaaatttgttaaaaaaaaagatatttacctcccttggcttctttgaggtcatcgaggatgttgccgtaccttttaacggggtttttcaacaattttttgcgcttgacaacgacgacaagttaatttttccggccaattttga

SEQ ID NO: 125068 - DNA, 519 bp, Arabidopsis thaliana columbia
tgacactatagaaagactatgacgtcgcatgcacgcgtacgtaaagcttggatcctctagagcggccgcccttttttttttttttaccaaacgattatataagaattttaacaagtgaacgaaaataaataaaataaacaaagggcaaacgggttcgattcagttgggtttaggtcttggtccgaacatatgtcatcaccggtccactgatctcaatctcaaattcactcgactcgactccaccaccgtcgtatgtttcgagtcaaactcagtacgccgccgtcgaaagtttccaagcggaggtggtaatgagtggacgagtgtgccaacccaacatcaaacatccattactctcctccacacgataaccttggccactattaaacacagacaaaagcatactcgcttgcttaaacgcgttagacccaagatgtgccggcgctaaaccggacgaaccaaaccggtttccccattgactcaacgtttcgtgtctctcgactctgtcaggaccttcacaag

SEQ ID NO: 125069 - DNA, 529 bp, Arabidopsis thaliana columbia
  unsure (1)..(529): unsure at all n locations
gattcgannnnnnnnnnnnnnnnnnnnnnnnnnnnnnnnnnnnnnnnnnnnnnnnnnnnnnnnnnnnnnnnnnnnnnnnnncctnnnnnnnnnnnnnnnnnnnnnnnnnnnnnnnnnnnnnnnnnnnnnnnnnnnnnnnnngcaaaggaattctgagggncagattttgatttttagttaaccctggacaaatttttacgtattatatactttggagtccaactcaaaacaagtcacgattgggaaaaaagatacgaggccccaattttgtgtttacaaggaaggccaaacctatcccttttgctccttgattcctgaaagaaactactatgtctcggataaaggttttgccagatactgacgccatttttttggcatgcccttattcgatctcagcatccttatagctgcatttgttaatggtattgcaacaatgtcatagtcttttggttcctttgggaccttaagtaacttcatgtgggcttcggctgctggcttctggcctttccttgagttgcatcttgaacat

SEQ ID NO: 125070 - DNA, 506 bp, Arabidopsis thaliana columbia
  unsure (1)..(506): unsure at all n locations
nnnnnnnnnnnnnnnnnnnnnnnnnnnnnnnnnnnnnnnnnnnnnnnnnnnnnnnnnnnnnnnnnnnnnncttttttttttttttttgataaatattgcttgatacattcattacaaacgaacatattgacactttacaagaaaaaacccacacttgcttaagcgttcgttacaagacgcaaaccaacgaaacagatcacttccaaaaactactaagtcgttacaaacaacaatttggactccagaatccggtttcataggctaaccggtatccactatacaaataacacactctgtacgagcatagaaccggattcgtttctttcatatacggttcccaagaattcacatggcaaagaaccatcctctagttagccgctatgtcacctacgacttcccggtcctgagtttggttacaaaagaagatcttgaccgggttggtttaatgaaattgcgcaatttgaaaaagagaacggatcttgttttaccgtttacgtttgttcttg

SEQ ID NO: 125071 - DNA, 490 bp, Arabidopsis thaliana columbia
  unsure (1)..(490): unsure at all n locations
ttgacgtcgcatgcacgcgtacgtaagcttggatcctctagagcggcctgcctttnnttttttttttttttcttctttttttctttctttaaatattggctaaatattaaatacttgcttgtctttatagactaaattaattaaattcccttttattacccaaacttttacttttcattttttttcgggccttaattcaaaaggttccaacctttttctggcctcaaattttttaaacccttggaaaggggttggcctttaaaaaaatacttaaaaagttaaaaaccagcccgtggtttgaacaatggcacttggtaacctgttcttttaaccgtaacaaacgttagtccttaatacacttccgnccttcttccaacttgttttttgacataccaaggataccaaggaagttgggtactcaaactaagtcttgctagggagtatttagtacttgtaactggtacaactgaatcgacgtcaccactgaaaa

SEQ ID NO: 125072 - DNA, 441 bp, Arabidopsis thaliana columbia
ccccccaccaaactggaaacccctaaaacgccctcccttgtgggtttggtctttttccaaatacccaaaccatctcacaaaagaaacaatttatcctacacccattttatcacgccaaaatcgtgccacacattctcttattacccatttccgacccaccttcgcctcaacgccgcaaagactcattatcccagcaaaacttctctttagggggggggacaataaaacacacatcctaaatcagcttaattccttcgccctatcacaataccctccccccaccaacataaacaaaaaaaaatctaggtccacgggacgataacgatcgaataaaacacatgttgttccataaccctctgcttattatccccccccgcgctagaaatcaccaccctcttgaaattctacaatcccacaacaccaaccccccaactccctcat

SEQ ID NO: 125073 - DNA, 512 bp, Arabidopsis thaliana columbia
  unsure (1)..(512): unsure at all n locations
nnnnnnnnnnnnnnnnnnnnnnnnnnnnnnnnnnnnnnnnnnnnnnnnnnnnnnnnnnnnnnnnnnnnnctttttttttttttttttgctcaaaatataaaaggagaaattggttcagattcactggcttgactcaaggacccaagaacaactttcttaatgatgtaaaagcaaaaaactgatctcttagtctgagaatcgaattcagcatatcccaaaacgctataaagctttgaagctgtttgcagatctaacttgccactgggcccatgatgaacctcattaggtccatcagcaatcttgagggctctagctgcatcccacaaatgcgctaaaactgtgtccgaggatacaccggatggtgcatgaactagtattgacgtgtctagtaccttcaatgccatgtttggagctgcaaccttggacattgtgagaattcctagagctattttgtttccaaatttatcacgatgatcagcaggttctaaaactatcaatcggggtccttatag

SEQ ID NO: 125074 - DNA, 490 bp, Arabidopsis thaliana columbia
  unsure (1)..(490): unsure at all n locations
tgannnnnnnnnnnnnnnnnnnnnnnnnnnnnnnnnnnnnnnnnnnnnnnnnnnnnnnnnnnnnnnnncttttttttttttttttttatactagagcgactactttttatatgaacagagccttattgtcttggcattagactaacagacaaagctctgccaaaaattgtgagagggggcaaaagacaacactgtaatcgatatatactcccagcgagctcttctatgtgtggtcgacctgaagctatcatcaaagctaatgtaagcgcaaggtatatgtatggatctaacaagtaaactagcctgcatgatacgctctgatccacaaagacacattcgcacatcgaaaggtgtagtatgtggaccactcacgactgagcctctatatgatgctcactgaatctccctcacataagagaacaggactgagcatctggacctattgtattatcgatagcagtgggctacgtgacgatcactagtagagctg

SEQ ID NO: 125075 - DNA, 376 bp, Arabidopsis thaliana columbia
aggtctctaccactcactattaggaaagctggtccccctgcaggtaccggtccggaattcccgggtcgacccacgcgttcggcccagccttcggttaaaacccaaatctcttaagaggaaaagattgcttaagtttgattaaacatttcaaaatcaatggcttgttagaaccaaggtgccttgaattcttaagaagacaaacaccttcctaagcttggtggttaataccgttccagaaacttgacacaggagtaaccaatcttattccgggagaatcgggaaaatgcgtgcgttaccggtgtgccacccatctttcgccgaggtgagcctatcgccgttttcggttgagagaaacaaaacaatcgcacgtcctcac

SEQ ID NO: 125076 - DNA, 329 bp, Arabidopsis thaliana columbia
tcaggtacctacgactcactattaggaaagctggcacgcctgcaggtaccggtccggaattcccgggtcgacccacgcctccgggagcgtcatgggttgggatcctattcattctactgattgggaagggtttgggcgttggaaggccaagattcaacaccaatttccagcttctattcaaaatcattaagggtcttggggtccttacatttggggccattcttattacttttcttgcaccttctttgattaccatcaaagacttattcatttgcatgcctggcttcatgcccacttgattgggaatgcctcttaatgcaccagcctgt

SEQ ID NO: 125077 - DNA, 279 bp, Arabidopsis thaliana columbia
gaaaggtggtacgcctgcaggtaccggtccggaattcccgggtcgacccacgcgttcgattaaactttggtttcttcgaatttcgagttcttggtctttccaaaggccctactttgggcctagcattaaccattggcggtttaaagcttcaaggtttcatgggccagaaagaagtaactattggtgaaaacctttggaattaattaattttggaggcttttgaaaatggcttattaccaggacttcattgataatggacaaaggtaccttaggggattg

SEQ ID NO: 125078 - DNA, 452 bp, Arabidopsis thaliana columbia
  unsure (1)..(452): unsure at all n locations
tacgactcactatanggaaagctggcacgcctgcaggtaccggtccggaattcccgggtctgaccacgcgttcggtaaaataaaaacccgaaataattttaaaaaatatttgtatttattttttggattaattttttggtgatcggatgggggtcctacacaagcctggggatgaaacggggggcggaccgacgcccgacaatggtctcgggaaattgagaaagtcacaatcattatccaacgtccgatcttttcctccttttctctcaagcgaccaagtccccagaagcatcatgggtaccaaaggggaatacantgttcgtgggtctccgtaaattgaaattgatccgggattctccaccctgttcaagcagcacccttgggacacctttaccccctgggacaccatgctatgctttggggaccattcacttgccggcaaattcctttcc

SEQ ID NO: 125079 - DNA, 402 bp, Arabidopsis thaliana columbia
  unsure (1)..(402): unsure at all n locations
nnnnnnnnnnnnnnnnnnnnnnnnnnnnnnnnnnnnnnnnnnnnnnnnnnnnnnnnnnnnnnnccacgcgtgcggccacgcgttcggatttcttttcgatttcttcaaactcttattaaatcggttatttggtcttaatttcgaagaagacaaagaatgccggcgccagaagccgaaccacccaaggggggagaaggaaggccaagggcacccaattccgcttttgatcattttaaggccggctttaatttcccgtgggaagaattggttgaattcttaaattccggtaatacccccagccttgtcggggccgagcctccggctatatcttccgttgttctggagtcctctcccgccaaggtgttgagacctggcgggacacgcaccagggtataccaagaa

SEQ ID NO: 125080 - DNA, 405 bp, Arabidopsis thaliana columbia
tacgactcaaatagggaaagctggtacgcctgcaggtaccggtccggaattcccgggtcgacccacgcgtccgcccacgcgtgcgtttctatttgaaatgaccctggtttttcatgcctaaaacggtgttctgcgggttaaagaaacatataaaagcctaaacggcttggtgacaacttaccgttcttgatttgttgaacacgaagggattaaagccttgccttttctcccttatacaaagaaaacaaaaagggcaggctttttcaaagattcaaggtttccaaaacggacctgctacacaaataccggttctatggaagacccttaatccagttaagttggcggtggtttacaaggtttgcattgggaaaacccttgcgttgcccaattttattgcctttggaa

SEQ ID NO: 125081 - DNA, 359 bp, Arabidopsis thaliana columbia
accactcactattgggaaagctggcacgcctgcaggtaccggtcccgaattcccgggtcgacccacgccttccagagaataaccaccttatgggtttgggttaatcctatgaatttcttaagaatctctatcaatggagggttggctcaaggaccgccacctggtatgaagaagcaccttcttctgcaggtggagtaagaaccggctactgggacccttgtttttaccgggccttcttgaaatcaccccaccacttaatcttaagggccttaattgccgtggaatgccttggccaaaacctcaaacccagtttcaaaccagaagtggaaaccgaccagccccgcgaattccaaggggag

SEQ ID NO: 125082 - DNA, 414 bp, Arabidopsis thaliana columbia
  unsure (1)..(414): unsure at all n locations
agctggacacgcctgcaggacaccggtccggaattcccgggtcagacccacgctgtccgccacacgctgtccgcccacgcgtccgactagttctagatcgagagcggccgccctttttttttttttttaacacaaatcatacaaaccaataaagtacaacncgtngaacagnttataaacgttaatgggaagggaaaaggcaccttttttttaaccctaaacacaggaaagggggactaacaaacccttccttaattgattcctaaggggacacattacacattcgcctcgagagagttctaaaacacagttactacagctacctaagcttcaaaaaaccccacaacccggatgtttaccgaaataaaccatggcataccttgttcggaattcttgtgtttcaatatatttccc

SEQ ID NO: 125083 - DNA, 312 bp, Arabidopsis thaliana columbia
acgactcactaataggaaagctggaccgcctgcaggtaccggtccggaattcccgggtcgacccacgcgtccgcgagaaagacgaacacttaccaaaaaaaaatctctttgtgagctttaacgatcgtaacaatggcgaacgaagtgattcttcttgatttctggccgagtatggtccggatgaagacaaggatcgcattgagggagaaaggtggtgaatttgttttccgagaagaagatctaagggacaagagtcctttgcttcttcagatgaattccattcacaagaagaattctggtcttattcacaat

SEQ ID NO: 125084 - DNA, 513 bp, Arabidopsis thaliana columbia
acgactcactaatggggaagctggcacccctgccggtaccggtcccgaattcccgggtcgacccacgcctcccagaaaaaaaaaaccttcattttattccgtcggccggttcatcttggtgcttccgagccagccaaaattatcggcggagaatttatcggctctctctttggaaattctggtccggggagaatcggccgatccgaaggtccgttatcctcttctttaccgttcccgggattaaattccttgggggttttttttcctgggaaaggccggggttccggaagggggggtggattttggtccgaccacttaccttggatggataaggttatggtttggtaaatggaattttttgggaggattccggaggaggaggagaggaaccattccgtatcctagaccctggaatggccctattattaggatccatatgatgcctatgagcgcgcctttgagtggcagggtcctaagggggggctttggtatctatctgtaggagggctttta

SEQ ID NO: 125085 - DNA, 389 bp, Arabidopsis thaliana columbia
acgactcactatttggaaagctggcacgccctgcagtaccggtccggaattcccgggtcgacccacgcgttcgctcgttttctttggcggcttttttattcgcgcgaagcaaacgatcttcaaccatggccaccggcgcagatgttgacgctgagaatcaacaagcgctcactaaccaagtcaagctcttcaaccggtggacctatgaccacgttaccggcacatacctcagtcttggtgactacaatggagttcaagcagcttaacatgctaactttggttcccacaccggtggaagaacatttgggaagagaatcaagaagggttaatggcccattggtgagaagcttaccaactcttttatgatgcaccggaagaaccaccgtaag

SEQ ID NO: 125086 - DNA, 367 bp, Arabidopsis thaliana columbia
cattccactcctatttggaaagctggtacccctgccggtacccgtcccgaattcccgggtcgacccacgccttccaagaattaccttttggccgcttaaaagaaatgggaagaagcttgttttaccatggccagaatgactggttttcaccggtattgagaaaccaaccaaggagaagaagattttttgggaaggagattaatgccagggttaaacctgttccattcaaaaccgtggttattgtgagaagacttaaccaaagggagattccttctttcccttcttcaggggaggcaaagaggcttccttcagaggctaggtccattaaggtgtcgaccactaaaaaagttggaagcagtggaaactc

SEQ ID NO: 125087 - DNA, 327 bp, Arabidopsis thaliana columbia
agctgacacgcctgcaggtaccggtccggaattcccgggtcgtacccacgcgtccgcggacgcgtgggtgggaacatcatgatggatgaagagaccaaagcaataaccattattgattatgaatattcatgctataatcctggggcttatgacattggcaatcacttctgggagaagggtggcgattaccacactggaacaacttttattatggattattggaaataccctggtggggaagaaccaccaagaattctgaaaacatttttgaagtattcaaaagaaaaggccaacgattctatgggccaaaaacttctaaaagaacgt

SEQ ID NO: 125088 - DNA, 239 bp, Arabidopsis thaliana columbia
ctgacacccctgcaggtaccggtcccgaattcccgggtcgtcccaagccttcggttcttctttctttaccaaaacttttcttctttactctttttcaacggccaaaaaaaatggaagtggatcctaccccttaggtggcccagaagggttaccgaagaaaagggggaacctacttttgcttgtggccaaaagaagtggccgttcttaaaccggggaaccatggaacccgttaacctggt

SEQ ID NO: 125089 - DNA, 389 bp, Arabidopsis thaliana columbia
tacgactcactatgggaaagctggcacgcctgcaggtaccggtccggaattcccgggtcgacccacgcctccggttggtcttcttcttcctcttcaatttactttctcttcccgaattctctttggccgaatcaacttttccttcgatcttgggcttcttaaaatcccgaattattcccttaagggttggcttaataatcggcggtttcttcggcatgaatttcaattccggggcggccaacgccggggccggccgatccggagaatctttcggcggttaggagaatttcaaggcaaccaaggaatccgaggtcacacagaagaagtttcaacttggcaggccaatctaccccttggtgggtcaattcaacattttggatagccagggt

SEQ ID NO: 125090 - DNA, 503 bp, Arabidopsis thaliana columbia
  unsure (1)..(503): unsure at all n locations
agctggcacgcctgcaggtaccggtccggaattcccgggtcgacccacgcgtccgattattttggccgggagcttcttcatttccatttccattgccattggactcttttcttttaccaacctttcatttttggtagctcttatctctacggcgaattggtttttcttttcttcttcgaatccaaaatgaggaccatcggttttcttttggatgcgtatcattggctcttttccagaatccggttggttcttgcctctggggcgggagggattctctcgccagactctaccaaaatggataagccttccattgtgaaagaggctgaaactgtacatgtgcctccacctcctactgagaagctgctngtcctggaaggaaatggtttggtggaatcacatgtctgtaaggaggctttagatcgcggctaatctgtctctagcctaagcaggcaggtaggccgtctttacagagtcctgggcctccagagtaacatggcatcaag

SEQ ID NO: 125091 - DNA, 325 bp, Arabidopsis thaliana columbia
caggtctacatacgactcactataaggaaagctggtacgcctgcaggtaccggtccggaattcccgggtagaacctcggctacgggaatgatgctgatgcaattggacgtagtttaaactgtgagccagaacggaggatttgtttagcatccgttgtttccttgatgccaaatcacatgaagcaatatagcccgactattccaattaggatgtattgacccagcagtggtttttgaaagggccaatttgctacctagactaatacctcctacgtagcttgattggaacgtaaatggggattgacgggctggccattggggttggg

SEQ ID NO: 125092 - DNA, 403 bp, Arabidopsis thaliana columbia
tacgactcactataggaaagctggcacgcctgcaggtaccggtccggaattcccgggtcgacccacgcgttcgagattaccaaaatagaaaaatctaaggggtgggaagctctgcagctcattcattcatggggacgacgattcccactacaggtaccggaactatggggtcggcttcttctggccctaccatcttttccttacttaaaacgacttaacaatgttaaccattttcttctttattattcccattttctattaagcttaataccggtcttggttggcgggacccttccggggattgaaggggtgattgcttcgggaagaacaaacctgaagaatgggggattcagtccgaaaagaagagggagaaggggagaagaagaagaagtgggttccaacc

SEQ ID NO: 125093 - DNA, 528 bp, Arabidopsis thaliana columbia
acgactcactattaggaaagctggtacccctgccggtaccggtcccgaattcccgggtcgacccacgccttcggtcgtcatcatcatctactttttctgcggtttttccaactgaattatcttaaccagggaaagttaaaccgagtacccatcttaaaatcattaacttcacttggatttaaaggaacccttactggtccatcattagaagggagaagccacttcagttaccaggtcttaaggcccttgaatggaaggggatggtgatgaaccttagaacacttgttatttcctccaaggttgtaattgaaaagtggccaagggaggagaaggagaaggagaatggggatttcttaaaggtggaaaaggaacctttgattgccaaggttaatgcggagaaggcaaatcatgttcttgtggaaaccaaaaggaggttatggaaggagcctcgagtggttcacagagagacctccttgattcacaggaaaaggcaaaggacctagacctcgaatggaaaagagttgcagg

SEQ ID NO: 125094 - DNA, 535 bp, Arabidopsis thaliana columbia
taccactcactatatggaaagctggtacccctgcaggtaccggtcccgaattcccgggtcgacccacgccttccgcttaaactggatgggataccaaacaagttcttaccgatggtggaaaagccacccttggtattaagaatggcattaaaaatggggggaatggttccagccggttccactttgacccttaactggcaagaaagaagtccaaccttgaagaactaatcaatggttcttataagggaatggattccatggcttcgtgacctgggaaatgcagccaaatctttgaaggagggaagtctaatggaatgggtccgcaagcaatatgcacctgggaactctgagcttgggaggcaaatagaagaaggaaaagctgattttgagtatcttgagaggaaagctaaggagtttggagaaccaaaggttccttctgctaaacaggacctcgctgagatgattttccaaatctgcatgtaggaagaggaccaggagggctttttatgtttattaaaagaatcgccttttttta

SEQ ID NO: 125095 - DNA, 490 bp, Arabidopsis thaliana columbia
  unsure (1)..(490): unsure at all n locations
cnnnnnnnnnnnnnnnnnnnnnnnnnnnnnnnnnnnnnnnnnnnnnnnnnnnnnnnnnnnnnnnnnnnnnnnccacgcgtccgaacacgcgtgggctcaaatttcatgtgttaggaagaatcaatccctgctggaagtggcgatccgccaggctatctagcattcccctcacatgaacatatgattatcaaaaacaagggatctttttattacaaaggctgttcgaattatatcttgaacaaaggtttctccagcaatggccttgcttgcacagggaataccgatgtactggggacaactaacatttggcgtcttaacaggatgtttcaggctgttgctccattgacacagatgtttcatatgcttcgagaaagaatatatcggtgagactccgaaacaatggaagtaaattcaatcgttgcagtacttatacaagagatgggacatgacccaaccttgataaacgagatcttcatgaagattcaaaagc

SEQ ID NO: 125096 - DNA, 377 bp, Arabidopsis thaliana columbia
gaaagcttgtacccctgcaagtacccgtcccgaattcccgggtcgacccacgccttccccgaccccttggccgacccctgggcttgtacttttaggaataacccttaagggatccacttttaacaaattgatcaccaatggcacttggaccattaccttatcctaccagccattattatgaaccttatctggtacctggtaccaccattgatgatgatgattaaccatccttcttttgggaaccacaaaggacttattggattaattggggctccttggacctttttaaaagccttattcttattttttgacaaaatttttcattggaaccacctcctttttacaccattaccattttttcacaccttaatttctgg

SEQ ID NO: 125097 - DNA, 349 bp, Arabidopsis thaliana columbia
  unsure (1)..(349): unsure at all n locations
ggaaagctggcacgcctgcaggtaccggtccggaattcccgggtcgaccacgcgtncgggagcttcactgaacgttcactactcggctcacacgcgtttggtgactgcataagatacattgacgatggactaggggttataaccctactcgatcgagcatcgactatgatctatagaaacgagaatgatggagatcatcattttctttgctctggtctacactgtctacgcctgcagctgttataccaataacggctatctagtgaccatctcttctctcaacatctggcttatcgactgacgcaacatgattactactaggtcattctacatggtatccatgtagcca

SEQ ID NO: 125098 - DNA, 524 bp, Arabidopsis thaliana columbia
ggaaggtggcacccctggcgggaccgggcccgaatttccgggtcgacccacagcctgccgaggtatgtgatacacacgttttcattgagaaggaggatataaattcctttattgaaaaaggaaaaaaagggccaacacaaaggtgggcaggttaacctaagggaaaagttatggcggacacaacagagtggaatccaagtgtggtttcttctgatggtgtgggaagtgttgggtctgaatgggttgcacaggaaggagaatgtgtggctctatgagtccagccttggggagaacaggctctatctgccaccagtgagattgtgggtgtggccttacatggccaacatgttgtcttttctcagagctttcaagacttgtgaccgtgactccttcactcgcactataatcaaagtgtatggacctaaaggtatatataaagcacacatgttcgggaacccagtataatagtcacaacatcagactcttgccggcgtgtgctgacagactatgatgcgtacaagcca

SEQ ID NO: 125099 - DNA, 332 bp, Arabidopsis thaliana columbia
acgactcactattaggaaagctggtacgcctgcaggtacggtcccgaattcccgggtcgaaccacgccttcgaagtactggatggcttcctggctggtgaaccattccatacattggtttggtattcatttgcttggccacgaaggtccaatcccgaattattcgcttagaactgaaggaacggttgggaactaactaactaccatgggtggcaattattggataatctaccacattgaagaccttgaagggaagaaggaaggggcaattctggggaataaggctaatataagaaccggtaccattggtcaaccttaattttctggccgaga

SEQ ID NO: 125100 - DNA, 343 bp, Arabidopsis thaliana columbia
gaaaggtggtacgcctggaggtaccggtccggaatttccgggttgaaccaagcgttcggcccgcgttcgggcgggggcctctttttttttcctccctttttcttttcaacttttggcggaatccggggaacttatttagagaggaatttattaatattggtaattttaggatttttaccaaacatggattggccaccacaatcccattcttttcaataaggacaaaaaaatggtcattcttttttcaaagggtggggaaagggttcttgtgtgttctaggcaagttgaatatggacaaagcctggaggctactgtagatattcaatggaataatatgaatgac

SEQ ID NO: 125101 - DNA, 447 bp, Arabidopsis thaliana columbia
  unsure (1)..(447): unsure at all n locations
ccccccggggagaggagcgagagaaacgcggtttcccccgcggggaggaaccgcggaagcaggcaggcgaacaggacgggaggagaagcccaacgaaccccgcgcgacgcgcaccacgggcgcagaccaagcggagggcgcaggggacgacgaaggggacgcggcaaagccaagaggaagacaaacggcgagagagagggggacacgcgagttttttttaccagggcggccagaccgggaagaacaaccaagcacaccagggcgcgcccacgcgccggacacgcccccggcacacaccgacggaggacacacgnaggagcgaggacaagaacgagcgcacagagaccacaaccgacaccaaaaaccaaaacaaggaagagacccccagcgaagcacaacaaagacaaccgacggaacacgcacagcgcaacccgcgggaagaagacc

SEQ ID NO: 125102 - DNA, 434 bp, Arabidopsis thaliana columbia
tcatacgactcactattaggaaagctgctacgcctgcaggtaccggtcccgaattcccgggtccgaccacgcgtccggttctttattcctgggttggagctggtttaatgggtctggagacatttgattatgaagtctctcacttcattttggttgggtgatggaaaatggtggcagtggattttaagggaagcttaatctcatggattattcttttgaaatccccttaagtgaatcaatgaaaattgaaaaagggatggtcaaccttctaactcttaatccctcaattgctctggccaccttggagcctattttccggtgcaggttggtaaggtttcattggaagccgtggctttggagtggtctggaggtgaccttaattctgaaagaagaaggaatagcctttactggaggttttattggaagcacttttt

SEQ ID NO: 125103 - DNA, 222 bp, Arabidopsis thaliana columbia
tacgatcatataggaagctggtcgctgcagtaccggtccggattcccggtcgaccacgcgccgccacgcgtcggtgatctggatggtgaaccgcgtgatcagcttcgacgcggctttgactcgctggggacgcgtacttaactcacgtgaatctcaataaagatctacaggatggctgtgcctgacactgatactatttctcgactctctgcaatgtgaagt

SEQ ID NO: 125104 - DNA, 581 bp, Arabidopsis thaliana columbia
cccccccggaacagagaacggaacgccccgagttcacacggcgggcggagaagcggagaaagggcggaaccaacgaaccaaaggcgcgggaaacacacggacaaagcaaagacagccgcgacgaacgaggcacacgacagagcggggacacgacacaaccacggcaaccaacagacaccacgagccgggcgaagcacaggagcgccaccaggaggcttttttcacaaggggaaagacaaagagacaaacccagcagaaacgggcacacaagacggccacacaccgccaccacgcgcaggcaagaagcacacagagaacgaagacaaaaacacaaggcgacacgggagaacgacgcaaccaagagacagacaacagcaacaaacagccagccggcaaagcgcaggggggagacccagcgcacggaaggggacgcaaccgaagcgaacacacaacaacgcagggaccgcacaccacaacaacagcacgaggaggccccgacgcacaaacagacgagcaaccaacgccaagacagccgaccgccagccagcacagacaccgagcaaacgccacgacgaggcgac

SEQ ID NO: 125105 - DNA, 452 bp, Arabidopsis thaliana columbia
acgactcatattgggaaagctggtacgcctgcaggtaccggtccggaattcccgggtcgacccacgccttccgggatggtggaaggggtttcttaactaaggatgtggttgtggaaaagaagagtttatgggtctagctaagtagattattctattggatcttatggtaccaccatacctggatggtgtttggtctaaactctttagtctttttttggttacccatcaactcggttttatattttattggccccctttggggcattattaaaccccttaccattattttccttcacttggacttataatcaatggtactcgtgtccattcctgaactccgattcttaaacttcttttccacccgggaaaggggaaccggataaaaaccccggttcttggaattgctgccttttttaaagattctagcttacaaagggttgcttggcaaggtt

SEQ ID NO: 125106 - DNA, 490 bp, Arabidopsis thaliana columbia
  unsure (1)..(490): unsure at all n locations
tcgtaagctgggatcctctagagcgtttcgcccttgggggttagagcttttttttgagctatgaaaacttgaggagattctaaagatttatcagtttgttacaacataaagccataaatggctgacaaaaagaaaaaatcgaacttgaagaaaaagaagtaacataccagggagccccctttaagatttttttacgaggggtgggcaggaaaacgggcacccactgatcgaaaccctaaaaccanagcaacgacgcgggaggcagagcctcttgctcttcttctttcttctactagtatcttcatcacaacccgacgcccaagctgaacctaactcaaatgactgccatgaagaagagctgggcctagtccaggttaattgactagagcttcacgataataatagctatattagagcttagatctacgactactttccgaacgatgcgggcccgcgtcgaccggtgtcgtgagcgcgcttgcggaaggga

SEQ ID NO: 125107 - DNA, 463 bp, Arabidopsis thaliana columbia
  unsure (1)..(463): unsure at all n locations
cgcgtacgtaagcttggatcctctagagcgttcngcccttggggataagcctttttctcatttttttttttttttttggggggtgtgatgtgatgagggtgggcgttggggggaaaacagagggaggaagagcaagttttagaaagagccatctaagatccgggagaaaaaaaagcgcctccagcagtaaagctctcctaactttgggggggggggggncgccccaccgcacacgaggcgacccaacaaaaaggggggggcacaacccgcgggggggggcgccccccttaaggaaacaaagccgcacaacaacaccgggggggcgggccgagagaagaggggggcaaacaacgccgggcggcgcaagcataaaaacagggggtcgcggaccaaaagaaaatataggcaaaaccacacacagagaaaaagatgacaccaaagagacactgtcccgtgaacccga

SEQ ID NO: 125108 - DNA, 480 bp, Arabidopsis thaliana columbia
  unsure (1)..(480): unsure at all n locations
tacgtaagcttggatcctctagagcggtcgccctttnggttaattctttttttttttttgtcttgtaggaagtaaactacatattcaattaagctcaaggaggtgtttttgtgtatgaaaaaatacactaaagctttagaatctaaatatcaactgcagaaggaatgtcgtcgaccgttagatcttcctcccatcgggggactcaganccgagtgggcctagtatcccgtcagaactcagcgtcagtccactctcaggttggaagcgaagcatgtctgcacgagccatggcttctgcttgcgcaattctctgtctgaatgtctgagccatctcctcagccttctcgaacacaagttttgggttacgaatcatatcaccaggggttggctccagcttctttggggagagacttactcttcctctgtcacggtcgggactcaatatcataacccttaaagggcaccaggctgaagaacagtt

SEQ ID NO: 125109 - DNA, 378 bp, Arabidopsis thaliana columbia
  unsure (1)..(378): unsure at all n locations
tcgtaagctgggaccttaaagcggctgccttggggtttaaatctttaatttttttttttttgggccgaaaccctatttgtattggaacaacaggaaagacaaaaacgaatttgtttagcatacaacaagaagaaaaaaacacaaaactaattgcttacacatacttccctctatactaagttctcttttcggggaaggccnngggaacaggggcaatctgagaagaacaaggggctngaatatagaggagtgaatattaccatcctctaaccacttaagatgattctctctaaactctaaatgcattaaacgaagcagcttttttaaccctcttaattataaggttctactttcaccatcggtagcagaaccccgact

SEQ ID NO: 125110 - DNA, 463 bp, Arabidopsis thaliana columbia
  unsure (1)..(463): unsure at all n locations
gcgtacgtaagcttggatcctctagagcggcctccctttttgtttttatttggttcatcaaaggtatttactaattcgaattcaaaaacataagtaaactttgatcttgccgatttaataaatactagattacaaaatcaaagataaaccacatgtttggacaattagtaaaaatcgnctctgcacttctcctactaagtagcggggcagagggagatttcgagtttctttcagttatcagaaaggtggcctaagaaaggatccatcttcacacctaagatcttgacattaggatttgagtgacctttaacaaatacttncgtcacctgactgcatccaaagaccttcaacactttcagagatgaactgttatcgacaatgtagcctaataaatcgttggacatttctcggcaccaggatatatccaaaatctgcagtttatctgaatgtttggaaagtgcta

SEQ ID NO: 125111 - DNA, 477 bp, Arabidopsis thaliana columbia
  unsure (1)..(477): unsure at all n locations
cccctcgtaagctggatccttgagcgtcngccggggggaagccccggcacaaagggngagcaggaggagggnagaaacgaggagccaaagacgggggaacgcaggaacacaacgggcattccgaaagaggagcagagaaaaatacgggggcggagagcaagagggggctgttcatatcttggggggggggggaacaaagagggcgcagagaacgactgagcgcgagaaaccccgtggagggaaaaacccagacagagggggaagcggagcgggggaagtaagaaggggaggggcaggaagggggagggaggggagcgggggagacgggcggagggcgcgcgcgcgcggggggggacggaagcagagcgaaggggggcgcggacggagaaggccgacagggcacgcagagagggaacggggcggcggggggaggaagagcggggaagcagaaggggagaggagaggggagccggggag

SEQ ID NO: 125112 - DNA, 489 bp, Arabidopsis thaliana columbia
  unsure (1)..(489): unsure at all n locations
cccgtcgtagcnnggaccnctagactttcgcctttggtaaaccctttaaaacggaaagccaatctcttttgcagatgttttattacaatccaaaacaaaaagttctgatacagccgtttaggctttttttttttttttaacctgcagtagaaaatcctgaagacttaagaaaaagaggatttttttttaacggggggggccgcggacgcgggggacgacccgggaaacccggcccggaacctggggggggaaccagctcccccaaaaggggaggggagcagagcgagggggaaacaggggaaaagggcggaaccggagggaaaagcggaaggcgggcacaaagccccacaacaaacgagcacggaagcaaaaagggggaaggccggggggggcctaaagaggggggcaaacccacgaaaaaaggggaaggcgcccaccggcccggccacccaagccgggaaacccggggagggccacgcaacaaaaaag

SEQ ID NO: 125113 - DNA, 219 bp, Arabidopsis thaliana columbia
ctaagcgggaccttaaacttcgcccttttgtatttcttggtaacaaagctttagatttaattagcccgggaatagataaatgattacttggatgacaaagaaagcttaaaactttgccaataaagagccgagaccacatcacacaggtttgacatgttcaggcaggtttttctatttaaggggggtggcaaccccccagggagcaacagaggcaacagc

SEQ ID NO: 125114 - DNA, 429 bp, Arabidopsis thaliana columbia
  unsure (1)..(429): unsure at all n locations
cgtcgtaagcttggtcctctagagcggccgtcctngggggnaagatccccnnnnnnnnnnnnnnnnnnnngccctccgctaatagaaaaatccaaaagttccccatgacaattcgaatccaaagtttaaaaaccaaaagaaaaaaaaaatctgtaacatttaaaaattttaaccatttggaggttactattagattccaggggcttaagaaatcctgggaaaagaagggaaaaaaaccctaagaaatagggatcgagaatcaccgatctcttggttatggcttttggaaacaaacccaaattttttttaatcatccatgtgggatttttggagttcccaatttgatcttatcttatggaaaattttttaaaggaaaaataacttctttttttggggttgggggggcctccccccaaaaaaccaaaccag

SEQ ID NO: 125115 - DNA, 401 bp, Arabidopsis thaliana columbia
  unsure (1)..(401): unsure at all n locations
aaaaaagacaagggggccgggatgttattggcagcatttcaactacatgggatgctctgggaagcgaaaggaacccatttttatatttagggggggggaaacccaaacagacacccagacgaaaaacaggcggaggcaagcggggagggaggggggccggaccaaagagaggggggagcccccaaaaagcgggggcggagaaacgaggccagggaacgcaaaaggcgaaaacccgnnaacgaagggaggcaaccgcgcgaaagaacccggaaaaaggaacacagggcaaaccgacgaaaaaaagggaaggacaccgacgggggggaaggccaccaggagcggccggagggaaccggaacaagaggcagaaaagagggcgagagaaaggagacaaaaaaacc

SEQ ID NO: 125116 - DNA, 432 bp, Arabidopsis thaliana columbia
  unsure (1)..(432): unsure at all n locations
gccgtgggggtaaatccttcaaggtgaaccagaacggtattaccaggtgtgatggaaaatacatccttatgggtccgagcaagagtcaaaccgatggaagttaacaagatgtgctgtaaaagaaaaacgaaaggaacccgtactgacacagaggttttatanttttgggggggggaggaaaggaaagcccacgggaacagcaagggcggggagacgggggggagggcggagagcgaaccaggaagggcagggaacgccccaagagggcggggagcgaggggggaacaggaaagagcagagggggcgagaggaaaggggaggggggagggggcaggagggagaggcagagggaaagaagcgcgaagaggaacagaagcgagaggaccgagggggagggggagagcacagaggcaggcgggggaggggggggga

SEQ ID NO: 125117 - DNA, 475 bp, Arabidopsis thaliana columbia
  unsure (1)..(475): unsure at all n locations
gtaagctgggatcctntagagcgttcgccctttggggtaatccttggattcaaacacaaaataaacattattgggtcaggatcttcgctttgattgcctcgaaaaatgcaggggatatctgagccgggagaaaatggaatgcgaaaaggggcacgagtgaacttgatgggggagaaaaaatgggattttctcttttgggggggtgaacgcaacggggggcacggaaggggggcaacagcaaacatagggacgagcgggccgaaacgggaaagagaaaaccacacgggacctagaaaggagaaacgcacaagggagaaccaggggagcggaggggaagaaccgggaaaaggggccgggagacggcgaaggggaaaagagaggcgagagggaggggcaggagagcgagaagaagaacgagcgaagcgcggcagcaggaggaaaccgggacgaggggcgggcccggcgaggggggggg

SEQ ID NO: 125118 - DNA, 524 bp, Arabidopsis thaliana columbia
  unsure (1)..(524): unsure at all n locations
cgtaagctaggatcctctagagcggccgcccggggggaaaaccccccaaagcaaggaatatttcaggagaagggaggcgcaggaccggaaaacagagagacggggacccgcgcaaagaggaggcagagatacaacagcggcggcggaaaacacgcaggggggcaaaacaaacaccgggggggcacacctaaaatgaggggggggacaacgcccggggcgggaacnccacaggaaaaaaaaacgccaccgcgggggggggggcggccacccagaacgaagcagaacgccaaagagcgccacccccgccgggaggggggacgcggccaggagccgacacccgcgcccgagagagaaggagagagagcggaggaacgcaacccacccgacacaagccgaagcccgacgcgaaagaggcgacggcgggcgcaaacggagaacagggagggaggaggaagaagcgaagcgaccgggagggaccaaacgggagggagagacaagcgaggcgagggacggggaccggcgag

SEQ ID NO: 125119 - DNA, 483 bp, Arabidopsis thaliana columbia
  unsure (1)..(483): unsure at all n locations
gtacgtaagctgggatcctctaaagcgtttgcccttttttttttattctaaactgaatcacaaatcccatagctatttaaataaaacacagaaaatttaaaaataaatcaaaagaaccctgggagcttctcctttttcctggtcttggataaaagtcttctcctttcttcctactggtgggaaccgtttttttttttagggggcggaacaaaggncccggggacattacaaggaaaagggcctttatttgtcaggaaaattaataacattctcttttctctctgaaacaccacaattactaactggggacataggtcccgatccagcccagcccaatggagatgaaagacattggcttgaagaaacaggtagatgaaggaattggtctttccggggccaaagtgataggctccggacacgaacaagaaagccgggaaatgcaagctccaatgtatttcaatcgatcaggcattttggagaatc

SEQ ID NO: 125120 - DNA, 179 bp, Arabidopsis thaliana columbia
gtaagctgggaccctctagagcggttgcccttggtgtttatttcccaaagaccagaaactctttttagtatggggaaaagatcagaagaatctagcttccttatactgtaagaaaacatatacagttaccatgaaaactcccttcttcaagaaaaacagccccatagaaaaaaaaccta

SEQ ID NO: 125121 - DNA, 506 bp, Arabidopsis thaliana columbia
  unsure (1)..(506): unsure at all n locations
gtcgtaagctnggatcctctaagctttcgccctggggggaagcccttatccagcccccccttagaaagaaggggggacactcaccacctaggacgtggcgctactgccaagaaaaaaaaaccctcttatttataatcgaaaccagataaccagggcgcggcccacggcgcagggccacggcccggcgtttaataatttggggggggcgggcggggaagccgcggggattaggggcaaacatgctctccactccgactgggggggggcggggaccgaccatagaagatcgccgagtgtgagggtgagagaggttatacaaccagagcgcgcacccccgagccccttatggaccgtcgcaccgccacccgcagatgaccgggtaaaaacaaaccccatagcccggaccgcggcagcacctcttaacctccggacgtggagtgcgtcgacctcttgcaaggcctcatgcgggccgaaaccaagagacccccgcaacagaccctccccac

SEQ ID NO: 125122 - DNA, 442 bp, Arabidopsis thaliana columbia
atggcctggctagacattatcattagcggtgaaccataaggctgaatttgccaacatatgatcttagaggatcatacttgtacatacaggacatgaattaagccatacaaagaatggttaagaaacaaaaaaaagctattttattttggggggggggggaaggacaacgggcacgggtcgagaaccagagaccaaagctcgatgggaggggggcggaagccatggagccaccgcacagggagagaccaggagcgacccgaggagcagaggacaaaagaggggggggacaagggcaggggggagcgaaagggacgcggagaagagagaaagggggcgcgggggagagcgcggggacggggagggacggggaggagggagggcgggagcgggcgggggggaaaggaaagaaggaggagaggccgagacggagcggaggaccggc

SEQ ID NO: 125123 - DNA, 475 bp, Arabidopsis thaliana columbia
  unsure (1)..(475): unsure at all n locations
tacgtaagctgggatcctctagagcttccgccctgggggaaaaccctttttaacaaatacaaaattttaatctgggggggagatccccacaacatcgcgtaatcgaacacgggaaagccaaaacgcttttttgacctccccgtgcggaaaaaagaaacccgcgcaaacccccccaaacgggggttttctaatttggggggggggcgacgacgcaaaccacgccaaagccgaaaagaccccgcgagggggggggcggacccgccccaagaatatggaacgccacccgaaccggcaaggcaccccaacgccgcaagagcaacaccccagaggggcgcacaaaaacacaggcgcccgaacaaaagacaagcgcagacgggcggccaagagggcgcgcccgcaccccgggaaaagcacgcgcgcgccaacccgcgcccgcngggcgggcgccgagacgcggggaaggggcaaggcgccg

SEQ ID NO: 125124 - DNA, 486 bp, Arabidopsis thaliana columbia
  unsure (1)..(486): unsure at all n locations
cgtaagctaggatcctctagagcgtccgcccgggggggaaacccccagggaagaaaggcacccnaacngggggcggaaagacacggggcacggaaaggaacaaccacncacaaacaccccagagacataggaaaatggaattaaacatcctctgtttttaccaggttacaagcaaagaatatgattcctcctttagcgcgggggaggaacccaaaagcgaaccacttggtacggagaggaaaaaaacnccaaaaggcgagcggccccaccaacnaagccatagccaacgccaaagcacacccccgggagagaagccgcgcgaacaagacagcaacacccggaaagggaccctaaacgcatttctggcttccggacccctagtataccttaagggagctatatagcctatatgcgcacggcgagaatgtcacattagcacaccccccaaaaccatgaattggtacctaatcactgcgtaccctgcta

SEQ ID NO: 125125 - DNA, 480 bp, Arabidopsis thaliana columbia
  unsure (1)..(480): unsure at all n locations
cgcctacgtaagctgggatcctctagagcggtcgcccttgggggtaaaccctttttatttacctttttttttttttttggggggttaaattccaacatggaatcgacttcagactagcagctttgattggacaacccaaattggagcaaataaggatgttcttatgaactaaaaggggaaggaaatggggagatgtcctaatctaaaggagggagaggggncccagagaacaaaaaccctctcctggggaatcggaatttcaccggtgggtgggggggcgagggttcttttaggggccttaagttttctgggaacctctaatcggggccaaaaacccagaccatgtaaacaacacgtggatgagcagctgccccaaactttggggaagaagaaatgcatgatgggccggccacgggaagccaccccccgcccgatacagggaagaaaatccggcggggcctccagtgggaaaaggacaac

SEQ ID NO: 125126 - DNA, 278 bp, Arabidopsis thaliana columbia
  unsure (1)..(278): unsure at all n locations
cgaaagctgggaccctctaaagcggttgccctttttgttttattccacacaaacgttgacttctgatttactctgaatatctacattgnccaaagatgcatgtaaaacaaagaagagacaccgacaaatgggtactacaatatcccaaaaaggcttttttgttaagttttggaacaaaggctgcgttctttgcgagggagggcacaagacaaacccgaaaaaaaannnaggcgcagaaacaaaaagaaaaggaagagggaggcccaaaaccaagaaca

SEQ ID NO: 125127 - DNA, 490 bp, Arabidopsis thaliana columbia
  unsure (1)..(490): unsure at all n locations
cgtccgtaagctgggatcctctagagcggtctcnccttggggtttttccctttttttgtttttttttttttttttggggcggtgggaaatttctccatattttgggctgaagaaaacccaaaaccttttatggactaggaattggcctctaaaatattctgggccgccccaccaaccaaaaaagggagtttcctctttaacggggggggnagcaggcccaggcaaaccaannggcttggctttggggggggtctataatttacctatccgggcccacaattatggagagctgggcctatcctctcctggggtccccttgttccgggggtggggttcccactggcgttccgggaatttcaacctggtctacaaactccaaaggggagacgggctcattcgggaccctttaatcgtgggggctcaccatcccccttggggttaaacccttccgggtgggcccttgggtggggtggcaaattaaagggccttc

SEQ ID NO: 125128 - DNA, 480 bp, Arabidopsis thaliana columbia
acgcgtacgtaagctaggatcctctagagttttcgccctttggtttaacccttttttagggtctgaattcatttggcaacagaaagaacacattttttggtgcatatattgaaggtacaaagcgattaaaagagcttataagaaaactcgagggtttgtgagggtaacgcgaacgaaacggaagagggatctataattttgcgggggtgccaacaccccgaccggaccgagaaaaacacccccacagcagcgagaacttgaatacaccacataacttgtgaaatttggccgagaataccctggaacacggacatctcgaaaccgctcgccagaagctatttacggaatcgctcacaaggctctcggcaaagtcatcatccaccgccggttcttcataaccgggaagtaccacttatctcttatatgtaacggtcctatctaaccactttaatctctctgatactattaacccaacttccc

SEQ ID NO: 125129 - DNA, 401 bp, Arabidopsis thaliana columbia
  unsure (1)..(401): unsure at all n locations
cccccctccgtaggctggaaccctctagagctttcgccctttgtggtaatccctacacacataacatntgcatttaattaatgcaaagttcaggcactcaaacatggcctaccattaccagaacagggtcgggccatgcagataccaaagatacacacagntatcagtccagcactatcctgctacttaagaatatatatatgacgggggggccaaggacgccacgaggatgcccgacggcacgagatccaaaacaggggcagaagaacttctaaacataactggagaaaagctgtgtactcattcgcccacgaggagcagcgtcaacaagaagacccaccgcaagagctggaggcgtggaagctcgcaatccaacatgaataactgaaaagtaatagtcc

SEQ ID NO: 125130 - DNA, 474 bp, Arabidopsis thaliana columbia
  unsure (1)..(474): unsure at all n locations
ccccgtacgtaagctgggatccctctagagcgtttcgccctgggggtttaaaccctccagcctttatttataacaatacaggccgggggaactctctgtttccccccgcgcccttcttaaaggaacataccgcccggctctaagaaagagaaccttgccaaaggccactcccaaccaaagggggccgggcgaagaaccatttaatanctttcgggggggcaagccccgcaaccggaacgggagaccaccccaagggccgcacaaccggaggagcgggcggcggggcacagagcccgaggcaccngaaggagagagggggagaggcacaagggccaccgaccaaacccggaagcccaaggaacaaagaccaacgaggagcggccaccagagagaggacccggaccggcaccgggggcggccgaacccacaaggcaaggagaagaccgccaagcgagccaggaagcgaacggcccc

SEQ ID NO: 125131 - DNA, 477 bp, Arabidopsis thaliana columbia
  unsure (1)..(477): unsure at all n locations
cgtaagctgggatcctctagagcgttcgcccttggggtgtaaaccctttttatattttttctttttttttttcgggaggagaaaaatgcatagtatttgagattaagagtatgaagatgatgtacaaggaaaactcataggaaacatctaagggtcatcatcgtggagaaggcggctctggggtttttatctgggcggggagngggcaaaacnaaagcccgaacaccctaacggggccgaacccccgagggggggaccagaccggaatccaaaaaacccccccactcaagggaaggcccgaggggggaaagaacaccaaagcggccccccccacaaacccagggaacgggccgaggaccaaaccaacaaaaagggcacccccagggggggccccgagggggagggccgccccccgaccacctacctgcaggggagaacaaaccccccaaaccgcggccaagagggaccccaaaaaac

SEQ ID NO: 125132 - DNA, 457 bp, Arabidopsis thaliana columbia
  unsure (1)..(457): unsure at all n locations
aagctngggatcctctagagcggctgccctttgggttttattcccttttaacggaggaatcgatgtagtgggataaaaagattcaactttaatttttcttacaagacatataagacaagttaggttaacataagacaacaaagagactacatagagtttaattaaactacaataaacaccagattttttctattaggggaggaagannagaagggggtnnaggcccagagccagaaaccctccggccatcggggatggancaagnacccacccacaccttggcattggtttctcacaccaatcgtgaaacaatctggaccggtggtgcaacgattcacgagctcctctgatctgtagggccacaaagcaagagaagagtggggagaattcttttgacccaacacaagaaccgagacttcaagttctttacttgggtaacactgggggtagcttgggg

SEQ ID NO: 125133 - DNA, 401 bp, Arabidopsis thaliana columbia
  unsure (1)..(401): unsure at all n locations
aggcgaggggggcgggggcaccacacacccggcggcagaatatgagacgcacgaccgccgagggggcgcggccccgccccacgaagagctagggactaccccctcccnaaaagagggagggngaaaaaangaacacaagaaaaangccacggggaaaaaaacacgcccccaccacggggcggggaggggggcgaagccccaactactgcgagggcgcgccggccancgccaccgaccgacaaacgagcgcgccgcagcngccgccancgacagaggaggcacaaaacccgacagagacaaagacaagagaaacagaccaggaaaccgcgaggagagacaggagcaccacggggaagggagaagccaaagaaacaacgcaccagaaccacacaccacgacgc

SEQ ID NO: 125134 - DNA, 442 bp, Arabidopsis thaliana columbia
tagagctttcgcctttgggttattcctgccataacaacatttagaaacagtaggggtcaatacagtgctcaaacggagaagagggaacagagaagaggaagtcgttttcatagatgctggagacacatctactgcacccgccgcgcctacccaccccggtccgcttttaatactcccgggggggggccccccccaaggagaaagacgaggaagaccacaaaccgcgaacaaagaccggggagaggggagaccgcgaacaaaaccgcgagaaggagcgcggaaaccaagaggggagagcagaagccacgaaagccgcaaagccgcgcgggccaagaaagaggccacagacgcccgcacgagcgcgagccgaggaaaggcgagccacgggaagaagggaaagggggagcaccgcgacgagggcgcgcggaaacggaacagaggg

SEQ ID NO: 125135 - DNA, 480 bp, Arabidopsis thaliana columbia
ccgccgtagctgggatcctctagagcgttcgcctgggggtaggcccccattccccccgcttttctctttcggcgagaagaatatccacttttctactttcctagtgcgaaaacaataaacgcacatccacttttctcctttgggagagccttctcttcccctggaagagaccggactttggcgatttatcatctgggggggggacctgccaaccgacgcacgccagaaagcaaagggcttcccccgcagcccaccccgcgcgtccggattgaccacagacggactggccggggcgtggccgaggagcgggagcgcaaataccgacaggcgcgacccgcatgaccgtgggaagggggggcggaggggggggggggtataaaaagacccatggtcccgtgggcgggatgggcgtacggcgccggggccgaggcgcagccccggtccactggccgcgggcgcccgcggggaactcacatcgct

SEQ ID NO: 125136 - DNA, 390 bp, Arabidopsis thaliana columbia
  unsure (1)..(390): unsure at all n locations
aaaaagacaaaaaggggggggcacaaaccaacaacgggaacagggggggaacaagcaagccggagaaaggggaccccacaaagcaagcaggagaaaggggattttttttttaagggggggaaggggaaaagggccaaaaagaaggccaaaacccccggaanaaagaggggcccaacaaggccaaaaaaagggcccaggggagaaacagaggggggaaaaaaaaacccgaagcaagccaggacggggagaagaccggccgagaaccccaaaaggggccagggaagagaaaaggaaaaaccccgagcaagggccaagggggaaaaaaggggccccgcgggaaaaccaggccggagcccccgagggggcgggaaagggccaaagaaaaaacga

SEQ ID NO: 125137 - DNA, 467 bp, Arabidopsis thaliana columbia
  unsure (1)..(467): unsure at all n locations
cgtaagctgggatctctagagcggctgcccttgggggtgaatcctttttatttttttttttttttttttttgggggcccccacccatgaacagggaattttattttatttaacactttggtattcgttttccaagggctcctaggaacaaaatcccggagggataggaaaaaagtgggagcaatttcatatttaaaagggccataacatnnattaaaagctaaggggggggacaagaaatggcctacattaaaggcgccacacattacctacggaattaccgccggacaaaactgggaaaagaggacaactaacatcccaaggtttgaaaatgggtttttggaacacctgactgggggctctggtttcaagggggctgggggtcattttgagaatagggatgggacccgtttgggaaaatgcacctttcccaccctttaaactttggggggggggatttcccacggg

SEQ ID NO: 125138 - DNA, 420 bp, Arabidopsis thaliana columbia
agccctcaggaaacagaatagggataaagggcgggcggggggtggagaggcggaatcgcgtccgcggccgtgagggagaaaaagggggcgggaggcggcggttgaacgcggtgagctgaagagagaagtccaaagaaacgcgaagaccgaagaggccggcgggtttttcttttcggggcggcggggggagaaaccaataggaggcgaaaaaacaggccgcacgcgcgcggcgagagagggaggaggcggaggcgaaaggaggagaaagacggcgcagtaaaagcccaagaacgaacgacggggaggcgaagggcgcactaaagcccgaataccgcgaaccggaggtagaggctgtaaattatcagcaccacagcgaccgacgtgaaaaaaggccgcggaagtacataatagccgcgagag

SEQ ID NO: 125139 - DNA, 491 bp, Arabidopsis thaliana columbia
  unsure (1)..(491): unsure at all n locations
acgcgtacgtaagcttggatcctctagagcgttcgccctttttttttttttctgagttatatcaacattgatatatatcatgaatggtgagtgatccaaaacaagaaatgaatacaatacaagaagatctggaatttgttcagactaccattcaatacaactacagtttccatggctcccgaaacaagnatttaataagtatgggggccaagnnaaaaaatgatgaattaancttcttcaattttaaacaaccattagcggacagaatccccgagaccgagaaccaaaggattctgcgaatatttaaagaaagaaccacctgcttttacatttctatttaccttttgggaaccaaatcaagctttggtgctcatttttgcctttcaaattttggtctggactttttaattagcttggctttatcttggaattggttcacaagcttccgataattaaaacccaacaattaatgggaagaaccagccagccat

SEQ ID NO: 125140 - DNA, 481 bp, Arabidopsis thaliana columbia
  unsure (1)..(481): unsure at all n locations
cgtaagcnggggacctcgagagctttcgnccggggggaagacccctntgatgaaggagggggggattagaagagggaggcttatgaatactgaggaagatggggcaggattattacaaccaaaccttccaatggccgcaaagggacatacaggaatggggcggctgcaagaccgggaaaaccttatatttttgggggggggaggaagccgaggggggcagcggagcctaacagcacacaggccaaaggcgggggacgacccacgagaggggggaggggggaccagggggggcggcaggggacagagcgccccgaaagcgcgcggcgcaccggcgccagacccggagacggaaggaagaggccgcaccggcagggaaaccaccgcccccgagcgccccaaaccaggaagggggagagacgagggcgacaggcggcgggggagcaggcggccggggcgcaccgcgcgcgcagccccacggcgc

SEQ ID NO: 125141 - DNA, 500 bp, Arabidopsis thaliana columbia
acccgtacgtaagctgggatcctctagagcgtgtcgccttggggtaaagcctcttttacgggagttttggaccaaagaggcaaattgatagacagcgagaagctggaacaatacaaaacgtccgaaagattacacgcaaaagaaatttaaagaaggccatgcaaaaacccctagcttaattataacaactttttcttttttcgggggggggcactcgcaaatcaaaaccctagataagaaacaaaccctgagaagcaaagggtccacatatatattctgaattcttacaaaggggctcacgaaacggcacgtgatgattccgcgcatgcgggcgagcaaggggggatgtagcacgatcaagggggcgggagggtcccaaacgaaccgatggcggactctctgatgtaacgagcaaagaggggcgggtgggagcgggagggagtgtgaagatagctgaacaggttaaggtagcagggtgtgatacagggaccgaggaagct

SEQ ID NO: 125142 - DNA, 484 bp, Arabidopsis thaliana columbia
  unsure (1)..(484): unsure at all n locations
ggacctcaagagcgttgccctggggttttatccctgtagaaacaaaatatttattaagttggatcatcttttattaaatacagtaggtagaagctcctttaatctatggagcaagttgaaagaagagacatgaagatgatctcgatggggcataaagggggctgggacttttttctaatggcggggggggagccccggccncaaagggcagaccggagcggaggacaaccgggggcgggggggggccacccacgaacgacagggaccaaaagccagaagccgggagggaccccagcagcagggacaaaaggggaaaccaacgaaaccaaggaccgaaccggaccggggccgccggagcagaanncgacacaaaccccacaagagaccaaaccaaagaccccaagaccggagccccgccccaccgggaggacccggcggagaaaacaaaccaggacgggaaagaaaaacaacccgggccgcaaag

SEQ ID NO: 125143 - DNA, 410 bp, Arabidopsis thaliana columbia
  unsure (1)..(410): unsure at all n locations
gtaagctgatccttaagcgggctgctnggggggaacccctnccnnttttatgaactggagttatttttttgtatcatcatattcactaacgtacatcaatttaaacttttttttaaatgcataccctaatataataaggcctttaaggaattatcctattgacggtgtaaaaancaatttttcaagcaagctcttaaaggtttaccacaaaaacagtggttaaacataaacgacgccgcttaaagatgatcaaccggggaacctacccgaatcctcccaacagagatggttatggctaagatccaaatgaccaataaacgacccacctgaaatcgatctgggtattgggccttttcagattattatacgacaaatcaaaaactgtgaaggaagaccttgggccaaacccc

SEQ ID NO: 125144 - DNA, 501 bp, Arabidopsis thaliana columbia
gtagcttgggaccctctagagcgggcttcccttttggtttttttttccttataaccacaccacattcttaattcagaaattaaaattattttctaagcaagatctatacatttgaactggaacaactggcctgaggagattccggcagaaacatttctctatattatacactaccagaaagatcatggaagcttttttttttatccagacgttgtgcatcatatggcttttcctttccttctggttcttctgcattcccattctccttcagcttatatgcaccatctacatacaattccgtgtcccacaggaatgtcccaaacgccacagcctcgagaaccaaccgcttcagactcgaaaacgatgtcactatggtctcatcactctcttccgtgccaaaaagagccaaactttgcttctctatcagattccttgcctcctctggccttggttttgcgcatctctgcaatgtctcgggatcaaagtctgagaagtaatggc

SEQ ID NO: 125145 - DNA, 515 bp, Arabidopsis thaliana columbia
gccgggcgcaacccgcgccgccgccggggagggagagcgcaccaggcgacgttttgcaaaggcccaggcgaagccggggggcaacccgcgggcgggagagacgcaagaccaacagacgaccccgagccacacgcgcggcggcccgcgcgcggcccgacaaggacgcggacgacagaagaccgaggcggcaaaccagagcaagcgagcgcgaaccggaccggcgcaggcgcgcgcacggagggagggcacgcgccccgtgtcggcgccggcggggggaagggccgcagaggagacggaagagaggcacccacacgcacggcgcgcgcgaccccgaggccgagccggcccgcgggagagccgcgagcaggggagagagcacccgcgcgcgcctggcggccgcgcgccccagggcccggccaagagcggcgggcgcgccgcgcagcggggagaggaggggacccggccagagcccgactgcgcagccgagcggcgcgccaggacacggcagcaccaag

SEQ ID NO: 125146 - DNA, 317 bp, Arabidopsis thaliana columbia
  unsure (1)..(317): unsure at all n locations
ataccccaaaccatattgatttcggaggggggttatctcaattccctcataggggaataaaaggacagaggaccctttgggttcagaagaaacccgaggtgcgctttaatggtcccgaacgggcccgaatttagaggtttataattttggggggggggggccacacgcggggggccangaagagcgagaggacggcagcaccggaaacgggcgggggggagggcgccgagcgggagaaaanagggggggggggaccaggcggggagagggcgaacgggcgcgagagaaacgcagaaggcagcggaggagcaataggg

SEQ ID NO: 125147 - DNA, 531 bp, Arabidopsis thaliana columbia
  unsure (1)..(531): unsure at all n locations
ccgaaaganaggaaccaaaagagattttcgcggggggggagaaggcggnccaccccaaaaagaaaacacaaaggggggggaccaccacccgcccgcaccagacgcacccacaacaggagcgaccgccgcacgagacaaccaccgaggcaagacggacggaaggcggaagaagaacccgaaaagagcccgggttcctaaatacggaacgcagggcgcacccccacgcggagcgagccgagcgcacaaaaacgcgcccaccacgggggggggggggggcaaacccccaaaaggaaagacgcaaaagcgccaggaaccaacaaaacaacacaaggaaccacaaaagaacaccggacacaaacacccacaaagcccacgaaaaaccgcacccacacgcaacacacagcgaagagcaagacgccagagaggaagagagcgccaaggaaccacaagcaacacgccagacgccagagccagcccaacgaaagcaaggaacgcagcgaaccaaaacgcgcagggaaaagcaacagcgac

SEQ ID NO: 125148 - DNA, 478 bp, Arabidopsis thaliana columbia
  unsure (1)..(478): unsure at all n locations
ggacgaaagcagggaaccacnagagcgttcgcccggggggaaaaggcccngacccccagaaagaagaaaaaaacgggggaaaaaagggccaaaacagcgggcgaaacgaaaacagaaaaaaaaaagagaaaaggagcaccgcggccccaacaccccgaaggagaaaggccaccggggagcgaaaaactcctcataggggggcggggaaggcacccgcagcacggggaacaaaaaaaagcgcgggcaggggggggggggcggcaacaacaaaaaagacacgaaaggcgcaagccaaagcgcgaacagggcggggaaacggcggccgaaagggaggggcggaagggggccgaaacccgaagcgaaagaagggacgaaaaagaaagaagccgggggccggcggggcgggggggacggaggggaagcagaagcgcgacaacacacgcaagggggagccggcgggagaagggcaagcgagcag

SEQ ID NO: 125149 - DNA, 473 bp, Arabidopsis thaliana columbia
  unsure (1)..(473): unsure at all n locations
acgcgtacgtaagcttggatcctctagagcggctgccctnttgtttttaatccttttttttttttttttttttttttttttttttttgggatggggataaagaccttacatagtacatacaattacaagaatgataacctttaggcttgtatgtttataatggatgcttttacattcatatcaacaccgactttttttttggagcgctagngggagactactggggtacaacaatttgataccaaaagctaccagagtgtaggaaaaatttatttaaatggtggggggcgggggggtctgattaaaagaagttccacttttgttcaccttcgccaaaaggaaacccaatgcgactttaccccctaaggttgagggaccacggaacaagcaaattgcaccggccacaagtcctaaccttttggtttaagtttcgtagaggggtttttatttttttcttttgttggggggtaaaa

SEQ ID NO: 125150 - DNA, 422 bp, Arabidopsis thaliana columbia
  unsure (1)..(422): unsure at all n locations
cgtagctggatctctagagcgcctccttggggnaagcnnnnnngnttagtgtaattattagattactgtttgactaaagacccaagaacactttattaatgatgtaaaaaaaaaaaactgatatcttattctgaaatcgaattcgatatccaaacgcttattttttgagctgttgcagtctacttgcaatggtcccagatgaacctcattaggccatcagcatcctcagtgttctagctgtagccccacaaatgcgctaaaaactggtgtgcccgaggataccacccggcctgcttccatgaaacttngtatttgcccgggttttagtaccctttcattgcccatgtttgggagttgcaacctttggccattgccgagaattccttgagcttttttgtttccaaatttatcaagatgatcag

SEQ ID NO: 125151 - DNA, 497 bp, Arabidopsis thaliana columbia
  unsure (1)..(497): unsure at all n locations
nnnnnnnnnnnnnnnnnnnnnnnnnnnnnnnnnnnnnnnnnnnnnnnnnnnnnnnnnnnnnnnnnnnnnnnnnnctttttttttttttttccactctatattgaatgacacgttaacaaaactctttctttggttcagattaaaagaactgagagcaatggccttataaaaagatgattgggcataacacaacggcaagggactgacatcaaccattgctgtctgatggaacagaggctgagccaagtactgctgactacaggatgcgaagcgacaccaagcaagctccactgtgggttgatctgcataagaaagggccatgcttaaccttgtggtcactccttcgggactgctgttcaagagcgcgagaccattacctgcatagacgtgaactttatgtgctattccagacgctttcagcttcttttagagattctgaggtgacgtgacattagaaaatccgacaaagttgtcgagctctccaaaatgagcctgaa

SEQ ID NO: 125152 - DNA, 522 bp, Arabidopsis thaliana columbia
  unsure (1)..(522): unsure at all n locations
nnnnnnnnnnnnnnnnnnnnnnnnnnnnnnnnnnnnnnnnnnnnnnnnnnnnnnnnnnnnnnnnnnnnnnnnnnnnctttttttttttttttttatgtttaccacaattgtcttttatttttttcaaaattttcgcattggaacactttattttacaggcaaagttttatgaaattctatggactttctcaatggagaccaagcaatggccgctttcgaaaaatcacattggcgttatatataatggcaaagtttattgggataattaagcttatgagcagaggccaaaccatctgggatcattttaacataatccaatactaatttccatagggaaattagtcagaagcaagggtctttaaaagggttcttaaccgggtctttcagccggccaacctctggaagcaatcttaaagaccttctcaggcagcccattagcagacattgtcatttcccaatggtgccttggctagaccttgacaggatgcatcgtaccgcttccaccttgaaaaggcagacacc

SEQ ID NO: 125153 - DNA, 479 bp, Arabidopsis thaliana columbia
  unsure (1)..(479): unsure at all n locations
ggttttannnnnnnnnnnnnnnnnnnnnnnnnnnnnnnnnnnnnnnnnnnnnnnnnnnnnnnnnnnnnnnnnnnnnnnnctttgtttttttttttgtttgtttacttgtttttcttggaaaattaagaaaatttcatagccgagccataaattaaaaccctaattcccatatgacataaccctgaaagatacccaagagcataaaccctgtttcacattacaactactactactacttttcctgcattacaaaaccacattgcaaatctaagaactcgtaaacttcgtaaccgccttagtcccttcagacacagaatgtttcgccaactctccaggcaacacaagtctcaccggagtctgaatctccctagaagtaatcgacggtttcttgttgaacctcgcaagcttcgaagactcaccagcaagtttctcaaagatatcattgatgaaactggtcatgattcccatggttttgctgg

SEQ ID NO: 125154 - DNA, 494 bp, Arabidopsis thaliana columbia
tggacttgcctgcacgccttccttaacctggattcttttaaaccggccggcccttttttttttttttttttagaatgaaccttaattctttagaatagggaaagggttttggaccacctttttaattcaccaattccttaaaacttaaattccaaagctttaaaatttttactttaaccaaagctcaaccccaaactaccacctatttttttggcgggttaggctttttttgaaaacttgcctggtgattgggtagcctttccttaagctggttaagtggcaaacttcttaggcattagaccagagttgatgttaggcaaaacaccaccgtaagcgattgtgacaccactcagaagtttccccatttcttaatcgttccttatcgcgagaagaagatgcctcggaataatcctggattcctggttatctctcgaagcgttaccagaaagctccaaaacttttgcggggaggtattcaagaccgggggccatgta

SEQ ID NO: 125155 - DNA, 505 bp, Arabidopsis thaliana columbia
ggcgacactatagaagttctatgacgtcgcatgcacgcctacgtaagcctggatcctttagagcgggcggccttttttttttttttttatcttaaacgagtttattttttgaactacattcaatgcttttaaaccggacttaaaatcgaggggtaaccgaagaaatagcagagggtttattttttatcaatcgaaaaagaaccaaggtaaaaccacccaatttaattgtcttggagggcgggcttttgagggggaacaattttcaattggggcctttgaattttttaacggcttttggcggttttttctttttttggtttttgggcagtttttttttttggtggcgaattaaaacccaaccaatccaggtccttccttgttggtccggtttggcctggttttggcaccctatggtttggttaagaagctggttgtttctttagctcctttttttaaggctttgaaagtcaaggggtttaactagcatggaggcttttggctttaa

SEQ ID NO: 125156 - DNA, 512 bp, Arabidopsis thaliana columbia
ttaggacacactatagaagatctatgacgtcgcatgcacgcgtacctaagcttggatcctttagagcgggcggccttttttttttttttttattttaaacgaagtttttttttgaactacattcaatgcttttaaaccggacttaaaaacggggggtaaccaaagtaataggagggggtttattctttatcaatcgaaaaagaaccatggtaaaaccaccccattttattttcttggagggcgggcttttgaaggggaccactttcaattgcggcctttgaattttttaacggattttggcggttttttcttctcctggtttttgggcagtttttgtttttggtggcgaattaaagcccaaccgatccaggcccttccttgttggtccggttttgcctggttttggcaccctatggtttggctaagaatctggttgttcctttggttcttttttttaaggcttgggaagtcaaggggtttaactagcatcggggcttttggttttaaaggct

SEQ ID NO: 125157 - DNA, 492 bp, Arabidopsis thaliana columbia
tggagttgcatgcccccctacctaagcctggattctttaggagcgggcggccctttttttttttttttttttttaaagaaccttttttttttactttttaaaatttttattttccagttttaggggacctaacaaaccgtatccaggttctggaggttggcagtcggccaaaagcaaaaccccagggggggcgcggatcctggcatttttttttagggggggcttgttactggactgcgagcactaattaaaatggcggagccctctttaaccctacggtttccaggttaaccctctttgttagttcaagtcgaccagtttcctcttccggcgaagcaaggaattgcactgaagttctttggtgaagccatttttgaacaattccgtcagaaagcaggtttttttttccacagctgaatccatatttgcgggaataccaaaaccgtaatgggaagggttccgaccacagggaccattcgacaaaacaccaca

SEQ ID NO: 125158 - DNA, 408 bp, Arabidopsis thaliana columbia
  unsure (1)..(408): unsure at all n locations
cggggaccaccggaggccccncccccagaagccggggcccctaaaatttccccccccggtttttgggttttttaataagagaaccaggaggcgaccgagagagaccgccaggaaggaggacccacaaggagaggcacaaaaaccgcccaagggaaagagaaaccaaatgcagaaccaggggaggacgagcacaaagacagccggggggggaaacctttttttagagggggttgggaaaagagaccaagacgcgagacacacacgaccccaccagcacaaaaccctaagcgcgacggagagagataactgagcacgcccgccatataggctggagggagagcgaagagagaccccagagcacaaccccaagcagacacccacggccagagccagcacccggccacaaag

SEQ ID NO: 125159 - DNA, 523 bp, Arabidopsis thaliana columbia
  unsure (1)..(523): unsure at all n locations
cggatcttnnnnnnnnnnnnnnnnnnnnnnnnnnnnnnnnnnnnnnnnnnnnnnnnnnnnnnnnnnnnnnnnnnnnnnnnnnnnctttgttttgtgtnttttttttttgggcaatacaactttagaaatctttattggatactttttttcatggaaacaaatagccccagtcccgtcgggaaagggccaggaaaaaattcttggtcccttaaccgcgggggcgaaaaaaaaaaattttgtttttcaaggagcccccacagggggggacaccgctctcaaggggggggcccttccaagggggtttttcacaacaaaaatgaactttggttccttcgccccccaaaaacacaaaagggggggaaaaccctttttataacaagagagcgcttcccggggggggggaaaagggtttanaaaaaaaaaactcccccccgggggggggccgcccccccacaaccccagggtttgtttttttttttataccacccccccccttgggggcccctgggggcccacccccccc

SEQ ID NO: 125160 - DNA, 259 bp, Arabidopsis thaliana columbia
  unsure (1)..(259): unsure at all n locations
ctaaatagtcgacgagagacacagcgtaggcatggtggactcgctttgccgaggacatgatcaagcacgcacgagagaaacagagaaagagcacctgccgaagatagtaatatgtaacgagcgcagatcccgcaaagtcagaatgcgtgtcgtgcgcgcgacaggcattcgattgtccncaggcgcatatagctcgagccccacgcaagtcgtcgagcgctcaggacatcgatacagacgtacactctcgacgctagac

SEQ ID NO: 125161 - DNA, 502 bp, Arabidopsis thaliana columbia
acactattagaagatctatgacgttgccatgccccccttcgttagcctggattcttttaaacgggcggcctttttttttttttttttttaccaaattttttaccttttgattggtttgccccccaggggattaacccccttttttccatttttaagttttaatttaaattcaaccacaaggttccaaattttccctttttgtacctaattaaattaagcattacttgttgtaaaggatatggatttatatttccgttttcaagtttttttgtggatttttttccagaatggatttgggttttggttggggagtagtttaaccaaatgttaatatccccagtcttcccaagcttgacggcattcaattaaacaacggactggaggatttcttaaaaggaaaaggaatttttgagagacattgatgaatatagatgagtgaccaatgccgttgttctacgacattgtaatgaaagagaggaactcactgcgattgaacaggcaa

SEQ ID NO: 125162 - DNA, 441 bp, Arabidopsis thaliana columbia
  unsure (1)..(441): unsure at all n locations
cactatagagatctatgacgtcgcatgccgcgtcgtagctgatcttagagcgccgncttttttttttttttttttagacttttttttcttttagctttagtttaaattaggggacttccaaaggttcaggttggaagtgcgggggccaaaaaaacccagggggggcccgacccgggattttttttaaggggcttttaaaggcccccggggaaataaaaaaggggggggccccctttccccccccgggggtttataaaacacccccttttggttgatatttaaaaaaaattttctccccccccgcgggggaagaaaaaaaaaaaatttggaggattgtttttttggtggggcgcccctttttttttaaaacacacccccggtgagaggaggggtttttttttttttttcccccggcgacgcccacaaaattattgggggggg

SEQ ID NO: 125163 - DNA, 494 bp, Arabidopsis thaliana columbia
acctatagaagtttttggacgtcccaggcacccgtccgtaagctgggatcctctaaagcggccgcccttttttttttttttttgtcctgggaacccaaacacataaccttaattggagcggcccttctgtgtgtcttacccatgataacgggaccaaattcttatttaaacatcacaatattcctacagaagagctatgcctcagtacgtgaacacactgcctagtgaggaggcggagagaaacattcaatgtggatgagcggctcctcagatgatcatagagcctttgtctcttaaccagactgagatcacgaaaatgctgacattttctctttagtgttcttaacgaaaagcatattctctctgaagagaatatgaactatcacacatatcttttccagcgcgcgagagtgtatgaccaaacgcctcacagagcgctggatccatcgcgtatactactaaggactccgatgtcgcctatggggctaatcact

SEQ ID NO: 125164 - DNA, 522 bp, Arabidopsis thaliana columbia
  unsure (1)..(522): unsure at all n locations
tttagggggccttttgaagatcttgaccttgcatgccccccttccttagcctggattcctttaaagcggccgcctttttttttttttttttaattaaaatcaatttcttttaagggattaaggggctatgtaggggttaccttttaagggttaaaactcattctaccctatgatttaaaaaattttctggcaatgtaaatggccacctttggaaactggaaagtctcaattttaacccattacccggaaccatcccttccatgtattcatggaagttttaatcatccttgccttctttatcagcactttccaacttgaactttctggttttcccttttctcctatcctcttcgtcagggtcatattcactgtgagatggactccgattccgttcctgttttttctttccattactctctgacctttcaccctcttttctttcggacgcgtggnnnnnnnnnnnnnnnnnnnnnnnnnnnnnnnnnnnnnnnnnnnnnnnnnnnnnnnnnnnnnnnnnnnnnn

SEQ ID NO: 125165 - DNA, 102 bp, Arabidopsis thaliana columbia
tatgccggcagcagataatgaactagcggctccgagttattactgtgaaagtgccggcgccgagcgagaagatgacgttagtattagcgagcgtatatgaca

SEQ ID NO: 125166 - DNA, 306 bp, Arabidopsis thaliana columbia
acactatctcatcgacatcgtaaggagacgctgcctccgttgggatgcctcacatagcgtacgccgtgaagtcacaaatgccgctcgctcgcctcgaagaccaaccaaggcaaataactcttcttatagggtatgcgtcgacgtatgtcgtagtgagtgataccatgtcattgagttgatgacggttgtctttgcttgcttacttattgctcctcagattctcttagcttctcgttacgcctacgtcaccagtatctctaaattgatatgtattgtgagagcccgaatagttcctaggcagcggcg

SEQ ID NO: 125167 - DNA, 240 bp, Arabidopsis thaliana columbia
ctattatgatatccacatgcgagtaataaaaaagagcgagagtcacgatggacgacgcgcacttcgtcgtggtcggtttgcgacagcaggagcagacagctgtcatacatcgctcatgatatagcgtattatgatctcagacagcaagtacgttctcatacgtaaagacataggtaatctaatgtctggtaattcttcagtatatttaggcgtgtaagacgatattaactaatatcagtg

SEQ ID NO: 125168 - DNA, 505 bp, Arabidopsis thaliana columbia
  unsure (1)..(505): unsure at all n locations
gcnnnnnnnnnnnnnnnnnnnnnnnnnnnnnnnnnnnnnnnnnnnnnnnnnnnnnnnnnnnnnnnnnnnnctttttttttttttttttttttaagatggcgatgaatgagtgacctgcccaaatgcgacctttttatgttgatgcatatatgtaccaaatcagttcttgtcaggaccgatgtacgataaaaaaaactgggtgaaatctgtacacttggctctaagactatgaaccaattggctaaagcctgcctgaagaagttaaaatttctaaagcagcttttaatatattggggttagttagcgggactcctgggatcgttccttatttgattctggtacagaggcagagaactcagggttaagaatttgcgttgacgctcttttgtttgctttttacccttttaggacctttgaggggatctggaccatgtgcttcttcattggcttactgaggagctctagctttaggatcagaagcagctctgctctttatatgactgga

SEQ ID NO: 125169 - DNA, 534 bp, Arabidopsis thaliana columbia
  unsure (1)..(534): unsure at all n locations
cgatactnnnnnnnnnnnnnnnnnnnnnnnnnnnnnnnnnnnnnnnnnnnnnnnnnnnnnnnnnnnnnnnnnnnnnnnnnncccttttttttttttttttttttttttttttttttttttttttttttttttttttttttttttttttttctaccaagaaattggttttttttaaccgggtatacaaaccataattttttaaacatctggattttacaatgatacaattttttttaggtgtttaaattggaaaaaaacaatttttgtttttaagttcttgtatcccaatgacaggtttaagtttactgagctgctcgaggtttggttaacataggcgtttcaaaaacaggaaaccgatgacaaagcaaacgcttgaaaaatgatgcaggttttatcgagatttggactttaacaacaaacatagcggcggttatgttacttggatcttgcgaagctgaccgaatgttgaacaacaaactgttgggataatcttccattggggtgtggaacccatccgccacatgctttaggaga

SEQ ID NO: 125170 - DNA, 523 bp, Arabidopsis thaliana columbia
attaggtgaactattaaagattatgaagttgcatgcacgcctacgttagcttggattctttaaaacgggccgcctttttttttttttttctttaaaggaatggtcaattaaatatagggggaaccaattagggtccttttcccggataaaggaattttaatttacattttaccttcaacaaaattcaattaggtaaaataaaacggcccggcaaggattttcctcctttttttggtggtggggtagtaaaaaaggttaacttaattccaggcttttcaaaggaatggattaacaagttccacggtttggttgggaattaacctgcaaaatgtaccgccttgaaaccattgttattgttggaaccgtggcaaatccaaagctggataataaacaaagctgtgcagcctttttttaggctttaattttttatccatatgtttcctcctattagccggacaaaccgtttacagagagctagcccaagtcctccacggaaatggttcctctgagttccggtccgagg

SEQ ID NO: 125171 - DNA, 482 bp, Arabidopsis thaliana columbia
tgaccgtccctgccccccttccttagcctggaatcctttaaaccggccgccctttttttttttttttggatcctggagaataggttttttgggccggggatattggcctccttaaaatttggaccaagaaacctggctctattggaaataaagcgggccaggtttcttcagggttccaaccacacttggggaagggaccaacctgaactgactttcttaatccaaaatctggaaactggttggccagggttggctccatacctggcatggacatcatggctgttagctcagcatcagtcacttcacagtcctggggggtatcctttattttttccgggtcatagccaaattgtgccaagtagttcttgtactttgcgatgaactcaggtcctggatttggcgtccttgagtatacctgaacaaagcccttgtctttggctccagaaacaagtgcgtagttgtcgtagtctgtggctatgaca

SEQ ID NO: 125172 - DNA, 510 bp, Arabidopsis thaliana columbia
tttaggtgacactatagaaagactatgacgtcgcatgcacgcgtacgtaagcttggatccttctagagcggcccgccttggcttctgttggtcttgtaccaaacccactgtacacatttgaccaaaaaaaaagagggttctgttccaatcaaggttgccaccacgggatttttacaaaggtgctttttagcggggcaaagaccaactatctttctccgtttttatttaaattataatttgccggtaacttttcggggacgaatttggtggccaaaggcccaaaaatattttaagaggtctcccacttggtagcgagggtcttcaaatggtcctttccctttgacgacaggtttgaccgaggaatcaacccttgtggaactggccgaccttttcgtattggacgggatgaccctccattttggtaaaagcacgagcttcattggcctggcccactgggtactaattgccaccaggggaaacaaagtcttgtgtttttccaaatggactatc

SEQ ID NO: 125173 - DNA, 516 bp, Arabidopsis thaliana columbia
ttaggtcgacactattagaagatcttgacgtcgcatgcacgcgtacgtaagcttggatcctctagagcggccggccttttttttttttttttttttgtaaatgacagtttctgattattccttcaaaatataatttgaagtttttaatcttctaaagggaataacaccgagacgaagcacaacacagttcgatcattgaagaggattgaatggagccttaatttgaattttaaagattcattagaaccgaagaaaactggttcttttgcgggtaccattgtatggaggaccaaacctggtggtctgaaggtgatatgactgggattggttttttgggcttgcgtactttgggaatatgacccaaccgtgaagaaactttccgttcattccaactattcctttggcagaatcttcttaaggggcatatttaaccaattccaaccctttggaatattccgatactttggctgggaccaccttaacattaggaactttttcaaactgagccaaagccgt

SEQ ID NO: 125174 - DNA, 520 bp, Arabidopsis thaliana columbia
atttaggtcgacactattagaagatctatgacgtcgcatgcacgcctacgtaagcttggattctttagagcgggccgcctttttttttttttttttatcaaaattatcatttatctttagtttcagcattttacaagggcttcttggattttttaaggtgggagccccaaggttccatacctttggtcccaaaaaaaatttaagggaaaaagaccccacccagaagccacccttttgtgggtctttaccaaatccttctttcttgaataattatttcattagaaaattaacctaattctttttttttttttaattagaaggaacccttccctttggtaaaaaggcttccctaattggtgggttttttaagccgcccgcaaaatttgcggtggaacaaaaaaagatggttaaaggcacccatgtgccagtttatgctaacccatgggaattttcttttttccttactaatccactccaccaaaatgctgtgagcgttaaccataaatttgaccggcttgtt

SEQ ID NO: 125175 - DNA, 504 bp, Arabidopsis thaliana columbia
acactattagaagatctatgacgtcgcatgcacgcgtacgtaagcttggatcctttagagcgggcggcctttttttttttttttttttttagccgggcaaaagcacccccggttagggagcgaagggccttggaaattacattgacttgggaatcttaattcttaccgtcaatggattggattattacctgaattccttattaccttggataccttaaaaaccttggaccgaccaaaaaattcttaaaggaaacttggcttaagggttaagggaggtccaattggttaaaaattcattaggttttgggggaatccgggaatcgcccggcaatggttaaactggaaggacccggtggggtcaataatggacattttggtcctttttttttggcctgggattgcctggccaactttttttgggctttcaaggtacctagaaaggtctttgccaactagaaagtaatccgttcgtccaaggccttcgtttctttccaaaaagccgat

SEQ ID NO: 125176 - DNA, 503 bp, Arabidopsis thaliana columbia
  unsure (1)..(503): unsure at all n locations
tnnnnnnnnnnnnnnnnnnnnnnnnnnnnnnnnnnnnnnnnnnnnnnnnnnnnnnnnnnnnnnnnnnnnnnngcggccttttttttttttttttttttccttaaaatcattccgatttaaaacagattatttaacttgaaaatacagcttcttagttttgaacacccttaatcattcaaagatcttatattccaaagggtcttttaacttaaattaaagtcacagcccaaagcattagaaacttggggtagattcaatttatgaagggctggtggagcttatgggttgatggattcttgaatgaagtctttaatttggatgggttcttcgggaaggcccaatgccttaacgaccgggactttggtggaaccatggctgaaggaaaaccctttttccttaatttccatgggggaggcatttcgttttttaacagttgaaaactgccttcttggaagccttaagttcttaattttttttttccattggtttccggataacctcct

SEQ ID NO: 125177 - DNA, 488 bp, Arabidopsis thaliana columbia
tttgaacgtgcatggcccccttccgtaggctggattcctttaaagcggccgccctttttttttttttttttccttgagaatggaaagaattttcctactacttaccactggccttatggtcatccatctacacaggaaaaaatggagcttaccatggtttaatccaaggtcctaactgactaccaaaaacaaaaccctcctaaacctttttttaaggtctcacaccaccaccttccagaagaattcccaaaccattgagacgcaacgctccaaccccaccattgcaaaacccgtgatttttaatagtctgggatgttggcaaggcaggtaatgacatctcaggagcacatagagacaaagaagactttgacgatgaagatggccatggagcagcaatgttgtctgtcaaatcacatgtaaagctgtagcctgatgtgttatcaaatatcaagtctgcaggatagcttctcagaagacaaccttgttgc

SEQ ID NO: 125178 - DNA, 233 bp, Arabidopsis thaliana columbia
actatcgataccgcgagtgggtatgaaagatgagaatacgaattatagaggatcatatcgttacttgactcgcggtacctgacgagttgcaacgattcagcggaccgtccagcacctatgttcatgcccgcctcaaacggcgcgataatcttttcaccctgtggctatacttatcgtattaaaacatacatagtatgagaagagaagcacagtcagggttagcgtcaccagac

SEQ ID NO: 125179 - DNA, 516 bp, Arabidopsis thaliana columbia
tttaggtgaccttatagaagagctatggacgtcgcatgcacgcctacgtaagcctggatcctttagagcgggcggccctttttttttttttttttttttttttttttttttttttttttcacaaacaacagaacctttaactttatttttccattacaaaacccgttatggttcggagatttaaagaaaccgccaccccaaaccggggtaagaaaattccaaaccgggaaaaagaccaaattggtggaaaaatcattagaatcaggggggtttaagccttttcttaggccttcttttaggaaaaggcccttcttttttaagaatcaaaacttttaccacccccttattaggccaaattggattttttcttggcctaacctccaggcccaaagggttattccttaaattcaatttaacccccaggtttcctgggaattccccctttccattgggatggcacctttccctaatggtaaatcccagaatttttcttccaggtttcattaagaaaggggt

SEQ ID NO: 125180 - DNA, 490 bp, Arabidopsis thaliana columbia
  unsure (1)..(490): unsure at all n locations
ggatactannnnnnnnnnnnnnnnnnnnnnnnnnnnnnnnnnnnnnnnnnnnnnnnnnnnnnnnnnnnnnnnnnnnnnnnnncttttttttttttttttttttttttttttttttttttttactttttctttttttttttttttttttttttggttttttttttgggaaacagaacattttttctccattcacttataatctgacctgtataaaacaactttgataagatttttttttttggggaccggaaaaggcctttaaaattcttacggccgccacaaacttggccaaaatgcttactaaaggggcttaatttcgtttgaacgatttttgatgctctccgaacaaaaattttccccaaaatgggcttacaaaaggaaatgcctggacagaatttggaacccgcttttcaggggcttgacctcccatgaactggaaaccgttcggacccgtgggcggacccttgggtttacccgggaattccggacc

SEQ ID NO: 125181 - DNA, 517 bp, Arabidopsis thaliana columbia
  unsure (1)..(517): unsure at all n locations
tttagggtgacactatagnaagagtcttgacgtcgcatgcacgcgtacgtaagcttggatcctttagagcgggcggcctttttttttttttttctttttttctttttttttttttttttttttttcctttttttttttttttttttttttaccaaaattgggggggcaaattaaggttttattggtcattaagaaaatggttccgtcccaagattgcgttggcttaaaaactttacaagaatcccttttaagttttgaccgatgggaaacttcccctttccatttaagcttttatggtttgaatgaaacatttggcgcttggaaaaattatttaccaccgcgcttccgggaaccgtgggcggaccccttccgggacccctgggttcacccgggaatttcggaccggtgccttgaggggtaccaagttttccttttggggggtggattaaagcttgggggtatcatgggcattggtggttccctggggaaattggtattcggttacaatttcccacca

SEQ ID NO: 125182 - DNA, 522 bp, Arabidopsis thaliana columbia
tttaggtcgcctatagaagagtcttgacgtcgcatgcacgcgtacgtaagcttggatcctctagagcggccggcctttttttttttttttttttttttccaaaatcgctatatttatctttgcctttctctaagaagaatcttacttacccctagaacctcccttttctggcttttatatcttctactcttggcttatctctaaaagaacccaaatgggagggagtaagaagcctggtggcacttgaaccttttcttcttcttttgcaattggccaggcgaattcttatgaccaccgaaaagttggtcccatcgaagcccccattatttttttattttaccattggattaggcccgtgcttgaccccggtgaccgtcttagggaccttcatgggatgagagaaggcgttcaactttccaaccttggcgggggtggagacccatccttggggaagtccagtgttcttcacttggtgggaagaattaatcttccttgtgggccaaggatcttgccttaggttcc

SEQ ID NO: 125183 - DNA, 508 bp, Arabidopsis thaliana columbia
ttttggaagatactttgccttgcatggcccccttccttaggctggattcctttaaagcggccgcccttttttttttttttttttttttttttttttttttttttttttttttttgggttttttttttttttttgggttttttttttttttttttttttttgggccttttttttttttacccccatttttccaaaaaaaaaattaaaattgggtttaccttccaaaaaattttaaaggggtggggggttgccttttaaggtttaaaggggaaaaaacccccttttttttttttttccccaagccattttccttttttccgaacctttaacaaaaaaaactttgaaaccccggggttttttttttaaactttccaaaaggaaaagggagggcccctttaaggggttaaagggttttttttttgcccacttaacctattttttgggccccggttttttttttcaaatcccctggggggaagggaattttaaggggggggaaattttttttt

SEQ ID NO: 125184 - DNA, 185 bp, Arabidopsis thaliana columbia
cgccggtcaatttgtgcacgagcggcgacgcgagaaggtgggggaacagtgaggactgactagttgagatgagataatgtcagagcccgatgttcttcgcgctagttcgtcaacgcgcccgcgacggacgcgggcagtctgaggcagagttcgtaactcatcgatacgtcccatataagcggcgc

SEQ ID NO: 125185 - DNA, 495 bp, Arabidopsis thaliana columbia
  unsure (1)..(495): unsure at all n locations
tatgacgtcgcatgcacgcgtacgtaagcttggatcctttagagcggccgccctttnttttttttttttttttttttttttttttttttttttttttttttttatttttttttttttttttttttttggggcaaattaattaattaagcccaaccttttccttggaattgggtgttcaaatttttacccattttccattaaaaaaggtttaaaattttaacttaaggtcattacccaatattggcttcaaacttttttttccttcccaattccgattaaaaccccgaccatttaaaaaaacttgaccatgttttttatttttaaaaaaaaaaaaaccatttacccccatccatggggtaaaaaaaattttaatcgaaacccctttttcttttaaattgaatttaaagttttgtttttgactttttcattcgccttggagggaaaacaaagggattccaatcttttattaaaaataaaaccttttcttttttcacc

SEQ ID NO: 125186 - DNA, 514 bp, Arabidopsis thaliana columbia
  unsure (1)..(514): unsure at all n locations
nnnnnnnnnnnnnnnnnnnnnnnnnnnnnnnnnnnnnnnnnnnnnnnnnnnnnnnnnnnnnnnnnnnnnnnnnnnnctnntttttttttttttttttttttttttttttccaggnnnggaatcgcttgttttatttacagagatgaaatggggcaaacctttttgcttaccaaattaacagagaggcgcgcttatttctccggttctggttggtactttctaccgaagcatttaattggttaaaacccaaatttttttattttttttctccggctacttattttgaacccatacccagttttttttaattcctttagtggaccagatgcttttgtgttcttcatcaatcgggaggtgaccttttggacccttccaccgcaacaccagaacaaagattctccttcagtaaagaactagtaccggacccaccaccatctcgagctttcgactctccattgtttttctcgctcccttgttttgcttttgatttcagtgtctgctctattggagcttc

SEQ ID NO: 125187 - DNA, 434 bp, Arabidopsis thaliana columbia
ccaccctaccaaaagttgggatccttaaaatttgccgcccttggtgaggtggttactaaaaccaaacccttgtctaaatggcaccaacaccaaaagcacgcgcagaaccctgccaactatgccaccagatgaaattaaccaaacaggtttacaccacaacaacaacaacacaatctgaacttgatacaattcaacatttaaccaatatttttgggggggggcctaaaagccccgcccctcgacgtggggcaaaccccaaacaatctgtcgtttacggggtcgcgcctaaatgtcagacacgagacttcaaatcgcctcccccacaaaaaaacaatcttatcacaagaaataactcaccctcccgcgtcactacgccccacaacacctctacactgtgatcgacggtaaacaatgataataatgaaaaggattta

SEQ ID NO: 125188 - DNA, 475 bp, Arabidopsis thaliana columbia
tatgacgtcgcatgcacgcgtacgtaagcttggatcctctagagcggccgcccttttttttttttttttttttttttttttttttttttaattctttattttttatgtagaaatctttccattatcgttcaaaaataggatggacaaatcatttgctgagctagaagcctacagagtttttgtatctttccctagatatgcctttttttttcataggaaaacttgtcacattttacatgtaaaaaacaaatgatcaaattctggttgtagtccatgtcatgaaaaaaggttggtcaatgattcagagtttcaccaaggaggagctattacaactgcacccacccactgcggaagggtatacagctaccggacgcttggttccacccgggaattccggaccggtacctggaggcttaccatatttcgctatagtgagtcccataagcactcaggttaatcatggccaaagctgtta

SEQ ID NO: 125189 - DNA, 512 bp, Arabidopsis thaliana columbia
  unsure (1)..(512): unsure at all n locations
nnnnnnnnnnnnnnnnnnnnnnnnnnnnnnnnnnnnnnnnnnnnnnnnnnnnnnnnnnnnnnnnnnnnctttttttttttttttttttgataaattatattttgatgacatatacaatttggtattacaaaaaaaattgatatatacaatgaaaaatatattggtgtataacataagatataaagtgaagtgtatatataattttttttcccaaaatcatttaagttggtattttttctaatttctcatattcagcttcccattggttcattcttttcgaagcttggtccacctttttggttcaattgggtatgtagaacatggacaaaagtatgaaagtctgaagactagtcccaaatattataccaattcatattccctggaccccaagggttggtttattacctaacaaaaaccctagagggaatccaaaagcggtagtacaaaacaaggttatataagccaccggtgcttggcatcctcctactactggaactcctgatataactggg

SEQ ID NO: 125190 - DNA, 524 bp, Arabidopsis thaliana columbia
tatttagggtgacactattggaagatctatgacgtcgcatgcacgcctacgtaagcttggatcctttagagcgggcggcctttttttttttttttttacttaagagccatagtccttatattgggagaattggtttgatgggccattaaagctggaaggttaatccttagccttttaagaaagaatttggcttcctaccaccagacctgcttaaccttgggggatccccattccttatttctttcttggacccggattcggatggaaccttttagccttattagccggtggttgagcctgtggtggttttagtgattttggtggaccttaagttttttttccagacctttcctttttcctttggcccaattcgaaattaaccttagggaaaacccaacccgccatttcgttgcctgacccagcgggaggagcttttccaccacgcttaatttgcaccacatccgttattctttgtagtccgaaccggttacttagtccgttgcttaatccagcctttttcttca

SEQ ID NO: 125191 - DNA, 515 bp, Arabidopsis thaliana columbia
  unsure (1)..(515): unsure at all n locations
tttaaagtttttaggacgtggctggcccccgtccgtaggctgggatcctttaaagcggccgccctttgtttttttttttttttttttttttttttttttttcaaaagggggaggaaacctttaaaaccggaggcttggcaaaaccttttttaagagttaaaacctcacccccccctctggagaaaggcaaggacaattaaccggggttggggaaaatttttttaacagggcccgcaaaaccaggttcttaacaaagtccgcaaccaacaggcagagggactttaactcaggcattactctgggggttagtagctaaacccgacttgttgctgctgtgggggctgttgggggggttgctgccctgcctgtggtgtctgctggaaaccaccgttgtatcctccaccagagtagcctccgtaatatgcattagggtcttgaggcatcgngcccccatactgctcctgtccttgcccatacccaccgaagaaaaactggctgggatcccccgactgttg

SEQ ID NO: 125192 - DNA, 537 bp, Arabidopsis thaliana columbia
  unsure (1)..(537): unsure at all n locations
attttttgggtacccccgcacgcgtattatagactgcgacctccaaatatatagcccctcgacgggccgccctcccaaactcatacctgcccttttaagcccacactttggcgaaggctttaacgcgctccttgtcagagagcccaacggctccattcacccccctccttgaaatccatggtttgcaagatttacggagccaggaagcttccttttttatggggggagggcaacagtattcgatataaaagtaaagagttactagcaaactacccgctatgactttctatttgccggaccaccgtgaagctattccccttttgttcaatgccctgtcactacatataatactaaaaaacaaacctcaggcgaagactgtgacagaattagtaattgtattctggtaaggttactacagngtttccttggtccaaacccttatgtagagtaactccctttccctctccgatccttcaaattcaacgggcagaaaaaaaaaaatagacccgcctcagcacagtctcgacatctatatct

SEQ ID NO: 125193 - DNA, 466 bp, Arabidopsis thaliana columbia
  unsure (1)..(466): unsure at all n locations
nnnnnnnnnnnnnnnnnnnnnnnnnnnnnnnnnnnnnnnnnnnnnnnnnnnnnnnnnnnnnnnnnnnnnnnnnnctttntttttttttttttttttttttttttttttttttttttttttttttttttttttttttttttttttttttttttggggggacaaggcaatttgaacaaaatcacattttgaataaaagatgtttttacatcacttttacttttaaaaataaacactttttttttgggaggggaaagaaaaaataaagacacttttatggtttaaaatgaatgattttacaaatcaaataattcggtggttccttgggcttgagctttttgggtcatttgggaaatgcttttaaaaaaaaggacattggatgccggtttatttcttcctttagggggcaacaacatccaaaagaggtttggttaatgggttgggcccctttttaaaacttgggggtttg

SEQ ID NO: 125194 - DNA, 508 bp, Arabidopsis thaliana columbia
ttaggtgacactttagaagactttgacggtgcatgcccccctacgttagcctggattcttttgagcgggcggccttttttttttttttttaattaattcccaaccatttcttaagtggttattttaatattcttaattcccaagaacccctaattacctacctttaacctttaccttttaaccgaccttaaaccaaggaatggtggcctttccttccaaatattaattatttggggagaaaataatattaggcctactatcgaatttacatctttggaaaaaaaggaataaaaaaattccctcatctgggagcgaaggagacggggatatccgttggccgtttaatattcgccgaccatttttccgattctaaatacagtggggatatttttccggcgactcttcccatctccggcctattcactggatcatcctgaacacaatccaacgctagcctcgttaacttctccaccaccgtcacaggaaacgaatcctccaatctccgatc

SEQ ID NO: 125195 - DNA, 469 bp, Arabidopsis thaliana columbia
  unsure (1)..(469): unsure at all n locations
nnnnnnnnnnnnnnnnnnnnnnnnnnnnnnnnnnnnnnnnnnnnnnnnnnnnnnnnnnnnnnnnnnnnnnnnngcctttttttttttttttttttttttttgggaaaaggagaaataaaacatttgcaaaaagagggacaagtcttagaccacaaccaccaccaccgaagaagaaacagagattgagaaccgattagattgcttgcaacacaagtcaaaccttttccttttccttttccagagattgacattgaaaccaatcattcaaagaagcttgggtcgtattcattggtggaagtagcccagatgtagtaaggaaccatcccaccccttccgggacccgtgggtcgacccgggaatttccgaacggtaccttgaggggtaccaacttttccttttgggaggcctattaaaacttggcgtaattatgggcatagctggttccttggggaaaatggtaatccgttca

SEQ ID NO: 125196 - DNA, 123 bp, Arabidopsis thaliana columbia
ttggtgcttggtcattgaattcggcgtgtgcatttcttgtatgtgcagagaaattcaatataataacgcatgcgtcgggtgtgatgacgcgcacgctgtgtacgtagttttcggtgtagtgtc

SEQ ID NO: 125197 - DNA, 514 bp, Arabidopsis thaliana columbia
tcacactatagaagatcttgacgtcgcatgcacgcgtacgtaagcttggatcctctagaaccgccgccctttttttttttttttttatgcgttcctcacttcattattaacccaagattaaacctaagaacctttcaaatttttttttttatttctggttcccaaaattcaataacttggtttaagggtattaagggaagttaaaaggaaggacctggaaggaatgaaaccgggccaccaaagccttaaccccccgaaggtgaacccccccttttttttcgcctttaagttttaccttaaccaattccaaatttggttattccggcttcttctccaagttgtggctgttattcattaaaaacccggggtaaaaaaaaaccagccttgaaaccgggaaggaagaaaaaactgccttgaaccattttccttgctttatccttggcccggcctcggtagaatgaaaatgctgttgcagcaatggttagtgtgaaaagtgttgattcgaggcaaaacc

SEQ ID NO: 125198 - DNA, 508 bp, Arabidopsis thaliana columbia
  unsure (1)..(508): unsure at all n locations
taggtgacactatagaagatcttgacgtcgcatgcacgcgtacgtaagcttggatcctctagaacgggccgcccttnttttttttttttttttttttttttaccccaatgaaccttcaatttaatattttactggaaaattttctttattccttattagaaaaacctaccttaattgcattgattttttattcaaaagggttggttccaacccgttggaagttgggtttgtcaactgacttcaacctgaaccaacctgaaaaggtccttttttgacaatggtaaaattcccagttttttaagtataaatatcttattgggtaatccaatcaggcaacttccattcaaaaaattaaagtaagttaaaaagtcccaattcaacggcagcattcccaattggcttcccggaacatatccttcgaccggacccaaatggtaagagctcgtaatgttgtccctataatcaacagagctatccataaacctctcagggtcaaactcttccgggt

SEQ ID NO: 125199 - DNA, 497 bp, Arabidopsis thaliana columbia
tttggacgtccctggcccccttccgtaagctggaatcctttaaagcggccgcccttttttttttttttttttttttttttttttttttaaaagggaaacttaaaactttttttgaacaaattcctcaaccaaaaaccccgttaaaaccaaccttgccatttttttaagggtggttaaaaacaagtgaaataaaaagcttaccaagaggttttttctggagtttcaaaaaaaaagctcgattgggggggacaaagtttataatctccggggggtccttttttaccaccagggtaactttcctcatcaccaggggcatgagagccctgccggcctttttcgaccaaacataaatgttgttaaacgtcccgaaaactcacttaagcccatgccttatcctgcgcccaaggcaaaagcgctttacgcctaagcatagccgcaaactgctgactcactctcaagaacattttttgagtggacggggaggcccccacaaacgc

SEQ ID NO: 125200 - DNA, 510 bp, Arabidopsis thaliana columbia
tgaggcgacacttatagagtgctatgacgtcccatgcacgcgtacgtaagcttggatcctttaaagcggccgcccttttttttttttttttttttttttttttttttttaaaagggaaacttcaaactttttttgaacaaattactcaaacaaaaaacacatttaaacaaatttcccattttttcaatgtttttcaatcaaatttaaatagagagatttccaagagtcgtttccttgtcttttaagaaaaatgtttgatttggtggatcaagtctaataatctccctccttttcttcttcaacatcatactcaccttcctcatcagcagtagcatcttggtactgttggtattcagcgaccaaatcattcatattgctctcagcttccgtaaactccatttcgtccattccttctcctgtgtaccaatgcagaaacgctttacgcctaaacatagccgtgaactgctcactcactctcctgaacatttcttgaatcgacgtcgagttacc

SEQ ID NO: 125201 - DNA, 506 bp, Arabidopsis thaliana columbia
gggccacactatagaaattttcttgacgtcccatgcacgcgtccgtaagctgggatcctctagagttgccgccctttttttttccttttttttttttttttttttttttttttttttgagggaaattgaaacaatgatgtttgtcaaaaagctaataagaagaaagtttttagattaattcgaattgggacaaaaagaacatcttttctttttccaactgagtttgcgaatatcaaagaaaaacgcttgagtagaggagagaagtatcaactgagtttactacttgatggtcgccttggggatgctggaagtgcaaggtccagccgaggtcatgaattgtatgcctttgtatgtggctacgccattttcatcagtgtagagacccggggttatcttctctagttgcttcttttttgggttcagtacatcttctggctttccttcaatccctgaaaatgaaacacgctctcctggtttagcaccagcaggtggtagcaacggctcta

SEQ ID NO: 125202 - DNA, 491 bp, Arabidopsis thaliana columbia
atgacgtcgcatgccacgccgttccttagcctggattcttttaaaccggccgccctttttttttttttttttttttttttttttttttttaacccccccaaattccttaaaccccaccaccaaccttttgtttccaatttaccccccaaaaccaaaagggggcctttaccaaaaggaaccaccggggggaaaaaaaccaaccggaaatttttttaaaaggggcctggttggatggattttctttttaagttttgcctccatgtttttaaacttaaaccccacctttgttgcacagaaccaccttatttttttattttgccataaagagccaaacactcccaataagccctaccatttttactttgcattttttttccctttagccctaaaccttttggctggcactccaaaaaaagctcatccaccatttttatcgacttgctcctaataatttcctccaccatttccgcctgggccttaataaccacgtt

SEQ ID NO: 125203 - DNA, 424 bp, Arabidopsis thaliana columbia
tgacgtcgcatgcacgcgtaccgtagctgggatcctctagagcggcccgcccttttttttttttttttttttctttttatttttttatatgttttggttttttttgtatgtggctcgtttattttgtgttttttttttgggaaaaaaaagttcccccttgcttttaaaaaaaaagcctttgccccaaatccaaagggggggcttttttttaggggggggccgcattcgttttaaaaccccccccctacttttccaaggcctgtttagctggtggttcttgtccttgaggagccactccccccccccttttgggggcggtggacgttattcgcacgtggcttggcagggcatgctgacggacctttttttggtttctgacctgcgttccaggcccgggttcaattagccgtgaaaaactcgtgag

SEQ ID NO: 125204 - DNA, 437 bp, Arabidopsis thaliana columbia
  unsure (1)..(437): unsure at all n locations
atacgcactcacttanggaaagctggtacgcctgcaggtaccggtccggaattcccgggtcgacccacgcgttcgggacgggcacgctggtccacgaagcttcgctggccacaccattatcggaacttaccggagttcgttaccaaacaccaagatgaaccgctgagaattattagactactactacttacttgaaagtgatctcacatggattctggactggttctggttaggtagggtctggtgggcccaccattggtcttggtgatttggcgttcgccaaggtggttacctttttccgggctttttttctggccttgggaaaaattcagattagatccaatggggaattcagagggaggggagaggttgcgttccaaggggtattcctggaaatgccaattccagggaccccggatggctattccgaatggcag

SEQ ID NO: 125205 - DNA, 420 bp, Arabidopsis thaliana columbia
  unsure (1)..(420): unsure at all n locations
atacgactcactttanggaaagctggtacgcctgcaggtaccggtcccgaattcccgggtcgtcccacgcgttcgggagactggtggtactggcggttcttctgaaccatttgatgaaccaccaccttatggtaatggtgaagcttaaggtttacctgatcagtcagtagaacccaaacctgaaggattatgatccttatacccagtctaggtgaagaaaagttgatgagaattgagaactattggcttcaccaatggtgcgctttgcttttctggctttcaaaagcattatatgctggttggtggacctattctaaaaggtttaagggagtgaatcttgagcattttgggtggttatggtttgggccaagggttttttaattgaaagccaagccaccggtggccaaccaaaaaaaaaaa

SEQ ID NO: 125206 - DNA, 481 bp, Arabidopsis thaliana columbia
cgccgggaccgggcccgaattccccggtctatccacgggggcggagaatctttttcttctgggtccttggtcctccaggcccgatcttttttccaaaaacccttttgaattctttttttgccaccaaccttccgcaatcctcgattttcaattccgtggctgtttttttccttcacttaccgagggcaagattgtagttggggcggaaaacaaaaaccgttgacctttaggccaactcccaaactggcccgagggggagaagcttctagggggtggttaaccgtggctcgttcaaatcccctcagggtccccagaacccatcagggactcttcttatctcctcaagcttggctaagcctggcatctttcgggccgtctgctcaccccaggggcagaagccccacccgggttttgaagatgggaaccagcccggttgaacagggccgcagaccctttcgaatgcctccacctacagggaccc

SEQ ID NO: 125207 - DNA, 541 bp, Arabidopsis thaliana columbia
  unsure (1)..(541): unsure at all n locations
tacgcactcacttagggaaagctggtacgcctgcaggtaccggtccggaattcccgggtcgacccacgccgtncgggagaaaaaaaaaaccgagtagagattgattaaaaaaaaatgagtagcttccattcttctcaacttcaccatatcttcgtctatgggagctttcaagagcctggccttattcctggcatgcctaatcggattcccgagaatggctctggacccttgccggcttggaccgtaccttttttttttgaacctgagcctgaacctgaatggaaattccctttggtttttaaaacctagggttaatggccaatttggggtggtttcaataagaaaattaaggttaaaggaccgttggattcctgtgttatcccctcttggaatggggaagttcatgggaagggccctatgggagtgggctatggtgaacctgggaatgtgaaatggggtgaaaggaaccatattaaagaatggttggtgaaattgtaagaaaagaacaatctcggaaaaaagaagggggacctttccctgg

SEQ ID NO: 125208 - DNA, 322 bp, Arabidopsis thaliana columbia
  unsure (1)..(322): unsure at all n locations
atacgactcactatanggaaagctggcacgcctgcaggtaccggtcccgaattcccgggtcgaccagcgtccggtcttcctttcaattggtcttttttgaaaacttttacttagttttttttcttttttttttttagaagtttgtctggatcctggatctgaaatagatttggaggaaagcagaacctttttttggcgaaatttaggcttattgggtttgaactctttggatcccattggaaagtttgaatttttggaagaagatgttaccgttctgataattccagagctcaaatctattagagaactgattcttcagttc

SEQ ID NO: 125209 - DNA, 491 bp, Arabidopsis thaliana columbia
  unsure (1)..(491): unsure at all n locations
nnnnnnnnnnnnnnnnnnnnnnnnnnnnnnnnnnnnnnnnnnnnnnnnnnnnnnnnnnnnnnnnccacgcgtccgctttattctccacctcaaaggaccatttctcatgggttctgttccggggagacctctacctcttcttcggcggaacattaccttgacgacgggttcgaaatcattttccatggtcgcccacgtttcgagccggcattctcttgggatctttacggatgatgaatttttgaagcaaataaaaacttccgcaactgggaaccaccggcggggagtaagtaccggggtggcctccgcgggaaacctgaccgcgccgtcgtgggaatcgtggaagcctgattagaccggcgggggtaccggttttttggtgagtgagctcatatgggctggtggtggagcctttgccggaatggccttattgggaagaatggatcaaatgctttcttcgaaaggcgatttaatggcaggtggaccccttg

SEQ ID NO: 125210 - DNA, 492 bp, Arabidopsis thaliana columbia
  unsure (1)..(492): unsure at all n locations
nnnnnnnnnnnnnnnnnnnnnnnnnnnnnnnnnnnnnnnnnnnnnnnnnnnnnnnnnnnnnnnnnnnnnccacgcgtccggtcaacgaattcacatgtaaactgctttcgaatccagcgaaactaataacaatcctactggaatcgattcattctactatggacctgacggcaggacaaactgcggctgcggctgaagcgaatggcgccgatggtgctacaacgcaacatctgcgaggagctggatccacgatgaccagcatccgtagaataaacgtcaagagtatgttgcggctaaagccgatgctactgatcagacacctatgcatcccactgctgcgggtgagatcatgactgatgtctagcacagcggccaatctacggataagcgggtggatgtatctgagcatgctaagttcaatgactccggcagtgatcgagcgctatagtggcatgagacaagtatacccttatgctcgttcgacaacagaga

SEQ ID NO: 125211 - DNA, 512 bp, Arabidopsis thaliana columbia
acgcctgcggtaccggtccggaatcccgggtctcccacgcgtgcgattattagttcaaaataacaaaaacagaagtaagagaaaatctaggcagctcgaaaaaaaaatgaaggatctgtcagtggtactatctctttatggcctaagcagtaagtggaatgtatatggacgagcgaacaagctccatatctgtgatgatcgggggcccaaacagaagcactcagacctctattgcgccaagaaaatctcgaaaggcccgacatggaaaacattatgtcaagtttggaaatatctatcacttggatatgacggataattttatggcagacgacactgtgatggagtacctttagacaatgggcctgatattggactggccaacgattggatgcgttagaatgtaaacccggtgtgggccagggaggcacctttgaatgggccgctacagaggatggaatttattttaggctaaatcaaggggcgaacccataaggttattaattggaggccat

SEQ ID NO: 125212 - DNA, 511 bp, Arabidopsis thaliana columbia
agctgctacgcctgcaggtaccggtccggaattcccgggtcgacccacgcgtgcggctctcaattaaaccctaaaacccttctcagaagagaggccgagagaaaaaaaacgccgtctttgcggaatctgtgaaaggagaaaagatgagaccacccatgagaggccgcgggggtttccctggaaggggaggaccaaaccgtggtttttgcggtaggttccgtggaagaagcggtagattccgtggaagaagaggaccctttggtggtggaggcggtcgctttggtggttttagagaccaagggccttctaacgaagtcctggagggtgcaacctttcgtcatgcttgccagggagatgccgtgaccaaactcttacaagagaagaattcttattttaacgcttcgatctaactaaagaaccagacttagattggggaaagtaaatgaaatctttggccccattaatgaatcctttggtttctatccaaatggatggaggggttgggagcccc

SEQ ID NO: 125213 - DNA, 414 bp, Arabidopsis thaliana columbia
cctgcaggtaccgggcccgaattcccgggttgtaccaagggttcggtttttttttttttttttggcttcttttggattcaaatcttaaaactaggttaaccctgggggtggttggccagaagaacctaagggggccggaattccagggccaagacctggtttaaggccgtttccggcggcttggacctcaacttttttgaggtggaaaggccggaattaagggttggccgaacggatttcgaactttttaagcctttcaagggcgctaaattcaccgaattttttcacatgaccatccaaacggccgaactaatggaaaccttacctgttctgggggctgaagccaaatggggttcctgcaacattttttccattaagaaccacgcggcgcgaaccatggttggtgactccgcc

SEQ ID NO: 125214 - DNA, 474 bp, Arabidopsis thaliana columbia
gagctactacgcctgcaggtaccggtccggaattcccgggtccgcccacgcgtccgactgattcttcattgaccgtaggagtaacacttttggcggcgattcccttgtctctattttttttgcaccagcacatttagcttctgcgaacctcagttcatttttcaacccttatatcggcgtggtttcttgctctagtaccgcgatcttggacgaaccaagaagccatcccgtaatctaaaagcggtggtgagaagaagacgaataccttaaatatttctggacagaaccattaccttggtggtcaagggaagactatccttaccaaaatccctgaccacaatattctaacttccggtacccgggatggaatcggtttccggtcatttattagccccaccgttgaaccaagcaagaagcttcatgtggtcccccatcggtggattggaagggccttcgggtcatgggccggttccc

SEQ ID NO: 125215 - DNA, 449 bp, Arabidopsis thaliana columbia
atacgactcactatagggagagctggcacgcctgcaggtaccggtccggaattcccgggtcgacccacgcgtccgaacgtcataccggtgctggcttctcgtataccagctctgaggtatttgttcgtcccgtggggaattgacatggcgaaaatggcggtatttgtgggggaatcaggtgatactgattaccaaggattgcttggtgggcttcacaagagcgtttttctaaagggagtgtcgtgcagtgcatgcttgcacgctaaccggagctattctctcaccgacgtgatctcctttgagagcaccacctggttcacgcctcaacagattccgatggtcgtgatgccctgaagaaattagagcttcttaaggactggaacctaaaattaaacgatcacctcttccgtcatcaatggggtggtacccaatgccaactattcttttta

SEQ ID NO: 125216 - DNA, 441 bp, Arabidopsis thaliana columbia
  unsure (1)..(441): unsure at all n locations
acgcctgcaggtaccggtccggaattcccgggtcgttccacgcgtgcgagcacgcgtccggggccatctcatctcttgcaatatggtattaggagaaaccaataagaaagtgatcaagaattgtgattaagcttttaacgatggtgattttgatgggcactgcggtgataaggatcatgatggcccccgcctacttatcataagagggggnccgaaagcatgcgtgcctatcttcggcaaataagagttattttgggaaaaccaggcagtaacccttttggtttccttggaccccaacgatcttactggcttttcttaggatctatttacctctcatttgaagaaaacaaccgaggagtaaccccatttcaatccctgcactgcggtaggatgaagatacaacaacttatggtgcccttgaacacacctttgttccttgac

SEQ ID NO: 125217 - DNA, 467 bp, Arabidopsis thaliana columbia
gagagctgctacgcctgcaggtaccggtcccgaattcccgggtcgtaccacgcgtgcggggacgcctgggccgacccgtgggccgacccgtgggccgacccgtggggtgaccctcttggctctttacttcatctctaccaatgttgccaatgcttctgggcgtcactggctgacgtcagtcatatgggacactgggagcctgttggccgcgggtttcttgggagccgaacagcttgggggacgcgcctacggggtatggatctttgtgatcataccagcccggtatacccgaggaaaacctagggatgaccccgcgaatgatcctggtttaaaaattcaatgctggggattggttaaaaacactaatgtggaagcggtagcacaaatggttggccctaatgcttatggccaacttggatcagcaccccctgtggaactctacttgtccccattgcccgctgaggttt

SEQ ID NO: 125218 - DNA, 503 bp, Arabidopsis thaliana columbia
  unsure (1)..(503): unsure at all n locations
aagcacgtacgcctgcaggtaccggtccggaattcccgggtctgacccacgcgtccgatgataataatattatagttttaaaaaaaacacaaaagacaatgatcggctaaaagataagctgaagcctttttaaataagcagagataatcgagtctctttaattaattaagttattcaataagtaaaccatatataggatggtcgctcnatgggggggtgcaangcgcaataatggcttcagcttatcttttagccgatcattgcgtttggtgtttggttccgatcatctccttcccgatgtctagcaactctgccatgtgatgagtctcgacttcccgtggcatgatattattttctcccttccaaacaatagacccgcgccacaccccccccgacccccacctccaaccaaatcggcggcgcctcttacaggatccaacacgtcctccgccttgcttctaattcataccctcttattatagggatcccaaatttaaatacct

SEQ ID NO: 125219 - DNA, 393 bp, Arabidopsis thaliana columbia
aagctactacgcctgcaggtaccggtccggaattccccgggtctacccacgcgtgcgagcgtacacgagttcttgaaaggcgtcctgaacttgtgtgcagacgtgggctcgtattttcagaagaatccgtctacagacaagctaacattcatcccttgaagcttgagtgggaaatattttgtgggacctagtggaggaaggctgcatggagttattgttatgggggggctgcattagaggatgcgcataccagacccaaagctcatcccctagaagttatttgaccctggaaaagggatctttctgccggatgaaaatttgggacgctcgatggctcagcagcttaatttttctagggccttcctcaggagaattgcgaggaattgcttacga

SEQ ID NO: 125220 - DNA, 523 bp, Arabidopsis thaliana columbia
  unsure (1)..(523): unsure at all n locations
agctactacgcctgcaggtaccggtccggaattcccgggtctacccacgcgtccgcaaatctcctcctgcaagccgggatagtaggcaacccccaattattgtgcttgtggtatgtcctactcgggaacttgccagtcaagctgcggcagaggcaaataccttactgaagtatcacccctctattggtgttcaagttgtgatttttggcacaaagcttcctacagagcaaaggcgtatgcaaacgaatccttgccagatccttgtggctacnacctggaaggctcaaagaccatattgaaaacacttctggattcgcaacaagattgatgggtgtgaaagtccttgtgcttgacgaagctgatcatctcttggacatgggtttccgaagggacattgagaggataattgccgctgttcctaagcagagacaaacattnttatttttctgccaccgtacctgaagaggttactgtcactttctagtacaaggctctcactttttgggttgaatcttgactgtgt

SEQ ID NO: 125221 - DNA, 341 bp, Arabidopsis thaliana columbia
agatcttagcacataccactcacttagggggctacacgctgcagtaccggtccggaattccggtcgcccagcgtcgcccgcgtccgagaaaccaaatgaaagctttgtctttttaattgataatcctttttattactggcatatactgctttttcacttttacaatcccaaatctttaaagagaggaaccaaaagaaaaacagatttccagggggtttttttttcatttacaacataacattccttgggccgattattctttttttccagaacatggagacttacagggaagaaccaatggttaaaccgggttggaattgctctctttgataaacccagaa

SEQ ID NO: 125222 - DNA, 548 bp, Arabidopsis thaliana columbia
  unsure (1)..(548): unsure at all n locations
tgcaggtacccggcccggaattcccgggncgtatcacgcggtccggcacgccgtacgaccaagcctaccaagactcctgggatttggtaatcacaaaaaacccaaaataacctcacccagtttcccattttctttcctttccggccgggcccccccactccaggagaaacaaaccacacacactcacccccccaaacccttttttcattggggtggaaagccaacccccgagaacgcgcaaaacgaaacaacaaccccaaggaggcacgaggcacacagcaaaccctcaacgccaccgcaagccaaaaaacacaatcggccccccccaacaaaccccaagaaccaacaaggccattggagaacgcccaactgggccctaatatttattttacacttcacgtcgcctcttatctaatctctcctatccaccctcacaatacccattctctagctcccccaccgttgttccttcacaacgccacccctcctccgttcatcaatggaaagcgacttctttctcaccacagattctgaatgttccacccccc

SEQ ID NO: 125223 - DNA, 500 bp, Arabidopsis thaliana columbia
  unsure (1)..(500): unsure at all n locations
ggagagctgctacgcctgcaggtaccggtccggaattcccgggtcgacccacgcgtncgcggacgcgtggggcgtctataaatccctctctctgctcacactgtctaaaaccctagaaaaaatggcatgaaccggagctgtggcggtgtacggcgaaagagccatgactgagactaaacagaaatctcccttctacgtgaaagttggcgctcgctcagatgctacgtgagcgtgtaatcatggatgtcatcaacgcaaagcaagcttcaatcgctgaacaagctggcgcatgcgccgtgatggactctagaacgtgttcccgacgatattcgagctccaagcgggtgtgctagcatgagcgatcccgagatgatccaagatatcactaccccttgacgattccggtgtggcaaaagctacattggtcattcggttgagctcacaccctgaagcaatcgagttgatacgtcaacagagtgaggtcttatctccccgacgag

SEQ ID NO: 125224 - DNA, 432 bp, Arabidopsis thaliana columbia
  unsure (1)..(432): unsure at all n locations
tacgactcanatagggaaagctggtacgcctgcaggtaccggtccggaatcccgggtcgaccagcgtcggtgctcagagcttcgtttaacaacaagtcactacactgcacggtataccttcattaccttgcaagatgtcactatggtgtgggtgtctgtggagcaatccatgtcttttggaagagtaagagatttacagcgattgggtggaaggtgcactgctagcaacacttgataggagtttgctctaactgaagagcatatgcagatgcatgatctcctgagagattagcagcttgtaggggaagccagtgtcagaagtaggtgtatgatgaaaacatgaaaggcttgacctgtgagaaattagctttgggacaaaccaaatcttgtacagcacagattcagacacaggacgcaatagagaagagtgct

SEQ ID NO: 125225 - DNA, 390 bp, Arabidopsis thaliana columbia
  unsure (1)..(390): unsure at all n locations
atacgcactcacttanggagagctgctacgcctgcaggtaccggtccggaattcccgggtcgacccacgcgtcccggcatgtgtgccttccgagctggttatagaatggagttgcactggttggagaaaaatggtcagcagataaccaagatgggggtctaatgggcttatcacagggctcccaacccagattacggggtaattataccaacttcttcaggagccttttcttcaaagagtcttggcccaaacaagaagaaaggggggtccaggcttatttcattaatcaaagaagaacatgaagcaccttgagaagattacaatacctgggaaccatttttctgctggttcgtggccagtatttaaaaggaaagattcattggcaagaag

SEQ ID NO: 125226 - DNA, 529 bp, Arabidopsis thaliana columbia
aagaacgtacgcctgcaggtaccggtccggaattcccgggtctgacccacgcgtccgttcacccttcaggccaagaacctagaggagccgagtacatgttacctattgcagaagacgtactccgacatgtgatcaataggaacatgatcaccaacgtaggtgcgctctactggactgtccaagtaggcaaggactcaaaagggacgatctatcatatggtgtgattggaacggtatatacactccggcactatgccctgcctaagatatgtactgcgaaggcgactacgcatagtcctgagagtctatgttgaaggccattcagccactcgctaaagaacccggggtgccactttctgactaggacaagagtgcagggactctactgcgattatccgcctataaaaaccccctttgaataggcatcgacttgaccgcctaacaacggcgaccttagggcctgctgcagggttaacatactgttaacacagttcaaccgaaaccacaggaggaaaacaacttttgagcca

SEQ ID NO: 125227 - DNA, 533 bp, Arabidopsis thaliana columbia
  unsure (1)..(533): unsure at all n locations
tcacttttnagaaagctactacgcctgcaggtaccggtccggaattcccgggtctacccacgcgtgcgatcatgatcacaggcatgtgatgcctggaccatgaagatctcatcgtcatcaccatcatccatgctgaacaatggatccgtgtactcaggattaggacatcatcagaagaagacgaggatgcccaggaccgtgtatgggggcaataactccttgagtggtctgcagcggcaggacccgaacaagcatgcggaatgatgccttggggtgtagatgagactttgttctcgccgtcctcacagaaaggattgatgcttgctctgtcctacagggctcctacttagaatccgtatatgcggccgcctggctaattccatagcgccaggtataccctaattattggcccttccctatataggggggcgcctagacataccctagaccacccgcgcgtatttcgcccgtctaggcggtctgccgggggattgatggtatatcggaaccccacctttcaaaataccttacaa

SEQ ID NO: 125228 - DNA, 263 bp, Arabidopsis thaliana columbia
  unsure (1)..(263): unsure at all n locations
cctgcagtccggccggattccgggtctaccacgcgtccgcggacgcgtgggtttgagcgcatcgcaaactcgaaggcgcgactgtgagagagaaaaatggcgtcgtcatcatcgagaggagagatggagaagatgggaatcgatccagctaaagctttgaaggagcangcagatctggaagtgaatctctttcagatagtctcaacaccatccgtacagctacccgtcgtctcgatgcccnccgccgcagctctcaacgatct

SEQ ID NO: 125229 - DNA, 488 bp, Arabidopsis thaliana columbia
gaaacacaaatttcctttaatggggtaaaggccgctaattggggaacacaaccaacaccaacgggcatgggttccctcagcgtgctcgtccccgtcgcttcagttacctcagctccttccttttctttaacccctggttacttttctcaatgggggaaagactaactccaaattgctcttcttttggaaaccccaaaataaaatttttccgggcgggaatcctacccgaatccgactccccccgccaccaataaccacccggaagaacacaggcaaaacccaaactaacaccccccgtccggtaggggggccttttcttttccttgggggatacaattcctcccgcctttaattgggaagcatcttgggacgctcaagctcaacttttaacaacctccttaactttgtgcgccttatccaaccaccaaaattccgatccttacatagcgagttttcagggtagaacaatccactacactccgcctcca

SEQ ID NO: 125230 - DNA, 526 bp, Arabidopsis thaliana columbia
  unsure (1)..(526): unsure at all n locations
agctgctacgcctgcaggtaccggtccggaattcccgggtcgacccacgcgtgcgcgacaaaacaatattgagtctctgtattctgtatactgtatnctctacggctatgtttctctatctgtctatctacggagtcgcaagagtgcatcatctttaacgccggcacctttcccgctgctctattctaccaatacgttcttagatcttctcatggcgatttcttcgtatatcttaatccttcgtggtacaagctcgccggatagagtcttagcttgccatggctattcctatcgggaagctcaccatccttatcggtgcaagtcttgtcgggtcagaacttgctaaagaaggagtttacccaatgtctcgagttttgtctaccgtgcctcttaagatggcatttagggagcctgaagcaagaagatcctggccaattaagccagaaggccccgaaggatacacttatgggcccaggttaacaggctcaggcctgaattgggcttgctttcttaaaacagacttata

SEQ ID NO: 125231 - DNA, 530 bp, Arabidopsis thaliana columbia
actataccactcactttagggaaggtggtacccctgccggtacccgtcccgaatttcccggttcacccaagccttccaaggaaagggttgaattggttaatttccacttcttaagggtacccggaagccatttccttggcctaaaagcctgaacaaggattggttaaccatggttcttattcctcggttggtgaaaaacaaaggaggcaaaacctgatttcaactaaacagaaccaggtccaggtttcctgaagggggaccacagttaattattggggctgatcagtcctggaaccaaatgtctaaaatggttcctgatattacgttgggcaggcttattagggttgctatgaatgttggttgtggggtgcgaagtttgggggcttatatatggcctcgggatgacataacaatgtctgtggcaccaaagaatgtccatgaaaaccaaattcatttggctcttgagcgtggtgtgcctgttatggcggcagcattgggaacaaggcgtttgttatatccaagccaagctt

SEQ ID NO: 125232 - DNA, 462 bp, Arabidopsis thaliana columbia
cgcagtcccggcccggattcccgggtttaccccgcgtccgagaacgaaaggcctgaaaaataggttggtgatggttactttaaaaagcgccattttttatcagcccaacaaaaggagtgatagggaaaacggggctgccagaagctggacccttctacccacttgagcttaccccctgatatctttttttatccggctgacaaaaacctgataggtgaatatctgtagtgaaaagcctgctgtcaggactactatttgcagttaataactgaactcgatcgctacaagttggatccatgggtttgaccacttaaggctttattcggggaaaaagactggcttaatctcaacccgtgggataggacgaatcatagcggtcccagacctattcgcttcgccggtcggagtcattgaaaagcctccgccacggaaaaccttatctccatggaggaaaaaaaagat

SEQ ID NO: 125233 - DNA, 355 bp, Arabidopsis thaliana columbia
ccgttttttttcttttttttagaccccgggaccttgtattccccaaccctttcttcctggcctctcactcggaaataacccttttctttctcttcctggtcctcctcctccagaaattaatctttcgctctggccgttttattttttccaccattcaatccttcaaatggaaaaagtggcaggcattattacctggttggagccgttataatattattcggcttgataaagggttaattggaaaagggattccggtggttaaaaggatggaggtctgtggggtagaaatggattccaataaccgatgggaaggttcataaaacctagcctaaaggtgtggttccaggaccaccca

SEQ ID NO: 125234 - DNA, 328 bp, Arabidopsis thaliana columbia
atacgactcactatagggaaagctggcacgcctgcaggtaccggtcccggatttccgggtcgaccaacgcggtccggggcgcctgggaaaaattctcccggagctgtttcctttggaaccatggttgctctgatccttccttgggttggaatctcgggccctcttggctttggccggcgttaactcgggttccagaaggccaccggtcgatggacccggggaaaacaatcaaaatccaacgtaaatccccggagcagcctgggacatggactcatttttttcattctcattggaaggattctaacggtccgggcagtctttatcgagc

SEQ ID NO: 125235 - DNA, 403 bp, Arabidopsis thaliana columbia
catacgactcactatagggaaagctggtacccctgcaggtaaccgtcccgaattcccgggtcgacccacgccttcccagaccccttggccgaccccttgggcctaatgcctggttaacttttaacgaaaatggtccttaatcctgccgttttcaagaacttgaaaaggtttccgccacttgagcttccggtagcttttgttttttttctgggattctgggaccaacctgataccattttccgcaaggctgtgaacatgctttgggcgaatccttctggcgcagggcttgaaaccacaaaatttcaattctttggctttttcattaaggctattgccaacgtaggtggcaaccttagaaaactccttccaggccgagtatttactgaattggatgcacttcttg

SEQ ID NO: 125236 - DNA, 364 bp, Arabidopsis thaliana columbia
gcctgcagtccggtccgaattccggtctacccacgcgtccggccaatggggttaaagggttataaaactttataattcattccgattaccctaaggcagcagccgttaactggaaacttcttacaaaaattcttaaatcttgggcttgaggcaaacctttaagttttttaggaggagccaggcaggctttaccttagccttcttttaccaacttccttgcaagaagaggcgaaccaaccttatgagtcattaattcatttttggaggtttggggaaggattaggggcttggagggatcatggatccagaaggagaactcttggttacggattccttgaaccagtcataggaaggcacttctgga

SEQ ID NO: 125237 - DNA, 518 bp, Arabidopsis thaliana columbia
gggagctgcacgcctgcaggtaccgggccggaatttccgggtcgaccacgcgtgcggtactattgttggcacttagactagtgaagcaaagttcatatacttaaaattctgggtttattagtgttaaagaccaatttcagtctccatggaaatagaagcaagaagggttattgaagagaggaggtgaagaaaaagaagaccatcttttcacctttgacttgaaaaaggataaccccgataccgatgaagagaagactggggaggacattcaaaccgttgaccaaacaaataacggtgagaggaggggtctggagcttgtgatccgagatggttcagggggattgtaagaaactaatctaacgaaggaatgggtccaattttaacaggtctggggcttacttggctttggtctttgtccaactttgacttagatttttcaaaaacaaggatttgttgggaacccttcctcagacgggaaaccccatggttcgacttttgttgtggttggaacggattcc

SEQ ID NO: 125238 - DNA, 458 bp, Arabidopsis thaliana columbia
  unsure (1)..(458): unsure at all n locations
acgggcgagaatagccggtgctcattcggcgtgcgtgttgtccccacaacttcacagtaagtgttacgatgtcagacacgttctgacgtgctccgcattcgtgaaaacataagtgtggccctccccgccccgtccggtgcaccccagtttcgctatgtcagcctctgtactctcgggactgagcgcgctgcagagttgcagctggcgtgactggggttgggattaggtgcaatgaacacgtgggatgggagcgtagcgatgtcgtctgagagtagggtgggtatggaacagccgcgtcacgtgcctcctgtagcctcacgcccgcgggtgggtataagttgagcagtatgattgtaggtcgcagcgagggtgtgttgcttgtggttactcgccgtctcgtgaacgccaggcgcgaaacactggccgcatgggcactgtggcgncaggtaggcgcaagc

SEQ ID NO: 125239 - DNA, 395 bp, Arabidopsis thaliana columbia
cgcctgcaagaaccggaccggaataccggcctgaccgagcggtcaaagcagcaaggaaggaacccaaggcgaaacgggggacgacacccgcgccacgaaagccaggacgcaagagcggggcgcccgcgagcacagcggaaagcgcgacccagaagcggacaagccgggggagagagaagcccgcgcccgccaatgggggagggcggggggggcacaaaccgggccgcgaaaagaagcaagcaagagaaaaagggcgaagcaaggggagcgagagcggccaagcaggaagacaccacaaaagcgaaggaaggccgcaacgcagagagagaggacgcaccgaagaaagggagaaggaaaaacggcagacacggaaagaggagccaggcaaaccaagc

SEQ ID NO: 125240 - DNA, 535 bp, Arabidopsis thaliana columbia
  unsure (1)..(535): unsure at all n locations
ccccccccccccaataagggggaaaaacggagcatccaacgaaggancggaaggaaggagagaatttaggggggggggaaaggcggacaaaagacaccgaagctgataagcgcggggggtcctatcagcaggccttgtagccgccataataatgacactctactttatatcgtcgtcccatacactctaaaccccatacgccgagctcgccagtggtcacaaaagcacgcccaaatttttttttgcgggaggggggcagagcggacgccacgggaactcctcgatatctgaaatcgcgccacgagagcgaaaggagcaaacaatatatctcgttcctcacacgcgacggacagtcgacccagcagccccaatacatccagatacgaacgacactataataagacgacaggctctgtcggagacattttagatgaggctgcttccccagacgcgcggaatgctgatggcgatgggggattgtgtgttttatgacggattagtaaacctcagcaatgatattattcagtgtaaagta

SEQ ID NO: 125241 - DNA, 479 bp, Arabidopsis thaliana columbia
tacgactcactctagggaaagctggtacgcctgcaagtaccggtccagaattccgggtcgacccaccgtcgccacgcgtcgattatttgtgctgagctgaaattcgaagatctaaagaacttggaatgaactgcagccaggcccgagaaattcagacaggagggttaaacatatgttgttcaagatggagatatcatttttttcaagttcaatgtgtgccggggtgggaagaaatgagatccatccgtctagccacctattcggtgtggtcctttttggaacttgaaggctctatccattttccgagaaagggacccaaactggattttcccatcgtgaggaggctatactcaatccagtatttggtcacctcttttaacttgtgccacgaatggctaagactatccacctttcccttataacctaaggccctcaacccctgcgcgatgcggatttaaaactatttgtaaattgggccc

SEQ ID NO: 125242 - DNA, 445 bp, Arabidopsis thaliana columbia
ggaaaccgccccgtctaaacttgaacctataagcgccccctttttttcttttcaacaagggcggtttcatactaaaggccattattaccacaagggaaggctagagctacccatacagatatcattaacccgcatcacattcaactttaaccgaagactagccaataaacgggtctaaaattttttatccgggaaatctaaacccacacccccacgattaccacccttcgataaattcctcctcgttaactgatttgctccgtgtaccctcgaaggcccctcgacctccacaagcacacccacaacatcctcacgaatggccacagccgtgcgtataacaatactcgacgcctacacacaataaattgccaagcacgccccatccagcgagaccacaccgtcaaagaacacgcatacagcgctcttcggtcatatgctaaaataa

SEQ ID NO: 125243 - DNA, 411 bp, Arabidopsis thaliana columbia
  unsure (1)..(411): unsure at all n locations
gactnactcttgggaaagctggtacgcctgcaggtaccggtccggaattcccgggtcgacccacgcgtgcggttgtgaccggaagccgctttaacattgtgccattagttagctcgaggctttgaacgctatggtatgcgtcgaatgtgtggctgctactactcggataatctggccaaaagaaatggcgaggggaattgccgagattcgtgcatccccggatggcaatgcaagagggcggggcagaggggtggtatgagtccgaagactagaagactcgttaaggtaagaagaagcagtaaaggtgggttatttggtaaccgggtatagaaagggggcgcggcaaataagaccagagtccgccaagggacgttgaggggaatgaactagcgttaacaagaactgctggtc

SEQ ID NO: 125244 - DNA, 478 bp, Arabidopsis thaliana columbia
agcgccccgaccgtaaagccagacaccctatcaaacctttcaccccaaccaaacctctcatttccctcacccccaatatatagggaaatcctttgcattctctcctcatctacgccaatcaacctcactatcacctccataactgtgagcacaagagactgcactcaccgacctacaaacacgccgtttttttaggggccactatctttaactcgctcttcctaattttgggcccttttctctcccctcttagactcccgccactcattctgtaactatataaagaatattttgatagctgagaagtatcatataataatttataaaatttttattctctttctactccatacacctccgtgaaatatattgataaattactcctcttatacccacaagaaagatctctgtatatcaccactcgacaatatgtcatttcacaattaccataatttcctcataattgtactcttcctct

SEQ ID NO: 125245 - DNA, 528 bp, Arabidopsis thaliana columbia
acgactcactttagggaaagctggtacgcctgcaggtaccggtccggaattcccgggtcgacccacgcgttcggcggtgtttagcgaaaattggggttgtttaccactatttgcaatcttggagctcacaagtaccgaggttacgagtcgttgagatctttagatcagtcgagggccggatatcataaatggtgtggaaacctattcttgggaaagcacaatctaacagcacccatcaattcgtcctctaggccacacgtgtttacaaagtcacaagtaatacttcttaggtcaatctgagaaaaccttggctgtgacattcactgcaaagggtcttaccttcaagccgcttgctgtttggtaccatggggggtcagattttgcgccctcgataaccgatgggtggatccccgcctgccacttatcctctcttaagctgaaaaaaacgaaggactcctcctttgaattgatcatttgccctcttgcttaaccctttggttcacctccccaccatggtaaggtctagat

SEQ ID NO: 125246 - DNA, 496 bp, Arabidopsis thaliana columbia
tgcacgcgtacgtaagcttggatcctctagagcggtcgccctttgttttttttttttttttttttttttttttttatagggggggggttttttttttttttttctaacacccaaagaattttttttttaaaaaaagggggggaaactggtttttcgggaaggggtttggcattcatattttttttccccgccctttttttttaagggaggggaaaggagggggggggaaaatggcgcaattcgcaattcccttttaatggagctaaggaaagaagggggggaaataacctttttggccccttttggggggggttggagtaggaaaaaaacgggatttgtttgggttaagaggggttccaagaaaaaatttccataaaactgtggggcgtcttgaaagaaagaggatttttttttttataatcgcaccaattctgcttgaaaaaggggattaaaaaccagtttggggggggtgggatgatagaaagtggcccgacct

SEQ ID NO: 125247 - DNA, 358 bp, Arabidopsis thaliana columbia
  unsure (1)..(358): unsure at all n locations
tacgactnactctaaggaaagctggtacgcctgcaggtaccggtccggaattcccgggtcgacccacgcgtgcgctcctctttctaactacatgaaaacacaatattggatcttcttagtatgctcctctctcttctagtctcttatctcatcttcaaagatctcggaaacgcataagactccatagagagaccaaatactgctacctctttggacttaccaatgtgacaaacctttccgacgattcgtatggtcgaacactcacattcagctggtgataatcatgccttcgaaacaaaacacccttcaggctcaaacgaagttcaaagttcgctccctcaaaactgcctcgtaagtt

SEQ ID NO: 125248 - DNA, 446 bp, Arabidopsis thaliana columbia
acaattaacctaagggaagagcgggtcccctggcaggtcccggtccggatttcccgggtgaaccacagccttccaacctcaatcctgagaataaaaccatggattccctgaggaggggccaaagcttaaaggaaaagaaccttaactttaagtccaagttaccttggatagccaaagaataagtaaaaaaatatggccggttcgaatgctttttccattcagttatataaactcttggaaaatgctgtggtttccaatccaacacatggttaaatgctctggtaaaatcgcccttgaaatatggcttggaattaatacctatgggtgtcccttggtttttccggtgtgtgggctttttacggggatgaaaattcggaaactcgtggtcatggggcctcctcaggcttttcacaggggtccatacaatagcgaaggccacttaaaaa

SEQ ID NO: 125249 - DNA, 351 bp, Arabidopsis thaliana columbia
gcacgcgtacgtaagcttggatcctctagagcggtcgccctttgtttttttttttttttttgtgaatctttgaggagggatggggtgttgttctttatgtgactgacccatttgtgtgctatacgaaataaatggtgcgaggatggtgcacggaagggagaagggcgacagggccgggacaagaagaggtatgcgaactgcagattttttttttgaggggggcgcaccgggcagaggccaataaaacagatttataaaatgccacctaagaaaatgtggcgccaccagaccataaggtcgtagcggaaaagaaacggcagagagcacaaaacaggacaccgaggcggtgag

SEQ ID NO: 125250 - DNA, 319 bp, Arabidopsis thaliana columbia
aatttcccgaggttctgacccacagccgtgcgaggcctgattccttcttctctgtttattcttttcaacctgaaggctttttgcttaccttttcggatccaattccttgttgcttacccggtacattcccagaaaaccttgcctttcttccgaccggcgttggtgaccacgcatcggtgacaacacaccagtgatttgcttggcgttcttctttcaagggcccctttttttaattcttccttatcttgacgagacgaaggcgaattcaaggccgaagtcttgcgtctaaccacatggcccaaagatcttgcaaacgaag

SEQ ID NO: 125251 - DNA, 498 bp, Arabidopsis thaliana columbia
  unsure (1)..(498): unsure at all n locations
cgcctgcaagtaccggtccggaattcccggcttcgcccacgcgtgcaagcgatccctctgctaaaantaaccagtctagggggcatggcccatagctctgccagatactgttacacaccgatattcgcgcaacagaatcacattcgagtgcctaagctgttctcaccaataacgaaattctgcatagtattgagaattttttttgtgaggggggacaatcgaccatgctttaacatttacagccgctgtgatctagctcatgagaaagtactcgaggtcagagtaaaactaatagacagtcgcagaaactcggtgcgccgtggaggcggactatgtaatgactcgacagaccgtttaatgtaggactgcggcgcagaattactgaattagaaaggataactagtcttagttatattcaccttctactcctgtatcgtatcttgagatcttctatcgtcatcaaaatgctcccctatctagcctaaagatcaaatatct

SEQ ID NO: 125252 - DNA, 458 bp, Arabidopsis thaliana columbia
gctactacgcctgcaagtaccggtccggaattcccgggtcgacccacgcgtgcgaaaaatgaaacatttttttctacttttcatttttctggtcattcttttggccacaagctacaatgatgcctttaccagaaacaggttttcaaaagatttcctctttggagccgtcacttgtgcttatcagtgggaaagagctgttgctgaagaaggaagaacttctagtggctgggatactttcttcaactcttaccatacagggtatggaaatgtaacatctgatgggtcttacaaattcaaggaagattttaaacttatggcaaccaagggcttataattattcaaaattctctttctccctggtagagacttattccttatgggaagaagacctattaattccaaaagaatttttgtgttaccaccattttattataaaacttaaaaggcctggaatccaa

SEQ ID NO: 125253 - DNA, 296 bp, Arabidopsis thaliana columbia
cgattactctatggaaaggcggtgcccctggaaggacccggtcccgaatttccgggatcgaaccaagccgtgcggtttgttaggattgtagaggattcggcgacgaactttggtgtgtttcggtttagattaaacagcttccttttagaaaaccctaaatccttgtggaggtcgggtcggccaggtggttaagggccccaccagagacctcgtgctctgaataaatctttcgagaggaacgcctgtcgttgtggttacattgtaccggggtgcgcgcgagttaaaaatctctgtta

SEQ ID NO: 125254 - DNA, 276 bp, Arabidopsis thaliana columbia
cgtcgataacattatttagaatatccgagtgtgcgcaacgtagcgacggagaaaggcgaccagacggtataacagagcccgcagtctattcattttctcccgcaacgagtaacataagtcatcacttacgataacaacatcctctgtactcttctctataagaaatagtgtggccggcgcgggctaaatgatagtgtatagatgttcggtgcttcacgtggttcgatgtgaacgaacacccgaagacctcaacaattcaggacatacaacaagggc

SEQ ID NO: 125255 - DNA, 223 bp, Arabidopsis thaliana columbia
tctgggagggaatcgatactaccccatggatacgctgcagtgccaaaagcccttcggtatccacagcactcgagcgatagttcattgtatgaacattaagataccccacttcggccacctccgaagaggctattcgggtctcccctagtttgtcgtcacgagtgctctcttactgttcttatgtttctttatgcctaaccgtcaactgaattccgcagcattc

SEQ ID NO: 125256 - DNA, 496 bp, Arabidopsis thaliana columbia
  unsure (1)..(496): unsure at all n locations
aactgcacgcctacgtaagctaggatcctatagagcgttcgccctttttatattttgcatttgacgtgaagggtgatataacaggggagcatttagtttacgggccaacgcttgagattgtagtaggagacctacgaaacgtcaatcagcgcaacgaaaccacgtaccgaaatcgacacgacccgctaccccccccaaggttttttttttggggggaccaccgngcccgtacgatgggcatagaggaaccctttatcctatttaccatctgtcaatgataccaggctactcgagtggtgccagaaagtctgcctgatatcatggattcgggcgttacgtataagtttggcgtgcgaccccgactgaggaaagggaaccaacaattatgtataatagcggagcaatgtagggtgaaggttttaaatagtttggacgtatgcaaagttgtacacagcttttattggagacataagtatcaagccgatacgaatagtat

SEQ ID NO: 125257 - DNA, 417 bp, Arabidopsis thaliana columbia
gtggcccgctgcgggacctgtccagaattaccggggacgcccacgccgtctggataaaaagactactgtgccaaaattaggaaaaggatatataccagagtatcagatttcatgtggatgaaaagtcatcagatgatctgaaatttggaatcagcctttcattatgtagggcttctcagcctggtgagagtatatatttcgagtctaaatccccgaagtctggaaaatatttccatcctaaagttctacggagccattacctttgaccacttagggaggaaaaacagaatacctaatcgtctctcgccttaagatggagatttgcgaaacaccttaaattaagtgaatcttgtgtgccaaatataatatcctagagtagaatatactgaggaatttataggaagaaggtgtccgcta

SEQ ID NO: 125258 - DNA, 318 bp, Arabidopsis thaliana columbia
acgactatactctttaggtaaagctgggtacggcctgcaggtacctgggttcggtatttcccgggttcgtacccacgccgtgccgatgctaacttgtctttattccggagtaaattcatgatagaaaatttcatcgatggcggccaagtagccgtagaagaatgcctggccgagaaaaaaaccggcgctgtgagacccggtggtaagaaaaccaggtcttgttgaaatagggtatccgggcgggttaaagaataccccttagggcgggagaaggaaatttgccacctaaaaagggaagcccgggtgaacaaagaaaag

SEQ ID NO: 125259 - DNA, 488 bp, Arabidopsis thaliana columbia
tacgactcactctaaggaaagctggtacgcctgcaagtaccggtccggaatttccgggtcgacccacgcgttcgcccacgccgtacgcacattaccaaggctacaacaaagaaggaagatttttttaccaaacttgtttgagttttttggagaaacctcatgtgacaggtgatgtgaccggtgacactacagtttctgagaaagagaagtcaagttagggagcaaaacgcaagaaaactcccaagaaaactttaccttcagctgggagttcatcctccaaacgatcaagaaagagccaaaataagtctgaagaagcaacaaaagttgtcaaacagagtttaacttattctgatgatgaatcctgagaagagaaaggagaaaagaaaaaccagaggaggagaaagccctagataaagaagagaataaagaggagggaaatgaaaatggcttttctgataatctgaagatgaggcgccttaacccttttg

SEQ ID NO: 125260 - DNA, 499 bp, Arabidopsis thaliana columbia
tggaacgcacgcgtacgtaagcttggatcctctagagcggtcgccctttttttttttttttttttcgatacaacagtcgcattattatatatttggcacacaacattttattactcaagcttactttggcagccaaatgccagaagaatatatcatcgaagaattagacgataaaatctttgggagaacatctcataagcttcttgttttttgcttcctggctgtacaccagagatccttaatggcccacgagaaacgggcaaagcttctgatgactttatatatttataacttggcagctaacaagttcaacagcaccaaagtccttggttgcaacgagttcccatggaacagagtctgacttgttaggcgcctcggccttaaatgcgggattgaaacaaaactggacctcacgaagatcaggaaacctgaagtcgggacctcaccttccaacactgtaccctcttaatacggggctctaccacagaaatgaacctgg

SEQ ID NO: 125261 - DNA, 512 bp, Arabidopsis thaliana columbia
cgactcactctaagagaaagctgatacgcctgcaagtaacggtccggaatttccgggtcgacccacgcgttcggagctttctaagtaagaaggactcctttgagcaaatggccgtttgtgggtgcgctattggtgctgttgatgggggtctttatgttattggtggacactctaggtctaaaacagtgagctgtgtttggcggtttaatcccattttgaactcttaggagtgaagttagttttatgttagcgagttgggcttatttcaaaacaagtgtattggataacaaactttattttgtttggaagggttagtccgggactgggaagtttatctccttttcagtcaagtgaaggttatgatccaagccccgttccttggtagaagtttcaagcatgccctttttaaaagctcaaatgtggcaaatgccgttttaggtgaactacctaagccctatagtcccaagaatatacctgctaccaccgaaaggtttaggtttattaaaagttaa

SEQ ID NO: 125262 - DNA, 490 bp, Arabidopsis thaliana columbia
  unsure (1)..(490): unsure at all n locations
ggaaagctggttcgcctgcaagtaccgggcccgaattncccggtcgacccaagccttcccggacccctggggtttcttgttcaacaaaagggcggattcctctttaaggtgattgcctctgggtgccaaaccctgatgattgctaatactgggggtgcttttaccctaccttctggggtcttgctccgaaggtttcttctttccaaaaggaaaaatccttgctggtggggttaggcttactgggtatcctcttttacctatgcttttaacgggctagtaggtaatgaaaaggttggctcccaatagatgaaccaaaaggcttcttctcaccacacaattaaacttggaacctttgtgcctaattcttgggaagtctaccatcaaaaaaaccctggtctggaattcaagttgaagcttactttggtttacaaaccctgttaaaaatttttttacacttggccattaactatttaaacccttttgggaaaaa

SEQ ID NO: 125263 - DNA, 516 bp, Arabidopsis thaliana columbia
tggaccccttccttaggcttggattcttttgaaggggccgcccttggttttttgtttttttttttttttttcaacggacgttttagaagggggtttttttctagaaaccttggggaaaattccgaattttaacccggggttagcctttttattccccccccttaaaattggaattgttttccaaaagccccttaaaaccttggtttgaaccggggtattaagtaaaaaaaaaaaaaaagaaggttttgagcttttttttaattccttcaagtttgggggatcctttttcctttctttgggaacaaaacccttttcatggtggccttaaatgaaccaaaaaacccttactggtggtcttccatgggcctctgaaaattgggacattttaaagggttttggtgggtttttaaaaaggcagatccccgcacctttttttctcaattatccttttttggcccgaccttttggagggggggaatattggaacttggattttgtttggttttttcccggagg

SEQ ID NO: 125264 - DNA, 504 bp, Arabidopsis thaliana columbia
tacgactaaccttaaggagagctactacgcctgcaggtaccggtccagaattcccgggtcgacccacgcgtgcgagaagaaataggctctgctctgcgccttttctacaagaaattcaccaaaaaagcttgaatatttatcggaatcaaagcttgggtttttaatcctggtaaagccatgtcacatatggtgtttcagagccgttgtcgctcccaaacccttatcttctcgtaaaccctgtttacctatccctcgtccactcgttactctgccttgtaagctccgtcgtggcttcgttagagcttcttcgtcctcgtttcttgtcgatgattcagtttcaggactcgagcgttgcttacaattaccttttgggagttgagttaggcacatcttcctctggctctttttctgcaagtacctaaatgtgtcctgtgatgaaaggcaaatttgagttcggtagggactgttactttggaaaaagggaaagcttgatatgaccccaaa

SEQ ID NO: 125265 - DNA, 472 bp, Arabidopsis thaliana columbia
ctcactctaaggaaagctggtacgcctgcaggtaccggtccggaattcccgggtcgacccccgcgttcggtcaaagattctgattgagtacgatttctaattccaccaatctcaatgcaatcaaaaaagagaattcaatctcccccacgctcaacctaaattcaggattcttctcacatagcatcaataaaagaaagcatcagatctgagatatctattgtatctctgttatgagccgttccttccacagcacagccttggctcggcgaaaccttctgaaagctttctttgcgtactatcagcctagaggctgataccagtacggcgcagaagtcttcctcgtacaactctccagaaaccaaatcatagccatgtgaggcccggcatctacctctcttcttccctacaagacatgagccgactgaacacgtctcggcaggtccagtgtacagccgcttcctaaactatttcc

SEQ ID NO: 125266 - DNA, 298 bp, Arabidopsis thaliana columbia
gccccggggggaccaaaggcaacataatcctcgaatcaaatacaaggccccccccctccatccagaataaagaacaacctcaccaaaacccaccatagtctaacccaactttttttccgaaccgaagtccctaaaccccaacttccaccgccagcaaacgcatactacaaaacgagacgacccagcacagcaaaggctggcgagccacaaaccgaccagaaaaatacacaacccccgcaaaaaaatcctgccacacacccataacgacacaaaataacaccccacccctagcaatcat

SEQ ID NO: 125267 - DNA, 495 bp, Arabidopsis thaliana columbia
cggcaaacaaaattttacaggaacggcggacagagccaccacccaacccacagcagcgccgacgaggcaccacgcggcgcggaaccacaagccggcgagaacggagataaccaggtcaacacacacgcggcgcgaagaaaaaacgtcatgcacgcatgtcgcccccagatcggcggcacgcccaggcgcaaacccggcaacagaacccctttttatcttctggcggggagcaaaggagctgacaataacgcagagcaagaaagacaaatctgcatataaaatagatgtacaaccccagaaatacatccaacacccacccatcatattcgccgcacatgatgaacgcaaagcgaccaccctccggccaaccccgcagattactcacgccgatggcaaccaccacacgacgcgcccttaactgccctacatacgcgtgacccaacgaatctgtttatcttttgttgtcttgcttaaccggcgcgcgggctgaaggac

SEQ ID NO: 125268 - DNA, 576 bp, Arabidopsis thaliana columbia
acgactaactctagggaaagctggtacccctgcaaggaccggtccggaatttccgggtcgacccatgcgttcggtttcttgatttcgaacaaccggcattggcgaagatagaacccggactttcaaaaagcgttttcattccgtatccagttattttgggggcaagaagattccacggcatatctcttgttagtaaggtcatgacgcttggccgatagggaaaattggctagccccttggcgttggaaggcttgcagaaatttggatcgtataatcggcccgggggtaacaaagagtttcttgttatttcatgcttatggaggggctgtaccaggcgctggcttagaggccactaacacggttgagcgctctgatcgcgcgacatttgggaataaaagtaaaaacatggtttgcaccatgttatacctacgctcgtcggcgtcgaccgtctgagaggaagagcttagaaacaaggtgtagtcgatctaactgctttggttgaaaaataaatatggaggtgattcgtgtgggaatatgggattcaatttaattgcgtctgtaataagatttgatatc

SEQ ID NO: 125269 - DNA, 361 bp, Arabidopsis thaliana columbia
gccgcgtacgtgagctgggatcctctagagcgttcgccctttgtgttatttcttttatcgatcatagagctttgagaccggggggcctctacgttcgccaggcgcgtcgtttacgagaaggggcgacccccaacgtaattaactctccactggccccgaggggacaatgggaccccgaggaaggaaagagggagggttttttttttgaggggggaggagcgcggcgccagcggcggcggcgcggcggacacacagacggcctgcgggaggagggcggccgcgacacgaaccagcgacacaagagagacgggggggcggcagacgtggagtggggggagtgagggagagaaacagcggagga

SEQ ID NO: 125270 - DNA, 489 bp, Arabidopsis thaliana columbia
gcacgcgtacgtaagcttggatcctctagagcggtcgaccttttttttttttttttgttttttttcgctcataaaactgaacgcgagctttttattatgctgaccgattaccttccattactaacaaacggcggacgaatttttatcttgaccatataatgatcctatctgcttcataatccaacccccaacctttttttttgaagagagtcctatggaccccctacctttcaccgctgtccactctcctatgtacgcgttgtttattttaaaacttaataagaaggaagagctaccagaattggtacagctactcaaccaaaaaaaggagaaacttgaatgatcaacgctctcctccatcgccgccacccaaaacgaatatggttctaccaattgggcaagctgtttaacaattcccttcaataccctacagaacaactgaactgctgcaatcaaaacgcgcacccccctatgttgaacttcttacct

SEQ ID NO: 125271 - DNA, 553 bp, Arabidopsis thaliana columbia
  unsure (1)..(553): unsure at all n locations
acgactnactctagggagaagctggtacgcctgcaggtaccggtccggaattcccgggtcgacccacgcgtgcggccaagcgttcgttattagcaacaacaatggcctgtttgctaggcaggagctgttagcctctcgtgctttgaaagaccttaccaccgcgccgggttgttgagccaacgtacccggaggaccccgggttaccagaagatccgaaacccgcaaaacttttattaaaagagggactttgactccaattgagaccgaagccctcgggaaaagggaccccgataacctttgggtcaccggcttacatacaccccttttggccgtgtacattggaaccagctggaatcgcagtttaggctcggccgaaattcaacttgccctgagtgccccttggctttgaacccacttctgccattgtgccttagaagaaaatgcctgggcacctgtccgggccgttagttccccgaatccaaaaacccctctgtttgccgggatattgcccgtttgggcccctatgaaccaaggcccctttcggcgggtggtt

SEQ ID NO: 125272 - DNA, 517 bp, Arabidopsis thaliana columbia
acgactcactctataggaaagctggtacgcctgcaagtaccggtccggaatttccgggtcgacccacgccttcgcggacacctgggcagacgcctgggttcttcaaaaaaaccttttctttatttccggaaaaattcactcactggtgcttttgattcatattacaacacactacccttttatgggttgtgccaccgaatttcaagggtcattcctgaattcaatcaacattcggcgtaatcagatcgggttcatggatatcaatcaccaaccagaacttcaaaaacttgaattttttcaaaaacaccttacccaaccgtttttggatttaattacatttacattttaggcttctttcttcttctgtttcagcgttttttaaaccgctgaatccattttttttaatcccttggttccaaaatctcttaaaagttttattgcccgggaaaccaaaattaagggcgtgttgaaccccaaccaaatactgaaaccggcgtctttaaaaaagggtttgccg

SEQ ID NO: 125273 - DNA, 317 bp, Arabidopsis thaliana columbia
  unsure (1)..(317): unsure at all n locations
aaaattttggagatgtagaagtgatgaaaagaagaggagggggtggacgaggtgcgtagggatgaagtaagaggaggggtgaagaaaaaaaagagaagtgaggagtgtaaaaaaggagcaaggagagtaanagtagaagagaaatgggacgagatagagagtagttttgaagagagagggggaatatcacagagggaagaagagaaggaaaggagtcgggtggggcgtaaatataaaggtgcgaatgtgaacaagaattgaagtgagaaaaaagttagataaatagggatgaagtgggtgataaagaggacaaagag

SEQ ID NO: 125274 - DNA, 516 bp, Arabidopsis thaliana columbia
gcacccgtacgtaagcttggatcctctagagcggtcgccctttgtttttgtttcttactatattcgcctccgcgcgcgtcaaagggaaatcaatacccacaagaacgcttaagaaagtggcatggtggattcttccagaaggattatttgggagaaaaaaaagaccctttttgacaaatctgttggaaatccccaaaaagagttttgattttgtcccccgcctatccacagccccttaagctgtaccaaaagacccggcaaaagtagtccccttccttaaatgccccagctgatgaaaccaaaagcgaccttcgataacctctatatccgcacttgcccactgaaggcaaaagatcacgcccctgaggatttaacgcctccccctcggggatatttttgggggctcgtcctcccccttgccaaaacccacattaacgggtctaaaccattcccgaggtaatcgctttcccacaaacaaaacatcaaccccgccaaaaaattgtccacaacggccgg

SEQ ID NO: 125275 - DNA, 549 bp, Arabidopsis thaliana columbia
cctgcagggtccggtcccgaattcccgggttggcccacgcggttcgggccacaacaaatttcatagagaagcagaaatggcgaaatcacttcctttgtcatcaaccctaaaccctttcttcttcaccaccttcttctcttcgaaaaagaaccaaattcggattcctcggggaaaccagcaagaaccaagacctccgtccttttctggtgttgggaaacaacgggaacctgtttccttggatttcttgaaccagcttacttactacatggtcctctcgaagtactgaccgatataatacccctactcggaacgccatcgattccttgaaagctgattgacgactgaaacaccttttttcgacaaaacgggaacctatgatccgcaaataagatggattgtctaggacaacgctggtccttggatatctggccgctaaaagtaaaaaggggttatttgtcaggattctgtttttgaccatgtgttgtcagagttgagggcaaactcacatgagtaaccactgtactaacccgttcgcctggcactgtttcg

SEQ ID NO: 125276 - DNA, 256 bp, Arabidopsis thaliana columbia
ccgcctgcaagtaccggtccccaattcccggtttcgacccacgcgtccagaggattttaactttttcgagtatataatgacaccagacgcgaggaccccgcattctaaaaagggcatagcggtacaactctttgcccgctaacgaggcgataggatggccgacacgttcgaatctaaccgtaacaaaagaaatatttcttgccccaaatattcctgtgcaggtgtgtgctactcgaacacaccggtcatttatgct

SEQ ID NO: 125277 - DNA, 373 bp, Arabidopsis thaliana columbia
aataatattccccgataaatttactcaattcatattttttatacggaaagaaaactaatcaaccaatacacctcataaaatcatttttctccaatactacacattctctataaagcttactcttcaaattatctcctccattcctaactacacacaaactaatcctaatctaacataaaatcttttctgaacaataattaactttatatacgtccatcgccccctaacccacattccaatccccatcactacaccatcctacatccacctctatcctattcctaactctatgcaccacttctttccctacacaaacacaatacacatccacctacatcatccgtctgcgtattgtacttagattatcctcaat

SEQ ID NO: 125278 - DNA, 303 bp, Arabidopsis thaliana columbia
gaatactcaaaacaggtcttaaaatgacaaaaggcgcgtaaaataagggggggcacaagacgaagaaaatcgtctgatgcgcatgttcaagagggagagtcgcgtcggagcacgaagtacgacaccgcatgaagcacctatcaagctctatcgaagtgcggcgagaatccgagggaggtggaggcgtgtcgacatcgattgttccagcgaccccgtctgacttccccagaggatacagagtacacagtacgtgagcatagcgatggatccgaaaagagagaagaacaataagacgcaaataga

SEQ ID NO: 125279 - DNA, 447 bp, Arabidopsis thaliana columbia
ttcccaatctcgggcgtaacactcttgacgaactgtgtgttggtctcacatatttaatgtcgtggaagattcatttacggggtccgtgtctcttttgttcgtactaccagattgagaagtagcaccccattcttgaatataacgtcttttccctttgtagggtcggtgttccgtaccaagctaagcctgttggagactctatttcatcattaggttgtatatagtcgacatccgtgcttttcaagaatctctcctcgggaaggtatagtatagtgatgttatcgcctcgcaatgtcgtccctgggatagggtctgcatgtatagaatcacgaacgaagactcgatacagactgtgttaggagcgagttacaagaggtgaacgtgttctctgattgtgatgtatatgcattgggagtttactctggtactttaaatgagggctatcgt

SEQ ID NO: 125280 - DNA, 551 bp, Arabidopsis thaliana columbia
  unsure (1)..(551): unsure at all n locations
caagnnnnnnnnnnnnnnnnnnnnnnnnnnnnnnnnnnnnnnnnnnnnnnnnnnnnnnnnnnnnnnnnnnnnnnccacgcggtccgaaaagagtattggatcaattgttgattaattaactgaggtagctaatccaaatgaagattatatatgccccaccttcaagaagcagataacgatgctgactgaaagatcgggttaaggcacaccaagaacaacgagattattatagaaaccttgatctgacctaaaacatcacgctgtttggattcttgggtgctggatcgtgtgtgttacccatattactggtcggcctaagctgaaactagaacccattgccgtgaaaaaatgcggtacagaacctacttttttgaggcggactctctgaaacaatcacagattgtgcgtgggattggaaagcgccttggctcttaaggatgacaaataataccggtgaatgtactccagaatgtgcacgccagcagcgggtgaaggtagcgtgacagcggagaggcccccttaagccttgtaaccttaagtagataggttac

SEQ ID NO: 125281 - DNA, 445 bp, Arabidopsis thaliana columbia
aacgaccacccttagggaagctggccccctgcaaggaccgggcccgaattaccgggtccaccccacccgtccgattatgatcctgtgtaacactgtggttaggcataccaagcatccaggtgaccgcaaagctcttgtacgaactcattcccaaagattcgccttgttatataacgaatagctttagagcctaaaagaaccaaacagccaaaatcctgggcattcctttggcgcgggccgcttcaaacgataccaacttaccgtaccccttacctagcacttagttgggattcgtcatttcgccagcgaatttcatgttcctgcgcgacactcctctcaggcgtagctacgaggaccccgcgctcgatcccacgcctggacagtttgggctataatgccccgttatctcgtaacagcaatacgaagaaaagaagacccccctctc

SEQ ID NO: 125282 - DNA, 333 bp, Arabidopsis thaliana columbia
tgaggcgtagtcgcaagggcgagtcctatgcctcatcaaatagatgggtccctcgattcgccggccctgtaatactacctacatcagagattatagtgattctttattatatcgccgatccaagacacattttcgagcgctcggcgtgaggcacctcagcccaacacgcggtacaatgatgctctctacgtcttcttttcgcgccaatcgacttcctgacaattaaatgtgtcgatacgagtagctagatcgtataatcgcgacagtcttccgaagatatacagaggcatatggtaacatcccgcaccaaacgacaaacctagctcggatcgc

SEQ ID NO: 125283 - DNA, 456 bp, Arabidopsis thaliana columbia
gcacgcgtacgtaagcttggatcctctagagcggtcgccctttgttttttttttttggacgataaccgatccggataatcaagaaataaggtgagagaatggaaaccaaagaacgccagcgtgatggaatcgaagcataaaaaaataagactggcaactcaacaacacaaagaaaacctagaaacctaaacaaacaagtttttttcaaaggaggcgtataaaaaacacaccaacccagtaccataaacaagccccgataatcaaccaggcggaacaccgcaaaaaaagatccggaaactctccgtccacggatcacccaggctggaagaacacaccagctcgaagaaacacagaaaacacataacacacgggaggagaacaaaccacactacaccccgggtcaggttcaatgagtatcccagccgcaccgagccagactgaatagctggaacaggt

SEQ ID NO: 125284 - DNA, 483 bp, Arabidopsis thaliana columbia
tgacgtcgcatgcacgcgtacgtaagcttggatcctctagagcggccgccctttttttttttttttttttttttttttagtaaaaactggcgaagaccacaatcatataatcagtgtagtcatctatctaagttggggctcatagctttccggttttggaatttaagacagttcattgttttgcatctttatctaacaaatcttaatcttcaaccaaaccgcataaacctacttcgacttgaatttctcgccgagtttaccgactctgtccttaaactcttccacagtctccttagccttcactatagagatatttctgatctcatcagccctcaagctcgtttgtctccacacttcctctgctttagacttagttttgattttgaggtctttggctttgttctccatgccatgaacttgttgttttaaggctgatatcagaaggcttatcttctctatgatcaagtaaattacttctctgga

SEQ ID NO: 125285 - DNA, 578 bp, Arabidopsis thaliana columbia
cgactcactctaaggaaagctggtacgcctgcaggtaccggtccggaattcccgggtcgacccacgcgtccgcgcgaaatagatacagtagacctttctcgttggctctggccaggtgatcaaaagacttgatgaaagaatcttgagtttgaaaagctggtggcaaacgtatactttacatcccaaggccctttggcgttttccaaaggagtctaatttcacctccaagggaagccgaaaagtgccgccaaacagccccggtggatatttgacgtgaagcttagaagttcataccatggtctttgatttagaagaaaacatgaacccccggctttttccaattgcaaatggtaatccttcctacccaattacaagaattctttgggatgaattttaatttattggtcctcatttgttgggaagaacattaccattgggtttacacaactcacccactttcgaaatatactcattgggccgggcccttctctacagaacccaagccttactcaacgcagatgctagaaaactgactaaatctccttcttaaggcgtaccctaaattgaaattcaacggg

SEQ ID NO: 125286 - DNA, 371 bp, Arabidopsis thaliana columbia
ggccgccagcgaagggagacacacccgcggagaacgacagcgcaagaccacgcgcacagcgccccacccgcggccgcccgcgcaccacgaaccaaacagacaccgggagcacaccggaccggcacccaagccgcggccgagccgcgccgcagcagagagaacaaggcaccgcacgccacccgaagacgcagccgagacgacgaccgcgagggcgggcgcaagggaaggaaggcgtgatagagcgagggggacagagaagggcgggaggcgacggcgggcggcgaagaccgcccaccacgagaaagaacggcacccaccacgccccgccggcggcgacggagaagcgcgccggccgaccccagagaccgccg

SEQ ID NO: 125287 - DNA, 595 bp, Arabidopsis thaliana columbia
gtgtgacgcgcggtgagcgtagatttgagactagtagctccaggtctctacgactcactctaaggaaagctggtacgcctgcaagtaccggtccggaatttccgggtcgacccacgcgttcgaggacgcgtgggctaaaacaaaacaaaacttaaggtcatacatcatggccttaatatctaccaaaattagttcacgttcttgttttgtttttgcttatgcaaacgattctccaacgtgtctgatatccaaattttcccaattacgggcgattctttagtcgcctgcgaatactggttaaaagaccgttcttgagaaatcgtcctgcgtgagtttctaaccccttctgaagcaggctgattataagacatccttaagttactatattcggcctactttcaggtggttcatgctgtgtttcaaatctaaaaatagtgtttggtccctgcacggtagaattattgacacgaattgaaatatcgcaaaaatcaagacgttactgagggcgtaccctaaattggttcctgcgcggaacctgttgatgatcacagtcgactaaaagttaggggtatggttctccttatgaacaagaaat

SEQ ID NO: 125288 - DNA, 281 bp, Arabidopsis thaliana columbia
  unsure (1)..(281): unsure at all n locations
ctgcacgcgtacgtaagctcggatcctctagagcagccgcactatgtgtcgtgtctcgaaatcagaacaacttagatagggtcggcgacacgaaccctcccgccagacacaatacgccagagacacaacactagtacgggtgagtataaccactgctcatccgctgaagggtgggcgcgcgaggntacgcgtccggcggatgcgccgcactcttttcctgcggcgggcgtaaaaacacagccgagccgcaccaagcgaaacacggtgcgcgtggggagtgc

SEQ ID NO: 125289 - DNA, 593 bp, Arabidopsis thaliana columbia
actcttgggaaagctggtacgcctgcaagtaccggtccagaattcccgggtcgacccacgcgttcggcttcattttgctgccactggttgaaaacaatcaaggctatatgtaagggcctaagaagggaaggcccatctttaggatactggttctcctgggaaagacccaactttgtgagcttctaaaaaagcttgttttttggccgaaaggaatcataggttcacatcttttatctccatgggatagacaaacttgtgatatttataggcacacagaaccctcccgtgtgttggctcttcgcttggttaaattaattggaactcggatccaaggccaccttgggatattttgggtccagagtaaccggcccaagggatcaacttcagtctactcccgcgacatagtatacttcttgttttactctacagctaaatactcgtacttcgcgcagtctgggtgacattcgtttatggcagagcaaggataaattcaataagattaagaatcccacgcatgaatcttaccaactctggtataagccaacttttatctctctatttaatcttaggctaaagcgagtatttatcatgta

SEQ ID NO: 125290 - DNA, 230 bp, Arabidopsis thaliana columbia
  unsure (1)..(230): unsure at all n locations
gatcctacctagagcgtcncgcgccgggggcgggcagtgtgctttttattgaggaagtgcacagcgctaaatacaagggcggggactaatctcacgccggctgcacacgggaaatgtactgggggctgccacaagggtgtagtaaggtgcgcaaggtacgaaaaggcaaggagagggaagagacgcacagaggtagcagaggcgggagagcagagagaggaggggagagg

SEQ ID NO: 125291 - DNA, 537 bp, Arabidopsis thaliana columbia
ctggttacgccctgcaaggtacccgggtccaggaattccacgggttcgaaccaccccgtgccggcaactttgtagatcaagttaaagaattggcgggtacatcactattgtacaatcaagctcaagggctgctgaaccattcttcttgttggctggtcccaatgtgattgaatcccgaggacatattcttcgaatgggtaagcccattaaagacctttccacaaaagttgggcctgccctagatttttaaagtcagttttgataaagctaacaaaaacctctttaaagtcattttactgactctggtctaggcccaagagtcttaagaattctagagaaagggaaaagtagcctatgatcctacccatagtaacttgttgttcattaaattaagccagtgataaacacacttgcccaggttgttcatcataatttaacaatacacactcttcctaatttcggccgacagaatcctctgggttgcaggcatcccaatcccgtaaatattttctactcttaacaaaaagacaatttcgc

SEQ ID NO: 125292 - DNA, 493 bp, Arabidopsis thaliana columbia
  unsure (1)..(493): unsure at all n locations
aaaagagcccgaaggggcgcatcctatggagacacctatagnaagttcatgacgtcgcatgcacgcgtacgtaagcttggatcctctagagcggccgccctttttttttttttttttttacgttttttcgtcttttatcaccctatggtttctattctcacgcctttattccctccaaaaaaaaagggacgggctctctttctaaccaatcgcgcttcctgaaactaacacccacgcgaagacccccctttgctttttttttttataccacacccttctccttaacctacacaaaaccccccggtgtgccgctcaagaaaacaccctctcagagaggaataacgctattttccgcacacttcttccctccaccgatcatcctacctcgcctcccatccccccctcaacgcattacctgtcttactctagtataatactacgcccactatgccctagacacccaccccacgacttgactatatttatcatcact

SEQ ID NO: 125293 - DNA, 563 bp, Arabidopsis thaliana columbia
gactagaggaagagacgaaaaaattaagggtagtagctccaagctctaatacgacttactctaaggaaagctgggacgcctgcaaggaccgggcccgaatttccgggtccgcccaagccttcgaagggttgggttggtttaatacctccgccggcattagctggcgagaatacccaacttttcataaaggtggctctttgacacctaaccgaatttgacttctttattgccaaatgttggtattatcaaaagaaaaagaaggtttttcccgggtttttaaataaccaaaccaccttcattataataaaaccacttcctttggccttaaaaaaacagaacgagatgttttcgcacgggcgacacactcaaccgaccgaaaacatacaacccataaagacgagttggggggggacacttcaaaaagatccaaaccttctgggccgcgggcgtttaaaggcaatgggttttttttgaggttcccgaaaattaattagacggccccagcgctttcaacatcaggaattgggaaaaccctgggcgacccaactataaacgccttgaag

SEQ ID NO: 125294 - DNA, 315 bp, Arabidopsis thaliana columbia
gcacgcgtacgtaagctgggatcctctagagcggtcgcccttgtttttttttttcatattatacgaaggatcttcatacaggagaaccattaacattacatgaatgtgtatgtaaagcggaaaacaatcggtaattcactaggtccacacgctacctagcgtaagaaaacctcgtcatccatgggggaacgaggttttttttttcccggggcgagtagcacgaggccgcgcggcgttggagtggagaccctgtaaatgtctgcgtgttgggcggttggcgttccttccgtcttcgtgctagctcaggaagtcgaa

SEQ ID NO: 125295 - DNA, 424 bp, Arabidopsis thaliana columbia
tacgactcactctagggggaagctggctacgccctgcaaggtcccgggtccagaatatccagggtcgacccaccgcgtgcgggcgagaggaacatgcgattcgggagaagccacccggaaaaccgaaagtaaacgcgggctagagttagaattaaagcagatagaattccttgttaacggatgggattcctgaagaaccaaagttagaaggatgaagaaagccttttcgtcttgaacggttgggagatgttgtatttacctctattggactgccgcgccttcggttgaattaggtcttcctattggcctctgggaacccaagatttttccctttggatgctatggtcaaacaagaagcgctttggaaatgtcttcatctgggcttttcggtgccctgattaaggctctttggttcggaaacctg

SEQ ID NO: 125296 - DNA, 568 bp, Arabidopsis thaliana columbia
  unsure (1)..(568): unsure at all n locations
cacgcgnacgtaagccgggatccacaagagcggctgaccggggaggagagagccaaataacaacagagaaaacgctgacaccagagatactcgggaagaccaaagagcgaactaggccggagtccgaaagatcacagcgacgaaaaaaggagaagcgggggtcgggggaccccatatccagcgagaaaagagggggaaaacaggaaacacgggcgatttttctttggggaaaggaaaagaggccagaggaacgngaggggcaaaggacaaaccaggagaacaaaccaggaggggggggggaaagacacggcccacgaaacagagccaaccccgcgccgcccgacaaaacgagggacgagaggcaccgacacgccagggggggaaagaacgatcgcggggaggggagggagccgcgggaacacacggcaaaaacagcaaagacgccagaggaggaagacaaagcagaagaagaaaagaggaaagaacagcgaagcgaacggaaagcgaaaaaaccagacgaaaaaaaagacacaaagagaagcactgagaaagaaacacacgagaaaaa

SEQ ID NO: 125297 - DNA, 521 bp, Arabidopsis thaliana columbia
ggaaagctggtacgcctgcaggtacccggtccggaattcccgggtcgacccacgcgttcgatctcactttccctctctacccacttgcccacttcttgtccttgatcgagagactcgcgaagggtccggtttcttctgctaaacccgtagcttcagtgccggttaatccataaccaagatgtctgccttggtggaaggaagaagaagaacaagattcccgctctccctctaacaggtaggcgtcctgttacttgtactttccctgttcccttgcttctacctcctatgttctgtagctatactctgatttggattctactagatgaaaacggcctccatcctcttcctcttgcaaatgaattttttaacggcctatatcttcttcgtttctctagtaaaatcctaaagaaaggcagttttagtcagatttcgacggatccgtgctctttgaataagaggttcaacctaaagccataccaaattgaatctggccgactcctggaaagcttcaactacaatgg

SEQ ID NO: 125298 - DNA, 291 bp, Arabidopsis thaliana columbia
tgcacgcgtacgtaagctgggatcctctagagcggccgaccttttttttttttttcaataaacaccataagagctgctcacaaaaatcatcagccaggcaaccttccattggggcagagacacggagagatcacgatccgaactttttaggcggatcaccacatattaacactcttgaacagtaagcaggtgaggatcgtacttatattgacgggaatctatttggggccttctcttcccaccttggcccgagccttcgtcgtgctggcccctacaccgaagtggggaaac

SEQ ID NO: 125299 - DNA, 377 bp, Arabidopsis thaliana columbia
gggaagctggtgcgcctgcaagtaccgggcccgaattcccgggtcgacccacgcgtacggccaccctgaaacctgggtgggctttgtttactggagttttctttatacgaaactttctctgaaaaggtccagtaccaaaggataaacccggggatcttgggtcggaaataataggaaaaccgagaacccaaagcaaaggggggaacggtttatgtctctcctactgagaggacgctggctccgctccccactccaaaacctggtagttaatagttgagattcacgtaaaaactgtcggtataaaacaaacataatatcctaggaaatccatagggatcataggcccacgcattcgattcggactacgcgggcgccca

SEQ ID NO: 125300 - DNA, 256 bp, Arabidopsis thaliana columbia
ggggggcccccctcagcacatttttggcagcggctggagctctatcgtcagctttgaatcttatccgaagaccgacatttgatctactccacttctgatgtggtccccaccgaaccattaacatttctacaatccctgcctgtcgcccccaaaagaaacccggaggagagtacatgagtaacacttgttacattacgaccgctgcagttgaagcacccggctcgcatccccaggactagagtttatcaggtgtgta

SEQ ID NO: 125301 - DNA, 538 bp, Arabidopsis thaliana columbia
ctctatacgactcactttaggaaagctggtacgcctgcaggtaccggtccggaattcccgggtcgacccacgcgtgcgcccacgcgttcgcttttcttccgccatttttttctttctaagttgcagagttaaaggaaaaagttttcaattaaggttttgttaaagagaaagatgagccgaagtttgggaataccagtggaacttcttcacgaagcctcaagtcattattgtgaccgtggagcctaagaacggcgaactttacagaaggagtatgaattgatgtgaagataactggaactgtcagcttgaggatttacttatacccgccaggatgggtaaggtttcacagttgagcctggcttatttcaaggcatgaaatcaaggttttggtgatccatactttttttacatgctccaaattcaagcggggagtatcttgaatttaaggaaatgagctactaactcggttctggcacaggacacgtgcccatcgaaaggaaaccggctgccgggccccagcccgtggacttggaggagg

SEQ ID NO: 125302 - DNA, 271 bp, Arabidopsis thaliana columbia
gctctaatacgactcactcttgggaaagctggtacccctgcaggtaccggtccggaatttccgggtcgtaccacgcgtgcgaatatgcaagtcaaaacaggtctttgagcctttgaaatgaaggcacttgtcctgctttctgtgagatcctcttcgcaggtttgttctccctctaccgcaaccattaaacgcgttgaatggataatcagtacgttgctaactatggctgcgaatcaattctcgtcttacgcacttgtgtataggcttgtta

SEQ ID NO: 125303 - DNA, 304 bp, Arabidopsis thaliana columbia
tccaaggtctctacgactcactctaaggaaagctggtacgcctgcaggtaccggtccggaattcccgggtcgacccacgcgtgcggccaaaattctgatctttgatttattaaagcagtcttaaaacgggaatatatccccattctggaccaaaacaatgccgaagccttctcgattctctcacaagttagttgcaccacgattccgatcccatacgatttcgggggaaatcccttcaagaacaagggcggctcataggtacctttgtcgttgaaactactaccatttgaggccttcaccccaa

SEQ ID NO: 125304 - DNA, 259 bp, Arabidopsis thaliana columbia
tggcgtaaccttgcacgcgtacgtaagcttggatcctctacagcggccgccctttttttttttttttttttggaaagataactaaaactaactgattgctgccctaagccacctcatacatcggcggagaacgggatccatctcacaagagaacacagtagagctacaagagcacgttgcgagtctctcggcaaaccctcggagaccacctatgttctacccgcccattatccaccgacgcgtacccaactcgactgct

SEQ ID NO: 125305 - DNA, 518 bp, Arabidopsis thaliana columbia
ttctacgactcactcttatggaaagctggtacgcctgcaagtaccggtccggattcccgggctgacttcctgctcgatggttacgagttgtatgggcttgggaatcttttaaggtgcaacatgttgtaagtctctacttattggctacaatggaatttgtcctattcaaattgggatagtagctgaaccttcagacaataataaaacatccctcattaatacccgtaagttgttgccaggatccgtttactgaagggttatgaaatccacaccccaaatgtacctgggctatctttctctttatcctgacaaattcaagctagcactttttacctgaaatacactagcgatgattttagcccccgttcggataataagggaatcctccttatttggaggaaataccatttaaagtgttccccttccttaaaaccaagccttggagttttttaaattgaggggaataacctcaacacccaccctggggcaaattttttgggtgataactgcaaaaattt

SEQ ID NO: 125306 - DNA, 551 bp, Arabidopsis thaliana columbia
ccggagctcgtagtggtgtgtattatactccaggtctcaacgacttactctcgggaaagctggttcgcctgcaaggtccgggccggaatttccgggtcgacccacgcgttcggtttaaacctaaacccttgagaaaaaagcctttggtttcacatcttaatttaacaagtcaaaccctttttaaaccacaaaattgcggaaagctttggaaccaataaacattttttaatttctccccttttaatggaaaactttttttttccctttgcattcctaccaaaacacgagtggtcccattttcctgggttatttaagacatggacccttttttctttttactttcggttataaaggttttatagccaccgccctttttcttattaaaagaaacgccccagtaaagaccaaccaatgcgtggttggggccgccgaagaacaataagttcttggaaccgggtatggttcctattccgggctgttttgggaattttctccgccacgcttttggtggtcagcaaggactctaccctcactcgaaccgggggaatttg

SEQ ID NO: 125307 - DNA, 510 bp, Arabidopsis thaliana columbia
ccgcgtacgtaagcttggatcctctagagcggtcgccctttttttttttttttgcaaaccaaatgatgatcttcaaaattgatcgctctcggatcactaattctacaaaagcgtgaagatcaactagtccctacgatgagataatataagcttagagacaaatattcaatcgtaaatgaatacacaaaggaatttttttctggaggtccgttactccaacaacagccatttctgcaacctaagacaatttctggggagcaaacctgcccaagtcaaaccacacaatccacaggggaaaagcgacacactcctcggaccacatagcgcctcctaggaccgctgacgcaacatagacaccgagctgcgccaccccgccataccgccccttgttccgtctaagatgtcatccctgctttgaccatcaaacacctatacagaaactaagccatcccggaccgccgcgtatacccgagaaattcacgccccgaccttgatcccctaccaacgccc

SEQ ID NO: 125308 - DNA, 535 bp, Arabidopsis thaliana columbia
tctacgactcatctagggaaagctggtacgcctgcaggtaccggtccggaattcccgggtcgacccaagcgttcgcctagttctaaatcgcgattagggtgttgagccaaaaggagtgatgagagctaagtggaagaagaagcgtatgaaggagattgaagaggaagagaccaaagatgagacagcgatcttagttgacccaatctacttcaccagtctttcgctttttccctttggattttgaggttaatttgcttcagttgggtcctcaaatttgtcattagtttctacatattgctgggtgggggatctacgggatttgcagttcggtccttccttgggctataatttaaccaactaatattgggctctaagctgatatttagctgatgtgggcttctaaggtgaacttaacccctctggtaaaattggtggtcccgggagcgaacacgcttcggatttcatcatcgaagtctgcataataacatatagaaggggccgcgcgctgtataagattaccaacttaccttacccg

SEQ ID NO: 125309 - DNA, 610 bp, Arabidopsis thaliana columbia
  unsure (1)..(610): unsure at all n locations
gggcaagggggggggggnggcgcgttaactaattggtacnnnnnnnnnnnnnnnnnnnnnnnnnnnnnnnnnnnnnnnnnnnnnnnnnnnnnnnnnnnnnnnnnnnctttttttttttgattttttttttttttgtaaaagaagaatttcagggttccttggtcgccgaacagccagccgtgacgcgcacaaaaaccaggagggagcggcttaaggaaaccaggtcccggaagcagagaaaaaaaagagtccggctttaaaatccgaaaggtcgcgccgcggcgggcacaccctccacgcacaaaccctgggtgtcagacaaccgccgcgacatatattgtgcggacacgcgggcaccggcttaagaacagagagaggcgccgcgagggagaggagacgcgcggcgggagcggccccaggcgggccgccggtgggctacaactaggtcgggaaccggagagcgccccccagacaaagcatactcaacacgcggttgtcggggtgcgtatagaaaatagagggcggagcgatgatgtagccggccgcggctcggtatccataccgcaaatagaatgagaagagcggaaactaagaaagagccaccccgccg

SEQ ID NO: 125310 - DNA, 434 bp, Arabidopsis thaliana columbia
tcgactcctctaaggaaagctggtacccctgcaggtaccggtccggaatttccgggtcgacccacgcgttcgggaaagccaagactgggagaaccaaaggttcgatcttaccatgaagaagaaggcccttgtgttcggtttggtccttttcttgcttctggttcttctttcagatcaaaggagaaaggttccccgccaatgccagaataaagtttccgatgatgtttccagattcacacaaaaagttgagagggaaaatttggtggggcaccgggtgtttattcgacgggtttcgataggtattcataaaagaggcttgagtccataggcaaaagaaaaccctcttgcagtaaacccgcgaaaaagtttgaggttcccaagctcgaagtgttcttggggttatatggacctatatttattaaacttcttttttt

SEQ ID NO: 125311 - DNA, 478 bp, Arabidopsis thaliana columbia
gacgtcgcatgcacgcgtacgtaagctgggatcctctagagcgggccgccctttttttttttttttttttcaccaaaaaacatataactaaatgattaattttagtcttctaactatcaaaaattactcctgaccaaaacattaaaaccaacaggtaaccaaatcccaaaacccttttattcatcatcgtctaaatgccagtaggagtagatttctccgatagttggctcgtagtttctcctgatggcgcatcctcctgagatacaacaggaatcttgactgatgaagctctctccatttccctctcaagctcttcctcagacatgagagtgttaaactgtccctccagcgatttagctgctgctaaccatgcagtgactataccgagcaggatgactccaaggtaaggtgttgaattggccagtgagccgaatgtaaggatcatgacctgctggattagagcaccccctgatttccc

SEQ ID NO: 125312 - DNA, 582 bp, Arabidopsis thaliana columbia
gccccccaaaaaaataccggggacaaccccgcccaggcccaggcccccaagacgaacagggtctccccctcccacccccacgtccaatacacagcaaaacacaaagacacacaaagcgagagcaaaaacagaaacaaaacgccgaaacaaggagacggggcccaaatcgcgcgccgcaccctccaaaaacgcaccgacgccccgcgccccaccgaccctggccccgcacagacaattttacgggccgggggggaaccacgagcgggaccaaaataacagaccgcacgacagagtagccgcgcccccccaaccacggcccaacaacccagacagcggaagaagcgcaggagacaagacacaggtgaggggcgggggccccaagcgcgcccgagagtccagaaccgagacgagcgagagcactacgacgacgggacacagcaaccacacagcacaggaacgatggacaaagactcggagacacgaacagcaacgtgaccacgaacacaatacgaacgcccatcactagcggacagccaccccggccaacggcgcgcagcagccaaaaaaacaaaccgccacgcc

SEQ ID NO: 125313 - DNA, 526 bp, Arabidopsis thaliana columbia
caggtctcatacgactcaccttagggaaagctggtacgcctgcaggtaccggtccggaattcccgggtcgacccacgcgtccgaggtaaaagcttgaattgcttagttccacctcctaaaggttaccgtcagccgattccatggcctaaaagccgtgacgaggtatggtttagcaatgttcctcatactcggcttgttgaagacaaaggaggtcagaactggatttcacgagacaagatcaagttcaagtttcctggaagtggtacacagttcattcatgggggctgatcagtacttggaccagatgtctaaaatgggttctgattttaccattagaaagcttattagggtcgctttggatctcggtcgtgtggtatacattttggagcctatctattgtgtcggatgtcattacaaggtgtgaagcgccaaaagagttcattaaaatcaactccatctcgcatcaaacctgagtatgcagctttcattgttaacgtgaaaaataagggttattgtattttaaatc

SEQ ID NO: 125314 - DNA, 587 bp, Arabidopsis thaliana columbia
tacgactcactcttgggaaagctggtacgcctgcaagtaccggtccggaattcccgggtcgacccacgcgttccgtagtaattgaggctcaagatttgataccctatgataaaaccaagttcccctgaggtttaaccgtgaaagcaatagcttgggatacccatacttctgagatacactgtatttggtcaggaccaagacatttgaatgccatggtggaatggaagaatctgatgttttggtatgtagtggaacactttttaaggaaacctttgattgctctcaggtaggaaaaatatgggtttgtacctaattgaaagatgataacagttacggcgggggtactaaccccgtttcaagaatcattccaaattaagaggtataacctattagtacgttttaactatagagtggttctaacctggaagaaactatttttagggagggaagggagacaataattaatcgaattctccacagcagaactcgttagaagaaatttttcctataaagaggcggttgcccaagtacttgagtaaattgaacttaatctcgtgaatttacattaaaggcctgccccagaaaca

SEQ ID NO: 125315 - DNA, 560 bp, Arabidopsis thaliana columbia
acgactcactctaaggaaagctggctcgcctgcaagtaccgggtccgaattcccaggtcgaccacgcgtccgatcgactcacaattagcaacgatactgatgagagatcgaaagggggacctcaagcaacgggaattacgttgtgatggaaagaacagcgcctagctgtaaagcaaagcattgcctccaaaacgacgactaaaaccaaaaccttccttgtatctatgtggagctgatcatttaaacgaccgggatacgcctttgataagtcaacaaaagagttagtctgcggataacccacgtaacagttctatggtacaaaagctctcagttacgaaaaattcttgttagcggggctgcccatcgcacactacggttacgataacaaaagcgagtaccacgtaacagcaaagacgtacctactccccaactacgcggccccgcggacctcacttcgacttgaggcaaaggcataacttgcgcgtctcggcggtaatctgactctcgccaagcttatccgtatcaccctagcacctacatgtggcaggcctcgcactcag

SEQ ID NO: 125316 - DNA, 507 bp, Arabidopsis thaliana columbia
acgactcatcttaggaaagctggtacgcctagcaagtaccgggccggaattccgggtcgcccacccgtcgcggacgcgtgggcttcaaacacagggttaggatctaaaaagggacgcttcatcacttgtttaaccacctgacaacaagaattaaaaggttagacgaggttggtggttggcaatagaatacttaaagccagacatttgagacattgagaacttaggggaaaaagggggggaaaaaaacggttaagagagttacgagaattaatacggtagcttctcgagagattcaaagtggtccttaacatcacgcaagtgtacggcctataactggtagacaataagattgggatatttctaaacaatattacagcgcgaatcagacccacgctccaccccgtaacccgcttgttgaaaccagattctttggggtccccaaccgcttgggagctgcaagtgcctagggaatccattatagagtgatcccacgccaacaaacccaag

SEQ ID NO: 125317 - DNA, 513 bp, Arabidopsis thaliana columbia
acctatagaagattatgacgtggcatgcacgcgtacgtaagcttggatcctctagagcggccgacctttttttttttttttttttgactctcaatacttcataaccggaaacctctactggatccaaagacaaaactagtgctatgttctcaagacttgtattgccagttgcaacatttattacacggactccacatctactaactgagaacctatcatttatacacttagtcggctgattgataggaaagaactgaaatgcaactaatccaaccaagatatcagggccatttccttcaccgaagccttgtgcgcatggtgacatcagtaaagacaaacgtgagatcctgttcaacttacaaaacatctctgtcgtggagaccaaccacgaaaactgctatagtacgctaacaagatacgcctctctctgttcgcgcatttgcaatcacaggttatgccgatcatgcggagccgaacatcataacttcggaatatcaacatctccccacataa

SEQ ID NO: 125318 - DNA, 551 bp, Arabidopsis thaliana columbia
tacgactcactctaaggaaagctggtacgcctgcaggtaccggtccggaattcccgggtcgacccaagcgttcggtcaaggttttcctcggaacctaaaagagttatatttttgctggcgctaccttaaaagaagtgccccaacttcctttaagcctagagggcttgaatgcacatgggtctgactcggagaagcttcctatacgttaccaggtcaacaattttttcgaactatggtaacaaggggtcaacgattttttattggaaaccctgacttatgttaaacacattccaagagggttttccccggaacctctctacaaagcttccactttcattttttagggcgccccttcattcaaaaataaaacgcgccactttgatcctgcacataagaattctttggtatggaccccacttaaagtctctcttggggggaacacgcccttggggggatttgagttatcggcggggggaagggtgcctattcccaggggcctcctgggaaacgttcacctaggtgagctataagtgtcggttggacttaggatc

SEQ ID NO: 125319 - DNA, 516 bp, Arabidopsis thaliana columbia
acctatagaagacttatgacgtcgcatgcacgcgtacgtaagcttggatcctctagagcggtcgccctttttttttttttttttcagaaaatattatatttacaattaaaatccaatctgtacaactaactataagaagaaaatctaatgaaacgcagatcacacaaaactcataaaacttaggtttgatctgttgccactaattaattctttctcatctttgcattctcacgagaaagacttcacacaatctctcggaggtttggttaggacgaccaactaatctggctgagtattgcttcttcttcctctccccctgattgcgagaatcatgtcaagactcaaaatgtcaccggattgttgtctaccaaaagataatgccccgattaccctctccctgctctgagatttcggagaagggaagacttccacaatcctaaggtttcatctcctgctcctgtaaaaactgtgtgtccatccggtgacaccttaaggtacagaacgcggtactagtga

SEQ ID NO: 125320 - DNA, 520 bp, Arabidopsis thaliana columbia
acgacttactctaaggaaagctggtacgcctgcaagtaccggtccggaattcccgggtcgacccaagcgttcggccaagcgttcgctttagtgaagaaaccaaaaaaaacagaaagatctcaacttttttcaacccaaatcttcaaatctggaagaaccaaacagttagagattgaaatccaacctggaagaagatgaatcaacaacacccaagaagaagttagattctgaggtgaatcttccaacggcgatgaatcgtccgacgggggtactccagtcacgaatcaacccgttaaacgattcgaatcattatcactctccctagaaacctatttactcaaataagggttaattccaggagatctggttcccattttgcgcttttcgaattgggattttctttacccgaatagaaaagaggggaagaagatagggcctggttttattccaattctttgaaaaccgggcttttttggctccggggaacgccggaaaaaatggaaggtggtaaaggggtttt

SEQ ID NO: 125321 - DNA, 538 bp, Arabidopsis thaliana columbia
cgactcatctttgggaagctgggaccgcctgcagggtaccgggtcccggaattaccccgggtcctacccacgccgtgacgttactggtttttaataacgcgcgaaaaacccccttgtcgaaaaatattcgcagtgcctctctctccaccttaagaaaagagactccttccccctgtcttttcggcccggggttgcaactcaatctggaagtcggcgtccttggccggagaaccaaccttctctggtaccattacacaagctatgctctgggatcgcagggagaatggctggttggaaactacgggtgaatcgtataacgcctgccgtctccatctcgcgattcttacactgaaggaccatgcgattggtcgtagccagcaactttcctagaccctcgtcgccggctgcagacgctactgtcttgtcgtatgcatagatcgtaccagcgtgttgtagaccacaggggacttcaccgagcagctacatcgacatgcctctcgccggttgcatgtgatgggaccatatttctctcttaaga

SEQ ID NO: 125322 - DNA, 492 bp, Arabidopsis thaliana columbia
aacctgggatcctttagagcggccgcccttttttttttttttggtccaaaacataaaacctttttaaggaccaacttaggagaggccggccaccaaactatgggcggccctctctatggtcatatccactgttgcgagacgtacagttcacctttataaccagaaaaaacgtgtcccggggggtttttttatcactgaacctcggttagggaatcaccagtccttgggggattaaggcaattttcaaagcccggagcctcccttttggatttgtttagttctcccagatccaagtgaacctaagggcgggggaaactcgcttaccctcctttcccgtggagctgaaacggagggtctccctccgtttcaggctcgggaacggatcaagaccctctcggcgcctctcgggcctgtttgacccgggggctacgcttggacacggggtccgggccagggttaagcctggaaccccggtgggcaatttagggaacg

SEQ ID NO: 125323 - DNA, 487 bp, Arabidopsis thaliana columbia
gcctgcaggtaccggtccggaattaccgggttgacccacgcgtgcggtagaggaaaactcgaaaagctcacacaagaagaagaagataagatacgagcaagaagactaaacacgaaagcgatttatcaactcgaaggaagagacttttgattttcaaatttcgtcccctatagattagtgttcgttactgggtttgagatggcggggtatgatcagagtggagatagaaacagatcacaaattgatacatcgaggaaaaggaaatctagaagtataggtgacggtactactggggctgagagattaaagagatggaaagagtataacgagaccggtaaagaagtttctaccaagaagaggaaagtacctgcgaaagggtcgaagaagggttgtatgaaaggtaaaggaggaccagagaatacccggtggagtttcagaggagttaggccaaggatttggggtaaatgggttgctgagatcagagaga

SEQ ID NO: 125324 - DNA, 400 bp, Arabidopsis thaliana columbia
gaaacgcgacacacctaggctcggccccctgatacagaggacgccgccaacggaaagacgcaggcaaagacgcgagaggacaccaacaagaagacgccacaagagcgcggcggggcacgggacaggacccccgccgcagcaacccacccacactccgcgaaggagacgaccagcccgcgccccccgcgcgccgccgcgcaccagcgccaacagcgaacgagcagagcaagcaaaagatatgagcccgggcaccaaacggaaaccaaccgacggccgacagaccgacagcgcaccgaacatccatacagacaagcgcaaacgccacacccacccacaatgacacacccagaagaaataacaacgacgcagaacagagcgacgaaataacaagacgtgcgcc

SEQ ID NO: 125325 - DNA, 548 bp, Arabidopsis thaliana columbia
tacgactcactcttaggaaagctggtacgcctgcaggtaccgggtcggaatttccgggtcgacccacgcgttcggggggaatggggagagagatactatggagagatcaaagatttggctgatgcgtttcttaagcttaacccatagctcaaggagtatggtccttccttctttggctcgaatgaatctcgggggttttgaaaaaggattaaggcttacctatcattttggaggcccaccttaacttggttgtcgagaatgatcactttccttaaaaggaaaaaggctttttgcccatgtgaagcaactaatgacacttgtggtcatgcttaggttataaagatgatgttatttaggaaaactggtttcgtgctttggctttcagcgactaggttaccgagagaaaacctcgccaggttgctctttttactttgggccccggtggttgtatttcctttctttccggaagtcccattctcggccctcggttggctctctatttgaatttccacttgaacacggtggctctccgatgcttcgtcctgtat

SEQ ID NO: 125326 - DNA, 443 bp, Arabidopsis thaliana columbia
ggggtaacctgcacgcgtccgtaagcttggatcctctagagctttcgccctttttttttttttttcatcttcggtctcatccagtttcagaccttccttggtggcagaaacaagtttctttccctcgaattccttaagctgaccaatagcgtactcatcaatcgcatcaaccatgtagagaacttcaatacctttcttcttgagcttttcaaggaatggagagttctcaacagccttcttgctctcaccagtgatgtagaagatatcgttctgaccttccttcatccttggaacgtaacccttgagactagtcaattcatcaccggtctttggttaaggtgaaacggagcccctccagcaatcttgggttctggtttcggggagtcctcatgggatcacccacctcacaggtatcctaagaagaaagccctgaaggaaaacta
